United States Patent Application Publication US 2011/0014706 A2 - sequence listing, part 45

SEQ ID NO: 139626 - DNA, 1615 bp, Arabidopsis thaliana landsberg
caacaccatcaattcatggatcgaatacgacggattgactcgggtcttcaacgtatcagtctcttactcaaatctgaaaccgaaagttccaattttgtctttccctctcgatttagatcgatacgtgaacgatttcatgttcgttggattctccgggtcaactcagggaagtacagagattcacagtatcgaatggtggagcttcagttcatcattcgggtcgagtctcggatccggatccgggtcacctcctcctcgggctaatttgatgaatccgaaagctaattcggtgaaatctccgccgccgttggcgtcacaaccgtcgtcttcagcgattccgatctcaagcaacactcaattaaaaacttcgtcgtcgtcgtcttgccacagccgtttctgcaaagagaatcccggaacaatcgccggagtagtaaccgccggagctttcttcttagcactattcgccggagctttattctgggtttactccaaaaagttcaaacgtgtcgagagatctgattcattcgcatctgaaatcatcaaagctccgaaagagttcagctataaagaactcaaagccggcacaaagaacttcaacgagagtcgtatcatcggacatggagccttcggagtcgtatacagaggaatattaccggagaccggagacatcgtcgccgtcaaacgatgcagccatagctcacaagacaaaaagaacgagtttttatctgaactatcaataatcggaagcttaagacacagaaacctcgtgagattacaaggatggtgtcacgagaaaggtgagattttgttagtctacgatctaatgccaaatggttcgcttgataaagctttgtttgagtcacgattcacgttaccgtgggatcatcggaaaaagatcttgcttggtgttgcatctgctttagcttatttacatagagagtgtgagaatcaggtgattcacagagatgttaagagtagtaatataatgttagatgagagttttaatgcaaagcttggagatttcggattggcgagacagattgagcatgataagtcgccggaagcgactgttgccgccgggactatggggtatttagcgccggagtatcttctgacgggtcgtgcttcggagaagacggatgtgtttagttatggagcggtggttttggaagtggttagtggaagaagaccgattgagaaggacttaaatgtgcaaagacataatgttggggtaaatccgaatttagtagaatgggtgtggggtttgtataaagaagggaaagtttctgcagctgctgattctaggcttgaaggtaagtttgatgaaggtgagatgtggcgggtcttggttgtgggcttggcttgttcgcatccggatccagcgtttaggcccactatgaggtcagtggtgcaaatgctgattggtgaggctgatgtaccggttgtgcctaaaactagacccaccatgagttttagcacttcgcatttgttgctgagtttgcaagatactctctctgattgtaataccgtggctttgaactctagccgatcgtcgtcgtggtcagtgcccgaacataacgttatcactagaggcgaggatgaccatttggtatag

SEQ ID NO: 139627 - DNA, 1522 bp, Arabidopsis thaliana landsberg
ctctgatctcgatccagattctctctacttctcttatcttcgatagagaaatttgtatcttcagatttattcgaggaggaagacgaaccctacttgattgatttaggaggtggagagatctttctgaacaagtttgattctgttggtaattgatctgaaatcctaggttttagccgtagatctgctgcttgtttcgatcgatttgggataccgtaggtattgattccatagaatttctcgctcgaggaaggtgaagaatctgcccagattccggagatttttagttagtcttggtgtgcttgttgcttcggtaatgttagatcataaaagtcttccattgtgaggaatcggaggttgctaagagtgtttgtggaagctgcttcttctggtattcgattagaatcgggactatggaagttgattgaaacagtgttagttttcttattttgatacctaatctggtcttgttaagcaaaaatgaagttttggagggaacgtgaaagggaaaataaggagcagatcttagcgccattatgtgggcaagttcgagtgttggtagttggtgactcaggtaactataacaagttctggtttcatgtagatcgttagatttgattacctattttatggtatcaaaccaagttagaaatgttaccattcttttgtagttttgctgaatcggggtacttctgctaaacctagatcatgtgtgactcaggaagatagattctctgcactgaattagaccatttggttaggagttattgttatgtggtcgttgagctacatcttttagatcaaacctgagactctagtttgtttagtcgacagtgttttccttagagtctgtcacgtactgtgtttgcttttgctcatgataattgagttaattttcatctctgaatttcaaatctttttggtaggtgtgggaaaatcatctcttgtgcatctcattgtcaaaggctcctctattgttcgcccatctcaaactattggatgtacagttggtgtcaaggtaacttaagctgttctataaaaaaaattctcgatatggttaaagagagcatgggataagtttccctacttagtttctggaactctctttggtgcagcacttaacttacgcaagtcctgctagttcttcaagtatcattaaaggtgactcagagagagatttcttcgtcgaactttgggatgtttcaggtcatgaacgatacaaagattgccgctcactgttctattcacaaatcaatggtctgtctcaacaaatgtcatctctgtccctgttttgtcactgatgcgactgtttgattatgcaggagttatttttgttcatgatctttcgcaaaggactacaaaaactaatttgcagaaatgggcgggtgaagtttcagtacctggggagttttcagctcccctttcttctggtgggcctggtggtcttcccgtcccatacatcgttattggaatcaaagataataaaaaagccaaaggaggaacaaatggaagcagtggcaatctt

SEQ ID NO: 139628 - DNA, 2729 bp, Arabidopsis thaliana landsberg
cctcctcaagtcatgcctcctccaaaatttaggttaacaaattcatcatcggggattagggaaacagaaatggaacagtactcggtaacgaccgttggacctagccattgcggaagcaacccatcacagaacgatctcgatgtctcaatgagtcatgatcgaagcaaaaacatagaagaaaagcttaatccgaacgcaagttcctcatcaggtggctcctctggttgcagctttggcaaagatatcaaagaaatggctagtggaagatgcatcacaaccgaccgtaagagaaaacgtataaatcacactgacgaatctgtatctctatcagatgtatgcttcctttaattctaactcatgataataacttcttgaaaacgtaatcttggtctatctcagagagtaatacataatacattaagcaggcaatcggtaacaagtcgaaccaacgatcaggatcaaaccgaaggagtcgagcagctgaagttcataatctctccgaaagggtacttcatcggttcgtctatataatatataatatatagtttaatgttagagaatcgtataacatttatacaaagaaaacagatacaaaactctgttttttattttcttcttttcataacttaaatagaggaggagagatcggatcaatgaaagaatgaaagctcttcaagaactcatacctcactgcagcagagtaagtcttttcatcagaaaaaaaactgagttaattaagctgtaattgattggtgtgtttaaatatggttttgtcttcttcttcttttttgtgtagacagacaaagcttcgatattggatgaagcaattgattacttaaaatcacttcaaatgcaactccaagtgatgtggatgggaagtggaatggcggcggcggcagcagcagcagcaagtccgatgatgtttcccggggtacaatcatctccatacattaatcagatggctatgcaaagtcagatgcaattgtctcaattcccggttatgaaccggtccgctccgcagaaccatcccggtttagtatgtcaaaacccggtacagttgcagctccaagcacagaaccaaatcttatcggagcagctcgctaggtacatgggcgggattccccagatgccgccggcgggaaatcaggtcagttgcagacggcatcgttttgaagaaagacaaatatatttatttaatatctgacgtgtcatgttttaaattagatgcagaccgtgcaacaacaaccagcggacatgttgggatttggatctccggcgggaccgcaaagtcaactgtcggcaccggcgaccaccgacagtcttcatatgggtaaaataggctgacttggcatatagttttcctccgaaattattcttcttacagttggtgattgttatttatttttggtcgcctaagcaagcataaaagctaagtcaaatgtattatagagatctaataagttagtctcatacttataacttatttttaaacagttgaattatagtatcaatcaagtgttgggaacctaaagatcatacatgtgtcaatacttttatatttgttctcaaggttcatcagaaaaacaaaataaaaaggatagactaggcctgcatttgacattatcatgggctttttttgggtctatgaatatgaacattaacccatattaatgctcaaaacgcatacgttatacaaaaaacggaaaacgctaacgtggtttactccaccacgattcgtacgtagcgactagcgagtcccatacctactcgatttttagtttcctcaagttaacggtgaaatcacattaccgattatgtccttctaaagtgacacgtgtcttacaacaggtgcgagtttatcctaatcacatactcgagcgtgtaggtttccgattaaagcgaagcagaaaaaaaatactaaaataataaaaacgtatagaatgtgattaattaagtcaaccaataagcatcttacaaatcagcactctgaaaacaaacacgattattaatagaaaaagctgcgacccgactcctgagcctctctctttctatcgctctttgattttgtttctcattgttttgcttcaaattacgcattcgaatctgatcttcgttgatctctgtggaagaaacagataagagaaaatcgcatgaatttttttagaaaactaggttttaatccttcgattgcaagctacttcactaatacgagtcttctgatctcaattcttagtttttctcctcaattgccgatttctctctttcttttcgagcagaaatcgttagatcctttatcgctgtgtaatagtagtactaattttaataatcttgagagtaattactccgttcattgttgaatcatggagtccggaggcaaaactaatcgtcagctgcgtaaaggtatcatctttacttcttatgatttttgttttttttatgaaatcttaatactttgtctgataatgaataagttattcagttatattacatgaatccgaattttgttattttctgttgtgccctgaactgtttcatatgttgcgttggtgtttcagctatttgcgtctcaacagacgagaagatgaagaagaagagatcaccttcagtgatagtaattggaggtggtatggctggaatttcagctgctcgcactcttcaagatgcttcctttcaggttgttgtattggagtctcgtgacagaattggtggacgagttcacactgattact

SEQ ID NO: 139629 - DNA, 892 bp, Arabidopsis thaliana landsberg
caaaaatgctgggtttttgaacgaacgaagatgacgatgctcagagtccgaagcagagatggattggagagagtgagtgtagatggacctcatatcacagtctcccaactcaaaaccctaatccaaaatcagcttcagatccctatccacaaccaaaccttatccaccaatagaaaccttctcctcgctaagagcccttctggtttcctagcgttcaccgacatggccgatcctaacctccgaatctcgtctctcaatctagctcacggctctatggtctaccttgcttacgaaggtgagcgtacgattcgtggtggtcctgctgtaacgcctgctggttccttcgggaggaagatgaccgtcgaagatctaatcgctcgacagatgcgcgtcggtcgccaggagaaggctcactgcgattccgtctcgttcgatcgcgattgcgccaatgcgtttcagcatttcgtcaacgagtcgcttgccttcgctgtcaaacgcggtggattcatgtacgggaacgtctctgaggatggtcaggttgaggtgaatttcatctacgagccaccgcagcaagggatggaggataatctgattctgatgagagactctgaggaagagaaacgtgttgatgctattgctttagggttagggatgaggagagttgggtttatattcaaccagactgtgactcaggacaagaaggagtacactttgtctaacgttgaggtgttgcttgcggctcagcttcacgctgagagcgaattcaaggagtgggtcactgctgctgtgaagcttgagatcaatcacgcatggtggtgctgatgttcactttgagccgtttcaaatgagtgatatgtgcgttaggttgtttaaggaaggatggttcgaggct

SEQ ID NO: 139630 - DNA, 659 bp, Arabidopsis thaliana landsberg
acgtgttatgtgttgaatggttcacttggtcttgcaaaactgatatatcttgttatccagattgatccagcgaagtacaagagcatctcgtctggttttggaattttgctgaaagagcaaggagtcaaaggctttttccgtggatgggttcctactcttttgggttacagtgctcagggtgcctgcaagtttggattctacgagtactttaagaagacttactctgaccttgctggacctgagtacactgccaaatacaagactctcatctaccttgctggttctgcttctgctgagatcattgccgatattgcactttgcccatttgaagctgtgaaggttcgtgttcagacacagcctggatttgctagggggatgtctgatggatttcccaagtttatcaagtccgaagatacggagggtgagtttttcaataccaataacattatctcccttgttactgctagccttttggtctgatttctgatttttttgcagcttgtataagggtcttgctccactctggggacgtcagattccttgtaagttctggcctctattttgcaactgttgccaatcttttttttttattttttttgtttattgatgaaacatatgtagttctttaaaagcaaaaggtggtgatgatactatgaatt

SEQ ID NO: 139631 - DNA, 1144 bp, Arabidopsis thaliana landsberg
  unsure (1)..(1144): unsure at all n locations
tttctagacttgattttgctgatgcttacatccgtaagagatccagggattatcccaagaaattctcatcctccagaaccagaagttgttgatggcaacacgggctcgggaacaagccaaactccaagattgcctcgtgttaaagaagtggaagttaatggaaaagtattcaaggtcaagtactgtgatacttgcatgctctatagaccgcctcgctgctcacattgttcgatttgcaacaactgtgtagaaaggtttgaccatcactgtccttgggttggtcaatgtattgctcaagtaagtttctcggtttttcgttttcctgtccgttagtttctgacatcagtctatataattcatctcattctccttgggaatttgcagagaaactatcgattcttcttcatgtttgtcttctccacgactcttctctgtgtatatgtgttcgccttttgttgtgtctacataaagaagatcaaagagtccgaagatataagtatcttgaaagcaatgctcaaaactccannnnnnnnnnnnnnnnnnnnnnnnnnnnnnnnnnntacattcttcgttggaggcttaacatgtttccatctctatctcatcagcacaaatcaggtaccctaatcatttgcctctttctgaaaaaacctctctcattcgatatgcgtgtttaatcgtttgatctttctttattctgtagactacatatgagaatttcagatacagttatgatcggcatagcaacccacataacaaaggagtggttgataacttcaaagaaatctttttttctccaatacctccttcaaagaacaacttcagggctatggtaccaagggaaaatccaatgccgtcgagatcagttgttggcggttttatgagtccaaacatgggaaaggccaatgatgatattgaaatggggaggaagggtgtttgggcaatggctgaacatggtgatggcaaagatggcaataacaatgaacggtttcatgttaacgacaatgagttaaacgagttatcaccagacatggggaacatagtgaatggtgatgagcaaatcaataggccaaacaatcacccgaggaacgcaaactgggaaatgtcaccagaagttatggccttatcagcaagaagagcttag

SEQ ID NO: 139632 - DNA, 2832 bp, Arabidopsis thaliana landsberg
tcagcaaaatcagtgtgccttatgctctttttactctcgagaaaaaatgattaacattttcttgggatctaacctcgttgtcttcggtttctaggatatatctctgttattgagcacagaggaccatagtgaaactatgaaaaccatcgcagcaaagagtggtgctcgatttcatcttattcctcctgttgttaactcaacttcggaaactgttgcttgcaatcagtttcaggatgacagttttgaagcagaaggaaagtttctaggtaagtttttgaatatacttgagatggtgaacttataatgaaggctgctcttttaatttttgccaccttacctcaagcaattattggtctggattttctgcatcacttcagcctttatttgtgcagatgatccagcattgatcgtctacactagtggtacaactggtaagccaaaaggagttgttcatactcacaacagcatcaattcccaggtatatatccgacctccttatgtaccgcatgtcatgtttcgaatctacccaacctgcaatagaatggtctgcatgtatctaaattatgatgtaccttataacctagaagcttgtatatgttgcaggttagaatgctcactgaagcttgggagtacacatctgctgatcattttctccactgcctcccactacatcatgttcatgggcttttcaacgctttatttgctcctctttacgcacggtctttggtaacttatactattgagatttgctttggctagctctttcaaaatacattaccttcggaaaacatcaggctagttttaggtttttaattgattttcacattcctttttcaaggtggagtttttgcccaaatttagtgttagcggaatctggcgtagatggcgtgaatcatatccagtgaatgatgaaaaaaccaacgactccataactgtatttactggagtaagtcttattttttgttacttgtattccagacaaatcatactagtttatgcttagctgtccctgcctcaagttaattgtttgatttcttgttgcataatccttttcttaagcctgatatagcaagcttattaattgtttctagtgttagttagtatttgaattgagggaagtattcactattcaatgtgagtttactcaattttactatgtaacaaaatgatactcttggctgagttgatcagtttccagtttgcttcttgcgctctagatatataaacaaacatgctttgctttagagaaatttagcctgagatgagaaatagaaagaaacagcgagagaattagctatttttaattggtaaaagttattgttgcgatacacaggttccaaccatgtacactcggttgatacaaggttatgaagcaatggataaagagatgcaggactcgagcgcttttgctgcacgaaagcttcgcctaatggtaagcaaccaaatatctcctagaagagccaatccagcttaatgtttatcattatctgcctagatagctattctattttcatattctgatgaaactagtgcttaaatgttagccaatgaaatacattttcagatgtctggctcctctgctctccctcgacctgtcatgcatcaatgggaaagtatcacaggtcatcgtcttttggaaagatatggcatgactgaggtaagtagattttcctgtctctttgagttaccataatcaataccttagaacaagcttaacacaagcttgttcttagtagttacatctactgaattaaaaaaaaatcttcaatattcccagtttgtaatggcaatgtcaaaccccttacggggtgcacgaaaggcaggtactgtcggcaaaccgcttcctggtgtggaggtcagtgacatcttctttctctttcgtcctcactcaataccttttaactaatgctacacagattaagtactagtaatactgtgacatgaagttatgatactgaaaaagtgtaaacatgataggctaaaataaaagaagatgaaaatgacgcaaatggagtgggtgagatatgtgttaaaagcccatctttgttcaaggagtactggaatcttccagaggtgactaaagaatcatttacggaagatggatacttcaagacgggagatgctggaagagtggatgaggatggatattacgtgattctaggacgtaagcagaacctataagtacattcaaacacaatttaaaagtactttgtgttccttcatttaacatcttatcttctcttctctggtgtcgatcaggtaatagcgctgacattatgaaggttggaggatacaagttatctgccttagaaatcgaatcaacccttctcgaggtaacattaacatccatttgagtttttttttggctctgtaaagctatcagaagcttttatctccttgggaaataggctttagataactgaaccgagagaacttaatcgttgtatgatatctctgggggatgtgttatgcagcaccctactgttgcagaatgttgcgtgttggggttaacagacaacgactatggagaagccgtgactgcgataattatagcagagagtgcagcaaagaagagaagagaggatgagtcaaaacctgtaataaccttagaagaactgtgcggttgggctaaagacaagcttgctccttacaaggtactaaaaatctgccaaagtgttgtcaaaacgcgcaacagtcttgtcaaactttttttccttttttttcttgtccataatattctgtcttttcagctaccaacaagattgctgatatgggagagcttgcctcgcaacgccatgggaaaggtagctatatttctctcaaattttttct

SEQ ID NO: 139633 - DNA, 2263 bp, Arabidopsis thaliana landsberg
tttctctcttctctctctcctacggctgttgaaaccaatggcatttctccacttcgccggaatttcgatcggaagatgaatcgtctccttcgtctctcttcgcttaatcgtcgatcttcttctgtcgccgtctaattgcaaatccaaatcgtaaacgcttcttctcttattcttccttcccccattgttatcgtttcttcgctcgatgtgatcatattcgatttttagagttttatcgcttctttcgatgagataatctgcgtttcacatttccagatcatttgattgcgtttgttttttgtgttcattcccgattttgaactttttatatgttttcactggatttatccgcgagcgacggagaattctcgaggacgcattctgattttgaatttgtgttgctcgaagaatttgaagatctaattcatgttttcttcgacgagatcgtttttttcagagtttttttagtttgattctgcaatgtagatcggaatgttattgtaatttcacgagtatagattggatttatacattgaatttgactaacttggatttcaagtttcagattgttcaaatttagaggttctgattcttgaatgttctttttcttttaattgtgtatcaggttttttgtatggcatagagatttggtgaagaactagacgcagcttagaggaagcttttatatttattgaagcttagcgggaaacaatgtcaacaaagggagaacatcatacagttccactttctgtgttgcttaaacgtgaatcagctaatgaaaagatagacaatcctgaacttatacacggccagcacaaccaaagcaagaaaggagaggattttactcttgttaaaacagagtgtcaacgtgttatgggcgatggtgttaccaccttctccgtttttggggtaattatttgccttctttctctattgattgtggtcctatcgatttttgtagttaaaacattgaaatgtgtattgcagctttttgatggacacaatggttctgcagcagctatctacactaaagagaaccttttgaataatgtattagctgcaataccttctgatcttaacagagatgagtgggttgctgcacttcctagggctttggttgcaggatttgtgaaaactgataaagatttccaggaaagaggtatgaacttatcaatgaaaaaccttgtgatgtgattcaagtcccaagagggtgaactcgtctgtgtctttatattcttatatcattctggtgaaggctatgtttgaggttttattgttttcttgcatttcagcaaggacgtctggaacgactgtaacttttgtcatagtagaaggatgggtggtgagtgttgcatctgtaggtgactctcgttgcatacttgagcctgctgagggcggtgtctattatttgtctgctgatcatcggcttgaaataaacgaagaagagtaagtcagattttttcctgctattcacccaactgatgataatcttgattgtatacaatggcatctcaatattttggctttcttttcaggcgagatcgagtcactgcaagtggtggtgaagttggtcggttaaatactggtggcggtactgaggtacttctttagataattcttgaaagtttcttctgtatgcattaagtctcacgttatcatgcgctcttgatactagcaatatatacctaaaaggtaactgagtgcaaacttctaggatgatgttccagaattggatgtttttgcgagactgtattatacttagctgatgaactgtcatattgtggtagctttgtagaatgtaacacatagggaactatctttgtgccgtcaaattgaagagttttgataactaaatcttatttttttagattggtcctctgagatgttggcctggtggtctgtgtctctcaagatccattggagatctggatgttggcgaatacattgttccagttccttatgtaaagcaagtcaaggttcaaaactcataactaaatctaatctaaattgatctttatgcgcttatagcacaagctgacattctaattattgagttttatactgaaaactgtatctatttattttgattatgtagttgtcttcagctggtggtcgactgatcatctcaagtgatggtgtgtgggatgcaatatctgcagaagaggctcttgattgttgccgggggttgccacctgaatcttctgcggagcatatcgttaaagtatagtatctgaattactttattttagatatattctctaca

SEQ ID NO: 139634 - DNA, 2714 bp, Arabidopsis thaliana landsberg; identical to SEQ ID NO: 37716
  unsure (1)..(2714): unsure at all n locations

SEQ ID NO: 139635 - DNA, 5667 bp, Arabidopsis thaliana landsberg
atgccggaaatcgatcttatgagagtcgatcattgtgtttccgatgttaaattagatgattcttcttcttctcctccgggattcttcgatggtggtggtgttccgttagattcggatgtgaagttagacgaagaagattccgattctttgaagaagagaggtagacgtggtcgtccgccgagaactttagctaaagcttcttcgcctccgatttcgaggaagagaagagaagatgaagatgtttgctttgtttgcttcgatggtggtagtcttgttctctgcgatcgtaggttagtgattgttagcttatagtgataataattctgttagatagtatgctctagtgggagattagagccttgccatatgttttagttggttcacaacgaagaagagcttaatttcgtagtttttttttggatattctattatgttctgtatctcattatcgagattctaagtatcgattatgcgttggttaatgctcataggttagagctactcaatttctaaacaagcaagagggtaatgttaaaaatagctatctatggaggtttaagaatcgaggttcgagttattgataagtttttgatggctttgtttgtccattcaggaattgccccaaggcataccatccagcttgtattaagagagatgaggcattctttcgaacaacggccaaatggaattgtggtatgtcgtatagtccatcatagatgttactatgttgctgtcagcaatctagaggctgattgttctgacatgtcgttatttcacatctcttacatgatgacgtgaacatccttcgaaatctgatgtttcgttcattcatttcagggtggcacatatgtggtacatgccaaaaagcttccagttacatgtgttatacatgcactttttctgtttgtaagcggtgcattaaagatgctgactatgtgattgtgagaggtaacatgggtctttgtggcacatgtattaagcctataatgctgattgagaatattgctcaaggagataatgaagcggtaagacaatccttcacaatctatagttttcatttagtactgttttagccgcaaaatttgcttgggtgccgattatttttaccaacctgccacagtttccttaagaagaatatagtttgttgatttgagtcttgtttgggctttacgtctctttgcttgttctatattaagcaaccaagggtttctatttatgttaacccgattctaatccctcgtagtgttgccatgcactatgatctcgacacaataggtaagatgatagcaatcaatcgcaagttaaaatcatgaatatttagagattcggggttgattgatttcatgtattacgtgaaaggatgagagttttccaaagatgttagccatgagcttcctctgtaataattcaagagcagtagggtatgttgggtttttgaaacaatcgggtgaaactgaaagacaagggtcactcttgttttgggagggaaacttgtatatcttcagtattttaagaaagttgagtgttgttcttttaaattatcctctttactctatcataatgtatgtagctcataaatgtttttcttgttttgtaggttaaggtggatttcgatgacaagcttagttgggagtatctattcaaggtatattggctttgcctgaaggaagagctgtctctaactgttgatgagcttactagagcaaataatccttggaaggaggttcctaacactgctcccaaagtggagtcacaaaatgatcataccaataacagagctttagatgtagcagtaaatggaacaaaaagaagaaggaccagtgattcccctaccttacccaacaagttggatggcaaaaatccaagtaatatcctaaagaaggctcctggagatacgagctgggcaacaaaagaactcctcgagtttgtgtcgttcatgaaaaatggcgatacatctgttctatctcagtttgacgtgcagggtcttctgcttgactatatcaagaaaaaaaatcttagggatcctcttcagaagtctcaagttctttgtgaccagatgcttgtgaagttgtttggaaaacagcgagtgggtcactttgaaatgcttaagcttctagagtctcatgtccttattcaagagaaaccgaaaggcgctaagaccacgaatggtgaaactactcatgctgtacctagccaaatagaggaggatagtgttcatgatccaatggtcagggatagaagacggaagatgcgtaggaaaactgatggcagagtacaaaatgaaaatctggatgcatacgcagccattgatgttcacaatatcaacctgatttatttgagacgtaaatttttggagtctcttcttgatgatatcaacaaagttgacgaaaaggtggtaggcacaattttgagaatcaaggtatctggcagcgaccagaagctggatattcacaggcttgttcaagttgtaggtacttgattaatggtcatattagtgctttgttgaggatagaaaggaaaatggaatattagttacccaaatgttttaatagtaagatctcagctgattttgtggttattcaacaggtacaagcaaggcaatagcatcctaccaacttggcgcaaagactacagatgttatgcttgaaatactgaatttagacaagagagaagtcatctcgattgatcaattatcagaccagaatatcacagaggtgagtatagttctatctgaaatattgatttctctacctttctctcattctctgcttgtgaagaaagagttagaaacccatcagctaataagtaagatctagtaaatacgtttcagtttttatttttaatgtacgtataaccgtggtttcaggatgagtgcaaacggctgcgccagagcataaaatgtggcctcaataaacgtttgactgtggtaggaatgcgcacatgatatcttcttgtcctgaaattgtatatgttacctaatttggaaacatgtttttttttttgtgttaggttgacatcttgaagacggcagcaacactgcaagccatgagaatcaatgaggtaggttcattaaaaagagcaaatatctttcatagaaatactaagatcctcattataatagttctttattgccctctaccgtgtttcttattgatgttttgttgatgtaggctctggaagctgagatattaaagctcaaccatctccgtgatcgggcaagtgagaaggggcatagaaaggaatatcctttttgagattgctatactatatttgttgcacttcgcttacactatatctctctgcaaatgtgcttgatatagaaaattttaatgagtcgttgatgaaataattcattgaagaggtgaccatgctgctcataagcgcaaagaataattcacattgagtagtgtacctcggtcttcccatttagactttgacattgattgcgtggacttaatacttgatttagcaactatttcttaactatctcccacgcttagagaatgtgtagaaaagctggagcttctaaaatcacctgaggaacgtcagcggcttctgcaggaagtcccagaagttcatacagatccaagcatggatccaagtcatgcattatcagaagatgcagggttgggtacaaggaaacaaggtctcccaccttaacctaggatgtgaacagctacttgttcattatcttatcgaagattcctgattgttggatgctatttacaatcttctacgttttttaattgcagataatcacgtaaaggcacaaagtaaaggtccacagaataaaggggttaagttgaacaacgtgggaaataatgtgcagaaaaaatatgatgcaccaattttgcgaagcagaaataacgtacatgctgataaagatgattgttctaaggtccacaataactcatcaaatatccaggtttgacatacctcctacatttgcaacgtaacctttcatgatttctattttgacttcacgtcatgtaaatttctgcgtactgcaggaaactggtaaagatgacgaggagagtgaaatatggcattatcgagatccaacaggaaagacccagggaccgttttctatggtgcagctccgtagatggaaatctagtggccattttcccccttatcttaggatatggagagcgcatgagaaccaagacgagtctgtgcttctgactgatgctcttgctggacggtttgataaagcaactactttgccgagttcttcttcgcttccccaagaactaaaaccgtctccacacgattctggccgcactggcgcggatgtgaactgtcttcagaagaaccagatgccagttaacaccagtgcaacctcctcttcctcctctactgtcactgcccattctaacgatcctaaagagaaacaagttgtggctcttgtagcttgctctggaaaagttgaggatggtaattctgttcgtccccagcctcaagttagttgtccggcgtcgatctctgtggttcctggacacgttgttactcctgatgtaagagaaactccaggaactgatcaatacaatactgtgcgggcagatggtaaccataacacaactaagactctggaggatgaaacaaatggtggttctgtttccataaacggttctgttcatgcaccaaacctgaatcaagaaagtcatttccttgatttccctagtcctacacctaagtcgagccctgaagacttggaagctcaagcggcggagactatccagtctctgtcttcatgtgttctggtcaaagggccatctggtgtcacttggagcaccacaaccacaagtacaaccgatgctgctactaccacttcaagtgttgtggttactggaggacagcttcctcaagtaattcagcagaatactgttgttttagctgcaccgtctgtaaagccaattgagttggcagctgatcacgccacagctactcagacttcagacaacacccaagtggctcaagcatctgggtggccggccattgtggctgaccccgacgagtgtgatgaatcagtttcagatctattagctgaagttgaagcaatggagcagaacggtttaccctcttcacccacctcgacatttcactgtgatgatgacgatgatttgaaagggcccgaaaaagatttctttaaccctgtggcacgcatgtctctcacacctgaaacatgtagattggatgtctctcagacgagtatcctcgacaatgtctctgccgggaaaagctcaatgcttacagaagcaaaagacaatactcccttcagccactgcggaactgctggtccagagctcctgctttttgcaccgccaccgccaccgccaactgcaataagtcacgacctgactctaacgacaacagctctcagactaggatcagaaaccacagttgaagctggaacggtcgagaggcttcctaaatctgttttgggagtaagttcggaaccaagccctagatcattatcatctcatgactcaagctcagcccgtggaagcaccgagcgaagtccacgagtgagccagccaaagagatccagcgggcacagcagagaccggcagtggttgaacaacggtcacaacagtagcttcaacaacagtcataataaccggcaatggccatacagcaatagccatgggtatgaccatggatcag

SEQ ID NO: 139636 - DNA, 934 bp, Arabidopsis thaliana landsberg
atggatttaaaactgactttgattttccatttttctttgaagaaatttctatgtggcgggaggctaatatttggtcctgatgcatcatctctatatctatcaaccatcttgatccttggtcctgctgtaatgttctttgtcaaaatgtacactaaaatggctgatcctcgtaccaagaatccaaatctatgtattccaattctctgtgtgtcttggatactcacaattttggtatgtcttctgctttcgaactttttttaaatgatttttttgtgtgtaaaaagtgaactaaagtttcaatagttttcttcaggatatatttttcctcttaatgacatctagtagagatcccgggattgtgccaagaagttttaggcctccggaaaccgatgatgcaccggattcaactactccatcgatggaatgggttagcggtagaacccctaatataagaataccacgggtcaaagatgtaactgttaatggacataccgtaaaagtgaaattctgtgacacttgtttgctttaccgtccacctagagcttctcattgttccatatgcaacaactgtgtccagagatttgatcatcactgcccttgggttggccagtgcattggagtggtaagtttactccatgactcttgccatatattcccggttctatgttttgaacttgtttggattcttttgcagcgaaattaccggttcttcttcatgttcatatcaacatcaaccactctgtgcatatatgtgtttgccttttcttggttgaacatatttcaaagacatatggatgaaaagattagcatctggaaagctatatccaaagatgttctatcggatattctcatagtttactgctttattactgtttggtttggtggaggacttacatatttcaattctatctcatctgtactaccaggtgattag

SEQ ID NO: 139637 - DNA, 1123 bp, Arabidopsis thaliana landsberg
gctttttctgaagctttatctaataaatctcttcgttgatccttcctttccattaacgaggtagaaattccaaaacgcgtaataatcttgtcgtcattacaaattacaataaaaagaagacatttttatttagatttccctctgatcctctcttttagatttcgaatcgagaccagatctgcgtgaagatgatagagaagtgtataggagcgcatcggtttcggagattacagagattcatgcgtcaagggaaagtgacgattctttgtctcgttctcaccgtcatcgtcttacgtggcacaatcggagccggtaagtttggtacgccggagaaagatatcgaggagatccgtgagcatttcttctacacgcgtaaacgcggcgagcctcaccgtgtcctcgtcgaggtctcttccaaaacgacgtcgtccgaagacggaggacatggtggtaacagctacgagaccttcgatatcaacaagctattcgttgatgaaggagacgaagagaaatctcgagaccggactaataaaccttattctcttggtcccaagatctctgattgggatgagcagagacgtgattggctcaaacaaaaccctagcttccctaatttcgtggcgccaaacaagcctagggttcttcttgtcacaggttcagctcctaaaccgtgtgagaatcctgtaggagaccattacctcttgaaatcgattaagaacaaaatcgattactgtagaatacacggaatcgagatcttctacaacatggcgttgctcgatgctgagatggctggattctgggctaagcttccgttgattaggaagttactcttgtcacatcctgagattgagtttctatggtggatggatagtgatgccatgttcacggacatggtgttcgagcttccatgggagaggtacaaagattacaacttggtgatgcatggttggaacgagatggtttatgaccagaagaattggattggtctcaacacgggaagtttcttgctcaggaactcacagtggtcgcttgatcttcttgacgcttgggctcctatgggcccaaaagggaagatccgagaagaagcgggtaaagtcttgacccgggatagtgttgactccgg

SEQ ID NO: 139638 - DNA, 874 bp, Arabidopsis thaliana landsberg
ttacaccactttaatcttattctccactctttgaacgtaatggagaagaaccatagtagtggagagtgggagaagatgaagaacgagatcaacgagctaatgatagaaggaagagactatgcacaccagtttggatcagcttcatctcaagaaacacgtgaacatttagccaaaaagattcttcaatcttaccacaagtctctcaccatcatgaactactccggcgaacttgaccaagtttctcagggtggaggaagccccaagagcgatgattccgatcaagaaccacttgtcatcaagaggtacattcatatctataaactgtcctaacgtatttttgttttatttctcataaactcatagttattttgaaaatgtactatagttcgaagaagtcaatgccaaggtggagttcaaaagtcagaattgcccctggagctggtgttgatagaacgctggacgatggattcagttggagaaagtacggccagaaggatattctcggagccaaatttccaaggttagtctcgtcatttaaactaataaataactatttaggaaaataatttttttttgtcattttagcccttcatacaaggcatagtgctctgtttgatcacatttacgacaattttcgctttataaaattttatagttttttcaaaaaaacatgtatgtaaaaatcttaatggtatacgagaaaagaaagttcaactaatactgtatgtctatttttgggtacagaagatactatagatgcacgtatagaaagtctcaaggatgtgaagccactaaacaagtccaaagatctgatgaaaatcagatgctccttgagatcagttaccgaggaatacattcttgctctcaagctgca

SEQ ID NO: 139639 - DNA, 4127 bp, Arabidopsis thaliana landsberg
gtcgaatcccaccataattactccattgcctcacatgtacgtcatcaaagacctagtcgtcgacctcactaatttttaccaacaatacaagtaagtgaagctagctaccttctttaatcccatataaagtttctcacactttcaacattatggatgtcgaacaagtatatatgatggtttcatgcaaaattgaggaaaagaaacataaaacttgatttaagtgaatacttgcagcatagcttaactttgtgaaatcacaaagtgtttgaatcatattcatgtggaactaactattgtgatgtgctgtatttggaataaaagatcaatggagccatggttaaagacgaggaagcctccaaaagacggacgcgaacaccggcaatcaccaaaagacaggaagaaactagacgggctatacgaatgcatattggcgcgtgttgtaccacatcatgtccttcttattggtggaaccccgaggagtttccaggacctgcggctttactacaagcgtaccgttggatcagcgataggtaaaaaaaaggtgaagattaaaagccagtctctcaaaaacttggttttcactgttcatttttattttggtttgacgcagccgcgatgaatacagagaagagaggctacaggcaataactgagagtgaaaccaaagtatatagatgcagagcaatcaagaactgtacggccacttgtcctaaaggacttaacccagctagtgccattttgaaaatgaagtctaagcatttgctctccgatccgttagtgagaacagagagtgtctagcttcaacatgacttggaccggtcatatatattatgtaaaagctctctctctctctggatactcattgcaataagaatcaatgtttaaaacttttaatacgtgtctctctctactccttttattgatataactttctagaaaagatcatcaaacacgttttgttacataaaaagggaactacgtgctctccataaaatcatctaaatatagagtcaattggagaaaaacaccgattaatttaaggacaaatcgcccactttctttctaaatattcgttcttctctcttacacgaccgagtcagcacgcaacaaccataataatttttagaaaaattaaaatcaaataaccaaaaacaagaaaaagtaagagctgacaaagagaacagagaaatagaggtgattaactaaccagtaatgcattggcaccaactttcaaactcaccaccaactcattttgacgtcgaataacaataacaaaattacataaacatataatttccaatcgtttttcgtctttccttttttttcacctaaactattagtcgcttatttttcatttccgtagtaaaaaccaaaaatcataatgacacaatatataaaattaatgacaccaatacaaaacacgaaacggaagaatcttcgttcctctttaccgtccggccgagaaaagcctaatcacatctttctcctctattcttctttttaaaacatgagatctctctctcttctcatcaccattgatctctggttttcataatctattctttgattcttattctatctctgaattttgatttgttcttcgggggagatagggttttacaattctcaggccggttcttgagatggaggagaacacggcggtggctgcggcggagagaagatcaggttgtggtttattgagtgtaatgtttggtagacgtggcttgtggtccaagaaatctaccgctgtcgaaaacggtagccagaaaagcacatctacggctgcgaccgcaacaagcaacattcaattcactaaatctccgggcaccgagttaaagaagccgcgtgatgatcagaaagtttccgctgagccaatccagaataacaagatccagaacaaccaaaatcacaaccagagatccgtagttccatcaaaaccctcgtcaaatcagtaccctaataaccatcaattagggacttacgagaatcaccaacgaagtagttataacaacaatagtaatagtgttgatccatatcgaggaggaggaggacagaggaaagtgccaagagaagccattggtttatcgggtgagcttgaaagcatgatcacggatcatcagaaagcaaaaggaaccaatggattggttcgtgcatcttctagcaatataatgttatatggtaatcttggcaatttgaatcagactggacctgtaactgcgggtgtaaattacggtaataacaatggatatggcgtgaagaggacgacaatgggggctgcaacggcgacgacaacaaagagtcaagatcaatcaggatctttgtgtagagcaatctcaacaagaatggatccggaaactttgaagatcatggggaatgaagattacaagatatgggaatttcgcagaggctttagcattgtatgaagcaaccattgcaattgatccaaacaaagctgcttaccgtagcaacaagagcgcggctttgaccgccctagggagaatccttgacgcggtttttgaatgcagagaagcaatcagaattgagcctcattaccacagagcacatcataggttgggtaacttgtacctcaggtaatctcaaaacctcacaattattactttttcttaaaaaacgttattaagaatctcacaaatttcgataggttaggagaagtggagaaatcgatatatcatttcaaacattcgggtcccgaagctgatcgtgaagacattgcaaaggcgaaaacggtacagacacatctcaacaaatgcacagaagctaagagattacgagattggaatggtttgattacggagacaacaaacacaatctcttcaggagctgatgcagcccctcaggtctatgcattgcaagcagaagctttgttgaagacacatagacatcaagaagctgatgatgctttgtctagatgtccggttttcgatattgatgctagtactaggtactacggaccggtcggttatgctggtttcttggtcgtccgtgctcaggttcacttagcgtctggcaggtttgttttgttctgttcttctttacaattcttggtttattacagtaaccggtattcaatttgataattccggtttcacatcccaaaacctggtatctcaaatttgatttaccgggttcatgttacattttttggttttcttgtttatataacatggtaaaaactagagttatactgaaaattcggtctgtattggttttattgtttgaaactcggtatagagttatgaactggtttttaatttgaaaattccggtttaatttgattttatcagattcgacgaggcggtggaggcgatccaacgcgccgggaagctggacgggaataaccgagaggtgattatgatttcacgacgggcacaagcggtgactgaagctcggtttaaaggaaacgagctgtttaaatctggacggttccaagaggcgtgcgccgcttatggtgagggattagatcacgatccacgaaactctgttttgctctgtaaccgcgcggcttgtcggtcaaaattgggtcaatttgataaatctatagaggattgcacggcggctctctccgtccggccgggatatggtaaggctcgcctcagaagagccgattgtaacgccaaggtaacaataaaaactagtggggtcgatataaaattttgagaaaatttgggacttgtttgtaattattaattaattgcggatgcagatcgaaaagtgggaattagcggtgggtgactacgagatattgaaaaaggattcgccggaggatgagcaagttatcagaggattatcagaggctcaacaacaactcatgaaacgtagtggacaagactcttgagaatttttccggtgaataaaaaccagtaaacaaccgtgagggatatatggattgagaaaagaaaacagccggaatattccatgtttgattttcttttttgggctggcaaaaatgacaaatcgtgtgaattctctaatttttatttttgggttttgaatgattaaattgtttgtataggaatgagattgtgggaatactgtatcttagcattttcaaaaaccaaaatttgtccatgaaaaaaaatatcaaaattttccgatgtcgagaaatat

SEQ ID NO: 139640 - DNA, 750 bp, Arabidopsis thaliana landsberg
gttagatccttttgacatgtaccaacaattcaagatccatcaaaaggagccttcctcgcgttgttactacgcaacatctgtcgctcctgacggggtcccaccatggtttctgaggaaaaaagagtggacggttgaatactcgaggttccaagactttgaactgagagatgatgcaaaaggactcatcacagagcttcgtactgagcttcctcttcttggtatgagcactgtggttgggaagtggtatgtccctttcatattcgtgaaagaaagagaggtaaaggatcagatcaagaattcgatgtattacagcatgactcttgaacaaagatggaaagagcttttttctgatgagaacgacaaaagcgagaaccgtgatgttgtcgttgatgtagaagtagaaacagaagttgttaagcttgagggacaaatgattgaaagaggtctggaagcaaatgggtttgtctggtttggggttggagacaaaaagatcggtttaggatcagttgttgttgagaggatgaaatgggaagaagagagattcgggtggacaggcaaaggcgacaatgagcgatcaatgacagttaagagattggagaaatcaacagatggtagcctttggaagcattatcattgttatgttctgatagagagctttgtcttgaagagaatggatgagagtttggtcttaacatatgagtttacacatgtagataagctcaaaaccaaatgggattaagcttatcacgc

SEQ ID NO: 139641 - DNA, 859 bp, Arabidopsis thaliana landsberg
catctacctttttttactccaatgtactctggccaaaccgaagtcgtgtgcaacgtggcaatgtcctctcctactcctgatcaagacgacgaccatgaagattgggtagttggcatcaagttcttgggtagacagcttagcctctgcaggcctcgtcatgaccttcgttggactaacatcctaaccccttttgagtcgtgggaagtctcaaaactcatgtattctaaaaaagaccaacggttctatttgcttgctcctggaggcaactacttatgctcctgggatctcaacttcaaggaagacaagaagcctaagttccatgagttggtcttgcacaaccttcccaacatgccacgttccctctggaagcagttagattcctacggcagagaggatcattgggtggagtcaccttccggcgaaagtttccttgtcaaatggtaacctaattttaatatttaaggaattttgctgaaacaaaaaaaaaaactaaaacactcatatatttgacttgtaacctatatgcaggttttgtgaatactcgcctgaaaacaccagtaactggtgcaagtcaccgattgtaatggtgttcagagaggaagagacgaaagatggaaggaaaaacatgcgttacacagatgacattggagatctatgcattttcatttcgaagggagaggatttctgcgtcaaggctagctcttgccctggactccaacctaactccatctctttacatggccgtttgtttgcgattcttaatctcacgaaaagaaccatgggttgctacgaatatccccaaggcataccaaaaaggattccctatttaccctactggcttcctccgttttctccttag

SEQ ID NO: 139642 - DNA, 3195 bp, Arabidopsis thaliana landsberg
gacgcacttacaccattatgcgaggtcgtcacatagacaagcgtgttccttctaaagagtttctctctgctttggataaagctgaaactgcaggttttttgtacccaccctcataatagtcatgattttactctattgcctactttttggtgcacacggacagtgttatatattttaaagaccacttctgatctttttattgtatttgctcatcaactctatattgcttgtttgtgttttagacatagcattgtacctagatataccacttttttcttgttgcctcaatatcttgaaacttcttctgcatagactgactcttgacttttctcaactccagtacgtcttcctactgggacgggaaaagactgcgggaatccttcctggaagcgatctctgcctcacgtgctcgttgcttctctgacttcgcttttattcggctatcatctcgggtctctccttgtgacatttgttctccctttttccttttttctttttcatctttgcatttatagaccaaacatggaaatttacttctcatgatgctaggctattatctttttctttcgtaagcttatttttcaggctcaagttgtatttcttctcgatgcattgtttttcttggagcactcgataacattatctatttgcctcaatgactcagttttttataaatgtatatgtctgggaataatagcaaattcatgcctcttttctggacacagggttgttaatgaaactctcgaaagcatatcaattgaccttggctttagtgggaacaccatagctgaaggtaccttacctatccaagaagacaacttacttgtttttctgtttatccagtctttgtgtctatctcccgtctgatcattccaaaaacctttttctgatggatgaaggtcttgtggttagcacctgcttaggcggcgcctttattgggtctctgttcagtgggttggtagctgatggtgttgggcgccgtagagctttccagttgagcgctttaccaatgattgttggagcttctgtgaggtgatgttttgttcaggttaattgggggtttaggctgttcagttcacatgactaagtacttgtttcaggttcttatggtatgatatatatttttggttgaatgtctatgtgggcacttgaacatttcagattcgaatctttgcctgttgatttgctgaacctgtggtctaggctagtcattatgcagttggattatctcgtagtgatttcctgcttggatgtttatagttatagcgtggtgattttaacatatttggcctcatttgaacatatttggtctcaagtcattgccatggtgattttcacttatcccaaggtgtactcactagttaggttaattcatcctgtttctcttttagccagagtccatttatgtaatcatgaaatctgtgtgcttacaagtgtgttgtttgcagtgcatcaactgagagtcttatgggcatgctcctgggaaggtttttggtcggaattgggatgggcataggtccttctgttacagctctctatgtcactgaggtacttgacatatacgttgaagtctttcttatctgcacttgttttgataggattgctacatgaaatttcttcctcacttttgatgtgaatattacttggcgtatattattttaattatgtcaaaagatgtttggagtcaatgtaaatagatgtctatttcagacataaaaagacttgaacttggaaccattaacatgcagaaggtcattgacgcacataattttcattgtaataaggacttcaatcttgaaagctatattcgcattattggatttatttaatgtgaaaaagaaggttctgggcacacaaatatcactaactcgctttgtcaatacatcttacattcatacttagagcaagactcacagtttctctttgcaggtgtcacctgcttatgtgagaggtacatatgggagttctacccaaatcgcaacatgtattggactcttaggttcgctgtttgctggaatcccggcaaaagataacttgggctggtaagatgttgataagaactcaaggaatagatgacttaacagcttatatggcctgtaactcttcgaggttgaaattattgcaactctgtgccatctgtgacttccaaacgcatggtagttcaccctttttgcttgctttaggtggcatgtttgatccccgttgtctattccaaacccacctatatgcaatgtgaatctctagtgccttgttaaaatgctgcaactctataggaaccacctcatcttttgctgcaaattcattagtgattttgacatgagaaccgcctttgtagggaaagaaatcctggagtttctaagctactagcagatcacatgctttggtctacttggctgaattactagttgaataggtttctctttcttgattggtgtaggtggcgcatatgtttttggatatccacagtcccagctgcaatgcttgctgtcttcatggaactctgcgtggaaagtcctcagtggctttttaaggttactgtctaattttaacccgcatagctcttaaagacgttttgatttttataaaccatttctttggttgattctttttctgtttaaccgtagaggggaagggcagctgaagctgaagctgtgtttgagaagctattgggagggtcgtacgtcaaagctgctatggcagagttagtgaagtcggataggggagatgacgccgattcagccaaattgtcggagttgctttttggacgcagttttagaggtatgtgtgatctttaaccaacaagattggtgaaaatgtgtggcattagttcgatgtcaaatatcacggaaatattagatctagatttttattcatcaaaaagttgaatcatttgcacggaaggtatgttaggtggctaaactggatccatagccaaaaaaatgacattttcatttgccaaaaacatacatatagatgatgtgtagcctcttaattaccttcatttttacgtttaaattttctccgattgcagtggttttcattggatctaccctttttgctttacaacagttgtctgggataaatgctgtgttctatttctcatcaactgtcttcaagaaagctggtgtaccttcagcctctgcaaacatatgtgtaggagtttgcaacctcttaggtattgaaatgtgacgtttt

SEQ ID NO: 139643 - DNA, 1069 bp, Arabidopsis thaliana landsberg
ttctcacccatttttcaccaatttctctccacttaaaaccaaccccaattctcaccaaaaatcgcaaaaaagatttcaactttcgataaacccagatcgaaaaatcagatttttccagatcaatcagagagttagagatggagtataataacaacaatcagcaatctttttggcagttcagcgaccagctgagagttcagacaccgaatctagcgaatctgtctctcaacgactcgatctggagcacaaactctgtcttcaaagagcgtcgaaacttagacatagccgccaccaccgacaagaacaacaaccagatcgactattatcagaagaagacaacttccgacaacatcaattccaactggaactggaagtcttctggttcaaacaacgacatgggtttaggattcggacctgtgggttcaaaatccaccgtcgatttaaacccaatcgacaaattcaactcaccgttcaacgacacgtggaaattcaactcagtcaacgttaacgttaacggttactcaccgtcaagcgccgttaacggagatttcaacaaaggggtttacacgtcgatgaagaagtatgggtacaacgtcaatctaaagaacaacaacaagaacaaaggaatcgatgaagatcatcagattcagaaaggtgggaagaagaacagaaagaatcagcagaacaataataaccagaggaacgaagacgacaagaacaatggtttggacaagaggtttaagactcttcctccagcagaagctttgccaagaaacgaaaccattggtggttacatctttgtctgcaacaacgataccatggaagagaatctcaaacgccagcttttcggtattcatcaccacatctttcttcttactgtttcgattgtttcttcttggttttgatttgtggggatggaaattgtttaggattgccaccaagatacagggactcggttagagcgattactccaggacttcctctgtttctttacaactactccactcaccaacttcatggaatctacgaggcagctagctttcgaggaacaaacattgagttgaatgct

SEQ ID NO: 139644 - DNA, 517 bp, Arabidopsis thaliana landsberg
  unsure (1)..(517): unsure at all n locations
cgaaatcaatcggaatcaggaagacaaaaatgagcggagtttcgacggcggcgtactttgcgcggcgagcggctcagaaggagagagttcgaatcctttaccgtcgtgcccttaaggatactctcaattgggctgttcatcgccatatcttctaccgtgacgtaagtctttnnnnnnnnnnnnnnnnnnnnnnnnnnnnnttttgattttttaccgatctctcattttggtttttgattccatttgatcttcgttacctttcaggcttctgatctgcgtgagaagttcaatgccaaccaagatgtggtttgttctcttctcctttcattttgcatacctctctctttgccttgtttcattgttgattgttaaaatgtttgataatccgtagaaatggaaattgatattgttttgtttcatttaatttggtagagagactttagagatatgatgagcataatcatctaagtgtgtgtggatgagaaaattggggacttttgttgtggaaacacctcta

SEQ ID NO: 139645 - DNA, 1289 bp, Arabidopsis thaliana landsberg; identical to SEQ ID NO: 26619

SEQ ID NO: 139646 - DNA, 852 bp, Arabidopsis thaliana landsberg
tatctttgtttcgactttttttacttttcaagttcttgagaaactcatttttagtttgagggtctctccagattgaagaaccggttgaagtataccatgacatggagtacaaatcaaaacgttggcatttccctttacataaccttactgtatccaacatatggtcgccatttcttgttcaagccgctattttcgaagattctaacggtgtctcgaccgcttctgttcagctacatcttgatagactcgatgagacatggaccagtctcatgcctagcttcgactatgcgatcatctcaaccggtaaatggtttcttaaatccgcaatttaccacgaaaatgcaaaactcgtcggttgccataactgtcaggaaaaacctcacatagaagagttaggattcgactatgcttataacgcatcgctgcataatgtcatggactttctagcagctgaagataacagtaaaggcacggttttctttcggacttcgactcccgatcatttccaaaacaggggaatggcatagtggcgggacgtgtaagcaaacagagccggtgagcgatgaggagattgagattaaggatgtacataagatactaaaagatattgagattgatcagttcaagagggcggttagagagaagactaaccaggacggtgggaatctaaagcttttggatttcacccggatgttgctgacccgaccggacggtcatccgggtgagtaccgacagttcaggccgtttgataaagacaaaaatgcaaaggtacagaacgattgtttgcattggtgcttgcctggtccgtttgattacttgaatgatgttatattggagactatagtaaatggc

SEQ ID NO: 139647 - DNA, 4676 bp, Arabidopsis thaliana landsberg
  unsure (1)..(4676): unsure at all n locations
atgaagttgtgtagagaatgtgatgctgaggttcgtgagttaagggttaagagctatgataaggttcatcctcgggatagccctgatccgccttcttctcttgctaccgaaagcgagagtcttgcctcgagtcttgaaatccgtgattgtaggaacatggcttctattcgttgctatcctagcaggtaaagtttcgatttttacattcaattatgtgtgaaaaagattcaatttttatgttcaattatgagtctttaaacatgttggagtaagtgaatgatttgtgtttgcaggggagaggaagaagaggctagatattgtggccaacagttgctaagcccttcgagtgataactatcaggacagttcagatatagagtcgggtagtgttagtgctagacatgagctttttagttgtcaatcttctgctgggtccagtcctcacgacagtccattaaggaacaattttagtcctcttgggcgctttgtacagcacgcgaaagacctaagaagccctactgtttgttcttttgataatcatcaagaacaactcttggctgataatttagttaagccaggtcagggggtattggaacaggaagatcacgaggaggaagaggataagttgcaacagccgttggattttgagaacaacggccgcatctggtatcctccaccaccggaagatgagaatgatgatgctgagagtaattactttcattatgatgacgaagatgacgatattggggactctgctaccgagttttcattgagtagtagcttttctagccacattcctaccagagagaaattgggagaaaacagcaatgaacctcttcgaaccgtggtgcatgaccacttccgagctcttgttgcagagctattacgtggggaggagctaagtccatctgatgatggcagtgccggggagtggctggatattgtcactgctttagcgtggcaagctgcaaattttgtaaagccggatactcgtgcaggcggcagtatggatcccgggaattatgtaaaaataaaatgtgtagcatctggaaatcaaaatgagaggtataactagttgttgaaaccttgtttaaatcgtcctctgactgatgattactaatttgggtgatagttactaaatgaataccttgtttctgcagcattctcatcaggggaatagtgtgtagcaagaacattacgcacaagcgaatgatatcgcagtacaaaaatccaagggtgatgcttttagctggttctcttgagtatcagagagttgcaggccaattagcatcctttaacacgttgcttcaacaggttggtgtgttactgtttctttatgatggctgcataaaatcnnnnnnnnnnnnnnnnnnnaactgaattatgtgtgttggacaggaaaatgaacatatgaaggcgataatagcaaaaatagagtcccttcgtcctaatgttctgctggtagagaaaagtgcatcttcatatgcccagcaataccttctagagaaggaaatttcattggtgctcaatgtgaaaaggtcattgctggaccgtatagcccgttgcactggtgctgttctttgcccctcactagatagtattagtactgctcgattgggtcactgtgagctgttccggactgagagagtgttggagcaacatgaagctggcaatcagtcaaacagaaaaccatcaaggacattgatgtactttgaagggtgtcctaggcgcctaggttgcacggtatgctcctttattggtttcacagttcttgttttgcatagcttgaacctttgtagctaagaagtctgctatcttaaatttattaacttccttactgacttttctgaaacttgtgcaggttgtgcttcggggaagttgtcgtgaggagctaaagaaggttaaacatgttattcagtacgctgtatttgcagcttatcacttatcgttggagacttcattccttgcggatgaaggtgcttctctgcctaaaattagactgaagcaaccagggatggtgcggactgcatcacaaaggaggataattgatgaaggcatttccttaataactcaatctcctacagaaacagatagtcaagctttgcttgaaacagctgcacatgaagatgaacatacggctcctatgcctgagcatgaagtttgtgaatcattgtgtaaggattttgatcctactcttatattcccaccgtcttctgtatgttgagactgaacaatctgataccctgaatggagattttgccaataatttggtaacaagatcatattcttcgaatcagttaaatgatttgcatgaacccactttgtgcttaagtagtgaaattcctgaaacgccgactcaacagccgagtggtgaagaagataacggcagaggtgaagaagagaaccaattagtgaacccccacgatttgccacaacatgagagcttctatgaagatgatgtctctagtgagtatttctctgctgcggactctcatcagagcatattggtctcattttcaagccgttgtgttttgaaagaatcagtatgtgaacgttcacgactcttgcggattaagttctatggatcctttgataaacctctcggaagatatttgaaagatgatcttttcgataaggtagctctttcatctataaagttagttaatccactttttcatctttcttaaattttgaagtctaatgcctttctgttccatttctggacagacttctagttgtagatcctgtaaggagctggttgatgcgcatgtactctgctattctcatcagaatggaaaccttactatcaatgttagacgtctcccttccatgaagcttcctggtgaacaagatgggaagatatggatgtggcatcgttgcttaagatgtgcacatgtagatggagtcccacctgctactcgtagagtagttatgtctgatgcagcatggggattgtcttttggaaagtttctggaacttagcttttcgaatcatgcaactgcgaatcgtgttgcatcttgcggtcattcgcttcaaagagactgccttcgattctatgggtaaacgcaggctgtataatatcattctcttacagttatctcaatgctgttacactaataatattatgatttgctttgtagatttggtaacatggtggcattctttagatattctcccatcaatatacttactgtactcctcccaccgtcgatgcttgagttcaatagccatcctcaacaggagtggatacgaacagaggcagctgaggtagattttaagaaaaacttaaggctcttttgcttcaggttttggatatgtaaatgctaaaactcaaatacttctctgtttgcattttacagcttgttggtaaaatgaggactatgtatacggagatatctgatatgctcaaccgcatggaagaaaaaagcagtttgcttgaacctgaacaatctgaagcatgtgatctacatagtcgcatcatcggattaatagatcaacttgtgaaagaaaaagatgaatacgatgtaagcttcttctgtttctgaaatcttgatgatgcttgttgaatatgtatttgatggaatattcctcatcatgaacaggatgcactgcaacctatttttgaggagaatctgcaaattcagggaagtttggatatcctagagctgaatcgattgagacgagcactcatgattggtgctcatgcttgggatcatcagctttacttgttaaactctcaactcaagaaagcatcagtctttaaaactggtgatgacaatgctcctcggaatccagagatgcatgatcctccaaagattgaccgtagaatgcaggaaggttcagatgagagggatgaacaatcccatactgattcagaagctaatggtgataacaaagatccggaaaacattccctcccctggcacttctctatctgagaggatagattcggcgtggttgggctcgtttcaaaatctagagaaagccgagactattgctgagacggaaggcttttcagctgttaattcttctctccggaggcttgccaggccaattcgagtccagtcttttgattcagcgatacggtttcaagaacgtatccaaaaaggtttgccaccatcttctttgtatctctcgaccctcagatctttccacgcttctggcgagtataggaatatggtgagggaccctgtttcaaatgtgatgaggacttactcacagatgttgccactggaagtacagaaattggatctgattgttggttcagcgccaacatacatctcttctgcatctcaaatggctgatggggcacggatgttgattcctcaacggggccttaacgatatcgtggttcctgtatacgatgatgatccagctagtgttgtatcatatgctatcaattcaaaggaatataaggagtggatcgttaacaaaggtcttgcttctagtagtagtagcagcaatttgaataacagagagtctgaaccttccgccttctcgacttggcgttctctgtcgatggatgttgattacattcaacacgcggtgtatggatcttctcaagacgatagaaagtctccgcatttgaccatttctttcagcgaccgcgcttcttcttcctctactgccactgaaggtaaaaaaaagttaaatgtgacgtgttattggcaactcagtt

SEQ ID NO: 139648 - DNA, 3418 bp, Arabidopsis thaliana landsberg
tctagtccagaaagttccatcttttacggaatcagagacatctactggggatagatcttctgtggatggatacaactgaaggaaatacggacagaagcaagttaaaggaagtgagtgtccaaggagttattacaaatgcacacacccgaaatgtccggtgaagaagaaagtcgaacggtcatcggatggacagatcactcagatcatttacaaaggtcaacatgatcacgagaggcctcagaatcgccgtggcggtggaggcagagattccactgaggttggtggtgcagggcaaatgatggaatctagtgatgatagtggttatcgtaaggatcatgatgatgatgatgatgatgatgatgaagatgatgaagatcttccggcttcaaagataaggtatagtagaagtgcatctgattatcatacatagtattagtataatggtcatggcattgccaattaattagttaatatatatcgggattatagaagaatagacggtgtgtcgacgactcaccggacggtgaccgagcctaagattatcgttcagacaaaaagtgaagtcgatcttctcgacgatggctataggtggcgtaagtacggacaaaaagttgtcaaaggaaatccccatccaaggtactaatacttagggttgtgcttattgaatctatatagaaataatttgattattgtatacattatttcacattcattttgtttaaatactcgttttattttggtattattaggagctattataaatgtacaacgccaaattgtacggtccgtaaacatgtagagagagcttccacggatgctaaggctgtgattacaacttacgaaggtaaacacaatcacgatgtccctgccgctagaaacggtaccgcggcagcaaccgcagctgcggtggggccgtctgaccaccatcgtatgagatcaatgtcggggaacaatatgcaacaacatatgagtttcggtaacaataataacacaggccaatctccggttgttttgaggttgaaagaagagaaaatcacaatttgacttttaagaaccaaagatttcgagattgatatttaggattggtttagccgcttggtgattgattctgaaccgggctactacttattgatgacttgtataacaacatgtgtgatgtgaattgagtgcatgcttttgactaaacgaaagaaatttgttttgtttttttctttttcttcataaattatgaatttattattttgtacctaatcattgtttgatgtaacatatagattatttttttcattacagttttttcccttcaaaaatttagtaaaaaaatatcttcatttttttgttagggtgtaagataaatctattttaaattacaaaagagagagattaaagatttgctttcttgtctcttttgtcgtccaaagtttaaggaggattgtcgaattgtccgtgattatctcactctctcgattcggttctcttctctattttacaacaaaaactattttccttcaattttttgtttttttttctcctttattttcgtttctctatggtctaatgcggggattgccctccctgcgttggacccgtttacccgacccgggtcgatactcacgccgccacccggaaactctcctctgacaattaatttattatgggttgcttcaactccaagcattcttctccggcgggtcctccacgccctgtccgccgtcgcttggacaccaacgtccaccgaagtcatacccaagattcccataaccgccatgttcttcccggtccaccatctcaccgccgtgtcgtcaactcatctccgaaaaaacatcgcaacaatgacgacgatgctccaaaatcgaggacgactggtgttagcctaagatcgggattgccgcacagcaatgtagaggctgagcaggtggcggctggttggccctcctggctcagctctgccgctcccgaggccgttcatgggtgggttccattacgcgccgaggacttcgagaaaagagagaaggtaaaataatcctatccatagaggcatagattattacattttcttgcaagacaagaaacaaccctatcaatgatttcaacgaataattttctctaaaaatcttagatcgggcaagggacgtatagcaacgtgttccgggcttgtgaggtatcgacgggacgagttatggctttaaagaaaatacgggtccaaaattttgaaacagaaaatataagattcattgcgagagaaatcatgatcttgagaagattagatcatcccaacattatgaaactcgaagggatcatcgcatcaaggaattcaaacagcatgtactttgtgtttgattatatggaacacgacctcgaaggcttatgttcatctcccgacatcaaattcaccgaggcacaggcaagagagagacacgcacacacaaaaccctaatctcttctgcaagtgactctgtttctttctttactctgacaaccctaatttcgtttccagatcaaatgttacatgaagcaactgctatggggagtagaacattgtcatctacgagggattatgcacagagacataaaagccgcaaacattctggtgaataacaaaggagttttaaagctagctgattttggattagccaacattgtaacaccaagaaacaagaatcagttgaccagtcgggtcgtgacattatggtaccgtgcaccagaacttctaatgggttcaacaagttatagcgtatcggtcgatctttggagtgttggttgtgtcttcgccgagattcttaccggaagaccacttcttaaaggaagaacagaggtgaggaattagggaccaaaccgattccggagaaaagattatgtttctgaatgttttgtttttgtgaaattctctgtagattgaacaacttcacaagatttataaactctctggatcaccagatgaagaattctgggaaaagaacaagcttcatcctcaaactaagatgtttagaccacaacatcaatatgaaggttgtttgagagaaagatttgatgagtttccgaaaaccgcgattaatctattggagaatctattgtctattgatcctgagaaacgaggaactgcttcttctgctcttatgtcagaggtgaaaaaacttcctaaacgaaaccctagcatgtactctaatcaaataagctgaaactcttttgttttctctgtggtttgttgttgttcttcagtactttaacacacagccttacgcttgcgatccatcgacattacctaagtatcctcctaataaagaaatggatgctaagtaccgcgaagaacttcaacgaaggtatcaatgattgctagcatgcgcattgtataaatatcattggttgtatttaattaattaaactttgttatgcaggagaagagttagtatcaagtaaa

SEQ ID NO: 139649 - DNA, 2139 bp, Arabidopsis thaliana landsberg
tagatttatttatccggcctgggacggacacaccagccattttttaataaatatgcatcttattccattgagttactgttgcctgcatatgcttgatgataatcattttgctgcaaatccaggctgacatatcttctattatcaggacaagtaggtcagagtttattgtgagcgtcaataggtatctcgaagctaagacccagaagctgtctgtaggcatgcgtttcaagatgagattcgagggggaagaagctcccgagaaaaggtatcaaaactaactatattgttttctttttgctgataaagctgaatataacttctagtctttttttttgtgtgcattttaactatgcaggttcagtggcacaatagttggtgttcaggaaaataagtcttcggtctggcatgattctgaatggagatcgctaaaggttagaatattctactgctatactttgcagtggagcaagttgtggatttgtattttcttagttgaatgaatagagtgatgcatcttaatatgcttattggcaatctgatcatgctccaggttcaatgggacgaaccctcatctgtatttcgtcctgaaagagtttcaccttgggaacttgagcccctagttgcaaatagtactccgtcttcacaacctcagcctccgcaaaggaacaaacgaccaagacctcctggtttaccttcaccagccactggtccatctgctcctggtattctgtgttcttttctctttgaactgttcttctttgtggcggctcttgctctttttattgatgctctcttcagttactccagatggtgtgtggaaatccccggcagacactccttcctcagtgccattatgctctcctcctgccaaagctgctacgtttggtcatggtgggaacaaatcatttggagtatctattggatcagccttttggccaccaatgcagatagtgcagctgaatcctttgcttcagcgtttaacaatgaatctactgaaaagaaacaaactaatggaaatgtctgtaggctttttgggtttgagctagttgaaaatgttaatgtggatgaatgtttctctgctgcctctgtgtctggtgctgtcgctgtagatcaacctgtcccatccaacgagtttgactctggccagcaatctgagccattaaacatcaaccaatctgatattccttcggggagtggtgaccctgagaaatcctctttgaggtctcctcaagaatcacaaagtagacagatacgtagctgcacaaaggtgtgactattagcctcttgtatcgctcgctctttctttgaagatcaattttttttgtcacaactccaatattggtcttaaattggtggaccgtgtctgcggcttgcttttgactaaaacgcaatgtttttggcaatttgatttaggtgcacatgcaaggcagtgcagtaggcagagctattgatttgacaaggtcagagtgttatgaagatctgttcaagaagctggaagagatgtttgatatcaagggtgaactcttagaatctaacaaaaaatggcaagtcgtttacaccgatgatgaagatgacatgatgatggttggtgatgatccatggaagtaagtgcatttgctgtctaatactcaaaattttgtttggtgtcaacaaataaagcagtgtttaaaattgcaaagcatcatctgctgtaatgtgtccttttgctttaccgttgatgatcattttggtcttctcttttgtgctgcagtgagttctgtggaatggtgaggaagatattcatctacacacctgaggaagtgaagaaactttcaccgaagaacaaactcgcagtcaatgcaaggatgcagctcaaagctgatgcagaggaaaatgggaatacagagggcagatcatcatctatggcgggatcaagatgagtatatcactgtgttatgttttaaatgtacttgccacgtaggaaatatgaaagcagaagcaagagatcgttagacaatatgaaagttgagatgtctgtgtatagcaatgaagttttatgtcttcaagtcttatgaattcacttagatgcaatgtgttttgaggagttgtgtagcttttgtacgggaaatatggaaattaagtttcacgtcttgttctacc

SEQ ID NO: 139650 - DNA, 3697 bp, Arabidopsis thaliana landsberg
cgtcggaggaggaaccgttaaggttcggtcaattggttcggagaacggtagagatatgtcaaaacagacttgaaggttgtctgatcacctctctgtacgtccttctcttgtcaacccctgttttctttggcttcttatttgtagcaacgaactatttccacatcatttctctgaccggatcaggcgaaaactcatactactattctataaacattgaagaagatgccgaaggctattacagaagcagcagtgtcaacagtccggtaaagatgttgtttgatgcggttttagctatgtttcacggtgctatctttctcggtttactggcgatgttcagcaagtggagtgcgggatggaacatgggtttggttgtttcggtgttagaagaggaagaaaatggtcaaagcatatatggaaccgatgccttgacactgtcttctaactatggaaaaggacatgagaagcgtggtctccaagtgatgctggtgttcttggtcttcgctattgcgatgaggatgccatgtttttgtttcaaatgcacggagagttccaatggaaacagagtgttgtacacgagtttctatgtgggtttgatctgtgttgggaatatgatcaaatgggtggcttgtgtagtgttttatgaagattgtagaactagcgttttggagaagaaaggtgatgtggagattggatcaaaaggtaagacttttgttgcatagataaattgtcttagatcaaaccaaagctctcgaatcttaaacaatttctacatgaccaatagctctggcctcttcaagctttccttatagttgctccgtttaagccattaaggtcatatcccaatgtattgttgtgtgagactatcagtgttcatggcttggccaagtatttattgaaagttatattattgagttgtgtttgatcatgtacacttatacaatgtaaagcttaattttatcttatctctaacataaaaaaaaaacgaaataaaaaattctaaatatatgttttcataagaatgatattggacacacgtcttagattaactgacttcacttcatagttaggctttcactgttatctctaatacttcgatcaagttttttgctaatttccatataatttaattacaacaaagtgtaaatagttctaaattgacaatctaagacttgaagcttatctagtaaaaccccactactaatcaaacattacatacagtgacttatagaccaagtcaagaagtcaacgtcaatgaaggacgaccattaaattactcaaagacttattaccaattacatgttccaccactacacatacagatctgtgacctctcttcttctattgtgagaaagagatcaacaaatggagacaaagagcgaggagaagctaagtgtcatcgaactactaaaacgagctcttaagctactctttggtaacatcaatctcgctctcttcctctttctttgctctctcccactgttttgtttcttgatcttcttcgagctctccctccaaaccactgtctcactcgcttccacatacatctccaaactagtcaattctgaggaggacttgtcggagaatgatcttcttccttggctgattcagacaactctgctctacttctttccctatactattcttgacctccttaccaccaccacgatcgttgcagcatcatcgattgcttacacatctgaggaagagccgctagggttgctttatttggtagggagatctttcaagctatgtcagaacaaagtaggaggttgtctgatcacatctctctatgtccttctcttgtcgacctctgttttcctcggtttgttctctggttcgaccatctacttatattttgcttctctcacactcgaacaacaaatattctttaatcaagcagtggtgcaagaccaaagattccttgaacaagcagtggttctgttggatgtggtggtagttctgattcatggtactgtcttcatagttctggctgcaaagttcagcaagtggagcgcgggatggaacattagtatggttgtttcggtcttagaagaggaagaagatagtaaaggcatctatggaagtagtgctctgtctctttcagcttggtacttaagaggacaagagaagcgtgacttctggatgatgctagtgttcttggtcggcgctcttgtgacaaggatgccatgtttatactacaaatgcagtgaaagtctgagtgggaatggagtgttgtacactggtctctatgtaagtttgatttgtgttgggaatggcatgaaatgggtttcttgtgttgtttggtaccatgattgtaacacaagggtcttgaggaaaaagggtgacgtggagattgggtcaaaagcttttgctacatagagaaattgtttgtgagttgtgaccaaatctttaacaatttctctatcaccaatagcttttgctctctacttgaaataacaaattgaagtttaatagttctcaaatcagaagacacttctagtaaaaccctactagtcaaacattaccatacagtggcttgtagaataagtcaacaagtcaatgaaggatgctaaccatatattaatatatgttctactttacatacagatctgtgattaccctttttcttctacttcaattgtgagaaagagatcaacaaatggagacgaatagcgaagagaagctaagtgtcatcgaactactaaaacgagctcttaagctactctttggtaacatcaatctcttgctcttcctatgcctctgctctctcccactgttttttttcttgatcttctttgagctctccctccaaaccaccgtctatctcacttcccaattcctctggaaactactcattctgggagaagacttgccggaaaatgatctgattctcatatcagagaaaaagaatgatctgatttcatggctgatccagacatttctgctctacttcttcccctacaccattcttgaccttcttaccaccaccacgatcgttgcagcatcttcgattgtttacacatccaaggaagagccgttagggctgctttatttggtagagagatctatcaaaatatgtcagaacagagtaggaggttgtctgatcacatctctctatgtcctcctttggtcaacctcagtttttcttttctttttcttgttcttttttcttcagtttctctctggttcaaccaactacgtatccattccttatctctcacgcgaatacaaagggttccactaccaaccaacgggtctattcaacgtggtagtgcctctgactcttctgatgcaatgtactctatttatagttctgactgcaaagtatagtaagtggagctccggatggaacatgggtttggttgtttcggtcttggaagaagacgaagatggtcaaggcatctacggaggagatgctctgtctctttcaggttggtatagaaaaggacatgagaagcgtgacctctggttgatgttaatgttcttggtcttcggtcttgcgacaaggatgccatgtttatactccaaatgcagtgcgagtggaaatggagtgatgtacactggcttctatgtaggcttgatttgtgttggcaatttacttaaatgggtgacttgtcttgcctgttaccatgattgtaaaactatggttttgagaaaaaagcgtgatgtagaacaagctaaaactcctgctgcttaa

SEQ ID NO: 139651 - DNA, 1800 bp, Arabidopsis thaliana landsberg; identical to SEQ ID NO: 7004

SEQ ID NO: 139652 - DNA, 1057 bp, Arabidopsis thaliana landsberg
gataaaacaaatactcatatctcatcctttggcatgtttaggagccatctctcagctggacggagacaacacagacacttgtgccagagagggaacacaatcttcccaagtcttcgaaagggtaatctcagaccaaaccgttgactttgttcttattaattgtttatgctaaaccacaagatatttggatcaaaagtattaccataaatcactatataaagacataaatgtgcaccccacttttcttatcaatcataaaagtcagcaaaacacaaggcatattcctcttctcttcctcagccttatttttctgatattcagattcaaggatatatccatggcgatccagaagatcctctttgcttcacttctcatatgctcactgatccaatccatccacggggcggaaaaagtaagactcttcaaagagctggacaaaggtgcacttgatgtcaccactaaacccagccgagaaggaccaggtgttggtatgtataattctcttcaaaacatcaatcatttgctacttcattagccatgccttataaatgtgcgattttgctctaataccatgttagattttaaagctttatgaatgttaagacaaatttttatgagtattggaaacattagttctctttagtcgtttattacaacatcattagatcttatcctattaattagaattacttagaattaagtgatatgaatgatagtatgatctaatatcaatttacaagaataagttggaattgatattttgaatgtttggtctttagttttggatgccggcaaggatacgttgaacattacatggacgctaagctcgattgggtctaaaagagaggctgaatttaagatcatcaaagttaagctatgctacgctccacctagccaagttgaccgaccgtggcgcaaaacccatgacgagctcttcaaagacaagacctgcccacacaagatcatagcccagcccttatgacaaaaacacttcaatcaactacttggactcttgagcgtgacattccccaccggaacctacttcgttcgtgcctac

SEQ ID NO: 139653 - DNA, 959 bp, Arabidopsis thaliana landsberg
atcagacatcactcatatctttagattcacattaatgcttttcaactaaatcctcttcgtttgattctccgatgacgtccatcagttcctccgatcacccccttccggtgagcaagaaacgattaaagccattgatattacgagatttccttctcgatgatctcagctcttgctcatccaacggcttcaaatctttccctcgtctcctcaacgctgagatccaacggtcaggaatgttccaccacaatcgccgtattacctgcggattagcgtttagtcacgccgttcataaagcttcgacggcgttactcaccgccgttaaactcttgcccttcccttcctccgttaaatctcagtctcgtgatagagataacaagaaaggacttttctcaagaagcttctggaagaaactttcccgacgtgaacttaacgtcgacgtcggagagaaggaacggagaacggatgatcgtgaagaggagatccaacggtgtagatcattcgcggagtttcttcaagagagtcaagatcaactgtctgatcagatttattatatttctccgacggatttattttccggtgaagtaacattgtcaaaggacgccgtcggtgactcgtcgagttttagtagcgaggactcggaggtgactcagtcatcaagcggagtagtagtagttatgaggagtggggattgtgtagggtcacatgttagtgacggatcgtctttcaacgacaacacagaggttagtaaattactttacaaactttcaatgattcgaaatctttcgggctcgggcaaattcagtgaccatcccgcacgtcaatttctcaatgcaccaccaaccatttaaatcacaagttattccaccagcgaaccattaggtgaactaatactagaaattacgtgtaaattgatatgatgctgtttaagacttaagctgagggagttggacatttttgaa

SEQ ID NO: 139654 - DNA, 1988 bp, Arabidopsis thaliana landsberg
taaaaatatttaactataattatatgatgaaatcaagaatgggtcctccaaaaatcgagcttatggcccaataaagcccaaacgtaaatagccaagcccaagcatatttatccacgttcccaaacaatccctaaacctcatcatcatcatctccaaactcctaaaaccctaacaagaacccttatctctctcatttcctctgaaaggaatcatttttccactcagaaaatctcaaacatttcaaccatgtcgatttctaaagccgcctttttaaaccaccttcaaacactatcaagatcctaccgccaccgtgttccgccgcagccatttctcgccgtccgatacatgtcattcgcgactcaggaagaagccgccgctgaacgtcgccgtcgtaagcgtcgtcttcgtatggagccaccggttaattcattcaacagatctcagcaacaacaatctcaaatccctcgaccaattcaaaaccctaatatcccgaaattacctgaatctgtctctgctctcgttgggaaacgtctcgatcttcataatcatatcctgaaattgatccgagagaatgatttagaagaagctgctctgtacactcgtcactctgtgtattcgaattgccgtcccacgattttcactgtgaatactgttttagcggcgcagcttcgacaagctaagtatggagcgcttctgcaattgcatggattcattaatcaagctggtattgcacctaatatcatcacatacaatttgatattccaggcttatcttgatgtaaggaaacctgaaattgcgttggagcattacaagttgtttatagataatgctccattgaatccttctattgctacttttaggattttagttaagggtttagttagtaatgacaatcttgagaaagcaatggagattaaagaggatatggctgttaaaggttttgtggtggatcctgttgtttatagttatctaatgatggggtgtgtgaagaattctgatgctgatggtgtgttaaagcttcatcaggagttaaaggagaagcttggtgggtttgttgatgatggtgtggtttatgggcaattgatgaaggggtatttcatgaaggagatggagaaagaggctatggagtgttatgaggaagctgttggagagaattcaaaggttaggatcagtgctatggcttataattatgtgctggaggctttgagtgagaatgggaagtttgatgaggctttgaagttgtttgatgcggtgaaaaaggaacataatccaccgaggcatttggctgtaaatttgggaacttttaatgtgatggttaatgggtactgtgctggaggaaagtttgaggaagctatggaggtttttaggcaaatgggtgattttaagtgtagtcctgatactttatcgttcaacaatctgatgaatcagctgtgtgacaacgagttgttggctgaggctgagaagctttatggtgaaatggaagagaaaaatgtgaagcctgatgagtacacatatggtttgttaatggatacttgtttcaaggaaggtaagatagatgaaggagctgcgtattacaaaacaatggttgagtctaatctaagaccaaatttggctgtgtataaccgtttgcaagatcagttgatcaaagctgggaaactcgacgatgcaaaatctttcttcgatatgatggtgagcaaactcaagatggacgatgaggcttacaaattcatcatgagggcgttaagtgaagctggtagactcgacgagatgctcaagattgtggatgagatgctggatgatgacacggtaagagtgagtgaggaactgcaagagtttgtgaaagaagaactgaggaaaggaggaagagagggagatctggagaaactaatggaagagaaagagagattgaaagcagaggcaaaggcgaaagagttagcagatgcagaagagaagaagaaggctcaaagtattaacatagctgcattaat

SEQ ID NO: 139655 - DNA, 1725 bp, Arabidopsis thaliana landsberg
  unsure (1)..(1725): unsure at all n locations
cagtttgagattctatacnataaggaccgtgtgatcgagatcagtgctagaatggatcctcattcgcttgtggatctcactgaggataaggaagttgatgcagagtttatgtacactgtgaagtggaaggaaactgagactccttttgagaaaagaatggagaagtactctatgtcttcttctcttccacatcatttggaaatccactggttctccattattaactcctgtgtcactgtccttcttttgactggattccttgcaactatcttgatgcgagtcctcaagaacgatttcatgaagtaagtttcaagtttcctcactgtcgactgttttacacttgtctatctcatctaaccttattccaatgcttaaaaggtatgctcaagatgaggaagctgctgatgatcaagaggaaactggatggaagtacattcatggcgatgtgtttcggttccctactcacaattctttatttgctgcatcgctcggtagtggcactcaattgttcacgctgtaagtctctcataactcgaatactttccatctggatacactttcatccatatccgcatttcttcttactgtaactaactgtagcttttccttttattccatgtcatcagcaccatatttattttcatgcttgctcttgttggagtgttctacccatacaaccgaggagcactctttaccgctttggtggtcatttacgctctcacttctggaattgccggatacacatctgcctctttctactgtcaacttgaaggaaaaagctgggtaaatatttacacatgatgagaatcatccctgtctctcaaaaaatcatcttcaactgaaataaacaacttctcccttttttgacattattgcaggtgaggaacttgttactcactggatgtctcttctgtggcccattattcctaaccttttgcttccttaacaccgtagccatcacttacactgcaaccgctgcattaccctttggaaccattgtggtgatcgtccttatatggactctagttacctcacctttactcgttttgggtggtatcgcgggtaaaaacagcaaagcagagttccaagcaccatgccgtacaaccaaatatcctcgtgagattccaccactcccttggtacagaagtgctattcctcagatggccatggctggttttcttcctttcagtgccatctacatcgagctttactacattttcgctagtgtctggggtcaccggatctaccccatgtacgataccaacatcatcagcatcacaaaaagtatcattatcatcttcatcgaattagatggcaccggtgaagaggagggtgttcaagacaaataatgaaatggcagtggagctggccaaatacacggctgatctttcctccaaattttgcaaagaaagaggagttttcaccgttgttctctccggcggcgacctcatagcctggctctggtctgtttcaagatttatatacataactctcttatcaataatcaataccaatctataattcgtttgattcttctaaaatttataattttcatttttgttttataggaaattgttagaagctccttatattgattcaattgagtggtctaagtggcacatcttttgggtcgacgagagggtttgtgcttgggatcatgcggatagcaactataaactcgcttacgatggttttctctccagggaaacatgtataccgttaaaa

SEQ ID NO: 139656 - DNA, 3461 bp, Arabidopsis thaliana landsberg
atgaagaagctaatagtgaaatcaaatgaaagagagagagaaaaagggataaccttgcaaaaggggtctggtgaggaatggagctcgaaatgtgagaagccatttatataacctgtgggtacagtcattgagaaaatggcaggtgaagctaatcatcatcacaaggagagggggtttggtaggaaaagactctcatcaaaccttttagcttcttctacctaaccttttttgacctttatataaaaaaccttacatcaaagtaaataaacaagcagatgaatatgatggacttattctttgcaacctaaggcccatctaccattaaagctctgaatgtgatgggcttattcattgcaacccaaggcccatctgtcattaaagctctgaatgatatgggcttattctttgcaacccaaggcccatctaccattaaagctctgaatgagatgggcttattcattgcaacccaaggcccatctactattaaagctctgaatgatatgggcttattcattgcaacccaaggcccatacaccattaaagctctgaatgatatgggcttattcattgcaacccatggcccatctaccattaaagctctaaaaaggtaaaacccaacaagtttcttcccttgaagaagctctctctatctctccagtctccttccaccttgaatgagtaaagcgagggttctgctaaaaccctcttccctcaccacttgcttaaccagagccaaggccttcttctcctctgtttctcagtcacgctctatctctcatcagatggagatgggtccttccgattcggagcgttactgttatgatccggtactgcgatggaatcctgaagttgaagactacttcactaaagcttatggacccgatcactttgctcgcatttcaaaggctctcacgtacttttctatcattctcatctacttctgaagcaacattgccctcctttaggcgcatttagctggattcgctttgccttattgcttattcattctctaatctcctaaatcgaattattatttaattgcattttccccaatgttagcttctccttcacatgtttcagttgtagtctgccatcgtaactaaattaacaaactttctcacatttttcttgcgtctgctctagttattgttgctacattttgctcgactctatatatattttgtttttgttccatattaggcgcccatcttcatactcctgcattagggtgaacactgttaaaacgacgagtgatgcggttatcgaaaagcttacgaaaatttttaacgactcggaggagggcttgaagctagtacaaccagatggaagtagtcccgtcaccaagtgtcagatacctggtttggattatgttgtctttgtcaatggttcaggcccacataagatagaatatgactctggtcttgaaaaccctccaaaggaggtactagtgagcaggaagtgtgctgaagcagttctcagaggagcccaggtaatcttgacgctctctcagtgaaactttagtggctagtcacattgatacttaaaattatgcgatcttaaagtattccattgggagggtttaagcttctatcctgtcactatgctgctgggagttgggttggaatatgaatccctatcttggttgtatttcgttatagtttttgacaatctagctgagaaactccgggcttttaagtgaacaaatatgtactaatttctcttatgggtctttggtaggtctatgtgccaggtgtactggcttgcactgcccatgttgagaaaggagatgcggttgctgtctgtgttgctatggaacaacctggtgatgaaggtgactggagtgttaatatgactcgtgggaccactctccaggggctgccaacaggcaagaatcagaaatgtttcttttgctttcttctctataaaataagtgcaggaacctatcatatgattgaccattactttgtttcacagtaactgaaacccgaagaataggtctttgatttattaagcgcttcacgtgttaagttgtttattgatcaaaggtgctattatttgagtaataaattatggcagccaaaagagtcaaacagtatactcggtggaatgcgttcaaattttaaagagtagttttcctcaataatccagtcgtattagataagaaatctcaacagtattttttcttgaaagtgttatattatccataagttttaggggtgccaactacgaaacttgtgaaatgtttttaactttaacagttgaaatgttattgtagatccttactatcgtgaacgcagtgcactatatatcggcatgggaacagctatgttgtcaagggctgggatgtttcgtgttcctaatggaattgcggtggatttgaaccatagagttttcagattgccttctttacatagtaagattcttctttgtacttcagcttacaatttatgactcttagtatcttatttcatcatggggtatttctcatacattttcgttttcgctccttagatatccttgagggggaaatatttcttcaaaacctgccaagtattattgttgctcatgctcttggtaagttatgttaattttcggcctacagtttgcttatacattcaccccttttatgatatagtttacatatatccataattcaaatatagtagatcctagatatcgatgggaaagccacagtattacaaaactgatgagatcctaaattcttatcttgcttgcacagatcctcaaaaaggggagagaatattagatatgtgtgcagcacctggagggaagactactgcaattgctatacttatgaatgatgagggagagatagtggcagcagatagatctcataacaaggtacagtttcttatgattaagtaatgcttattgaaacaggcatgatttctgttgggtttacttgcttgccaaatttacattatatgcgtagaacacaaaacaaaatttctggttgggaatgcaaaatcacatgctctaattagtttgtttactgttttccaaaacgcaggtgctggttgtccagaacttgtctgctgaaatgggttttacctgcataacaacatgtaaattagatgcactaaaatctgtctgtcttccgaccatactcaatgagtccacaatattaattaacggtgataatagtagttccatgaccagccattctgaattatcatcaaacgaggaaatgacatctgttacttctagaagatccgaggctgacaaatcatgtgagaaaaatggtaagtaagctactctctcaaagtgtttggtttagttgtttttttaccgaaatggtggcctctttgtttactaggtaaaagtacctcaacaaacttgccatgtttgcattgtcctggcccctttgtggacaagggaattagttgtctctttggcatcaatcaaatacacacctagggctttactataatggcatctgt

SEQ ID NO: 139657 - DNA, 6306 bp, Arabidopsis thaliana landsberg
  unsure (1)..(6306): unsure at all n locations
atggaatcgggttcagagaaaaagttccctctcaatgcaaaagactacaagttatgggaagaaattggagatggtgtcagtgcgactgtgcatagagctttgtgtataccgcttaatgtggtagttgctatcaaggttcttgatctggaaaagtgcaacaacgatctggtaggaacttttattctgaattatgaaagaacaacttccttattcctagtctctagctatttcctggagttacatcaaagatagaagtttagttttctcttacttttgttttcctgcttcatgctttactaatagcgagtccaattgtagtttaattgcctttgaaagtagagaactccagatcagtctgtcaaattgtagttgcatgtttctatcttatcttctctttttatttttattttcatgttaaagttttacgagcttaagctagatgtaaagattcagatgcagttttgaacaccatggaattcttgtctctgttaatctgaatgaataggaactgaattgcttgtaggatgggatccggagagaggtgcaaacaatgagtctgatcaaccatccaaatgtgttgcaagctcattgctcatttaccaccggacaccagctttgggttgtgatgccttacatggctggaggatcttgtctccatataattaagtcttcctatccagatggatttgaggaacctgttatcgctactttacttcgtgagactctgaaagctcttgtatatcttcatgctcatgggcatatccacagggatgtgaaggtatctacgtgcattatctcccttttagtatagtactttcctcaattatatctggatgaaggccgttttggtttattgccctcccctattgagtgttgggaatgtgttatcatttttatcaatacacatggcttccttggcaggctggaaacattttattggattccaatggtgccgttaagttagcagactttggagtatcagcttgcatgtttgatacgggagatagacaacgttccagaaatacatttgttggcactccatgctggtacttctttcagcattagttatgcgatgttctctgggcatatgcagatacgtcttagacaaaatttctgattaatacttgtttctccacaggatggctcctgaagtcatgcagcaactacatggatatgatttcaagtaagctgatactaataaaattctaaattctgcatttacacttaaagatcacttccccaccatgttacgcaggtgttttgtctaatatatttctctgtcacagagcagatgtatggtcatttggaataacagcacttgaattggcacatggtcatgccccattttccaaatatccgccaatgaaggtaaagttatgatgatgtcatttgatctgtattgatctttactgctctatgctactcaatttgtgtattttcctttactggtaatcattgataggttttgctgatgaccttacaaaatgcacctcctggacttgactacgagagagacaaaagattctcgaaagtgcgtgagtggtcacaatttggttgtatcatatagcttattgtgttttctttctaccttaattgttgccttgccttaacaggccttcaaggaaatggtgggtacatgcctggtgaaggacccaaagaagcgtccaacttcagaaaagcttttgaaacaccctttcttcaaacatgcacgtccagctgattacctggttaaaacaattctaaatggtcttcctccattaggtgatcgctatagacaaataaaggtcttaagcccatcctctgaacttattctgtgtcttgctgggaagaaaattactgaaaaatcttgattgatatgtgaattctttgtttcagtcgaaggaagctgatctcctaatgcaaaacaaatctgaatatgaagcgcacttatcacaggcaaggatttcaaccttctgcttgatagtaccctgcaatatgtctttaagctgcaaattttttagcctgagaattgcaagaaatatcttctggtattgtagtttgattgtgtgtttgaattattttttacatctaactgagacttcctgtttctctgcagcaagagtatataaggggaataagcgcttggaatttcaatctcgaggacctaaaaactcaagctgcccttgtaagttaatagttttctaatttagttaattataaagggtaggtaactaatattgttagccttatagatttcagatgatgatacttcacatgctgaagagcccgatttcaaccaaaagcaatgtgaaagacaggatgaatctgctctttcccctgaaagggctagcagctcagcaacagctcctagtcaagatgtattatttaaaacgattctctatactcttatctacctgcttttgggaatctttataaagttttaagtgtggtcttgtcaactcaacttatcttttttttgtttcctttttcttttcaggacgaactgaacgatattcatgatttagagagttctttcgcctcatttccaatcaaacctcttcaagcactaaagtacatcacattatttaaacctccactatctaactcatatatatggataatatcaaattgaaactgtgtaaatgtttctgaattttaaggattgaacttacatgtgctatgatgcagaggctgctttgatatcagtgaggacgaggataatgcaactactcctgattggaaagatgctaatgtaaattctggacaacagcttttaacaaaggcttccattggatctttggccgaaaccacgaaagaagaggacactgcagcacaaaacacttctttaccacgtcatgtcatttctgaacagaaaaaatatttgagcggttcaattataccagagagtactttctctccaaaaagaatcacatctgatgctgataggttagcattctcagtgctttatgttagcgtttctacctatctcaacatgcttcgttcacatataagcttgtactctatgcacttgaatgatgagttaattttaaaagccacctgactgatttctgcagggagtttcaacagcgtagatatcaaacagagcggagctacagcggatcattataccgcaccaagagagattccggtaaccctccacagtaacctactcatttgtatacatgtaatttgtatacagtcttcaatttaaatatgtttttatgcagtggacgagacgtcagaagtcccgcatgtggagcacaagggacggtttaaggtcacatcagcagatctgagtcccaaggtataaaaagtaccgcattttataaccttcagtttcttactaatcttcattgaagctatatggtatttccagagaaatgatagatgcttgaaagggcaatgtgcggaatagttcaaattgtgtttttgaaaactgaaaatgtgtttctgcttttggtacaattagggatctacaaactctacattcacaccatttagtggtggtacaagcagccctagttgcctcaatgctacaaccgcctcaatcctcccatcaattcagtcgattttgcagcaaaatgctatgcaacgggtatattttaaaccataaggaatattactttaaagtcgttagttaaatactcttctcttggcaggaagagattttgagactaatcaaatacttggagcaaacctctggtactataatcctcttcacctacagattgattttctgtaggatcttatattttccttattgttgaagaactcaacagaaatgttctgatattgtacgttttgtcccatatcatagccaagcaacctggatcgcctgagacgaacgtcgatgacctattgcaggtaaaagaagaaggaaaagaaagaaaattgttttcaaatttttcatcgaatcaaaaatggtaatcatatgtaatcttggtatattcactaacccgaatttgatatcatatttttatgtagacgcctcctgcaacctcacgagagagagaacttcagtctcaagtcatgctactacaacaaaggtacatacatatatccatctctttctttcaccaagatcctgattactaatcatgaaattaaatacggaatgtctcaagctaaaacgcatcttgttcttacttaacatcaacattgaattactttttttcttttcatctttgatcttgaagcttttccagcctaacagaagaactaaagaaacagaagcagaaaaatgggcaggtttgtcttttctcatatgagataatgggtgaacctcatttactatcaatcgatttttgagatcttataaacatgtacacagtaatgaaatagattttgaggtacaagccttcacattttcatcgtatgcctaaatggaaatctttttcttataatctgcagttggagaatcagttgaacgcattaacacacagaaatgattgagtctcaaaagccatcgagacaaggctgagagatacaactggggatcttgagttaaaaaaacacaaaattccctttcaaggcaaaaagaagaaatagagaagatttgtgtgctttatatttctattgggtgtaatttgtttgacaggtttatattatgtgacaactactacagtgattttcttatttttggggaagttttccccactttccttttttacttatttgtgttttatgatatgctatgtaaacaaaatactattgtttaattatgtttctgtgtgaaaaaaatgtgtacttgttgttaacttttatctcaaaaacaatgttttcagtataaacaagaaaagattccacaactccatgctaattatatcaaccaagactaaaacataaaacatcttctcgttctccttttaacatggacaacaatatgtattaccaaaggcgattctcaatcactgtcgctactatttccttcaacgtctcctacaaaaaggacacacacagaggtatcattgatttcttgcatacttttcagaatcagataattttttataagaaaatgtagagtaccgaagaatgatctttgagaccaagtgagagaaccagaggcttcgagggaacaatagaactgaagaattcaaaagagattgcataaattataacagtttgatcactttctagtgttccatcttaatcagacaatagaaaaacaaagaaatggaggagaagaagcaaagattcaagaatttgaaggtgaaagagagaccttatgtgttcaatgagtcttcgagcagttgctgtcagcattggcttcaagaaacataaatttcagtacgactttgtatgaattagctatatgaaattatgaatgtgtactatgataagatttttacctcgtctcgctttccgaatatcactgaaacactaaatgttggttcaacagacatcccttcttccttcctgtcaacaagtaacactcgtttttcaaacaaatataacttgatcttcttaaccaatatagattaccgctaaagtgatagacctaaagaagcaagaacaagcaattttcattcctcagggatatcttagaagcatgaacaatacctaattatatcncagncaaaagatatacaaagaccaacacaatttaggttttctcagacagaatgaatcaagaccactcgagatcattccttagaagaagcatagccaataacaacattaagcatacctcttcaaaagaaaaagaaaaccagtagaatgatgaacagttacatatatttatgtaatcagagaccttgcgtgcaatatagttcccatggcaccaatctgtgttgctatgatctgaaacaaagttatgtaaaggttcagagagacaaaactatgactacaagcatcaaaacaagtaatatctaacacagaaagacactcacaaggatatgatcttcatagctgcagatcacaatctctgtcttgtttccctttcacacaaaattttaaacaaacactagaaattaatcgatctgattatcttcacaacataaaattgtttaacacaaatggaattttcaaagcacagtagacattatttggaccaatcaaaacgagattttctattaagaaccgaccaaaaccaattgagaaaaatcccatggaagtaattcgagagattctcaaattaccttactttcaaacgagacctttctatggcgcacaggaaaattagtgtccaagctttccattctcagtctttgctactctcttttatgcttttgcttttcttcttctccttattctttttttacctcagaactccgacgagagaagagaaccggaaacgccttcgtctccactcaaacggcatcgttgtga

SEQ ID NO: 139658 - DNA, 3610 bp, Arabidopsis thaliana landsberg
gagagctcagtccagtaagatggagatcgagcgagaatcgaatttgggatctgcgagtgtgctgatgcagtcgaagggtaggcttcacaacttcaggtcgaggagcttttcgagatccagactcgctatcgaaggatcatagccaatagccatagctctttgttacagtcatctccgtctcgaatttcttctctattcatagatttcattaccctcgtgaaaaaatcgtctcttttttgtttcctagtgtgttctcaaggataatggcttcgtatggtgagtgactagtttcttatacaacgttttctggtgtgaagcaatatggacactgtgttaggattctttaaggcttcgatgatgtagtgcagatttaaaaattgggactttaccataaagcgtgtggattgatttgatattggtaatgggtttattgatttattttgatgaattgaatctttttaatggttgcaggcgaggagcgtgaaatccaaaagaattactggaaagagcattcagtgggattgagtgttgaagctatgatgcttgattccaaagcttctgacctcgacaaagaagaacgtcctgaggtttatttcgactcacccactataaagttatcatctttgctatatatagatcattttgagatatgtatgccttgatgagttgaatctttgctgtcctttattgtgttatggacttatgaaggaaagcttctaaaggcttaaattatgtgtgtggttgtgtcagatacttgcgtttctttcacctattgaagggacaacagtgctagagtttggtctggaattggtcgttttactattgaattagctcagaaggcggcccaggtcattgcgggttacttcattgaaagtgttatcaaaaaggttgttagttcacgtccatgcttgttctttctagctacttataagacttgtatttttctcgagttttgtttgatttttttctctaatgagagtttcatctccagaatgagaacattaacggtcactacaagaacgtcaaatttctgtgcgctgatgtcacatcaccaaatatgaactttccaaatgagtctatggatctgatattctccaactggctgctaatgtatctctctgatcaagaggtagccatattatttattactgagggaaccacttttaaactgtacacacttagactaatcgcttatatcccttggacaaattttcatgtcttttcatcaaattgcaggttgaagatttggcgaaaaagatgttacaatggacaaaggttggcgggtatattttctttcgggagtcttgtttccatcagtctggtgataacaagcggaagtacaacccaacacactaccgtgaacctaaattttacacaaaggtgtgctacctataaatccctccactcttctgtttctagacgacaattatttgaactctggtacatgaattcctctcagcttttcaaagaatgccatatgaatgacgaagatgggaattcgtatgaactctctttggttagctgtaaatgcattggagcttatgtgagaaacaaaaagaaccagaaccaggtaattggcctcttcatcttttagccaccctttgatggtatctcttataatgtttggactcatatttttcgaaaatttcagatatgctggctttggcagaaagtcagttcggataatgataggggcttccaacgcttcttggacaatgtccagtataagtctagtggtatcttacgctatgagcgtgtctttggagaagggtttgttagcacagggggactcggtatgctctttagtcatcgagtttgtatcaactttgcagtattgatggttctgtttttgaatttaagttatacagaaccattaagtgaagctatcttttcttcttattatacttgtttcttttgatatagagacaacaaaggaatttgtggatatgctggatctgaaacctggccaaaaagttctagacgttgggtgcggaataggaggaggggacttctacatggctgagaactttgacgtggatgttgtgggcattgatctatctgtaaacatgatctcttttgcgcttgaacacgcaataggactcaaatgctctgtagaattcgaagtagctgattgcaccaagaaggagtatcctgataacacctttgatgttatttatagcagagacaccattctacatatccaagtataagcttccgctatttcttcttcccttatgactttaatttggtatccattttgtaatccctggtcttactctcaggacaagccagcattgttcagaacattctacaaatggttaaagcagaaagggaaagttctcatcactgattactgcagaagccccaaaaccccatctccaaactttgcaatctacatcaagaaacgaggttatgatcttcatgatgtacaagcatacggtcaggtatacagagatagaacccgtctcctcctatacttatttaaaaatcaccaaaagtcatctaaactcatatgattcaacagatgctgagagatgctgctttcgaggaggtaatcgcggaggatagaaccgatcaggtaagaaacgattttctttcgagaatgactcatatgctttaaaaaagatgttgaaaccaatatgctgtttgccttttaatcatcagttcatgaaagtcctgaaacgggaactggatgcagtggagaaggagaaggaagaattcatcagtgacttctcgaaagaggattacgaggatattataggcgggtggaagtcaaagctacttaggagctcaagtggtgagcagaagtggggtttgttcatcgccaagagaaactgattatggcatttactataagttggaaataaatttgggtatgtatgtagatcatcaaaacccagtaccctgctattatctctacaagctatatatatgtggctgtgaggttcctttaatgtctccattttacagcatatccagtttggtatttaatatatgtgatattttgaaatcagtttgatcaagttatacatagaaaagctcgagctcgatcaccattattgaatagaaccaaaagcaatgagccaaggtgatagccctgttattttactagtcgtcagcaactgcgacttgttatattgttcttgatagtcgatgtgttgttgttttggtaaatagcttgctacatattttttttatttttttatttgtatgttattcttttttcatttttttttcatgttattacctagttattctataaatcttcttttattgtcttttaatgtttcaatcaaatataaatatatttatatatatacacatgtatgtaaaaatattcgtaaacttaaataaataaaatgtacatgtgcatgccaatattacctaggtattattctataaatatttttatttagtctctcaacttttcaataaaataaatatattctactacaaaaacgaattaatttatcaaatatcatatacttttctataaataaaacgatttataaaatcaactataaatattttactataaaaagaattaagtttataaaattatatatagagtttctataaaatatatttacaagtaagaaattcatatact

SEQ ID NO: 139659 - DNA, 901 bp, Arabidopsis thaliana landsberg
ctttctcctccaatttcgtcgcacacaggaaaacaaaatgcttctcaaagctgcttctactttctctctattgaacattcatggagagaagaaagacatctctcctctcttctcctcctcctcctccatttcgtctccggtttcttctggaaaatccggcaatctctctttccctcttcgtgcttccaagagttcaaccactaccacaagcacgttgagcggcgttgtgttcgagcctttcgaagaggttaagaaagagatggatctagttccatctggtcaacagctttctcttgctcgtcatttgtactcccctgagtgcgaagccgccgtcaatgagcagatcaagtacgtttttccgtcttggattgaaacattttagtgattgttatcatggatttgaaaattgttattgtaaatctgttgattgagtcaatttttgcttgaatcctatatagatgagattggcttttattttgagtctctcatgaatctggattttcgtttgatgcagtgttgagtataacgtgtcgtatgtgtatcacgctttgtatgcatatttcgatcgtgacaacgttgccctcaagggtctcgccaagtgagtttttctctggtattgaaatctctgtgctgatattcgttctgtgtgatgatgaattatctgttgtttggtgttttttgctgaatcaggtttttcaaggaatcgagtgtggaagaacgagagcacgctgagctgttgatggagtatcaggtctttgactaatgaattcattttgttatcattcataagccttatgatcatttgagctaagtttgtaacatcttacatttttggttttcttgaactacagaacaaacgtggtgggagggtcaagttacagcccatggtggtgcctcagtc

SEQ ID NO: 139660 - DNA, 1002 bp, Arabidopsis thaliana landsberg
ctcactctctcactgtcggcaaactaacttattcacttttccggcactgattctgctcgggaaaaacaactccggcacaaaatgcagctttttccagtcatgttagccacactctgcattgtcctgcagcttctcattggctcgtcagctttggctaccacaaatcgccacgtgtcaaactctcattggcttcccgcagtagctacatggtacggaagccccaacggtgacggcagcgacggtaattataagtctataacacataattaaccacacttcacagtctagtgattcctagttaaacactaacattaacttatataccgcaattgtgtaggaggagcgtgtggttacggtacgttggtggatgtgaagccgttacatgcgagggttggagcggtgaatccaattctcttcaaaaatggtgaaggttgcggagcttgttacaaggttcgatgcttggacaagagcatttgttcccggagagccgttaccgtcataattaccgatgagtgtcccggctgctctacaaccagcactcactttgacctcagtggtgccgtctttggccggttagctattgccggagagtcagggcctctccgtaaccgtggactaatcccagtcatttatcgccggtacgtatattaatattattctcattattcttgtcatttattaatgtttatgctctttcaataactaactcgtgacagtgcacgagcatatagaaaaataggaattatttaggtaagaggctaaaacagagttaatataattattagatttattggaatgggtgtgaatgtattaaacaaaagaggtaactttaacggcgatctcgttttgtatggtcccaaccatttcttgaccattgaccatttgatctcttttttctcactgatataattttaccttctttctttcttttgcataataaaaaaaggactgcatgcaaatatagagggaaaaacatagcattccatgtgaacgaaggatcaa

SEQ ID NO: 139661 - DNA, 1805 bp, Arabidopsis thaliana landsberg
gctggaaaactcccaatatgtgtgttgttgcaaccattcaatgtttcgaatcttaaatgtacgtattgaaaatcatcaacaaaaactctttaatatcttgattaacaatttattatgatactacaataacaagcatgtgagttttgacaactttgctcaactcaaaacacttaaaaataagaaaacaaaacatttgcatttcattaacagataatatatttgacgaaaacttttttaaaacaatatattacgaccactaacacacggatccgaagtatacggcttatgccatgatcatattttgaaatgctgttcattcatatataaaaataaaactattaaaaagcaatccagctaatactgaatcaaaaactcaaaaaagtaatgttattggtagatcaattttataaagtcaataaaaatatatataacacgacaaaaatggccttattgataattaataaatatttaatgttgcaatttgcacgatgatgagctggttttgtcggtaaagtcaatgactattgggtaacactaaaatactgtatatgaccagctcaaagggatagaaagaaaaatgagttagcaaggaagtatatcacccacccacacatgacaaaaaagtacaaacttgtgccttctctctgatattcaatctttcgacttcttcacccatcaaaaatggagccgatcacggaccaaccaatggatcaaccaaagcaaaaagtgaagattccctgcaatcatccgttagaatacatacaactgaagggtggaggatggcccggatcatatgactatgatataaatacttgcgcaggatgcgatgaagattatggcttctgctactactgcgcaagctgcagttttcgagcacattcggaatgcatcgagtggccagacaccatcgaccacccgagtcactccagacatcctctcaagaaagtctcgcccgggacaattgactatacagatggcaaatgtcatttttgtagagaagaacttgttgatcccatgtatcattgttccttgtgcaacttcagcgtagatgtgaattgttggaggcatccgccacagcgtactatttatcaaccaaagagccacgagcatacattcaccctcatgccgagaaagatcacattcacttgtaacgcatgtgggatgcttggtgattgcaatccttacttttgttttgaatgtggattcatgctgcaaaaaagactgcattgatttgccccgagtgatcaacatcaaccgtcatgaccaccgcatttctcgcacttatcatctcggccacggcgattggggttcatgtggtgtttgtcgtaaagaaatagattggagtcttggagcttactcttgcaagcgttgtcctaattatgctgttcattcaaagtgtgccataagggaagatgtgtggaatggagaagaactagaagatgtgcctgaagaagaagaagaaatcgaagatccatacaaggtagtaaatgataaggaaatcattcatttttgtcatgaagaacataatctaagacttggtggtgatgatgatgttaccggttatgaaaagatgctgtgcgacgcttgcatcactcccatcagttctgatccattcttcaaatgtgtgcaatgcgagttcttccttcataaagtatgtgctagtcttccacggaggaaacgaaatatcatgcacaccgagaagcttgatctacaagttacgaaggctggcgagtataataagtgtatatcttgtagaaaaatatttgatggcttccggtaactgttcaggtttgaaaagtttgatg

SEQ ID NO: 139662 - DNA, 2667 bp, Arabidopsis thaliana landsberg
gtctatgatatggcacagatattcaactcaaagtttacacatttatcgccggtatggttcgacttgaagaggtatattgtatacatttgttaatgagttctaagttcctgcaattatctcatggtttccacaaaatagtagtgacatttttggtttctgtttctggtagccaagggtctggattggttttggaagggagacataatgctgataagggatggattcaagagcttcggtcaagaggcaatgcactggtagtttaaccaacacacctatttttcttccttctctgaattggccagagatcggtacccggaaaatgctgatgtttaacttgtttttccttctttgattgtctggacttttttccccttttatgtagatattaccaagagttgttctagaagcaattcctggggagatgcttaacaaaaaaaaactaagagagaaagctatcagtcttattgtcacagagtgcaagtaagggtctcccaaagctctacaattcctgtatatttcatgctctgaaaaggatgaatttctttacattagagcttgtgaattttaacacttaccttgtcatcatgtttgccttgaactctagggaaatggaatacaatggtatcgtgttagagtcttggtcaaggtgggcagcttatggcgttttgcatgaccctgatttgcggaaaatggtatgccctgtaatctcttccaggccgctgcgattttttttccacataatgcatcatgtcagcaagcttttttataaatcttctaggcactgaaattcgtaaaacaacttggagacgctcttcactcaacgagctcaccaagaaacaaccagcaacatatgcagttcatgtatgtcgttggtccgcctcgttcagagaagctccaaatgtacgattttgggccagaagatcttcaattcttgaaagattcggttgatgggttctctcttatgacctatgatttctcaaatccccagaaccctggccccaatgctcctgtcaagtggatagatttaactctcaagctcctgcttgggtcatccaacaacatagactcaaacatagccaggaaggttcttcttggtatcaacttttacggcaacgattttgtaatctctggaggtatataaagcatccaagcttatataagcaacttgttctcttcccgcctttctttcaaaaccaactgacataaactgttttcttttgcgcaagattcaggaggtggaggagcaatcaccggaagggattacctcgcattactccagaaacacaagccaactttccgttgggataaagagagcggcgaacatcttttcatgtatagagatgataagaacatcaagcatgctgttttctatcctacattgatgtcaatccttctacggcttgagaatgctcgtctctggggaatcggcatttcaatctgggaaatcggacaagggttagattatttctttgatctattgtaagttccatacattgcatcatgttatgttttcttaatgttatacttgatcctctttgttcacttaaatcaaatgctgaggaaccttttgtatctagtctagtctctgttctttgtgttctagataaaggacattttggtaaatatgcagaggcttctcttgaagcatcttcaatattctctggccacacatttgacatgcaatttcggactaagtaagtcactatgctttagtcctctacaccaaaacatgatcaagaggtatctcatccgaatattccacgtgtcaagcaagcggaggctaggattgattacacagtccacgtcagctctctagaaacggctcaatgctcttgtccttgacacttttcttccacttcttcttcatcatctttaatcgttgggaaaagtttgatgatacggagtggacaattcttggtgtagaagtagaatctgagagagagagagtcatggaagctctgaaaaccgcaacttttagccctatgtcggtgttatccgagaaaagatcagaaccacgaaagcctttctcgctccctaacctctttccaccaaaatcacagagaccaatctcccaagaaagcttcttgaagagattcaatggtggattggctcttctaacttctgttctaagcagtgcaacagctcctgctaaatccctgacgtacgaggaagctctgcaacaatctatgaccacttcttcatcttttgattcggatggtctgattgaagggatatccaattttgtcacagacaatcctttggttattgccggtggagttgctgcattggctgttccatttgttctgtctcaggttctgaacaagaagcccaaatcatggggagttgagtctgctaagaatgcttataccaagttgggtactgatgataatgctcagttgcttgacataagagctactgctgatttcagacaagtgggcagtcctaatattaagggtttgggtaaaaaagcggtttctactgtttataacggtgaagacaagcctggtttcctgaagaagctttctttgaagtttaaagatcctgagaacaccacattatacattctggacaagtaaggctcttggaatcttacaaaatatattgaaagttataatattgaggcttatagttacattgagtagcttatattgtctgatcactgaataa

SEQ ID NO: 139663 - DNA, 2843 bp, Arabidopsis thaliana landsberg
  unsure (1)..(2843): unsure at all n locations
agagagctgtctctcttgagagaaactttgaaagagaagagagacgtgtacgtgtcacgttttggatgttttgtttgacaaaactgaaaaaaaaaaaacgcctgaaggaaaatactttgtcaatttctatttttcgcgatactctctcgaaaccaaacgacaatgaaaacgctggtgatggcgacggagccggtcgtttgctccgacgattgcgggttgaatttaagcagtcgatatgttgtatgagcagtggttgcgcaagagcaatggttgggccggattcatccttctcgaaggcggtggtcacgtcgattgtaagttcttctagcctagccctttgaggttctaggtttgtgttaattgatgatgggtttgagtagatgtgttaattgatgatggatttgtgttaatttgtgttgaatctcactggatttgtcatatatgttcatgtcacgtacatctcttggaagaagatttaattagtgtttattcaagttagtattcattgtctatcgcagatttaactagtgtttcttcaagtttttctagcttgatgcacgtattttctcctaggtgtgtgttttataggaaattgatatccggcacacttaagagattcctctttttcttgtttgatgtatgaactagagtgtgttactaatttaagcattgttgtgcagtgagattacggcagaaggaagacgggttacactttataatggttacctgattatagtggctttaaaattgtaagtcaaaaacacactttaaaattttctaacttctggatatagtggcttttgcttagagtttgttgttcaaccgatggaaattgttgtcttgatatctgctttagcttgtaaaatgggtctttgatgatgtaagtaactcgtgtctagtttccactttccagtgatttgagcttcaacaagctacatggaccaaggtttgacagatggcaattagccatgacaatcgtgtaaggttggtagttacagaaatcttgaaaagagttcatagttgaatgattttttctactatctcattttcttatgattttgtttaggttcaaagatgaaggcataccattatcctctgaatatggttatggaagaanagctagaccttctttagatagagttttcaagaatgtaaaatggggattcaagaagccattgagtttcccttcacataaggatcctgaccacaaggaaacatctagtgttactcggaagaacatcataaacccgcaggattcgtttctccagaactggaacaaaatatttttatttgcttgtgtggttgctttggcgattgatccattgtttttctacattcccattgtcgatagcgcaaggcactgtcttactttggactcaaagttggagatagctgcgagtttgcttcgtacgctcatcgatgccttttacattattcacattgtgtttcagttcaggacagcttacatcgctccttcttcgcgggtttttggaagaggtgaactggtagatgatgctaaggcaatagccttaaagtatctctcttcttacttcatcattgatctactctctatccttcctctcccacaggttaatgactagtttgattacttgttcaaaatgtcaatgatcatttctttttgaatcctctggcttcttaacttttgcagatagtagttttagccgttattccgagcgtcaaccagccagtctctttgctaacaaaagactaccttaaattttccataattgctcaatatgttcctcggattctccgtatgtatccgctttacactgaagtgacaagaacatctggcattgttactgaaacagcatgggctggagctgcttggaacctctctctctatatgttagccagtcatgtgagtttcggatcttttgatgactgaatctttatacatgtaaatgcatattaaaggttatatgttaaacttacttattcaggtgtttggagctttatggtacttaatctcagtagaacgagaagacagatgctggcaagaggcatgcgagaagacaaaaggttgtaatatgaaattcctctactgtgaaaacgatcgtaacgttagcaacaatttcctgaccacttcttgcccatttctcgaccctggtgatataacaaactcaaccatcttcaactttggcatcttcactgatgctcttaagagtggcgttgttgaatcacatgatttctggaagaaattcttctactgcttctggtggggtcttcgaaatctgaggtttgtaagacacacataaaactgttgacaataactaactagctatatttggagattttaagccgtgaaatgacctgtttatatttgcatcttaagcatatatatctgtcacaatttaaacaagtcatcattctcacaagttgcttttgttgttgcagtgcattgggacagaatctccaaactagcaaattcgttggtgaaatcatatttgctatatcaatctgcatatctggactagtcttatttgctctacttatcggcaatatgcaggtattagcctcaaataatcgcttctcattttctggacttgttccataatgctacatataagttactcaggacacgcatgtaatttttgtttgctgttgcagaaatatttggagtcaacaacagttcgagaagaggaaatgagggtgagaaagagagatgcagagcagtggatgtctcatagaatgttacctgaagacctgaggaagcgtatcagaagatatgaacaatatagatgccccgagacaccccgagttgaagaagaaacccttaatggtaacatacataaagacctcaaaagagatattaaacgcca

SEQ ID NO: 139664 - DNA, 1431 bp, Arabidopsis thaliana landsberg; identical to SEQ ID NO: 3206

SEQ ID NO: 139665 - DNA, 1413 bp, Arabidopsis thaliana landsberg
attctgctacctaggcctacttacccgatgtacgattcccgagcggcttttgccaactcgaggttcgttatttcgacctcctaccggaaaatggttgggatgttgatctagatggagttgaagctcttgcggatgacaaaaccgttgctatacttgttatcaacccttgcaatccatgtgggaatgttttctctcgccaacatcttcaaaaggtgtacacttgcttcttattaatcattcatttgatatagtggaaatggctttgttatggatttgtcttctttatatggtggatgaagattgcagagacggcttgcaagcttggtatacttgtgatcgcagacgaagtctatgaccattttgcctttggggataaaccatttgtgtccatggcagagtttgcagagctagtgcctgttattgtcttaggtgctatatctaaaagatggtttgttcctggatggagacttggttggatggtgactcttgaccctcatggcatcatgaaagattctggggttagtagttacattttgtttagttgattaatatcttgtcaagaatgtatttgtgatcaatctctgtttctttttgtctattagtttgttcagactcttatcaatgttgtcaacatgtcgacggatcctgcaacgtttattcaggtatgcattggtgttgaatcacggctggagtttttcaagaaaaatgattttggttttgttttgtccgaggcagggagcaatgcctgatatcattgggaatacaaaggaagagttcttctcatcaaaacttgaaatggtgaaaaaatgtgcagagatttgttatgaggagcttatgaagattccttgcatcacttgcccctgcaaacccgagggctcaatgttcacgatggtaatgaatcgacatgaaccagattactcattggttaacctcaagctcaagctcagaggctaatccatttgttggtgcaggtgaagttaaacttttcactactcgaagatatcagtgatgatttggacttctgctccaagctggctaaagaggaatctatgatcatcctaccaggtaatattatatagttttgttaacaagttgacagctaggggtcgttaaaataacagataatggatgagtttcttgtaggtcaagctgttgggcttaagaactggctacgtatcacctttgcagttgagcttgagcttctcatagaagggttttccaggctaaagaactttactgagagacactccaagaatcagccatgagacgtattaagactctctctctctttctccacagccaaagcaaattagattttgctgtgaggctattttacatactattgttggctttataaaatatttgcacaaacaatgaatcactaatgccaagaagcagccatgaccattcggt

SEQ ID NO: 139666 - DNA, 2199 bp, Arabidopsis thaliana landsberg; identical to SEQ ID NO: 28928

SEQ ID NO: 139667 - DNA, 2007 bp, Arabidopsis thaliana landsberg
tactcagtcgttgtatggttgctgatgtctttatggatcgaattatatcagagggcttctgcagcaagcgaaatgggacaaagaaataggaatgttgatttagaaatggagcagcagcaatctcaagcttctctccaagcagagccttgcatccttttaggcagctttccgcaacaaccggataataataatatgcctgctatggttgcacacgttcctaatttagaacctcattctcttcaagacccaacttatgacaactcggccatgttctacgggcttcctcagtatcatcatcatcctcaccagcgtgttccaacgaatttctatgttccctatgtggcatttcaggctcctccgggtcagttaccatcttcaagcagtcacggtgtagttggtgtaagtcctgatcatgaatacgaaagaaatgctcattttatggatcacacaagagggacatacaagcgaaagaacgctgaaggaatacccggacaacctcaatatttaagtaccttagcagctccatttaacacaccggagacaatagccccttttggaggcgctaggaacagaccaggagctgttacagtgaaccctgttcttccttctcatgctccaaacaacttcattcaaggaaactatgcaggtcatcatccttttccacctcctggctcaatctggtatgatcaccaccacggcagatctgatggctcacattcgttctggcccacaccgtacatgcacggtacatactaacacacaatcgctttttaaagttttgagccttgtaatcttatttatctatctttgaatgacctttcaggtagtaacattttcgctggttccatagagtctagtagcagaaaccctacatcatttatgtatccttctcagttaaacccgagggaccactattatagtcatcatcaccacccggcacctcctcctgtacaaggcatgagaggccagaatgccacattatatccccacacagcttcttctgcttcatacagagttcctccagggagttttactcctcagaacacaatgaatagtggtcccttggggtcagagatgggctcgagtcacatgggtccggttcaaccaaccgggtttcggatataccagcatcatcagcgagatgattctgtacctgtagcaactcttagacaacaccgtggaggagttcctcggcttagagtgatgcctgatgatgtaactttctttcctcaaattttctgctccatcttttttcatttttgtcgttgctcaaggttttgtttcttttggttctctttcaatgtgtgtaggaagttgcgcttttggagtttggagacttccttggtggttctggaaataatcacattgatcatcatcgagatatgcgattggacatcgaggaaatgtcttacgaggtgagcccttcattactctttaccgatgtagttatcagatttaggagctaaaagttgctgtcttttattatcttttccctgagaagatcttgggtttcgcatgagcagagaattcacaatgcaattttctgtgatcatagttaggattttgtttatctgatttgtcactggggtttgaacaggagcttcttgctttgagtgagcgaattggaacagtaaacactgggttgccggaggaagatgttaagaatcatttgaaaacaagaacatgttctggaatcaactttgaaaaagagtcgtcgtccccacgaactaaagatttagaaaccgaaccgtgcactatatgtcaggtaaaaaaactagccaaaatgatcaaagctctgtaatgggctgcacaggcttggaattagagctctgaacaactctctcattatctttacaggaaagcttcaagatcgaagaaaagattgcgactttggattgcgggcacgagtatcatgcagagtgcttggagaaatggctgattgtgaagaacgtttgctcaatctgtaaatcataggcactggtcatggagaagagaaaggtataggaa

SEQ ID NO: 139668 - DNA, 262 bp, Arabidopsis thaliana landsberg
gccttgccgcgattactgtaggaggacaaccctcaggtgcatgttgtgcaaagcttacagagcaacagtcatgcctctgtggtttcgctaagaaccctgcgttcgcacagtacattagctctccaaacgctcgcaaagtgctccttgcttgcaatgttgcttatcccacttgttgaaacttatctagagattttataaataaataaacgaaaggaaataaattacattatatcaaacgttatgatacaattcaaccgtttgt

SEQ ID NO: 139669 - DNA, 2455 bp, Arabidopsis thaliana landsberg
gctttgtcttcttcttcgtctaacatcaggagataccatgtctttccaagcttccatggcccagatgttcgtaaaggttttctcagtcatttacactatcactttgcaagcaaaggaatcacgaccttcaaggatcaggagattgagagaggcaatacgattggacctgagctcgtaagtgcaattagagagtccagagtctcgattgtgttgctttcgaaaaagtatgcttcttcgagctggtgtttagatgaactggttgaaatcttaaagtgcaaagaagatcagggccagattgtgatgaccatcttctacgatgttgatccgtcgagtgtacggaaacagaagggagatttcggaagcgcattcgagaaaacttgtcaagggaaaactgaggaggtgaagcagagatggagcaaagctttgactcatgttgcaaacataaaaggagaacattctcttaattggtatgtcatttttttgtttttttttgaatcaattagtgcttttatctttcttaaggaaagctcagttgtgaaatttcttgtaatttagacccaccaaagccatgttgttttttgcttttgctagggctaatgaagcagatatgatccaaaagattgctacagatgtttcaaacaaactgaatgtcataccatcaagggattttgaagggatggtcggacttgaagctcatttgacaaaattgaattctttgctatgtttcgagggcgatgatgtgaagatgattggaatttggggtcctgcgggaatcggtaagtctaccattgctagagctttatacaaccaactctctagtagttttcaacttaaatgttttatggggaacctcaagggaagtcttaagagcatagtgggtgttgatcactattccaagttgagcttgcaaaagcaacttctgtctgagattttgaagcaagagaatatgaagatacatcatttaggcacaatcaaacaatggctacacgatcaaaaagtgctcatcattcttgacgatgtagatgatcttgagcaattagaggttttggctgaagatccttcttggtttggtcctggaagtcggatcatcgtgatcactgaagacaaagatattttggttcaacatggtatcaaggatgtataccatgtgggttttccatccgaggaagaagctcttgagatcttatgtctatctgctttcaaacaaaattctccacaagatggttttgaagaggttgcaaaaagagtagtagagctttgcggtaagcttccattgggccttcgtgttgtgggttcttctttttatggggagagcgaggatgagtggagaattcaattatatggaattgaaactaatcttgataggaaaattgagaatgtcttgagagtgggatatgacaaattgtcggagcgacatcaatctttgtttcttcatattgcatgctttttcaaccataaaagtgttgattatgtgacaaccatgctcgctgacagtactttggatgtcgaaaatgggttaaagaccttagccgctaaatctcttgtgtctactaatggatggataacgatgcactgtctactacaacaattgggtagacaagttgttgttcaacagggtgacccggggaaacgtcagtttttagtagaggccaaagagattcgcgatgtcttggcaaatgaaacagtaagttctaatctatataccctggatattgcctaattttgtttgtgataacagtgtcatcagtcttcttttgcaatattttgtagggtactgaatccgtcataggtatatcgtttgacatttcgaagatcgagacgttatctataagcaagcgagcctttaatagaatgcgtaatctcaaattcttaaatttctataatggaagtgttagcttgttagaggacatggaatatctacctcgtctaaggttactttattggggttcatacccgagaaaaagtcttcctctgacatttaagccagaatgtctcgtcgaactctatatgggattcagcaagttggagaagctatggggaggaatccaggttggtatttgatacttgtgattgtgaatacgtttgtttaccaatgatatttaaccttagtatgatattcctcatttttttgtgtgtttgacatgcagcccctcacaaatctaaagaaaataaatttgggatattcctctaatttgaaagaaatcccaaatctttcgaaagccactaacctcaagacgttgacgcttaccggttgtgagagtttggtggagattccatcctctatttggaatctacagaaactggaaatgctgtatgcgtcaggatgcattaagctacaagttattcccaccaacatcaacttagcatctcttgaggaagtcaacatgagtaattgctcacgtctgagaagttttccagatatatctagtaacattaagcgtctctatgtagcagg

SEQ ID NO: 139670 - DNA, 955 bp, Arabidopsis thaliana landsberg
tcttctctaactcctatctcaacacacatattttcccaaaatttggatcaaaaagttttccgatagaagaaattaaatatgatgagactcctctttgtattcttcatggttcacaccatctttatcccatgcttttcctttgatataccggggaaggatcttcctttaaccctagactattacaagtctacttgtccaaccgtatttgacgtcatcaagaaagaaatggaatgcatagtgaaggaagatcctagaaatgcagccataattattcgtcttcacttccacgactgctttgtccaagtaagtacacatccacacctttcttgaaacacaagacatcatccgccagagaaaattcataactgatatgtcaaacttttactgctatcaaatacttacagggatgtgatggatcggtgttgctagacgagacagaaactctacagggagagaagaaagcttctcccaacataaattcattgaaaggatacaaaattgtcgacagaatcaagaacataatcgaatccgaatgtcctggagttgtttcatgcgctgatcttctcacaattggtgctagagatgctacaatcctggtaagatatacacaaacgaaacatatactctctcaaatctcaatataaatactgtatattgtaagtatcgtatgaattatgaaatgaaataaaattttgatttgtgtttgtgtttgaaggtgggtgggccttactgggatgttcctgtgggaagaaaagattcaaaaaccgcaagctacgagcttgccacaacaaaccttccaactccagaagagggtttaatcagcatcattgctaagttctattctcaaggtctctcggttgaagacatggtcgctctcataggcaagatcaatcctcttaaccaaactaaaccgaaattccttgtaatagaagttaaaaccatatgattgaagata

SEQ ID NO: 139671 - DNA, 7469 bp, Arabidopsis thaliana landsberg
ctgatggggtaatgatcaatggccagggagtaagtactgtttattctatcaccgtcgacaaaggttcaatttaaaaactctagatattacgttagttacaagttacaaaaaaaaaaagattctcacatcacttttcgtggatcaattgataggtaaaacgtacagattcagagtatcaaatgtagggcttcaaacctccctgaatttagaaatattaggtcatcagcttaagctcattgaggtcgaaggaacccacacggtccaaaccatgtacacatcactcgacattcatgttggtcaaacttactctttcttggtcaccatggaccaacctcctcaaaactattccattgtcgtttccacaagatttatcaacgcagaagttgtgatccgagccactctccactactccaactccaaaggtcataagattatcactgcgcgacgacctgatccagatgatgtagaatggtctatcaaacaagcccagtccattaggaccaacctaactgcgtcggggccaaggactaaccctcaaggctcataccattatggtaaaatgaagatttctaggactttaatattggaaagctcagcggctcttgtgaaaagaaagcaacgctatgccataaatggcgtatcgttcgtgccttcggatactccgctgaagcttgcggatcatttcaaaataaaagatgtttttaaagttggaaccatccctgacaagccgagaagaggaggaggaataaggctagacaaagcagtgatgggagcacaccatagagacttccttgaaatcatatttcaaaaccgcgagaagatcgtccaaagctaccacctcgatggatatagtttttgggttgttgggtgagaataattaaagattagctatatctatcgtcctctatatatagtagctagtaataatgcattgcatgcatctgatgtttgtgagtactgtccacaggacggatagaggaacatggtcaaaagcaagcagacgagagtataatcttagggatgctatttctcgctccaccactcaggtacaaatagtttctaactccatatatcttaccaaaaatttttaaaaatcatctcaaaactagtatttggttgttgtaggtatatccagaatcttggacagccgtatatgtggcactggacaatgtggggatgtggaatctaaggagtgaatattgggcgaggcaatacttgggtcaacaattctaccttcgagtttattctccaacacactctcttagagatgaatatcttttgcctaagaatgctttgttgtgtggccgagcctccaataaacacaccactccttaatgactctactcagaccaatcgtcaatggctgatttagggatatgtattttattatattgagttctttattctttataatttcaatagctagatatatgttgcacaattattatatatacttcaaaaattgtaatgtatacccaaatttgatgaaaattttactgttttgtaacggttattgctaagtttgaagttaatttttgtaggcaaatgcaatgttttcatatgaatcaaccaagtaactctaccatatcaccaagcaaaatagtatagtttgaagagagagagtaaattaaaaaaaaaaaaaaaaccatacataacatattagaaacattaatttcgaataaacagactttaacgatgaaataaaaatttaaattattttccaccggtagatgttgaatgtttattggtatagaaagttgttctatttggtcaaagtttttgttgaccttgcaattacaaattacaaggctgtcaatcgaatgaaaaacatggcaatggaaaagatttgctaataatgccaagacaaacaaacgtttatttggaaggttaaaagccttttagagaagaaaaaaaaagagcagagagtcaactaattaagccatgcatgtgaatcaacaccaatccatagcatattctagtgatcagtgacattaatattgtagattactatattaacccgaattcaaagggcattaaataggtactttaatgaattgaattaagaagagtaatataatcaacggcttagattcgttgcgtgaaaaaaccataaccgaaaacagcggaatccacgaaataagtaagccaaacgcaatctagaccgtacgatgtgaatactttaatgacgccagaatactatggacagtgtagatcaggcgaatgggcgtaatacacgtggcgtaaaatcacgaggatagatatggtgcaacgtagttcaggccggtgtggtacgagagagtctgatgatccgacaaggaatacttctagtccacacaatgtcagcctttctttattttctcggtcgcttcgagattctcaattctgctctgtagaaaagatcctgatggttcacttttaatatccaacggttgatataacacaagcgcatgctcctcttatgagaacggccgtgggatataatttaatctcgccgttaaaaaatgtgacgaccgtgagttaacggtttatctgttaccaacctcatacctgtgcctaacggcagaggataacgccgtgagtatggatggatgggagagaaaagaagagagagagtgtgagtgaggaaatgaaaggagtcttttttatttgttatctctcatctctctctctctttctctctgagctttgctttttatcaaacaagcatcatcatcacatccacttccttcttcttcctttctctgtctgtctctttacccaaatgtggactctttgagccgttattagatctctgccgcttcaataatggggagcttatcttctgaggaagacgacgaagtctcttccgagagatgcggaagttacagtcccagcgccgacattagcgagtccgagagttccagcagcttctcctgccaccgcttcgacggcgagggtgcctctagctccatcccttcttcccctcgagttgtcgctggtagaggattttacttcccggccccagtcatgcttccggtgatcggcggcaaagatgtggtctgggatgacaaacaaccagacaacgatttatccggtataaaagtttccaaatttgacctcttttgtaaacattgatgaacactaggattcaatttcccttttgtttcctattgggtttcagaaattgagatgatgaaggagagatttgctaagctacttctcggggaagacatgtctggtggaggtaaaggggtttgtacggcgcttgctatctccaacgccatcaccaatctctctggtaccatctcaatcttcttccctttttgttagttggtatatatagtaggggtttctagttttttaataaggctagtgtccacacagcgactgtgtttggcgaactatggaggcttgagcctcttgctcctcagaagaaggccatgtggcgcagagaacttgagtggctgctctgtgttagcgattctatcgttgagctcattccttccattcagcagttccctggaggcggaacttatgagatcatggagacccgtccacgttctgatctctatgccaatctccctgctctcaagaagctcgatgctatgttgatcgatatgcttgacgctttctccgatactgagttctggtacactgatcgcggcatagttcttggtgattgtgacaaggattcttacaattctccagcttccgttaggcaggaggacaagtggtggctgccttgccctaaggttccgcctaacggtttgtcagaagaggccaggaagaaactgcagcagtgtcgggactttgctaaccagatactcaaggctgcattggcaattaacagtggcgtgcttgccgaaatggagattcccgacccttacttggagactttgcccaaggtatgcgccttctcgagctcaaggattagctttttcattgctgctggagcataaattcttttaccgttatatgtgattagctcattgagttatgattttaaacttaatgcagagcgggaaggaatgtcttggagagatcatctaccagtacttaactgcaaacaagttctctcccgaatgcctcctggactgtcttgatctctcatcggaacatcagactcttgaaatcgccaaccggattgaggcggctgtgcatgtttggagacaaaagaatgggaggaggcacaagaagcaggcgaaactaaagctgtcttcttggggtggcaaggttaaaggccttgttaatgacaacgaaagaaatgatttccttgtgcagagagccgagaccctcttgcagagtctcaggatccgtttcccgggacttccccagacaacgctggacatgaacaagattcagtacaacaaggtacattatagtttggagtgtgctttgctggttgcatcatgaaacgatgcttagataatttaagagtttgtgtgtgttcttgcaggatgtagggcaatcaattctggagagttactctagggtgatggagagcatggccttcaacatcacggccagaatagatgatgtgctttatgttgatgatgccatgagaagatccatctctgtcacagaatcgctatccctattcagcatcaatggactcaaccctcaaaaagcgttctctgtgcagagctctccgcacggttcaccatttgcaacgcctgccctaagtgtagcatcaagaagcccgaggagagcaccgccgctgtattcagtgaagaggaatgggacgagagagaagggaatagtgggagaaacagagaaagcatggtcgtatgcagggaatttgagttcaagaagagtaacgggagtgacgccggaaagagattaagattgaaaatagaagaatgtaaatcaatggttgtagagactgtagttgtttcttgtttgtctgactacgaagacgaatgtggtaatagcaacaagaatgttatcttatgtggagttttgaaatgttgttaacaaatcaattccttagctcatttaccaagtttacaaagattatggtccaagtcctaaaactgaatgaacatcacatacccgtctcttgagtgatttaatcatgttcttcattgcactaaagcgacaacttttggttcaaatatagactatgactatatggtttgttttgcacaggattaaagttgatgttccaattttataattaaaaagtcagaaaggggttttcttgttattttttacttgttcttataagctatcgggacgacacggagttttaaagagttttccgttttgctgagcggaggcgagagagggtttagagtgatggagcaaagtagcgggagagtcaatccggaacagccgaacaacgtcttggcgagccttgtcgggagcatcgtggagaaaggaatatcggagaataagcctccaagcaagccgcttcccccaaggccctcccttctttccttccccgtcgctcgtcatcgttctcacggacccgtaagccaatccaatcctctagtgcgtgctttttaggtttccatcttccttttgttgccttcttctagattttaagcaccttctactgttgtttagtacttgggactccacaatttttcaccgtgcctgaccttgtaattcagctttctgagacatctaatttttgtttctcatgtttgattttgtagcatttggctcctgtgggaagcagcatagcacaacctaaggattacaatgacgatcaggaagaagaagaagcagaagaacgtttcatgaatgcagactccattgctgcttttgctaaaccgcttcaaagaaaagagaagaaagacatggacctcgggaggtggaaagatatggtctctggggatgatcctgcatccacacatgtccctcagcaatcaaggaaacttaagatcattgaaacgagaccgccctatgttgcttcagccgatgcggccactacatccagcaacactttactggctgccagggcatcagaccagagagagtttgtttctgataaagcaccgtttattaaaaatttgggaaccaaggaaagggttcctttaaacgcttctcctcccctagctgtttcgaatggacttgggactcgacacgcgtcttcgtctcttgaaagtgatattgatgttgagaaccatgcaaagttgcagacaatgtcacccgacgagattgctgaggctcaggctgagttattggacaagatggatcctgcactactctccattttgaagaaacgaggtgaggcaaaattgaagaagcgaaagcattctgtgcagggggtttccatcaccgatgaaacagcaaagaattcaagaactgagggtcattttgtcactcctaaagtgatggcaataccgaaagaaaaaagtgtggtgcaaaagcgagggatagcccaaggattcgtgtgggatgcatggactgagagggttgaggcagccagagacttgagattttcttttgacgggaatgttgttgaggaagatgttgtctcgccagctgaaactggtgagtagaacaatacaactgaaacacatgacaatcttaggttgcttacactttgactgtacaggtggaaagtggtctggtgttgaatctgctgccgaacgtgatttcttgagaaccgagggggatcctggggccgcaggttacactatcaaagaagctattgctcttgcacgaagtgtggtatgtatgattgccacatattttaattttgatgctaattaatggttaaattcttttttccctccattttggctttagctgaacaaaacctgtaggctgagactgcgtttttttcgttatcactgctcattgatttgtatgtattattgatatatatatcagattcccgggcagagatgtcttgctttgcatctgcttgcatctgtactcgacaaagctttgaacaaactttgtcaaagcagaataggctacacaagggaagaaaaagataaatccactgactgggaagccatctgggcttatgcccttggaccggaacctgagcttgtcttagcattgaggtaatttcctgatgggtgtaattttgagacttatttgtgaagttgtcactcataaatcataaattgtttgttcttatcaatataagtttcttttcttctttaggatggctcttgatgacaaccatgcctctgttgttatagcatgtgtaaaagtgattcagtgtctactgagctgttctcttaacgagaatttctttaatattctggaggtatagttgatttttctcactcctaagaagttatagtcctcatagaacgtgattatacatgttcaaactgataaaacccatttctatttccagaacatgggaccacacgggaaagatatcttcacggcctcggtgttcaggagtaagccggaaattgatcttggcttcctccgtggttgctactggaagtacagcgctaaaccctccaatattgttgcgttccgtgaagaaatcttggatgacgggacagaagatactg

SEQ ID NO: 139672 - DNA, 1452 bp, Arabidopsis thaliana landsberg; identical to SEQ ID NO: 26456

SEQ ID NO: 139673 - DNA, 929 bp, Arabidopsis thaliana landsberg
tgtttcacgcgcgtccatcattcttcacgcgccgatcgacgcctttgatcgtcttcacctctctcgctatcggtctaaccggtttccttttcggattatcaacgatccttttccctggtctccgggtatctggccggtcctgcctcaccaacttgccaccgaagactgttaaaatcgtctgggacgtccctggtaatagtatcgttaatggcgaagtcaagaggcacaaagtgatgggattcgtcggaatccagaccggattcagatctgctggccggagacgagctctcaggaacacatggatgccgtccgatcccgaaggccttcgaaggtactgattcaaccttctctcaaccgtccgatccatttctgctatagctttaggattctctggaatcaatttgtcacaaagtaatgaacttttgcatcatttaaagactgaatttagcaatcgtctgagtacactcactgaaaaaaccattgttctttgcagattggaagaatcaacaggattagccattagatttattataggcaaaaccaaagacgaggccaaaatggttgagctgagaagcgaagttgcaatgtacgatgactttatactgctcgatatcgaggaggagtacagtaagctcccctacaaaacgttagtgagagtgatttggttcagatcttatctaacaacacaatatgaattacaaggctctaatccgtggtagtcgttgttcttctttgttgtatagtttggctttcttcaaagatgcgtacgcgctttatgattctgagttgtatgtcaaagctgatgatgatatatacttgaggccaggtgattagctcttatagtttttatcctctgtcttcaggggaaaaaagaatctggacctttaaatggtgctatgttgttttattcatgttttccacagatcgac

SEQ ID NO: 139674 - DNA, 674 bp, Arabidopsis thaliana landsberg
tcatcctaaacgtgcggctgctttcttatgattaccataaattatttagactaatagagtgatatgttttgtgtttcgattacatgacagatcaccagcggttgttgtagcgtacttgatgaaacgaaaagggtggagactcgctgagagtcatcagtgggttaaacaacggagaccaagcactgacataagtccaggcaagtacttagactttggattagaaacttacttattgttcttgaaactgttactcattgctttttctttgtacacagagttttaccaacaactgcaggagtttgagcaggggatattcggatctgagatgatgtcggcgatgaatattaatgatgctccaacgtttgggtttggtttccctaagattgataatcaagcacaagctcctgtgttcaacaatgctcctacttcttctatattttcatctcctgcttcaagtatccctcctcaggagttcacttttggagcaactccaccaaagccaacaactggtggtgatattgcaatggatggctcttagaaccagataatcatatactcttgcaagaattttcatcaacaaatatactgttgtgagaatgtttctttttcttttttgtacatggagattggtgcattgcttgagagagtttggggtttgagaacatgagattgga

SEQ ID NO: 139675 - DNA, 986 bp, Arabidopsis thaliana landsberg
aaagttgtcataaaatgggtacctcaatttaatatttgtacctgttattgttatattctgaattctaaagatatcttagaatatcttgtatttttattatttctattatatctattatataattatactaagtatctttaagtaaatatatatctaatattaatatacaacctaatagaaatatatagaatagaaccgaatagaaatagaatagaaatagaataaaaaaataggtacaaaaaaagccaaactaaataaatggacttattcatctttcaaaatcaactacaactagatgtatcataatccccttgttagatttattattctttttgtcttaatatcttataatagttaatagtcattaataaagaagtaatagctttcattgaagtgagtctactctaaataggatttccacagtaggaaaactagacatcaggaaatttattcaatcaagacgacttatgtaatagagtaatccccgaaggtattgagcagcggtgtagcatcagatcctaaagacagtaagtctttttcttttttatgaagtatgaaaaagtctttttcaaagattctatataaatttttatatgaaagcgggatagttacctttcagaaaattctaatatctaataacagtggacatgcttttttttctgaaggtaggagaaaagataaaacttattatattaattaatatattaattaaatcaaaatgaaagtttgaaactcatgtaattactctcttttgtttaatccaagaaaaacaaaaaatctataagaaatctcattcaattagacattcaattagatataaagttcaaagtaggttaaagttaaaaaactggtacaccaaaacaaaagagttggttgtcgagccgtatgaggtaggaaactctcaagtacggttctcagggagggaattgatccgcctattccgaccgtggagaacaggccattcaacaaggagattctgaaatggc

SEQ ID NO: 139676 - DNA, 561 bp, Arabidopsis thaliana landsberg
gaaaaatggaaaatattgagtatctgaatgagatccaagccgttgcggggaagctaatccacagctatggagtcccagttatgatcacgttgttcctaagatggctcgcgtccatcgttgcagtgtcagtcatgtctttcatattttaaacatttggatttatgtttaatttttatttttttaatgttggtttacttcttttatttgtgtgtaaagttttcttatgatattggatcaaacgaaatggaagtactcaaacaatataatggcttcactattagctccttacctcttctctagccttcctattgttatttttcaggtcttgaggtaacaatcaatacacgcaaagtactttttttgatgttgttgttcttgtgcatgtaacaatgatcggattaaatatttcgattttgaattcgcaggaacggggttgggaaatggatcgctctcctcaccgttattctcaggctttttttaccaaaccattttcatggtatgtaatcttataacatctagaacataaataatcttcaaagtttatattatataactgagagc

SEQ ID NO: 139677 - DNA, 1940 bp, Arabidopsis thaliana landsberg; identical to SEQ ID NO: 28514
  unsure (1)..(1940): unsure at all n locations

SEQ ID NO: 139678 - DNA, 2186 bp, Arabidopsis thaliana landsberg
cagaccgagaagattaagcgtaagattctcaacgaatgttggagaaggaatctgatttgactgcaatggagaaaccaaataacaagcacgcggctgattcgttttccagcgaggatttggtctcacgcggagaaaccaaataacaagcacgcggagatcaattatttttattttcgtagaatctgattgaaatattaagaaaaaagagaaaaaagagaggaaaagagcaaagtaagtaggatagatggctagtgtccagcaaaatgggcaacggtttggcgtttcagaacctatctctatgggaggaccaacggagtttgatgtgatcaagacaagagagctcgagaaggttttactgatatcttaatgcttttttcttgtaatgctttattgttttagttttaaagtttactcatgatatacttcttagttttatactgattgatagtatattgagttgtgttatttggttgttcagcacttgcaagatgttggattgtacgagagcaaggaggaagctgttagaagggaggaggttctggggatactagatcaggttttgtagtacttttgaatcctaagaacttgtgcttatggagttttcatcgatgttagtaacgaactcttgataaatcttcgttgttgatgtgtccagattgtaaaaacatggattaaaacaatcagccgcgccaaagggttgaatgatcagctgcttcatgaggcgaatgcaaagatatttactttcggttcttatcgactaggggtaatgattaagatctatagaagatttagctttgttttagtcattcttcttgtattgcgaagtagagggaaagggaacaatgtgaattggtggaaactgtgttttgtttctgttgtcttgtcttgtgagacgtccctgagtgggaagtggaatcactcgtctttacatgctctttgcattcatttaaacatattgaggtctcaatgttatatatgtcacttgaatcatatctaactgagcttttcagtcattttaattattggtaaatcttagacacaatagggggctatttatggttgcaattggttcttggagagaattcagagtcctaaagagttccttctctccgatttctagcatattgagtgctcctataacagttcgttttacttcttcaaataggtacatggacctggtgctgatatagacactttatgtgtgggacctagacatgcaactagagaagtactataacctcttgcatctatatgttggctgattatttcttctgtcaatttattgtgttcaatattcatctttatattttccattagggtgatttctttggtgagctacaaagaatgctgtcagaaatgccggaagtaactgaactgcaccctgtgcctgatgctcatgttccattgatgggattcaaacttaatggagtttctatagatctcctttatgcacaacttccactctgggttatacctgaggtaatttcttgtccacaatgaggtgattgttagtgaggactaggaaattcgtagataagtatgttttaacttatcgaattgaacctcactaaactcatccttactgattacaatcaattagtttcactctattacacagtttacattatgttcatgaatttaaatgaatgttatgagtggatctcgtagaaaataggtaatctgaacctggagctctggtcctgttcctcttatggaggcttaaatgtgttccctgcctgatgttaatggtgcaggacttagatttatcacaggactccattctacagaatgctgatgagcaaactgttcgaagtctcaacggttgtagagttactgaccaaatcttgcgtctggttccaaacattcaggtttcgtgctcactgaccataaatctcttatcttctaaaatttaattactcatccatatgatttgcttagcctgagtacatgtttttttctttgtttctgagcagaatttcagaacaacattaagatgcatgagattttgggccaaacgacgtggagtatactctaatgtatggagaattcttctataatgctcttctattttttatgtgactatcatgttgcttaagtaaagtatctttctgacaattgctaggtctcgggatttcttggtggtataaactgggcattgcttgtagctcggatttgtaacttatcct

SEQ ID NO: 139679 - DNA, 1403 bp, Arabidopsis thaliana landsberg
tttgattatggatttgaccttttattgttgttgaatgattctgtattgagtgtcaactgtcaagccctctgattttgttttcttgctgcaaatgttttagagtgttcttgtggaatctacgagtgggaacacagggattgggccttgcattcattgctgcttcaaaaggctataaacttatcttgacgatgcctgcgtccatgagtttggaaaggcgggttcttttgagggcatttggagctgagcttgtgttaactgaacctgcaaaaggtatgactggagcaattcagaaggctgaagaaatcttgaaaaaaactcccaattcctacatgctccaacagtttgacaaccctgccaatcccaaggtctgtaattacttcttgtttcatcatactctctaactgtgacatgaattatgagctacgattacttctggccttgtacagtagtaagaggtggtgtgtgaaagggttcattagagatgatagtgaaattcttccgcacttccttttggattgttgtagagtttctatggtatacagttttgaatcatcacgattatatctgggattcactggttccattggtaaaagctgcaagtatttgttagtgttttgatataagattaaatgcagattcattatgagacgactggtcctgagatttgggaagatacaagaggcaaaatcgatatattggttgcggggattggaactggtggaactatcactggtgttggtcgattcattaaagaaagaaaacctgaattgaaggtacatagcaagagggcttgtagcatatcagctggaatcaactgtagatgttataacctccgtaattagatttagttgatgtttacttgtacttgtagttatatttaattagttgatgtttacttgaaccaggttattggtgtcgaacccacggaaagtgctatactttctggtggaaaacccggtaaggcagtgattttgtttttcttgtttctctggcacgttattctttttatcttgcgtttatttgacatgtatttgaaatgcaggacctcacaagattcaaggaattggagctggatttgtacccaagaatttggatctggctattgtagatgaatacatagcggtatgatctgttggtttggttctctataactatacattcatctttttcactttcagcaagcaacaattttcctttttaacttcacctgttttgttgcttcttatcagatttccagtgaggaagctattgaaacctcgaagcaactagctctccaggaaggcttgttggttagtctatatttgctattctgtttgacttatttgttagtgggaacactctttataaaagatagaaaacgaatgtaaatgcatatgagaaatctatgacgattagtaaacgac

SEQ ID NO: 139680 - DNA, 1438 bp, Arabidopsis thaliana landsberg
gactgcaggggccatcggtggacttgctgcatctctgattcgagtgcctacagaggtaaaaaaaaaaaaactctctctcttgtatatcacaatccagaccatgttctacatagaatccctcagtcaacatttctgtgtgtgtattgtttaggttgtgaagcaaagaatgcagaccggacagtttacatcagctcccagtgctgttcgaatgattgcatcaaaagagggatttaggggtctctatgcagttagtaacacttttatagctttttctttaagtctgcattcttttgttgaattttcatgtggtgacttatttcatttgcttctagggataccggtccttccttttgcgagatttgccatttgatgctatacagttctgcatatatgagcagctttgcttggggtataaaaaagccgtaagtttctttgtaaaataagtggcatttcttctatatgtaatatctttggataaggtatcggaaaaaaaaacgcatgataacttctgatgtactgatattttgcatgagatttactttggtcaactctttggcaggcgcgtagagagcttagtgatcctgagaacgctctaatcggtgcatttgctggttggtgacataccttatatgctttaatatatattcttcggatccatttaatcaaacctgaatgagaattaagccgctgaacttaaaaaaaaaaggctctggtctgcatttaccttaaaagtacacagtacgatggatccatttcatctaaaaccgagttaatcatagtgtgcaagtgatgtatctggcattagttaaggagcggtctaatgatattgttgttgtttatgcaggtgctctgaccggagcagtcaccactccgcttgatgttattaagacaagattaatggttcaggtaataataatattctcacaagtgtgtctctaaaatccaatcatcttattgttttctttgacctctttttcagggatcagccaaacaatatcaaggaatcgttgactgtgttcaaacaattgtaagagaggaaggagctcctgctctcttaaaggtagacacacacacacacactagattaatgtaaagttgaaagtagaaatcttgagaaagtctattgagcggcattaagagtagagttcttacacgagatttgacttgtagggtattgggccaagagtgttgtggataggtattggaggatcaatcttctttggtgtcctcgagagcactaagagaacacttgcacagagacgtcccaatacggttaaagaaaccaaagaagaataagtttctggccgcacaagaaaatgagtgtaaggtgacaatgtaacccctttgtgagttctatgtggtgtgagtttgtttaagtaccaattcaactttcattaaaaaaaaataaaaaaattagtgttcattttagattatataa

SEQ ID NO: 139681 - DNA, 2047 bp, Arabidopsis thaliana landsberg
  unsure (1)..(2047): unsure at all n locations
tagataattacactaagggacgaagaagctctcgtttagtaaattttagcttagaacacagaagaagcattttttcggatctgagatctttagatccgaacatcgtttacttcaaatcgtttattcaaggtatgtacatttttaatcttcctcttcgaattcttcaggattgattttgtgtttttttatcttccgcttatcggattttttgtagcgtgaatcctctgtttcatggatctatccattggtagtgatttgtttctgtgcatttatgttctgcttggtaatttcttgctattatgttactgaaatggtacaatgggtttgagcgaaatctgttttggtaattttgtataccagattcatggatctattattttaaattgattctatatctggtaattcttttatgcattaatgattattgcatcactgaacgaaggaagtagcttgaaatcaaatttttgaattttgtgggtaatgcagagagtgttttaggttataagaaaaagttttgaatgaatctattctaatgtctattttggtttgaaggtctaaaaaaaagttttgaagaatcatagccatgtcaagaaggcaagtaaggcgtgtaggggatagtggaagcttcccatttgtaggagctctgcattcaaaatcacgttcgtctcctctgttatcagtttgccttgttctcgtggtatgatgatctttgcgtggtttgtaatctttaagtaatacgtttcataggatacaaattgatgtaatcctttttatttacagggagcatgccttctcattggttatgcttacagtggtccaggtgtgtattctcttcaactaagtatatataataagattcatttgtttttgcttgaggtttcgattcaaaagccctaatggtgacaatgcatgtgtattactacaggtatgttcaaaagtatcagagaagtcagcaagattacaggtaattcttgtttctcatcttcaatataagtgtttatgatgataatgtttaaacagtgatgactttctaaatttacctgcaagaatgtgtgactcttcacattaacattttgtttaacaaccctctctacaggtgactattcttgcacagcagaagttcaaagagccattcctattcttaagagtgcgtatggagatagcatgcgcaaagtcctgcacgtgggtcctgaaacatgctcagtggtctcgagtctgttgaatgaagaagagacagaagcatggggtgttgaaccatatgatgtggaggatgcagactctaactgcaaaagtcttttgcacaaaggccttgtacgtgtggctgacatcaaattccctcttccttaccggtcaaagtcgttttctcttgtgatcgtctcagacgctttggattacctctcacccaggtacctgaacaaaactgtgcctgaacttgctcgcgtcgcttcagatggtgtcgttcttttagcaggtaactaaaaccaaacccgttagaaaaaagctgagactgagagattgtaaatccggtctgattacacttaatcttcatgtactatataggtaaccctggtcaacaaaaggctaaaggtgcggaattgtcgaaatnttgacttttctgtaagttcgctaaaaccatgttgtcgtgatgaatgaaaccacacattacatccatcaattcagagatgtgggttaggttcgtacttgtcctgtttgctaacttgttgcaattccaatgtcttgcaggctaaaatgcgtagctcgtcgtggtggatccgtttcttctcacagacgatcttagaggaaaacgaagcagcaagcaagaaattcgaacaagcagcttccaagagttcatacaaaccagcttgtcaagttttccacctcaagccattacattagtacacactattattactggtcttaagacatcaaaccagatatctctcctctctgtttaatacccttttttccgctatagaaagaaactaaactcccacaaattgtaattcattctcaacgatttgattcataatttaactatttaataaat

SEQ ID NO: 139682 - DNA, 1025 bp, Arabidopsis thaliana landsberg
gattgttagcttatatttcagaattgaaggatttatgtttcttcttgtaataatgttacaggagcttaagagtgtcattcgagctattccggagattgaagaacttgttgggagtgaagaagcaaaccaagttttctgtatcactgaacatgatgaggaaaaagtgaaatctgttgtccgaacaatcttcaccctgctaatgtctgctgacgccgatacaacaaagaaaattgtatccaaattaaaacgccgactgcatatggagagtcaggtcagtcatctaatttcgattgttttttcagatgattccttctctaaattgccttgtgaatggcactgctgaaaccttctcaatatacacaggaacgccaattgacagacaaggaacggctggttttgaagctagagaagcaatatccaaatgatattggagtgatatctgcattcttcttcaactatgtgaagctcaatcctggcgaagccttgtatcttggtgcaaacgagccccacgcatacttattcggtgagtgccttgaggtcatggcgacttcagacaatgtagtacgagctggcctcacttccaagcctctggatattcaaacactttgttcaatgctctcttataaactggtaaagatctaaaccaaactcaaagtgtactccaagacttacaaaagattggttactaaggtcttatttctgactttcagggatatccggaaatcctgaagggaacaaggattcgaccatacataacaagatacctgccgcctttcgaagagtttgaagttgatctgtgtgatcttcccagtggagcctcgacggtgtttccctctgttccaggcccttctcttctgcttgtactccaaggtgaaggaagaatgtctacagaagcatcagccgatgggatttcaatgggagatgttttatttgttcctgcagataccgagattcacttgaggtcttcatctgacttgaagttgtacagagcaggaatcaacagtaggtttttgtttcctctatag

SEQ ID NO: 139683 - DNA, 4276 bp, Arabidopsis thaliana landsberg
gggagcgcatcatgagaatccaaagactatttctgcatgaagtgttcgtgttgataaaaaggctaaacttggggataatgaggcgggaggatacccaaggaaagttggcaaatacaaaggcagcaaagcttctgattcagtcaaaaaggaatcgagtgcatcaaaggtgaaaagtggtcataaagtggagctagaacatcctcttagaaagcagaagtatgaccagatagaacaggagccaccgtcttcatcaaagttcaaggaacagcaaacctctgttgtttgtgagactaagctgaatggtcaagctgagaagaaggaagtggtagccgtgaaaccacaaagtgatagcaaaaaagccgaggacacttacaaagacttttttggagacataggggactctgaagaagaagaggaacaagacgtaaaagatttgcggatttcagaaaagggacttccgcccttagaagatatgcctgaaaaatcgagcttgccgctagtagaacctcagaacgttggtcctgaacccatgttgagaaaacttggttctgatgcttctcttccgaaagcaaatcccgtgatcatacaagaacattgggttgcttgtgacaaatgtggaaagtggcggcttcttccttttggcgtcttcccagaagaccttcctgagaaatggatgtgcacaatgcttaattggctgtgagtcttttcaacttctctattattggtcctgttattttgttggtgtgctatatgaggtggttggcataacgtgtgtttgtttctctgtgttattggtcctacttttttcgggatgaggaactaaagagaaattgattttatttgtgataatgtgcgttttaggcctggagtgaactattgcaatgttcctgaagatgaaacaacgaaagcactgtatgcaatgtatcagatccctgtccctgagaaccaggcttcgatgcagagtaatcccagtggccctaagcctcagtttacccagggagatgacaacacaaagaagaagaaaaagggtttcaaaaagatagacaatggaatggataaagaaggtgctcgaactgcagaaactaacaagaccatccaaacatcgtcaagaaatggtattcaaaattcgcagggacttggcgacttggccgaggatgagaggcaaatacagaaacagaaagagaaaggaaaagcagtggatcacctctctgatgagtcgaagagcttgaaggcgaataacaaaagaaaaacagatctagagagttctatgctggccaaaaaaatgaagatcgaaagttttctgtttcctgatgaatctgaatatggaaatggacgtcctacctcgagtagtggtgtccctatcacgtcagcagatataaagccaaagccccgagtctcctccaaaatgccaaaagaggaaggaggagcttcagacactggaaatagcaatagcactggggggattaaaaagaggaaactgagagaaagccatggttctaggatttacagtgagaacgaaaatcatgaacgaaagaaagctcgagttcgtaaagaagagaaggagcctagttattcacaaggcaatgggaagttggaaaagaaaaatagaagtcattcgaaaatagagtatgcaaatgttcagaactcaatcgcggcaacctcaagttcttctaagatttctgattctcataaacccagaaacagctcccgcgaagctaaatgttctcctgttgagtcggtgtcttcctcacctatgaggctttccaacccggagaaacgtatatctgtgagtaaaaagaaagaagaatcttatgatgctaacgtctttgcagcaggtagtttgaaaaaattctcagatggtgaaggtgaagatgatggtgggagtgatagatcgcagagtcagatgaaggataaacatggatcccatgagtcttctgtgcttgatatttgggataataaaggatctttgaaagcgaaagagcgcgctgatcattctctcgatgccaattttgaaaatggtggccacaaggctttaccgcggaaactggatcatattctcggtgaaggaaaacagtctagcgatcatcatagacgtagcaatgattccctggcaaagaagtcaggaaaaggttcatcttctcggtccaaagaaaagagccaaagcattagggtctgattcacgggatggtccgagacatattgaaaagaagatatatgatggtagtcctgacagtagagcggatatgatcgtgagaccaaacattccaaaaccgcacgactccgaaagaataccagagaggtgtaatatagcagatttagcttctccatcacggccaccatctagaggtgtccaaggggattcctctatgctttctgtccgtaagaaagtcgataaatgcagcacatcagctggaaataataatatccaagctgatgatgtgacaaaggcaacagcccaaataagaaggaaaagcgagccttctccaagccccttgcgaaaggaaataacatctgcgcaggccgcccataatactttaaaagaagctaaagacttgaaacatacagctgaccgtctcaagggttgtctcataattcagttgcaggggaatgtctctttctcttttgtatttgcttctcatagtcttacgtttcatgttactgcagaatgctgtatcaaaccttgagcacattgagctctacttccaagcttgccttaagtttcttcacggtgcttttcttttggagatgagtagcaacgagagtgctagacaaggagaaacaatggtccaatctatgaagatttatagtagcactgcgaatctttgcgggtaatttacatttgtgaggataaaggaaaaacgtcgttcattccttcttttccatttgtaagcactgaaacctttttccgtgatagattttgtgctcatgagtatgagaagtctaaagatatgggagctgctgccctggcttacaaatgcatggaggtcgcgtatatgagagtggttaattcctcctacaccagtgctaatagatatcgaaatgaattgcagacttctctacaaatggttccgccaggtaagctagtcgaagatagccaaattccttattggccatgtctttgagtctttcccgttgtaatggtcttgtcactgccttttaggtgaatctccttcttcatctgcctcggatgttgataacgtgaaccatccagcagcagtagacagagttggtacctcaaggggcatcagttctcctttagttgctgggaaccacgtcatttctgcacaaaaccgttctaatctcttacgtctgcttcaatttgtaagtgtattaatgcctcttccaagttcattccccacaattatacttagatataaagtttgttaattgaatggaagatgaagtgatgcagttaaaatggaaagtcataaacataggccattgattaatctcagctactctctactgtttgtaggctcaggacgtaaatctgtcaatggatgcctcgaggaaatcacgtgtggcattaacagcttgtattgaaaactcaggggaggcccaacaacaaggagagggtataatatctattaaaagcgcccttgattataacttccaagacatggagggattgctacgtttagtgaagcttgctatgaaggccaacaaccggtgaaaaacagaaaaaaacaatgaagcaacttatttgcaaaaactgagaagaggcaaagttataatagtgaagagataactgaagccttgctgctctggatccatttccgttcacagacggcatttcaggattttgtttggatcccgtaatcatttgtacaaaagcaagaggagttcatttgacagagtccaccctgacgaggtttctggtagaccaaggaaggaacttggcatttgagtttttcagatgcttcttttattctaccaaaggaacaattcacaatggcaacattataacaagctactttcccatctaattatccaagacacatgtatggattatacagagcatccaagatgtaacttttggttccggaatatctatttatcgatcccgtgacagcgtctgatagattctcagtatcaggtcagttattgatacatcaattctcaatatctttttgttacaacaagctctttgttatgtctgagctaacctactttgaatgatttgattcagactctaattctgtactcattcataattagccatttaggtgcttacaatgtaaaatatatatttatattttcaggctattggatgtta

SEQ ID NO: 139684 - DNA, 1337 bp, Arabidopsis thaliana landsberg
  unsure (1)..(1337): unsure at all n locations
tgaattgtcgttgaataaagaataagtttaattaaggcagtgataattaaaattaaaaaaaggagaatccttatctctttcctctgtgggagattctggttttgcccaacatagtgacaaaaaggaaaacgcagtccacacacacacacaccaactcacactggaaaaaaaaaaaagagagagagagagaagagacaaaatttgaagtttgaagtgaagaaacagtttcattttgcggcgacgaattcgaattttccgatcgatcatgccgtccggtgcgaagaaaagaaaggcgttgaagaagaagaagcaacaggaagcgattggaacaagtatcaacggtacatttcgtagttcgattttggtttcaggatttgtttgtttgttaggtcgatagattatgtcttgaatggtgttgaaggattttagtatagtttctcgcctagaaattaactattttcgtggttggtgtatagagagatctgtttgattacttctctcaatatctgtttcgagctaacaatgcttcattcatgactttagcaagacttttttttataactctgatcaaatgctggattgttttctcctatcatttttggaagttgcaagtctttttgtgttcttagtagttccttttttaatctcaggaaatgatgaacatggaagccaagatgggaggggaagtgatagcagtttgagttctcctggttctcaaggaaatcaagaatttgggactaaagattcatctgctcttctatcttctgcatggtaaaggtgcttctaaagagatatctagagatgcaggtgttactcagggactaggacccacaactggcaatgctattgtggaaaaatcaactaactcctcttctgatacccgtactcgctccgccaaaaatgtagcttgtggtaattcagttacagaaatcactccagttgttgattctgttaaacctgtggtttctatctccaaaacagtgacttctgaaaagagtgggcttgttgagacctcaacacactcaaatttggtcaaaaagaagtctgagaaagatgaagagtatcatccgnnnnnnnnnnnnnnnnnnnntaatagtaaggtggttatgcttccaagatctgctcctgaaacaagcaaaaaagtagagagcgtaagaaaatctgaagttccagtatcccctgaggaaaaggtagcatctctattctcctttttgcatacatgtgtttttcgtctcttttcagttggctgaatcttctgcatgtatgcagcctcttttgctacctggtccaccagtcgtccgaaggacttcatggctaagctgctgcggtttgtttga

SEQ ID NO: 139685 - DNA, 562 bp, Arabidopsis thaliana landsberg; identical to SEQ ID NO: 13267

SEQ ID NO: 139686 - DNA, 814 bp, Arabidopsis thaliana landsberg; identical to SEQ ID NO: 7024

SEQ ID NO: 139687 - DNA, 2477 bp, Arabidopsis thaliana landsberg
gctgggcgctccattttgttgttggcagttttgctaagaatcttgttcttggattttactctggtgagattgagattggtagtgatgattctttaaaacctagatggatgaatttgcttagtgatgataagtgtagagagcttttagcagattgtattgagagattcactagctcagctgtatcggtgtatatcgataaaacggttggtgttaatacttatgatcagatattcgctggtttgacgaatccgaaacatcgagatagtgctcgagatgttcttgtttcggtttgtaatggagctcttgagacgttcatgagaacttctcatgatgtcttcacatcttcaggagagaaaaccgattcctccttgaggaagtcggagaatcgagaaaacggatgggcagaggcgctttcgactactttagcagtgccgagtaataggaagttcatgtttgatgttacgggaagagtgacgctagagacgatgagatcaattcttgagtttgtaatcttgaaaacgtcacaaagttttaagaggagtttggatgtgattcatgaagaagttacagagagaggacgtcaagtagttggatacgctggtgccaaatcttcagtgataatcactgtttgtcttgcggtttactttcacatctttaaccgctttgttcgaggccctccggtttgtttaagccagcaattctagttaatcggatcgatctattagcttgttagagttgttagggacattagatcttcagccttccatattcttattggtaagttggagctgaatagcgtagtagagtcttagcagtgttatgtacccacatattcattattgtttatttatagaggattcttgagataatctctgcatctatgctaccatttccagtcgaaccatataatgtattcgaatggatgttgccggcggagcggactaggcaactctatttcttggggcggatttatccgctcctgatcaaatttatctttatgtaagagccgtatgtagtaaaatatttctaattttttcgggcatattaagacggactataattcatgaatggtaaataaaaaataatctactccacaaacggatttatccgctaacaaccatgaaagagaaaaaagatttaattgtcactgtagcaaatcggcagttattgaggtttccccgctccgattgacgcaacacgccaagattttgccaacgctaaagcaaatcagatcgaagatttgtgctctcttctatctctcactcgcatcgaattcagcaaaaattaaaattgaagaacgagtcaaagatagagagagaaaaaccctattcgatcacgagatcgtaatcaacgtttttagcagaatcatcggagggtagaaaaaatgctcaacgatggcgaagtgactccttctaggtaaacaagtcagattcttttgttgttctatgtttgatctcgtgcttagttccagtcactgctcaaattgaaatgagatagttttctagttgatgaattttgttattccaccatgaaattgcctaattcgaatactaagatttcgtagtaattcagcatttatttgattcgatcttgcttaaattgattttgttgtctgcttcatgttttttcagacatgagattctgagtatggtgaagaagcactcaaagtcattaggaaagacgtctcttgatgagcaagatgcgtctgatgtagaaatggactctaatttctggcatggtgtgtttgatgtgtactttgttcgttgtatggagtcgaggaggcgacaagacgatgatcttctgttttttgtcaggaaattggtatgtaagcttggacctttctctctgcgtcgaaaacttagaatattgtatttatcttgctggttaatgttactgagtgttttgttgctttggccagagctgtaagtcatatggtttgactgaaaatgaggatgcaccagctccttactttgtacgcaggtgggcacctaaggtaaaaaactgtacgaaacaatacagatacctagttagatctcaccacatgaggtttggttttgacatgtaacatttcaactgcgatgtaaaaattgtatattaacaaggtcttagattgcaactcccctgaaggtgatggaaatattgattttacttcttttcgggtgagggattaaagtaagctagagtactacgtgcttattgtaaaggattgtcttttctggcctacatgctaaagcttttcacgatccatcattatcttatttagaccatgggacagagacacttcgagtaaccatttatttgttgtgttgcaccttgtatgtattgtctacaaacatatgataatgcatttctttcttacttgtaaagcagttagatgagctgcttggtgaaagtctggctgaagttgattggaggaaatcattttatttgaacatgattgcccacacatcgttcactgttactgttgcgatttgcag

SEQ ID NO: 139688 - DNA, 1498 bp, Arabidopsis thaliana landsberg; identical to SEQ ID NO: 48766

SEQ ID NO: 139689 - DNA, 1799 bp, Arabidopsis thaliana landsberg
ggtaagagttatagttcaacagtcaagtaatgcgggccaagccatcgttaagctgttgagtcgtctaaagtgtaattcggggcagaattggtaaagagagtcgtgtaaaatatcgagttcgcacatcttgttgtctgattattgatttttagcgaatccatttgatcatatgacaagatgtgtatccaccttaacttaatgatttttaccaaaatcattaggggattcatcagcgcatggcagcgtgagatcatttataagagaagaagatcacctgacagaagctcggtcgtaacttctgatggaggactcagtagtggaagtgtttccaagttacccaagaagggagatacaggtggttattgtagtctatctcaaaactcttcagttatcttatcttagctgttgtggtcctctcaaaaggctcccatggtacttgactggatggtaaatgatactgagacatttatccggagacaggataatgtggttctcatgtatttttatctctggtgcagtaaagctaagcattaagtcctttaggattccagagctttttattgaagttccagaaactgcaacagtaggatcactaaaggtatatgccaatatgtatttcttcacatttgtttggttctcttgtgtggacattgaggtgttaacaaattaccattttgctctttgacccttttggttgcagaggactgtgatggaggctgtcagtgttttactcagcggaggaatacgtgttggggtgttaatgcatgggaagaaggttagagatgaaaggaaaactctgtcccagactgggatctcatgtgatgaaaatctagacaaccttgggttcaccttggagcctagtcccagcaaagttcccctacctttgtgttctgaagatcctgctgtgccaaccgaccctacaagtttgtctgaacggtactaagaaattcgctatcatatccttgtgctgctttagttgaatatcactggtgttcattcttcttgaagattcctaagcaaaagcggttctgaattatcatcccaggtctgcggcgtctcctatgctagattctggaattccacatgcagatgacgtgattgattcaagaaatattgtggacagtaacctcgaattagttccatatcagggtgacatatctgttgatgaaccttcatcagattcaaaagagcttgtcccacttccagagttggaagtcaaggcgcttgccatagttccgttgaaccagaaacctaagcgtactgagctagcccagaggagaactaggagacccttctctgtgacagaggtagaagctcttgtacaagcagttgaggaactcgggactggaaggtatataacactagttctttcataactcatgtagtttggtcgtgggataatgtcaaagctcaaaagctaatggtcgatatatctgatcacacagatggcgtgatgtaaaattgcgtgctttcgaggatgcagatcatcggacttacgtggacttgaaggtaaacacatcagacacaaacatgtaatctggaacatatcacgtcttacagtcaggttaatatctcaagaacatgtgaatatgcaggacaaatggaagacgctagttcacacagcaagtatatccccacagcaacgaagaggagagccggtgccacaagaactgctagacagagtcttgagggcatacgggtattggtcgcagcaccaaggaaaacatcaggcgagaggagcgtccaaagatccagacatgaacagaggtggagcttttgaatcaggtgtttcagtgtaa

SEQ ID NO: 139690 - DNA, 1784 bp, Arabidopsis thaliana landsberg
ccttttgctggcgcactagttgagaaggtggatttttttttttccggcctcttcctgccgctttactttgtggcaagtggtctgaaaactaatgtggcaacgatccaaggagctcagtcttggggtcttctggttttagacaccgccacagcttgtttcggtaagatattgggcactctcggtgtttccctcgccttcaagatacctatgcgagaagcaataacattaggattcctcatgaacactaaaggattggtcgaactcatcgtcctcaacatcggaaaagatcgaaaggtataactttttcaaatccttaacaatttgcgtcatgaaagtttataacttaaatctttcttttgttgtgtcctcaggttcttaatgatcagacatttgccataatggttctaatggctctcttcacaaccttcatcaccacaccagtcgtaatggcagtctacaaaccagcgagaagagcgaagaaagaaggagaatacaaacacagggcagtagaacgagagaacacaaacacacagcttcgaatcctcacatgtttccacggagcaggaagcattccttcaatgataaacctcctagaagcatcaagaggtatcgaaaaaggcgaagggctctgcgtttacgctctccacttacgggaactatcagagagatcatcagctattctaatggttcataaagttcggaaaaacggaatgccgttttggaacagaagaggagtaaacgcagacgctgatcaagtagtagttgctttccaagcttttcaacagctaagcagagtcaatgtccgaccaatgacagcaatctcttcaatgtctgatattcatgaagatatctgcacaacagctgtaagaaaaaaagcagccattgtgattcttccgtttcacaagcatcaacagcttgatggttcgttagagactacacgtggcgattaccgttgggttaaccggagagttttgcttcaagctccttgttcggttggtatattcgttgaccgtggactcggaggttcaagtcaagtctcagctcaagatgtttcttactctgttgttgttctgttcttcggtggtcctgatgatcgtgaagcgttggcttatggattacgtatggcggagcatcccggaattgttttgactgttttccgatttgtggtatcgccggagagagtcggagagattgttaatgttgaagtgagtaacaataacaacgagaatcagagtgtgaagaatctcaaatcggatgagaagattatgtctgagataaggaagatatcgtcggtggacgaatcggttaagttcgtggagaaacagattgaaaacgccgccgtggatgtcagatcggaaattcaaaaagtgcggcggcgaatttgtttttggttggtagaatgccaggtggagaaattgcattggcgattagggagaatagtgaatgtccggagcttggacctgtaggaagcttgttgatttcgccggaatcttcgacaaaagcatcggttttggtgattcagcagtacaacggcaccggaatagctccggatttgggtgcggctgagacggaggtattgacttctacggataaagactctgattgaatgaatcattggttaaaaacaagaacggttcggttcgggtcaggggttggtttaccagagttagtgaaaagttggttaatgaatacggtttaatcaaaatgactggacttggctttcactgtttcatcttttctttcttttttgtcgtcactgttcatctttaagtttttttgctttt

SEQ ID NO: 139691 - DNA, 805 bp, Arabidopsis thaliana landsberg
ggagatttgaatgatcacgagagcttagtgaaggctattaaacaggttgatgtggtgatatctaccgttgggagcatgcaaatcttggatcaaaccaagatcatttccgccatcaaagaagccggtaatgtcaaggtcagtatttcatattaccttgattcaaaccccattacatataaacagagtccaatgttttgaatttttttttttctttttttaatgaaagagtagttctagagggatctaattgcatatatatagtttcatattggatatgttatttgcagagattcttgccgtctgagtttggggtggatgtggataggacgagtgcggttgagccagctaaatcggcttttgcagggaagatacagatcaggagaaccatcgaagcggaaggaataccatacacttacgctgttaccggttgctttggtggttactacttgccaacattggttcagttcgagcctggtctcacttctcctcctagagacaaagtcaccattcttggcgatggaaatgccaaaggttagtagtttcaagaatccaaacacttataacgtggcctatacagtttaatctaacaccgtagaatatttcgcagctgtgatcaacaaagaggaagatattgctgcttacacgatcaaggcggtggatgatcctaggactctgaacaaaatcctatacattaagccttctaacaacactttatcgatgaacgaaatagtcaccttgtgggagaaaaagattggcaagtctcttgagaagactcacctcccagaggaacaactacttaaaagca

SEQ ID NO: 139692 - DNA, 3214 bp, Arabidopsis thaliana landsberg; identical to SEQ ID NO: 67586

SEQ ID NO: 139693 - DNA, 553 bp, Arabidopsis thaliana landsberg
agatggtgaatgagaagaagatgctcccaaaacgcatcatactaatgcgtcacggtgagtcagccggtaacatcgacgcaggggcttacgcgaccacacccgatcacaagatccctctaacggaagaaggaagagcgcaagcgcgtgaggccgggaagaaaatgagagccctcatatcaacccaaagcggcggtgcgtgtggagagaattggcgcgtgtacttctacgtgtcgccttacgagagaacgaggacgactttgagggaagtaggaaaaggattctcgaggaagcgcgtgataggagtgagggaagagtgtaggatcagagaacaagattttgggaattttcaagtggaagagaggatgagagttgtgaaggagacgagggaacgtttcggtagatttttctatcgttttcccgaaggtgaatccgccgccgacgtctacgatcgtgtttttagtaagttcattattttattatagtagacatgaatacgattattgatatggatacttgcattaaaataacatcgttgaattatataaaccttttt

SEQ ID NO: 139694 - DNA, 1363 bp, Arabidopsis thaliana landsberg
  unsure (1)..(1363): unsure at all n locations
cgacctcgattctcttccacttctttcttgttccaaaaacctaaaccctctctctctctctctctctctctatctcttgaaaaatcaacaaaacattggaatcaatttctctatgttttgattctattttaaagatccaatattctttctccattgagattaagcttctttctcgctgtcgtctctctatagatcttggttcttagtcccttttgaataataatgatggtggagatggattacgctaagaaaatgcagaaatgtcatgaatacgttgaagcacttgaagaagaacagaagaaaatccaagtctttcaacgcgagcttcctttatgtttagagcttgtcactcaaggtaataataatccaatcaaaatctccaatttttaaacaagtctcttacaaatcttgatggggttttgttatgttttgtttctgtatagcgatcgaagcttgtcggaaggagttatctggtacgacgacaactacatcagaacagtgttcagaacagaccacaagtgtttgtggtggtcctgtctttgaagagtttattcctatcaagaaaattagttccttgtgtgaagaagtacaagaagaagaagaagaagatggtgaacatgaatcttctccagaacttgtgaataataagaaatcagattggcttagatctgttcagctatggaatcattcaccggatctaaatccaaaagaggtatttaaagttttgagctttttaaaggagttttagttttcgattatgaggaaataatcatgtgttaattgaattctcagagcgtgtagctaagaaagcgaaagtggtggaggtgaaaccaaaaagcggtgcgtttcagccgtttcataaagcgcgttttgtagactgatttgcaaccggcggtgaaagtagctagttcgatgccagcgacgacgacgagttctacgacggaaacttgtggtggtaaaagtgatttgattaaagctggagatgaggaaagacggatagagcagcagcaatcgcagtcgcatacgcatagaaaacaaaggcggtgctggtcgccggaattacaccgtcgattcctaaannnnnnnnnnnnnnnnnnaggatctcatggtaattacgattaattttaattacctgattatcttctatctgattggttcattagtgattcataatcgggttgataaagaactgtttttaaacattaaaacgtctcaacatttacattatattagtaagtaacaaagattattatcaacattaaaaaatgatttttatttgacattttatttgccaatcttgcagttgctacaccaaagcaaatcagggatcacatgaaggttgatggattaacaaacgacgaag

SEQ ID NO: 139695 - DNA, 1350 bp, Arabidopsis thaliana landsberg
gaaagtttcaaaacaagagtcctccgtcgtcgcttgaacggaagatattgtatggctagctccgggaattgtctcctactggtagattctggtctcgatttctatattttgaacctgttaacgatcaaaacgatcaagcttccatctattagacgaaagggctgtagggaactcttcaacgacgacaacgaagaatgcaaaacaacagctgttctgtggataaacgagagaacaaaggattatttcgttgcttggattaatttttcaaacagaaatacttgttctcactcaagaaaggatatgattcgaagtggaatcaaaacagtggaagtattttcgatatggcttataagaacagcaagctttatctgtatactttggatcatcacatcaagatttatgatttctctggagattctcccaaagaagaaggattgacaaacccgtattcgaatcatccttttcgctttgatgagaaaccgcaggaatacatttggaagaggaaaatagtgattgcagaatcaggagaggttcttaaaatcttgagcttaaaaaaacggaaacaaaaggagactaatgaagaggaacttttgttttacatctttaagatgaatcttgaaagtggcaaatgggagagagtgcattctattggagatgatgaatgagatgttgatcttttgtcatggggttacaatgagagcacaagttcatgatgttggtgatggaatcaagagggattcaatctgtttcgttgaagatgatctttggccggattttgatcgtccttcaaattgcggtatcttcaatcttgccacaagtagaataacatggcctaagagatacggtgtttacatagatcaaaaacaatggtttcttccaggatttgcttagtctttgtttcactaatgcatgttcttccaaagtttaaggatgacggttcaattttcttctctgtcttattttttcactagtttgaatttgcttcgacatagaatgtgatggtgtcttctgtgttttgcttttctttctcttaaacttatttcttatcattaatcttaaacacatccagttgtttcactatagaggttaagcctaagctcagcaaaagacattagttgttcatctttacattagaagctactacatgcgtcttcttcttcttctctaacataagttttcagagagggaatactttcttgtgcttgaagtataacacaaaaccaaaatacaaaaaaccgcatccaatacctgttatcagtaaaacatactggaaagtcgtcggattctggaaaacagagtcttgcaaattcatcccgaagacagcggttacagcggcaaaaatagctgcca

SEQ ID NO: 139696 - DNA, 1201 bp, Arabidopsis thaliana landsberg
cacaacaacttcttcttcctcgcttctcctcaaaactcttctccccgtaagccacctgaatcgtttctctacactctctggtatccgcgttggcgattcatggactcctctgctccggagcatctccaccgctgggtctcggcgtcgagtggcgattgtgaaagctgcgacggtggattcggattactcgtcgaaacggagcaatagcaatgagcagagagagacgattatgcttcctggttgcgattacaatcattggctcattgtaatggagtttcctaaagatccagcgccaagtagggatcagatgattgatacttaccttaacactcttgctactgttcttggcaggttcgttttcgctttcttattgattctcttcgttgttgaattagttaactaatagacgacatttacttgtgttgctaatggacttgtcctttgattgaatccaatgttgcgtataggaagatttggttttttgttagattagggtttttgatgatactttagggtaagggtttagtgagctgagtaaagctttcagctttaaatttgctctgaagttgacctagttccagaatttgttcttaatatcaggtgtaatctttagctgacttgtttttcgtctcttgatatgtgcaaacttattgaacattgctgcatattgaacacaaaacattggtgtctgatttgatatctaaaactttgtgctctttagcgtaattatgaatgaaattagggggaagaatagaagcatctatttttgcatattttcttcaagctatgtataaattgtaggtgattgtgcatggtttctgtttgttaaaaacttgatgtggacagtgtaagctagtaatgtatgtaaaaggagtgtacaattgtgcagagcattagattgggactcctgactagaaatttcttggtatggcagggaacgagtttgtgttacacaactaatgactaaaactttagtttatttggtgctactctctattttagagaactttgattcctgtttacactatcctgctgatgtgataaccaattaatgtacttgtgtccattttccagcataaccagttcatcgtgtttgcttattatatgtacttgtgtctattttcaacatggaagaggcgaagaagaacatgtatgcattcagtaccacgacatatactggattccaatgcaccatcggcga

SEQ ID NO: 139697 - DNA, 1775 bp, Arabidopsis thaliana landsberg; identical to SEQ ID NO: 8210

SEQ ID NO: 139698 - DNA, 2443 bp, Arabidopsis thaliana landsberg
atgaaagctttaagacggattcaaacgacgtcttcgttttctaatccttcatcgccattatcatctcctcttttttcttcatcatcatcctcgtggatccaaatacgttctgctctcttcgttgttgcttcttcatctcaggcttcttgttctgatcggttagtctattagatctccattgtttgaaattagattcttaagatctcgaatctatttaattgactttgttagactttcataatcatcgaatcttagataattaattagagtttagctgaatctgtacatttaaagctttcaaggctatttctggatgttttgttttctattttggtcttgttgaaatcaagtaggcacatttttaacctctgtttcattttgttgcaggcctcgtcttaaatcaccatggtctcggaggaaaaggaaaaggccacttagacctcagcaatggaagaggttttttactcctgacggtagattgcggaatggaggagtggatttgttgaagaaagttcgaagtagagtgagtcacagcttcatggaactaacttcacagtcacagccatttttgtggttgttgattttaaagattgtttatatttctcttgtttccttgtagggtattgagccaagcattcggctagaggtgtggccattccttcttggattgtaagtatacagtcaaaactctagtagctaaatcctattagctacgattgcttctatgaaagagttgtggtttagttagaagaaactgaaaagttgcactctttttggtatgtttgctgatttgtttttatactaacaggtatggttttaatagttctaaagaagagagagttactataagaaaccggaggaggtgagatagactgattgaattactatattgggggatagttttttttacttttatagctcttttttcgattctttagctcatcggttttgttacaaatgcagaaaggagtatgagagactacgtaggcagtgcaaacggcttcaaaaacacaataacgggactcgtaagttatacaacggcagtgaaactatccaagatgagtatgattggcctcgagttcaagacactgacagttcatgttctgatgaagttgttagtgcccgtgagtctctctctagtgacgaagacatttctgaagatattgggtctatgagcgaggtttcatgtacagttgagagagacgacggtagtagttcaagacgaatcaccaatgctactatctctacacttaattccgagtcatcagattcagattcttcagatgagagtgaagtggtacaggtctttcaatcttctgctactccggatgtgaatagtacttatccagccagttcatctattccccggacagaagaggattttgtgacgtggcagcgtattatccgtctagacgccgtgcgtgctgactcagagtggacctcctattctccatcccaggcagttatatcggaggatagagcatgtcgtgccgctgaggcggttgggttgaaagattacaatcacctggaaccgtacaaaatctttcaagctgcacggctagttgctgttcttgaagcttatgctttgtatgaccctgacattggatattgccaaggaatgagtgatcttctctctcctatactctctgtaatccctgatgaccatgaagtcttttggtgtttcgtcgggttcatgaagaaagctcgtcacaatttcagacttgacgaggttggaatcagaagacaactcaacatagtctcaaagataatcaaatctaaagactctcagctttataggcaccttgagaaactccaagctgaagactgtttctttgtatacagaatggttgttgtgatgttcagacgagagctgacacttgatcagacattgtgtctatgggaagtaatgtgggcagatcaagccgcaatcagagccgggatgggaaaatccgcgtggagtaggataaggcaacgtgcacctcccactgatgatttggtgctctatgcaatagcggcctcggtgttgcaaagaaggaaacgtattatagaaaggtataacagcatggatgagattttaagggagtgccaaagtatggcagggcagttagatgtgtggaagctccttgatgatgcacatgacctcgttgttactctacacaccaagattgaacattcattctcataaatatttatctctatattattccgcgggatttgtggatcctgcgactagtttaaaatggtggattcttggggaagtccccagtttcgtgcaggctcgaattgggccgtgagctctatctgaatccttgccgatatggaatgaggctagagagattgtgaaagagtggtgaacagagaggggtgtgtaatttaattaaaataaagtgtatgtgtgtgtgttgtgaagaatgtggaaaggttgaggagggtttctaaatta

SEQ ID NO: 139699 - DNA, 1677 bp, Arabidopsis thaliana landsberg
aaaattctcaccaagtcctctgttgaacatgacgattaagcctaaatcgccggcgagattcaagctaggtaggcagtcttcgcttgcgccggaatcaagaaccccgattgatacgttaacggaagatgaggacgacgacttggctgcggcggctacagctgggatcggggatccgacgattcgtttaatgtatttagccaacgaaggtgatatcgatggcatcaataagatgcttgattcgggtactaatgttgattaccgtgacatcgatgcccgtactgctcttcacgtcgccgcttgtcaaggacgaaccgatgtcgttgagctgctgcttagccgtggtgctaaggttgatacgaaggaccgatggggtagtacggtatgaattcgaactttctctgggctgaattttgtttgctttgcctgacttgacttctcgtagactctttagttcgttttgtgttcgacgaattgccgcacaaatcatatgttttactggagcacttagatttagcaaactcggttgcaataacagtgatggttaacaatttgtgattgatcttaccagcctcttgcagatgcagtgtattacaaaaatcatgatgtgattaaacttttggagaaacatggtgctaagcctacggtatgtgtttatccctcatagttgcattgatggatgttttagtttctgaatgtttggattgatttctttaataatcgtttctgattttagattgctcctatgcatgttctaactgataaagaagttccagagtacgagattcatcctacagagcttgatttttccaactctgtcaaaatttcaaaggtaagtagttcccttgcccaaatttatttgttgctgttttcacttgcttttatttgctgttcacagttgtaattactgtctgtctgctttacagggtacctttaacaaggcttcatggcgtggaattgacgtggctgttaaaacctttggagaggaaatgttcactgatgaagacaaagtgtgagtctacatccattgatttctttgtattattgtattaatcatgctctataggttttcatatccttctggtatccaggaatgcatttagggacgaacttgcactgcttcaaaagatacgccatccgaatgttgtccagtttctaggggcagttactcagagtacccccatgatgattgtcaccgagtatttaccaaaggtcctaatctttctcaatctgaataaccacattcagaggatgtatgacctctccaggtttacaaattatcatcttagattcaagatccatcatgaacactagcagttggaatcctataaacattctggtaatacttggttgagtagatcttaagaagcttacaaaataaactgacaacgttttgagctagtcctttgtttacctcgacagttagttagatatgacatgaagaatggctttgatatttaattgttgtttaagatgtttagatcttaacctctgcaaactgctgtgtttcatatttcactgcataaaatctatgcttctaattattaagtgtttatttctagggagatcttcgacaatatctagacaggaaaggacctctaatgccagcacacgcagtgaagttcgcccttgaaattgctaggttaagtggctatttcctgtacttttatattttcctca

SEQ ID NO: 139700 - DNA, 1072 bp, Arabidopsis thaliana landsberg; identical to SEQ ID NO: 54039

SEQ ID NO: 139701 - DNA, 717 bp, Arabidopsis thaliana landsberg
ctttgcttctcctttgccttcctccatcatccctgtctttgacctcttcttctctcatcctcttactttcccaggtctctttctctctctctctctctctctctatgttccttctgtcaaagcctctatgtgtgtatatgtctcctcgttttcctcaactgttttttgttcaaaatggtctatcttatgtttgggtctagatccggggtgtctgatgctaaaactgaagaagttttgctttcaggggaccaaaaggagaagcagaggtacttcttttgcaagaagagagaagtgtcaagtaatgagcatagaatcaagatttcctctggtgatggttattggaaacctattggtaaagagagaccaatcattgcctgtggtaaaacatttgggattagaagaacacttgctttctatgaaacaaacaagtcttcttcttattgcaacaaaactagatggagcatgacagagtattgtcttgcgggatttgcgtcggctaaggtacacaataactactctagactactgtaagaaagacattggaatgtgtgataataatgggttaaacaggtgtctggagaatgggcagtgtacaatgtttatgagaggaaagtctcaaaaggaagaaaacagaggaaatcaagagagggagatgatgaagaattgagatgcatcgaccattttacggttgggtcaaatcatgaaacccgtccaccg

SEQ ID NO: 139702 - DNA, 1475 bp, Arabidopsis thaliana landsberg; identical to SEQ ID NO: 63320

SEQ ID NO: 139703 - DNA, 2414 bp, Arabidopsis thaliana landsberg
tttattttttatacacgtcaaatctctctttgtggaacgggtttgtgtttgttttatcttatgtatgtacagtaaggaaccgatttcagaaaagtgggagtcaagcggtgtacgacgtgacagagacaaaaaaatcttgcgtgacgagagtcgacatgcctggttgtcccgagtcagatctcacctactgggtcgacgccaacaacgtccacttcttcgccgacgaaccagcaatgcctgagtacgaaaacgccggacgcaaatacggaggctccatgattttcaaccctgaggcttacgacgtcaagaaaactaaagtgaagcttatcaacggagtgctctggatcaccgtccctaagatcccaggcaaaaacgcttccattaatgtcaaggagaggatcctccattactgatttaacaacaccttggtttgtgtctcgtaatggtacttgtgtctagcgtctctatctatctatgaactttgatgcagctactgctttatgtttatcattttgtggtttagttaagaacgatcttgcttctatatgtcgtgatctcaataaagaaaaagttgtcagctttctttgttctatttaatcttacattaacctagctattcgataagactatatagatctttgccattattaaaccggattaggagtatgtaacctggacatgttaatagatatatgttgttgtaagtagggatcaaactttttaatagcgttatcgtaataattggataaacactaaacgacggttgaaaccttatttgatctttgatgaaaaaaaaaaagataattgagagctcataatttttttactcttgaagattgctgacgtcagcgtcgtcttgtcaaaaatgtttgaaaattaatgaagagtgaagagtgtgggtacggttttacttttgcagtcatttttgtcgtacataattacatataaacgaaaggagtaaaaaaagcgtgggatagctcacagagctggtgacgtcagcttattctctaccgtaaaaaaaaatcaaaagagtaaaagcaagttttttttcttaccgagagagagagtcggtgacgtaggcaagaccagtcaaacttatgctatgaaggttaaaaaaaagccagctggagcgtgccacgtcacagtctgtaccacaagatggtgcttcgtctatatttatcaacaggagaacaaaacgccatttttacgcaacctaccttgaactagaagagaagagagagcaaaaaacaaagagagagatgggtgagacaaaggcagagttcagggacatgtcaagaattcctaaagttcgaggtatctcttttcacgagctactagatttcccaagaacaacattgttctaatttttctcggaaaaaatgtggtttttctagaaagttgtctcaatttgtttacttgtgaagtgttaacatgaacttggtacaaagatttacagtttttttactgtgcatgattcatgaaaatgaagcagatcgagttagttccatctttgataagtgtcttcctttgttctctgtatacttttcttcatcaagttttgatctttgtttacttattattattacagaggggttctacgcgacgaacaatcagtttcagaaagcgggtccaaagggtttcgttcaagtgaaggttctggagaacgacaatctctacgtgcgtgtcgacttgcctggtgttccagacgacgccgttcgctacagagttgacgccgtgagacaaaaggttgtctttttctccggtgaaactctgaacaacggcaaggaaggtgtgcgtcagtactctggaaccactgggcttggctgtgactgctgcgagatcacaggcgtggatgccaaaatgaaagatggagttttgaggatgattctcacaagggtcaaggttgtgagcaaggctcaagacaacaacaacaacaagtgtactctcactgtgcctccttttacaggttcgactcattcctcttctctaaagtcacaatctcttttgctgcatcatttgttgttaatacagtactctctgttctttattaaggtcaatccggaatacgcttggaggatcatccgtgtctggtgtctggtcgcaagggagcactaattggggtgacaaaagcgggaggaggggctcactttgcagtggacatgccaggtgttagtccggatgatgtggaagtgtatgctgatggaaaggaaatcagattcaaagctgagatcaaggacgtgtatgaacacgatgagagcggtcgaacctacctcggaagcgtccaaagtccttttcccgctttaatttcgaacaacaccatcgcttgggatgcagaatttggtgttctcaggattgctgtcatacctcctgacgacatgaccaccatcaacaacaaaagaaaccctattgaatga

SEQ ID NO: 139704 - DNA, 2752 bp, Arabidopsis thaliana landsberg
  unsure (1)..(2752): unsure at all n locations
cttaccttgtggctttatgtgcatgcagagaaactgcagtcatcgatagagtgtaatgaacgggagacatattgtggcacatttaaagaagttacaaagcttgtgtgctcatgtttgtcagaaatgggtgatagttctcttgtccttcagattgtagagaaagtttnnnnnnnnnnnnnnnnnnnnnnntcttttgataatgcttatatctaaatggataataacattctcatttaatagcactgcatatacttaaggagattttgttcttcttggtgtaggttttgaagcctgcgttggataatgggtgtgccatactcaggatgatctgcgtgttggactctacccctaccacactttctgaaaggagtgtaaccactctaagtgagttcttaccgggatatatgatcaacatagtcaatgtaagcatttcccctttaaaaactttgcagggtcctaaatgtttcattataatcttgggattgacacatctcttacgctcttcttgcagtgtataccagaggataaggagaactcttacctttacatacaaacatgtctctactatttagtaccttgctatttcttgttcaatcggagctccaaactcacagaacaggttctgataagaatgcgatcaatgattagtgaaaacacaaaagcgctagaatcggtacaagacagggagagcggtcgaaactcattgaatatgatacaatgcattatctctgtgatcctgctgatgcacaacgacgtcaaagttaggaagataatatcgtcattcaagcccgagatcgatttgattcttcagaacgttatcacgttgcaggtatcattttctccaatctcttatcattattgcaaactgcataacacatgtgctgataagttttacctcttaaatgtgtagtcctcacgaagcacgagcttgactgtagaaggaaagcatatgatgaaaattgcgggagagcgacttaggattgcgtccaaaagcttactcgcgtaattaagttctacaactgtaacataaaatgatttgtgctctctttataaaggatgcaaaagatacgacttagcttggttgtttgagaaagcaccaattttgatgacaattttgtagaattttggtttagagtttaattgaagtgaaaaagacatatatcttcaaaactgtgatacgcttcttcacatgaaaaaggttttctacattaaccaagcatccataacgcttggttccagaagccaaccttcttttaaactgcaacgagaagatttgaactacgactttcctaaccagtaaatcttaaaaccactgcaccaccatgggttggctaaatgttcaacatatgattcatttcgccaccaaacaactctggtttattggattttgcagtaaactacatagttactaatccaagagtcaaagttctcgaaaaagtcatcatttattctaccatctgaagtgatgggcttttaagaatgattaagcccattaatattgacaagaaagcccattatattagtaagacccaaatattcgacccgtttataaaaccctagctcgcaggctctgagtatctctctccgtccaatttccgtctctctctctttttatctcaccgtctgatcgcttagaagcaaccatggtacgttctccgccgccggagtaccttttttttcttcttacagctttcgtttctcagatataacagcttgagcgttttgatctctaacaatttctgtggtttcttctattggtggatgaaaaacagcctcagggagattacatagatttgcacaggaagaggaatggatatcgcctcgaccacttcgagagaaagcgcaagaaggaggcgcgtgaagttcacaagcactccaccatggctcaaaaggttcttactttcttctccttcgtcttcttccatttttagcttccttttactgattcttcttctgcttttgctctaattgcagtctctaggtatcaagggtaagatgattgctaagaaaaactatgctgagaaagctctcatgaagaaaacgtaagtgtttcgtcttattctctgagaatctatcattaagtgaaagtgttaagtagtataattgattggatattcctaagttaataggtgtggttttatgagaatcttacattggtttgatttttatttttgtcataacagattgaaaatgcatgaagagtcatcatcaaggcgtaaggctgatgagaatgttcaggaaggagctgttcctgcttatcttcttgatcgtgaagacaccactcgtgccaaggtttgtttgttttttcttttcaagttgagatatctataattctgtaacttggtgacggcattacattaacaagtgtgtgtttttgggtgtaggttcttagcaacaccattaaacaaaagaggaaagagaaagctggcaaatgggaggtccctcttccaaaggtgaaatctctctctctgcttttgtattccttcagtgtttgaactctaacaaatgggcaaagcttaaattcaagccctgtccttttacaggtccgtccagttgctgaagatgaaatgtttagagtgatccgatctggaaaaaggaaaagtatgtatttactttctaatccagatatagctacttgtttgttttgttatcactctatgtctttgtttaaacacttatcatcatatagagctattgattaaggaaatgactctagactagattgagtttgctttgtggattggttgtatta

SEQ ID NO: 139705 - DNA, 1245 bp, Arabidopsis thaliana landsberg
  unsure (1)..(1245): unsure at all n locations
gagagtagaacctaaagaaaaaagtggtcgtccaatggacctctcactaattcaaggcatgtctctgcctctctattttctcttaacattattctttttcttctttgctaccgcaaaaacgcggagaagctctagcaccggcacgcttccaccgggtcctccgatactgccattggtcggaaacatattccaactcggattcaatcctcaccgttcacttgctgccttttcgaaaacgtacggacctataatgagtttgaagcttggaaggttaaccgcagtggttatatcttcaccagaagcagctaaagaggcacttagaacacacgaccatgtcatgtccgctcgaacctttaacgacgctcttcgagcctttgatcaccataaacattctattgtctggattcccccctctgctcgttggaggtactaactctatctaagatcaacatttcatttctttttaactctctttgtgttgatatcatccgtgtactaaacttcaatttaaaactttaaatctatacacacgtgaagtgattagctacgtacaactccattaaagttctgtatgtatgcattgtcaggtttctgaagaaaacaataacaaaatatttgttatcaccgcaaaacttagatgctattcaatctttaagaatgagaaaggtggaggtactagtgagtttagtaaatgaatttcgcgagagaggagaagctattgacctggctcgtgcttccttcgtcacatctttcaatatcatctcaaatgctctgttttcagtagatttagcgacgtatgactctaactcctcgtcttacgaatttcacaacacggtggttcacctgacggagatcgccggtatacccaacgtaggagactatttccagtatatgaggtttcttgatttgcaaggtacccggaaaaaagcggtgctctgcatagagaaattgtttagggtttttcaagaattcattgatgctcgannnnnnnnnnnnnnnnnnnnnnnnnnnnnnnnnnntaaagaggcttcaagcatcgatatgctagactcccttctggatctcacacagcaaaacgaagcagaattaacaatgaatgatctcaaacacttgcttctcgtaagtctttcacacacaccaatggtaagattaagatattggttggatgcaaatatcatcagtttacctatttttgtgacaggatgtgtttgttgcgggcacagacacaaactctagtacaatgga

SEQ ID NO: 139706 - DNA, 772 bp, Arabidopsis thaliana landsberg
ggtacaagacccgttggagaaccagagacttcacatgggttcaggccctaaatgtcatgttcgaaaaccacaagctcgtgatcacagccaacagagtgaatcaatgggatgaaacatctgacgcctttaccatcagatatgatggagaactcatcacactccctgaagacgaacaatcagaatggagggaaatttcaggacaaaagaaggatatcatcatcgaaagaactgatgagagaaacagcgtaagagtacttgtctctggtcttgttcagatggacatcagagtgagacctatagggaaagaagagaacagagttcacaactatcagttgccgcaggatgacgcttttgcccatctcgagactcagttcaagttcttagacctaagtgagctcgtcgagggtgttttggggaaaacctaccgtcctgattacgtcagctctgccaagactggagtcccaatgcctgtattgggaggagaagacaaataccaaacgccttctctgttctcgccgacttgcagactgtgcaggttcaagcctcaagaagaatcactttctgctgatatctaatgagaagaaggagaaagatggaaacttctttgatttttaaataaattcatggaaatttcgtgtttgtaactgttttgtttctggaaatattttatattcataaaaagtgatgtaataaaagccaaaaagataacatttggcctgtttgtgatgtttttgagggtttaagaaatgtaaaacatttcttgtgcaagaag

SEQ ID NO: 139707 - DNA, 830 bp, Arabidopsis thaliana landsberg
agtataaaaagtaaaatttttattaattgtcagtgcaatattgttcttgattttggtgtctatatttatatgacagattagaaggagatgtccaaaaaacaaggggaaaataatatggtacgataactgtgttctcgagatctcttcaatcgatacctttaacaagattgatttaccagaacaatttctttatgtacaacgcaaaggatgtgagcggcgatattgagttgttcaacaagaatacaagggatctccttcatgagctgaaggagaaagccaacattaagagcaagaaggatttcatgtatgcggcaggggagaagggtcttggggaaaaaaagttgtatgcgatggtgcagtgtacgaaagacttgacacctaacaattgtaatgtgtgtttaaattggattatggcgaagcttcctaaatgttgcaagggtaaacaaggaggaagagtcttgagtacgagttgtaattttaggtatgagctgtacccttttcttatgatttgaagactactaaaagaaaggacctttgttagagcctctaacttagagggtttcgtttggatggtgttgcaaatcagaggacgtgcttgaaatgttgcatctcttcacacaaaagcttcaacccttaaattgaagctgttatattgcattgtaattgttgaatatatagatgtgatcatttccttttttcaccgttgatccaataattttactctcttagcgacctttttattttatgtgttgttggttgaattatttgtttgttctagtcattgcactactctcttaattttttgtcatcatcaaacaaatataataaaa

SEQ ID NO: 139708 - DNA, 992 bp, Arabidopsis thaliana landsberg
ttgatttttatttttctctctcaaagtttttcttgggagagcaacaatggcgatgaggaagcttttatcgaagaaactcttcaatatcacgaatgttgcttcacagagtcttatgaattgtcgcatttcgtcttcttcattagccgtacgaaccagagttccgaatgattcaacagatacaaccaaaatcgcaccggagcctggagatttggcgatgtcgcgaaggttcatgcataacagtgctatgattaggccggcggagattatgcagatgccggtgggagagagtttgattgagaaactccgtgagattgatggaagcaaggatcggattcgattagacggacttgctcctccggagagggagacgagtttgacggtggcggatacgaagaagctgcttagagcggcgcagttcgagattgtgaaatcgaagctaagagaaacgggaaaaagctggatcccggataaggagtttgttagcgtttgtggtgaagcttcttcagatccagatctcggatctaaaatcgcgaagatgcttgatgattcagcaaacgtcatcgttttgggagattccgtttgtattagacctggtcagggactttcttagttcttcttctctagccttttagcattttgaaatcgtgctttgtttctaagatctctctgagtattgcagctgattgattgggagagataagatagagatttaaaaactctctgaaaaaaacggattaggttctcaaaagtttttgttcgattttgattttggaagctatcccgaaaactgataccatttatattcggttggatctcttttctttaggatccacgcccacaggaggtatacaaacctctgtgtttttaccagagttccataggaggttcccaagtttgagacagatggtgataaagaggaccagtttctacagagaccacaaatataaaaatttcccctaaaaaaagaaccattggttggattagggttataa

SEQ ID NO: 139709 - DNA, 507 bp, Arabidopsis thaliana landsberg
catcaaccgccaagccgcccctgtcactggtgtcccagttgctcctactttggccaacgcccaagccgcagtgacccttggagtgcacgtatgagggaaaaggtaacaagattataacgtgctgaaattaaaaaaaagcattagtgcgataccgagattcactgattgcttttttttttgaaacagtatgggcttgacacatctgagttcacatacaatccctcagagtcacaccggttccagcaaatgccagcgcaaccaaacgaagaaaagggccgatgcaccatcatgtgagtccattttaaaagtcttgaagagttcagttaattctcttttcctgtgtctttattatttctgcgtgtaacaatcaagagtgtcagtaaaagtaggattcttgtttctgggttgatgatgactctagcatttgagatctctaatcaacctagtcacggtctcaaaactcatttgttgtgtctgtgtagtcttttgtaaggattcaccattatg

SEQ ID NO: 139710 - DNA, 1163 bp, Arabidopsis thaliana landsberg
cttaacggtttctttattattcttcccattctacccctcttcttccttctaattccccctcaaatgccactgtcttctcactaaactccaaaacccaccggaaaaaatgattacgtggcacgacttgtacaccgtcctcaccgccgtggtaccactttacgtagctatgattctcgcctacggatccgtacagtggtggaagatattctcaccagaccagtgctccggcatcaaccgcttcgtcgctatcttcgccgtccctctcctctccttccacttcatctccaccaacgatccttacgccatgaatttccgcttcgtcgccgccgacacgcttcaaaaaatcatcatgctcgtcttacttgctctatgggctaacctaaccaagaacggtagcttggagtggatgatcacaatcttctctctcagcactctcccaaacactcttgtcatggggatccctctgttgatcgccatgtacggaacctacgcaggttctctaatggtccaagtcgtcgtcctccagtgtatcatctggtacacgcttctcctttttctcttcgagtttcgtggcgccaagatgctcatcatggagcagttccctgagacggctgcttccattgtttctttcaaagtcgaatccgacgtcgtttcgctcgacggccatgattttcttgagaccgatgcagagataggtgacgacgggaagcttcacgtcaccgtgagaaaatccaacgcttcacgtcgttcgttctgcggcccgaacatgactccacggccgtcaaatctcaccggagctgagatttatagtctcagcaccactcctagaggctctaatttcaaccactctgatttttacaacatgatgggtttccccggtggtcgtctctccaatttcggtccggcggatatgtactccgttcaatcatctagaggtccaactcctcgaccttcaaacttcgaggagaattgcgccatggcatcctccccgagattcgggtattaccctggaggaggagccgggtcttatccggctccgaatccagagttctcttcaaccaccacatctaccgccaataaaagcgtcaataaaaacccgaaagacgttaatacgaatcagcagacgactctgtcgacgggcggcaagtcaaactgtcctgacg

SEQ ID NO: 139711 - DNA, 779 bp, Arabidopsis thaliana landsberg; identical to SEQ ID NO: 10019

SEQ ID NO: 139712 - DNA, 1403 bp, Arabidopsis thaliana landsberg
aaagaaaaaaatatgggtatccaagaaactgacccgttaacgcaattgagtttaccaccgggtttccgattttacccgaccgatgaagagcttatggttcaatatctctgtagaaaagcagctggttacgatttctctcttcagctcatcgccgaaatagatctttacaaattcgatccatgggttttaccaagtaagtatatactaattgaaacccttctcaaaaaatgtttatttttcttaacagagattcataattttcttggtttttcttcttttgtgatttatagataaagcattatttggagaaaaagaatggtatttttttagtcctagggatagaaaatatccaaacgggtcaagacctaaccgggttgccggatcgggttattggaaagctacgggtacggataaaataatctcgacggaaggacaaagagttggtattaaaaaagctttggtgttttacatcggaaaagctcctaaaggtactaaaaccaattggatcatgcatgagtatcgtctcattgaaccttctcgtagaaacggaagcactaaggtaacaaataaaatctaaacaataataaatactatatcttatattttcttcttgtagtgttttgaatgacctataattaatattcttgttaattttctttagttggatgattgggttctatgtcgaatatacaagaagcaatcaagtgcacaaaaacaagtttacgataatggaatcgcgaatgctagagaattcagcaacaacggtacttcgtccacgacgtcgtcttcttctcactttgaagacgttcttgattcgtttcatcaagagatcgacaacagaaatttccagttttctaacccaaaccgcatctcgtcgctcagaccggacttaaccgaacagaaaaccgggttccacggtcttgcggatacttctaacttcgattgggctagttttgccggtaatgttgagcataataactcggtaccggaactcggaatgagtcatgttgttcctaatctcgagtacaactgtggctacctgaagacggaggaggaagtcgagagcagtcacgggtttattaactcgggcgagttagctcaaaagggttatggtgttgactcgtttgggtattcggggcaagttggtgggtttgggtttatgtgatgatgaaatgctgacgcaataaaaataagtcgttagtttttgtcccgtggcaaatcttatatgtatttgaatttcaattcttttgggttaagagggagactcatagatttagatgtagatttgtaatctttcatgcatagaaaatttgacgaatagatttcgtaactttattttgttgctgtttggttatctttgtattggtataaatttagtggattgaaattgcatattgatatat

SEQ ID NO: 139713 - DNA, 1586 bp, Arabidopsis thaliana landsberg; identical to SEQ ID NO: 28238

SEQ ID NO: 139714 - DNA, 2756 bp, Arabidopsis thaliana landsberg
ctatctttgaaaatggcgatgactccggtcgcgtcatcatctccagtttcaacctgcagactctttcgctgcaatctcctccctgatctcttacctaagcctctgtttctctccctccccaaacgaaacagaattgcctcgtgccgcttcactgtacgtgcctccgcgaatgctaccgtcgaatcccctaacggtgtccctgcctccacatcagatacggatacggagacggataccacctcctatggccgacagtttttccctttggccgcagttgttggccaggtcagagaatttgcaatttgattctgcaggttgcataattctactcaatttgatttagttggagttgggtataggaaaaagcttcagtttttcatcagtgaactgtgtgttatgggacttttacatttgtttgttcaacttgttagatgccgaaagcctcacagaggatgtaatttgtttgctttaactaaatgttgtttgtaggaaggcataaaaactgctcttttacttggcgcggttgatcgtgaaatcggagggattgccatttcaggtcgtagaggcactgcaaaaacagtcatggcgcgagggcttcatgaaatcctccctcctattgaagttgttgtaggctcaatatcaaatgctgacccagcttgtccagatgagtaagattcttacaatctgagaaagaaattgcttttcttcttcttttaattcttacactgttggcttgtaccttttgtgatatatgtaggtgggaagatgacttagatgagcgcatagagtacaatgctgacaataccattaagactgagattgtcaaatctcctttcattcaggtacatttagttttaggaggcattacaatttttctgaaattgtttttctttttacttaggttttcctgtcgtttatgtcacacagattccactaggagttacagaagacagactcattgggtctgttgatgttgaggagtctgtgaaaagggggacaactgttttccaacctggtcttttggctgaagcccatagaggagtgttgtatgttgatgaaataaatctcttagatgagggaattagtaatttgcttctcaatgtattgacggatggtgttaatatagttgaaagagaaggaatcagctttaggcacccgtgcaaaccacttttaattgcaacctataaccctgaagaaggtgctgttcgagagcacttgctagaccgtgttgccattaatttaaggtactactggagtttataaatcaagtgtgataaatattgcctgtttcttttgggtaattcccatttctttctctttttacatcacgatgttaacctttgcagtgcagacctacctatgagttttgaagatcgtgtcgcagcagttggaattgccacacagtttcaggaacgctgtaatgaggtttttagaatggtaaatgaagagacagaaacagcaaagacgcaggtatcttcaaatgaattaagaaaaaaagggcctcattagtaaaaatttgatgggatgctatgcttctcatcccacttttctcgatcataatccagtgcattttctctgactttagattatattggctagagaatatttgaaagatgtcaagataagtagagagcaattgaagtatctggttttggaagctgtccgaggtggtgtccaggtattgagcaaaaattctgaagtaattttttgttaatggaagaaatacacttagtaacatattcctggaagaaaaaggataaacacgaaaagaaaggacaagatgcatgcaatgatgcaacataatgtcacgattatagacttcaactagtatagggctcaagaaatggctcaccacaggcagaaagatacatctagatagagttgttttgatttagaaacaacgctggaaaaagaagggcctggcatcaaatgcttttgttgcgctgttgattgtaatatttcaccaagttatgatcatatcactatagttatatttctgcgtttggtttacttggtagttacttctcatggcgtatcttttgtcgatgattacctggaatcgtttaatactcctttcccaaataacaaatttatgatacagggacaccgcgccgaattgtatgcagctcgtgtggcgaagtgtttagctgcaattgaaggacgagaaaaagtcacaatcgatgacctcagaaaggccgtaagtactcttctctagctcattcatttttgttttctttcccagaacgatcaagcaagtcataaacttatagaattagtcatcctacgtttactttcactttccttgtattgtctttgtctataattgaacatcttaatagaaatttttgattagcaatgtagaatgacgctctataatgatttggatggagtatttatgatatcctccagttattgattagcaaatgtggtccattttttcaataggttgagctggtcattcttcctcgttcatcactagatgagactccacctgaacaacaaaaccaaccaccacctcctccacctcctccacaaaatagcgaatctggagaagaagaaaatgaagaagaacaagaagaagaagaagaggtcagtggatgcagtacacattattctctcgttgaacacacgttcaaggttctaaagtagaaatcattaaccaatgtaggatgaaagcaatgaagaaaatgaaaatgagcagcaacaggaccaaatacctgaagagtttatatttgacgctgagggcggtatggtgg

SEQ ID NO: 139715 - DNA, 1235 bp, Arabidopsis thaliana landsberg
agagcttctagcttctctttcaatggcgaaagactttgcctccaagagacacaatagtttccactggacaagaaaagtcggatcagacgaaaacgacgacgtttcttctcataaacctcttcctcatcacaacaacactaaaccttcttcttcttcatcttcatcttcctctaatgtaatcactcacaaaaaaaagcttcaatctttcgccgtttctcgtctccggtcagttatcgctactctaagcagagcacgacccggtaaccaaaactccgggctcgggtcacgggtcgtgggtacacttttcgggtctcgtcgtggtcacgtgcatttctctatccagaaagatcctaattctccaccggcgtttttaatcgaactcgctactccgattagtgggttagtcaaagaaatggcttcaggactcgttagaatcgctttggagtgtgataaggggaaagaggaagaagaaggagaagaaaaaaacggaactttacgtcacggcggaggagacaagacgaagacgacgacgacggcggcggtttcacggcggttggtggaggagccgatgtggaggacttattgtaacgggaaaaagtgtggatttgctacgaggagagagtgtggtgagaaggagaaaaaggttttgaaagctcttgagatggtttcaatgggtgccggagttttaccggagacggaggagataggcgacggcggtggtagtggcggcggcggcggaggagatataatgtatatgagggcgaaattcgagagaattgttgggtcgcgtgattcagaagctttctatatgatgaatcctgatagtaatggagctcctgagcttagtatctatcttctcagaatctgaagaagaagacgatgatcgacgaagaagaagatgactcaactaaagcctcttcgtcaaaaggaaggtttatggtttagtaagattttccggtttaattacttaattagtcggttaagtggttaagtaagtcgatgtctaatacttaaaatcgaaaacgacgtatctattattgcaaattcggattagatgtgaatgtgatcgattaaatcgatttcgtgttagatcagttttttttttttttgggaggggtttagaggttttttaaaagttggtatatgggatctggaggactttgtaaatgtataaatttcgttttaattaaatctgtaatcttttgttgttatttcaaatgtttaatgttataatt

SEQ ID NO: 139716 - DNA, 2468 bp, Arabidopsis thaliana landsberg
cttttgtctgactccataatcacaccatcaccaagaagaagaagatctaggttttgcatctctcgtcattacaatggagcgagcacgaaccgaaagccctagctacttccgtcaatggagcggcgattcaggtaccaccaatgccgccgccgtagctccttcttctccggcgcgtcatcaccacgctcgatcttcttccgtcactaatatgtctaacgtcaaacgagctcaaaacgttgctgctaaagccgctgctcagagacttgctaaagtcatggcttctcagaccaacaatgatgacgacgatgacgatgatgatgatgaagtcggtggtgatgatttaggtttccgatatggtgctcctcctcctctttccttcactagaaatccttcttccacaattgctaaacctaaacctgttgcttcttctgctgttgttcctcctcctaagatctctagatcttcctccctgcggtaaatttcagtccttttttgctttagtagaaaccaaatccacccaattcactacatttgtttacttttcagtcatagagatttggtttctagtttctaattttggaaatgttggattttgattgaaaaatatggtaatgtagtagttatggaaactagtctgaatgtttataatcagagaattgatggtggtgattgtgaaataccatttatctcagaactctccagctgtgtctgttcgggcatcgcaaccgcctgttccaccgagtaaactgaggaatcaaactaccaatcctttaccagttgcaactcctaagactgaaaagaggtgaagataactcccaaagatatcttcatattaaagaagctagttgagtttgttattcattacttcttggagattgtttgtcattgcagggttttagctgatattggtcattttaatggaaaagattcgaaagatcagcatgaagcatctgcacttcgtgacgaagtatgctaattcgtttttttttccgtatctatttatatcttaatggataatgtcatagatggaaactgagagttgttttacatcacagcttgatatgctgcaagaggagaatgatagtatacttgaaaaggtagaaagtcttcttttttggttttcatttatccccagagtaagttttttatacgtttgagctttgttaacagcttaggcttgaggatgagaaatgcaaggaagcagaagctagggtgagagagcttgaaaaacaggtaactggacaaatacctgtatgcataattttttttttgcttttttttgtaatattgttctcacctttgagacaaaatctaggtaacttctctgggagaaggtgtatcattggaagctaaacttctgagccggtagtcaatatcaatacaatttgttgccagttttcgttttttttctgttggattgaaatgcttacatgaatgtactttgtttcatgttgcagaaaagaagcagctttgcgtcaaagagaggtattgctacgtctgaggctcctcaatatttacttttatgtggtggttttgtttccaaagatggaacttttgttctggcttttagattcacctacactcactctatgacaggcggccctcaaagatgcaaggcagaatagagatgggactaatagagagactactgctcttcggtctcaagtagaggtaggccctttttttctgtccatgtgtcacatctataatgaggtgataattaatggaaatggagaaagcttatattttctataattcactcttaatcagactgcaaaactggagaccgctgctatagtagcacaacttcaaggagcagaatctgaagtcaatggtctacggacaatgacgcatagaatgatattgacccaaaaggagatggtttgtgttcatgtttttgcgcaatccacacataagcttatggtagggattaagtaacacagccttgcaaaattttcaggaggaagttgttcttaagcggcgctggctagctcggtattggggtctagcttccagatatggtaaggagtaacaaacatctgcttaacgacataactagaactttcatgccatcgtgtatctttgcttcttgacatatgtgcatatttgcatttcaggaatatgttcggatatagctacgtccaagtacgaatactggtcatctctggctcctcttccttttgaaattgtgctgtcagctggacagaaggctaaagaagaaagttgggaaaaaggcaagcaatcactcaatcatatttctaagattctgttgtgataacattctataactccgagtatcacttctcgttactgtatatttatctgttggctatgaaaacatctgaccagaatctgaggagaacgagaagaggagccagctcgttcaagatataaatgatctaacaggagaaggaaatattgaaagtatgctctctgtggaaatgggtctaaaggagcaaacttcttta

SEQ ID NO: 139717 - DNA, 1609 bp, Arabidopsis thaliana landsberg
ggccaaaaagaggaaacttggtttggttgatgatgaggataccaagacagaaggagagaccatagaagacttacctaaagttgtcaatgttcgaggtgagttgttttggataccttctccacgcgtttatgtgctttctctctgcctttacatgcactaatgtcttttgtttcacagataactcggagagggctttctacaaggagctagttaaagtcattgaattgtctgatgtcattttggaggttcttgatgcccgtgatcctcttggcactcgttgtactgacatggagaggatggtgatgcaagccggtcccaataagcatcttgtgttgctgctgaacaagattggtaagttcatatattcagtctttactcgtggacgtaataagttgtttgtttactctgggtggtgtaattaatttttgtaactgattcactctctccagatcttgttccccgagaggctgctgagaaatggcttatgtaccttagggaagaatttccagctgttgccttcaagtgtagcacccaggaacagagatcaaacttgggttggaaatcatctaaggcatcaaaaccaagcaatatgttgcagacgagtgattgtcttggagcagacactcttatcaaattgttgaagaactactcaagaagtcatgaggttggttccatagtttaaactttaatcatcctaccttagcatcaagttatatcattcagtttcaattaaatcttcctttgttgttctttggcagttaaaaaaatctatcacagttggtattattggactgcctaatgtcggcaagagtagtcttattaacagtctgaagagagcgcatgttgtcaatgttggtgccactcctggactgactagatctctgcaagaggttcacttggacaaaaacgtgaagttgctggattgtcctggagttgtgatgttgaaatcatcaggaaatgatgcttccatagctctccgaaattgtaaaagaatcgagaagttggatgacccagttagtccaggtaattggatataagctcaagatagaatcacacttatttttgtgctttgtcttttaaaggttataatctgagtgacctaacttggaaatcttctgctttgtgaaaaaaatagtgaaggaaattctcaagctttgtcctaaagatatgctggtgactctctacaaaatcccgagcttcgaggcagttgatgatttcctttacaaagtcgccactgtaaggggtaaacttaaaaagggtggtcttgtggatattgatgctgctgccagaattgttttgcatgactggaatgaaggtgcggatctttttttgttcctcgtaaacttgaagcgtaaaagcatttttgaaaaccagtttcttaactcatcattgtctctaatatgaatggttatgcaggtaaaatcccatactatacaatgccgccaaagagggaccagggtggacatgcagagtcaaagattgtgactgagctggccaaggatttcaacatcgatgaggtttacagtggtgaatcctctttcattgggagcttaaaaacggttaacgaattcaaccctgttattattccttcaaatggtcctctcaattt

SEQ ID NO: 139718 - DNA, 1477 bp, Arabidopsis thaliana landsberg
aagaaaggtgttggcatggccgtcgcggtcaagaaaatttacttagccaatgaacaagcttttcaagattggcttgtaagtaattatatcatctcaatctataggagaaccttcggcaaaaccaataatattgttaagtttcttgttacttatttattcttctaaattttttgatgtttttggatggtaaatgtctatgttgcctacccctagagatgggtcagtgtgtcttaacattagagatgatatttttgtaggttgacgtagagtttctacgacataactctcatccaagcttggtgaagctaattggctactgttatgatcgtgatatgttgtttattgtttctgaatactttccaaatggaagcttaggaagttacatcagtagaggtaaggaagttaagtttattcatctccttttcgtcattatatcttgtgagtagactcaaagcaagaagaatcttgctcgagcaagacccaaaggtaagagctcttaataagagctttaaaactagatctaaaaattgagatagctcattagagctttatttagtggaagtgaggaaaatatactaattgaagaacaccaagctaaatgattcctagataatttaatatcatagagagggaataaagagagttgctcaaattgatttctggagctctcacgagtttacgatcttaaccttagatccaatagtaattcatcttccttttggctttaatggtttatataatatcatagatagtcgtccaaagtcattgccgtgggagacacgacttaagatatccataggagcggctcagtgtcttgccttcttgcactctaggaagcaagccggtctataccgcagatatctcactgcttcgaaaatcctgctcgactcggtttgtattcaccttgccttttttgttttttttcttgaatacttgctccttacctttaaagtgacatttatgggatatgcaggacttcaacgcaagagtttcctattttggaaagccaaaagtttctctcgatgaattggtatacaccatcgggttttcaaatgtagcacctagatatcaatacccacctcccgaatacatactctcaggcaacaatcttctgcttcttccttatatcttaaagttaaaagtgaccattaaattcaaagagactaaccttaattgattgcactaatcaaatgaagggatgtcgaacatggcgggcgatgtgtatagctttggtgttatactacttaaaatgttaactggtttaggaaaagacctcacaatctcagcaaagcgagaaataaaaaataaaaagtacaacattgtggagatgatcgatccagatttgaagaatagctatccacttgaagcgggaagacttatgtgcgagcttattaaacaatgcctagaggtagacccgaagatgcgaccaaccatgcaagaagtgctagataatctgaatgctatagctcagatttga

SEQ ID NO: 139719 - DNA, 1851 bp, Arabidopsis thaliana landsberg
agcgtcgttgagaggttagagacgaaggaaggaggcagaggatagagagatagcgaggctaatggatcagtgactcactgagtcagattttaccgattcattgcctccattgaagcctcttttctcagataatacgcttcactgtctcttctccatgtgcgtctcctcctcctccgtttcttcagatcttgctttccggtgacggtgagttgttcttcttcatcgataccttctatttcgaaatatcctttaaatttcgtttctttggttttgattttctcatttggttcctcgatttgtgtaaagtgaataaatttctgtaaatcatttcttcaaacgattattggatcaagatgtatcttgtgataagtgtggagaaagtataattttttaacgatttgtgttaaaggccgagataaagaaggttgctttatatattacaactgtataaaataatcaaatcttcaagatttttgatcaatgtttcatcttttgattcaggttttaatcttcttctctctggtaacacgtataaagcatggcttacctgatgtagacatgtagtgttaggctaaagactcctcttttcacttctgtcttgttgagtttgtgttggtttaaggctttaagccaaaggcgttgttggtctgacaagatggcaatggcggtgtttaaggctcctctaaaaggggaatttcatggggctagaaagatggaagggaagcaatataagcaccatctgcttcagcaacagtctacagggagaagacgtgtgttcgtgcaaaccgatactggctgtgtgttgggagttgagttggatcgtaatgacaatgttcatactgtgaagaaaaggcttcagattgcgtttaactttcctactgaggaaagctctttgacctttggggatatggtgttgaagaatgacttgagtgctgtgaggaatgattctccgcttctcttaaagcgtaacttaatgcacagaagctcttctactccgtgtctttcacctactgggaatgatctgcagaggaaagatcgaagtggtcctattgagatacttagtcactcgccctgttttctgtctttgaagcaaacagcgaatgacattgttaaggcgatgaagatgggtgttgaaccaatccctgttaatggtgggcttggaggggcatactaccttagggatgaaaagggtcaaagtgttgctattgtcaagcctacggatgaagagccgtttgcccctaacaatcctaaaggcttcgtagggaaagcgcttgggcagcctggtttaaagccttctgtgcgggttggggaaaccgggtttagagaagttgctgcataccttcttgattatgatcactttgctaatgttcctcctacggctcttgtgaagataacacactctgttttcaatgtcaatgatggaatggatgggaacaaatctcgtgagaagaagaagctggtcagcagcaagattgcttcgttccagaagtttgtacctcatgattttgatgccagtgatcacgggacttcaagcttccctgtcgcttctgtgcaccgcattgggattttggacataaggattctcaacacagaccggcatggtggaaatcttttggtgaagaagcttgatgatggtggtgttgggaggtttggtcaagtggagcttattccaatagatcatggtctttgcttaccagaaacactcgaagatccttacttcgaatggattcattggcctcaggcttcaatacctttctctgaagaagaacttgactacatacaaagtcttgatccagtgaaagattgtgaaatgcttcgaagagagcttccgatgattcgagaggcttgtaa

SEQ ID NO: 139720 - DNA, 687 bp, Arabidopsis thaliana landsberg; identical to SEQ ID NO: 14965

SEQ ID NO: 139721 - DNA, 1154 bp, Arabidopsis thaliana landsberg
aaagacttctattttgttgttgttgttgttttcagaagatgtcaaggcttcttcagattctgttgctttaactgcaaatttcatttttgtggcgcgtgattctaagactggtaaagctgctcctatcaaccgtctttctcctgaaaccgaggttgagaaacttctctttgaggaagctgaagctaggaataacttaaggaagaagaagagaggaggtgacagaagggaatttgatcacggggagtgtaagaagcttgaggcttggttggctgaaggaaggattttctctgacatgccagctcttgctgacagaaacagcattcttcttaaagacactcgtcttgagaattcgctgatatgccaaccgcagcagaggaacatccatggtaggatctttggaggttttttaatgcatagagcatttgagttggctttctctactgcttatacgtttgcgggtctagtgccttacttcttagaagttgatcacgtcgatttcctaagaccggtttgtaaccaaatcacttcttaccattatcttcttgttcacgttcgtcttctgtgtaaacttacgcttaatggacttaaatgacaggtggacgtcggggatttcttacgtttcaaatcctgtgttctttacactcaactggataaacaggattgtccgctcatcaatatcgaagttgttgctcatgttacaagtccagagattcgctccagtgaggtaaaattctaacttgatgatggagctttcttaaacggttgttaaaattgaacttgctcactgattctatcttcatgccaaaatttcttgaaccttatcagatttgaagctcattatgttaattttgaggtctctttctctgttacatatgatgtaggtttcaaatacattctacttcaagttcactgtaaggccagaggcaaaggccagaaacaatgggtttaagcttcgaaatgtagttcctgccacagaggaagaagctcgtcatatcctcgagcgcatggatgcagaagctttgaagtcaagcaaacaacaatgtgtagtcacaattcttcagtaatggttatggtgtttctatgtttaaaagacctggcttatcaggtttatcctctgaccacaaattaactagaaatgtagatgcatttctact

SEQ ID NO: 139722 - DNA, 1484 bp, Arabidopsis thaliana landsberg; identical to SEQ ID NO: 4485

SEQ ID NO: 139723 - DNA, 528 bp, Arabidopsis thaliana landsberg
ctcttgttcatcggatctaaagcgccactcaaaagggtttatgaaaaggttagggttttaacaacaactcaaaaaacagagatggatttcgagaagagaaaagctgcgacacttgcttcaattcgttcatcagtgactgataaatctcccaaaggttttctcgacgaacccatcatccctctcctcgaaaccatcaatcatcacccatcttacttcactaccagttcctgctcaggtcgaatctcaatcctttctcaacccaaaccaaaatcgaatgattcaactaagaagaaagctcgtggcggttcatggctctatatcacacacgacccagctgattcggatttggtaatttctctccttttcccttccaagtcaaatcagattgacccaattgaccaacctagcgaattagtcttccgattcgagccgttgataattgctgtcgaatgtaaggatttgggttcggctcaatttcttgtggcgttggctatatcagctgggtttagagagtctggtatcacatct

SEQ ID NO: 139724 - DNA, 2002 bp, Arabidopsis thaliana landsberg
caagagctctcaaacaaaacagccttttacataagaacaaacacccccaaaaactgcaaaaaaaagagagagatcattaatccatcttcaagatgtctcttcctgaaactaaatctgatgatatccttcttgatgcttgggacttccaaggccgtcccgccgatcgctcaaaaaccggcggctgggccagcgccgccatgattctttgtaagtataatcacataataaaagttctagagaaaagctaccaacaatatacatgctgaagacaagaattgaaactttttaatggcatttactaagttataagtttcttatggctatcattcttattcttttatgtattctcgatgtatccaactttatcattaacaaaattttattgtgtgaaggtattgaggccgtggagaggctgacgacgttaggtatcggagttaatctggtgacgtatttgacgggaactatgcatttaggcaatgcaactgcggctaacaccgttaccaatttcctcggaacttctttcatgctctgtctcctcggtggcttcatcgccgatacctttctcggcaggtttgtctataaatatatttatatttacttaactaaaatcattcagattctttttaaaatattaatttgagttcattcattttgttttgtataggtacctaacgattgctatattcgccgcaatccaagccacggtaaggacctcaaaagtccctttctccttaccaaaacttatacccaagaaaacgaagaaaataaaaatattgtctagtcaataaacaaatcgaaatagtaaacagcataagtcgttatttttgttatagttttccgaaaaataatatccgtgttatgaactatgatgctatcagggtgtttcaatcttaactctatcaacaatcataccgggacttcgaccaccaagatgcaatccaacaacgtcgtctcactgcgaacaagcaagtggaatacaactgacggtcctatacttagccttatacctcaccgctctaggaacgggaggcgtgaaggctagtgtctcgggtttcgggtcggaccaattcgatgagaccgaaccaaaagaacgatcgaaaatgacatatttcttcaaccgtttcttcttttgtatcaacgttggctctcttttagctgtgacggtccttgtctacgtacaagatgatgttggacgcaaatggggctatggaatttgcgcgtttgcgatagtgcttgcactcagcgttttcttggccggaacaaaccgctaccgtttcaagaagttgatcggtagcccgatgacgcaggttgctgcggttatcgtggcggcgtggaggaataggaagctcgagctgccggcagatccgtcctatctctacgatgtggatgatattattgcggcggaaggttcgatgaagggtaaacaaaagctgccacacactgaacaattccggtacgattcttttaattaactcatcatttgctttccacgtacgatcctcaaaacttaataatttaaattttaagataaaagtttaaaaaattttctttttcttttccatttaagggttaattgaaataattgaggtgctggttcccttaattaaatgtgatagtatcagtagactttaaaaatgtgaaattaaaagtggggttgtgtgggtgagaaataactcgaaatgctcgtgtcctttaattatagtgggaccgtaaatatttctaattatatgcctacttggcattagaaatcatttttttttgacagccattataaattaattaaaaggtgttgaatatctttctttgtcttttgttacggggaaaataaattattttcataatattattactcgaccatacagcgaaactggtccaggatacgaattatacagctaattacaacatttttggatttttgggttcaaagtccctactttggcattttatattgtatattttttccttaaaatcctatgtgtgtgcgcatgtgtatatctttgtt

SEQ ID NO: 139725 - DNA, 1916 bp, Arabidopsis thaliana landsberg
ctttgattgcttttcttttcactgcttaggttctttgtctgttaggtttagagagatcctttccaaagatccaaagctggaaactttctagtcaatgctgcttaagatctgactttttcccttcaatgtcgctctgaaatcccctaaatttttgggcccatcaggttggttcttctctcacttatgaaccctagtttctaattgtaagttcaattcttgaatttctctagactctgttttttgggtgtttatcagacaatgcgacggatttttgtgtgttctgaatagtttctattgtcggtagatattttttagttttcttcagctgtagttttctttccagcatagtgtttagctggcgtttggtctgagaactgaatattctggcagctggcaattcttgggacttaggtacaaatacaatgttggttttgttgaatctgatttttcttagtccttttttgttcaatttcttgtctttttgcttgttcctttccaattttgacttcttaagagagaggctatgtgcattttctttatgggtttggttagatttctatgtctgagtagctcaaatctaatatttggtataagctttgtgtttctggtttgttttgattactttgattcaggtcttgaaatgattcttctcgaacttctttttttcttgtttaagcagcaaaagttatggtttatacaagagttttgagtttaaaattctctgccttttcaggtgaataaagcggaggtcagaagatgggttctggtttaaatgacacattatctcggaactacaatggtttggagctatgggagataatagtgattgttctctctgcgatattccgttgcagctttagctatatcgctatggcttactttcagaagaaaaacctctagatcttcttctaatctaatccctggtagtcgccagattcctactagtgttcctgaagagattaaagagattagagtcgacgaggtttctttcagcaatggtgggaatgaatacccctctattagtaagaaatttggcgataaagaccccgaaaaagggataaaagcagagtcagaaaatggcgatagtagccggtcaggctcgtttaatcacttgaagaaaaaagacggatcgagcgtatcttctgctaatcctttgacagctccatctcctttgtctggtcttcctgagttttctcaccttggatggggacattggttcactcttagagatcttcagatggctactaatcagttttcgagggataatatcatcggtgatggtggatatggagttgtttaccgcggtaaccttgttaatggtactcctgttgctgttaaaaagttgctcaacaatttgtaagttttttttcacaaatggtgaatcaagattcaagatttcatttcttgaatcctttttttttttaatggtgatgtttttgtatttcttagaggacaagctgataaagacttcagagttgaagttgaagctataggtcacgttcgacataaaaacttggtccgccttctcggatattgtatggaaggaacgcagaggtatgtatgttctgttgttgaatgatctgcagtttttcttctgaattttcactaaacatcaaatgcggtaacacttaattaggatgctggtgtatgagtatgttaacaatggaaatttggagcaatggctccgtggagacaatcaaaatcatgagtatcttacatgggaggcacgagtgaaaattcttattgggacagccaaagcgtaagtcttgtggcagctatatcattttgttttcttgattgtgttttttctttattctcatctgaggcgatgggtggtgacgcaggctcgcgtaccttcacgaggcgattgagcaaaagtggtcacagagcataaagctagtacatctgattgatgc

SEQ ID NO: 139726 - DNA, 4491 bp, Arabidopsis thaliana landsberg
ttttttaatccacattaaggttatgaggaaagtcacaccgggcatgaaagaatatcagatggaaagtatgtttttgcatcacagctacatgtacggtggctgtaggcattgctcgtacacatgcatttgtgcaacaggggataataggtaagtttggtggataaatcttgttattgctgaatatgcagaaatattcctttttcaggtgtttgtactgaaaaactaacaaaacgatgttaaattgtttgtagtgctgttcttcattatgggcatgctgcggctccaaatgatagggtaaagggaacacacattcctcgcttttttagttctctcattattccctgtttgaaaatgttttaatacttgttgcagacttttgaagatggtgatttggcattgcttgatatgggtgctgaataccatttttatgggtctgacataacatgctcattccccgtgagttcttctagcatcaaatctattcttaattttcctctgaattgtctttgcaccgcattgacttgcgtttttaatcttgtttacatgaacatcataatttgctgaatgtagttatctagagaaagtggactctaatattcatcaattggtgtgcaggtcaatggtaaatttacaagtgaccagagtctaatctacaatgtaagtgccttacaagattggtgcaacgtggatggattagaaatgtgggctctattttttgccttcccacaatccaaagtttggtgaggctcttgaagctttacatctgaataagtttctctgattttcccttcctttcaggctgttctggatgcacataattctgtaatctctgcgatgaagccaggagtaaactgggtggatatgcacaagtaagtcttactgagatgctatatagctctgttctactatgcatgcagatgcagtaattgggattgacaatgtaagcgtaaactcagttgctttggtccattttgatttatcctcttgttagggagataaattgaaatacatctccatatggttattcagctttctttgtcgactgaagcaaattaatgtacaggttagctgaaaaaatcatccttgagtcactgaagaaggggtccatactcactgggtaattctctctgtgctagacatttcaatactcttttctaaaggttaattcattctcatggtttcgttctctgttcctagtgatgtagatgacatgatggtacagcgcttgggtgctgttttcatgcctcatggactaggtcacttcatgggcatcgacactcacgatactggtggctacccaaaggtacatcaaatcttttttcaacccaatagtatcatcacgtaaataaaaccacagtccctgtgtcttacccgttgctttgatctttcattcttttagggagtggagagaccaaaggaacctggattgaagtcattacgaactgcaagagacctacttgaaggaatggtaagggccgattgtttcaagtagaaatgcttttggttcttctcatttatcgtctctgttcattgtcctaatcgtatttatgtcaggtaataacggtggaaccaggatgctatttcatcaaggcattgctgttcccagccatgggaaacgcaacaacctctaagttcttcaaccgtgaaacaatagagagattcagaaatttcggaggtgtcagaatcgaaagcgatttggtaatgtcaaattcatattcactacaacgtctacaagttaaaacactctcaagagtaatgtcatatacaataatctcattttgttgtatatgtgtgatttcttttttaggtcgttactgctaatggctgcaagaacatgacgaatgttccacgagagacatgggagatcgaagctgtgatggctggagggccttggccaccgaccaagtgatcgtagctactcttaggcagcttatggaaattaaaaacttgataagtaaaactcaataatacaacctttatttttgttaatgggaataaggaaaaattgcctgtgttttactaatcttgtacatgtagtttattttgtttcagtgtcttgtttgtgtggttggatattaaaccgattgaatgttcaagtggacagataaaatctaaccggtttggtgcttgtcgacgaaaaccgaaccggtacagaaaatatctttgagcacaattttagttctaatataaaattcattaacaagagagaaaaaaaaaacttcaaattaaaagcttcgtgtcttcataaaaccctaatctggcgacttcgtctctatccccaaaaaccctttcctctcttccttcttgtgtgagaccgagaaaaaaagatgactaagaacagtaaccacgacgagaatgagttcatcagctttgaaccaaatcagaacacgaagatacgctttgaagatgctgatgaagacgaagttgctgaagggtctggtgttgccggcgaggaaactccccaagatgagtccatgttcgacgccggagagagcgccgacaccgctgaagtaactgatgataccaccagtgccgattactacttcgattcttactctcactttggtaaattcccttttttcaagttctatttttttccttgtgctctttggttatgaattcttactaagagttgaatttggttccacttttttttgcaggaatccatgaagtaagtatcgaggacaaagctcagttttttttgttgtagtttttgttctagaagtttaatgtaattcattgtgttttcttctgtatatatctgatgactgaattgagaatggtatcttacaggagatgttgaaggatgttgtgagaacaaagacttatcagaatgttatttatcagaacaagtttcttatcaaggacaaaattgttcttgatgttggagctggaaccggaattttgtctctgttctgtgccaaggcaggagctgctcatgtctacgctgtatgtcttcaatctttcagtctctttttttaataatcataagtaagaagaatctttttcaattttgactgatttgattgaggatgtttcttaataggttgagtgttctcaaatggctgacatggcaaaggagattgttaaagctaatggattttctgatggtaggtcttttatccatgttgagttgtattcaaatcgataacttctgttctgtaacatgatttttgttttatcgatgcagttattacggtattgaaagggaagattgaggagatagagcttcccactcctaaagtggatgtgattatatctgaatggatgggttactttttgttgtttgaaaatatgttggacagtgtcttgtatgctcgtgataaatggcttgtaagttacagctccaccttgttacatgagattcttagttaccaaaaccaattaaatgaaatcttcttggtcctgtgtttttatggataggttgaaggtggagttgtgctaccagacaaagcctctctgcatcttacagccatagaggattcagagtacaaagaagacaaaatcgaatgtgagtgcattgatttgacacgttttctcgtctttttttttccaacattgatcttgatgtctgttgagatttgcatttttaatttcttttgtgttgttctgctacagtttggaacagtgtgtatggttttgacatgtcatgtattaagaaaaaagctatgatggaaccacttgttgacacagtcgaccaaaaccaaatcgtcaccgatagtaggcttctaaaggtatataagatatcatatgatgatgattagtagtatctctttacctgtgtgactaatgttcatttcattattcttatgggtttgtaacagacgatggatatctcaaagatgtcctctggtgatgcttccttcacagctccctttaagcttgttgcacaacgcaatgactacatccacgcccttgtagcctactttgatgtatcgtttaccatgtgccacaagctgctgggcttctcaacaggttcagatctctacaatcttatgctagctctgagtattctatttttttttggtgcaaagaaatggcatgttatcgaataacttggtttgaagtttaaacatagcacattgtttcattatgatctgaaacttgcactgaacaaccatatgtgtcacatgcaggaccgaaatcccgagctacacactggaaacaaacagttctgtatctagaagatgtgttaaccatatgtgagggtgagacaatcactggaactatgtccgtttctcctaacaagaagaatcctcgagacattgacataaagctaagctattctttgaatggccagcattgcaagatctcaaggacccaacactacaaaatgcgttaaagttctctcataagaagcagaacttcagaagatacaattctcatattgtgatttagtttttatatttctttttctccagattacaactttccatttgcttcacattgcaacatttgcttcatctcaagttaaattaatgattttgctct

SEQ ID NO: 139727 - DNA, 7628 bp, Arabidopsis thaliana landsberg
  unsure (1)..(7628): unsure at all n locations
atgaaagggcctattcgtataatcgaagaagtagaagggttcatcgtaagaaaattaaacttgctaattttgaatatccactccccccaattcaaatctgagcttcaaggccaactacaacagctctcgaaacttcaaaagctctgggtaagcattaatttcatcctcaagtttctgggcaagtttcttattgttccagtatgagcaaactaagcgtttgaattcgaatcgtcttcttattcttcccggttggtgaaagagaccacaagctacttctcgatctaccatgtcccgaaacgttccgagaatagagatgccggaatcggaagaaaacgagttcgcgagcttgtctttgttttcgccttcaagacctcctctgaattcgataccggatccaagtcaaattcagaaggcgaatcatctaccccatttcgatttggttcagaaattggaaggtacaagagcgcagcatcaacgaacacttggtccagagaagaaatttgtagttttggaaggtagagctggaaattcgagtgattcgaaccctaagattgttaatcgtaatggaaaatctcggtcggagccaaactctgcgcagagtacgcccactaggaacggtgctagggtttctcttggtggtggttgtgctaccggcgcaagatttcttcagtctttcggtggaagaggaaggattccgaggggagtttctattgctgagtctgttagcttcgcggaaacaactccacattttgaactcaatgaagatcattcgttttggaaagaccacaatgtgcaggttggtgcattgtttagaagttttttttttttttttggtgcaaaatttagaagtttctttataaattcgttttctttcttttaaagttactaatttaggcctctttctgtatggtataggttttgataaggctgagaccattaagcacaatggaaagggctaatcaaggatatggtaagtgtttaaaacaagagagtccacaaacattggtctggttaggccatccagaggccagattcacctttgaccacgttgccagtgagacaatatctcaggtaagcctcattttaaaattcatgtagttatctgaatacagtggtgatttatagtgttgattttcaggaaaaactgtttcgcgttgctggactgcccatggtggagaattgcttatctggttacaacagctgtgtgtttgcctacggtcaggtgagatcgtaaatgatgataagtgtttgcttattagaatttctatggtgcaagactaagaaacttagcatcctctcatatagactggtagtggcaagtcttattctatgatgggagagatatctgaggcagagggaagccttggtgaagactgcggagttactgctcgtatttttgagtatctgttctcaagaattaaaatggtagttgcctaacttcctttcgaggaatcacttcaagccaatatatttcagtactgaaaaagtccttttattacaggaagaagaggaaaggagagatgaaaatttgaagttcagttgcaaatgttcttttcttgagatatataacgagcagataaccgacctcttggaaccatcgtcaaccaatttgcaagtaattcaattatttttcctccatcacttggttattatccagactggtgcttttttttttttttcttttgagattggacgtaaccttgaattccatattttagcttagagaagacttggggaaaggagtatatgttgaaaatcttgtagaacataatgtgagaactgttagtgacgttctaaagcttctactacaggcaagacttccatacccaaacactctgttaagagtttaagtgttcaagtatttaactttatatgttttccttaactttatatgttttcagggagcaactaaccggaagattgnnnnnnnnnnnnnnnnnnnnnnnnnnnnnnnnnnnnnnnnnnnnnnnncttgtacaattgagagtctctgggagaaagattctctaactcgttcaagatttgccagactaaacttggtcgatttggctggttctgaaaggtagcttgtacttcttactgtgtttacttttgcatctttgactgctgaaattatttttgatacatatacaggcagaaaagctcaggtgcggaaggggatcgcctaaaagaagcagcaaacattaacaaatccttatcaactttggggtaattctaacagacagctgtttacgtgtcagtttgtctgccctctgcttttttttgtcatgaactgttttctgttgtacatttccaagcgtctcaattctcaggtaaaaataatatgcatacatgtgatggagaaaatttgtgaagaaactgaaaatatgcaaagtatgcaaggatggcgatagttgtatagctttgaggtctttccaacttaaaaatgctaatgaactttgagattaataatcttatgacaagataagatgccaacaatttcttatactttctactgtgctctacgtttacgttcttgtaacaaaatctttgtagctactaacacttttccattcatctgtcaatttagcttggtgataatgtctctggtggatttggcacatgggaaacatagacatgttccctatagagattctcgacttacctttttactgcaggtatgactgttagagcacttaaaccttcatttatatttctgttgcagttgcatacccactaacctcagatatggtttcaggattctctaggggaaaactccaaaacaatgataatagctaatgtcagcccatctctttggtttgtaccaatagctattcttgtttattgggcataccttgtcttgtgtatttctgattgttattgtcttattgcagctctacaaacgaaaccctcagcaccctgaagttcgcgcaacgggcaaaactaatccagaataatgtacttgtaattcttcattgattaagagctccgttatgaatgtttgacctgatgtaaggttgctccactctgattttccaggctaaagtaaatgaagatgcctctggggatgttacagcactccaacaggaaataagaaagttaaaggtatttactactgacaaattgcatcaaacagaaaactttcctcgtttcatacgtagtcatgtgaggtgatatcaaaaccttttcatttattcaaacaggtccaactgacttctcttctgaagaaccatgactcttgtggggctctttcagactgcatatcttctcttgaagaatccagatactctggtacatgtaaagtagcaggagaaacaagacaagacaagtgtcactgtcaggtgcataattcactgagagtgaaggtatttttgcaacaaatttgtggatatcttgcgactctattattgaactggcttaataactgtataacaggtgaaaaatatgaacgataatatgattggtgctctcagaagggaaaagattgctgaatctgcccttcagaagtccgaggctgagattgagcgtatagattgcttggttagtttgttacaaggacagttcattttcgtattttgaaaggatatatcctagacagagacatctcgagatgcaaacgaaataggttacattttagttcatcttatattttgaccttttactacaggttagagacatggaagaagatgctaagcgcattaaaataatgcttaatcttagggaagagaaagttggagagatggaattctgtacgtctggttcattgatgacgaaagagtgtctcattgaagaaaataaaactctaaaaggagagatcaagcttcttcgcgacagcattgacaagaatccagagttgacacgttcagccttggagaacaccaagctccgggagcagctacaacggtaaattacctattaactgttttggaagagtctttattttttaattaaaaaaacgtcttatactctgatcttactatctttacagatatcagaaattttatgagcatggggaacgagaggcattacttgctgaggtgacaggactacgtgaccaggtttgagaatgcctttaccaaataaaatttcagccaataattcaagctgaacttttgtcacttgtcatgcagcttcttgatgttcttgaagcaaaagatgaatccttttctaaacacgttatgaaggtttggggaaaatatgctatttattatttttaatcttcttggaaactgttgttgctggtttctaatgcgtgaactttgataacactgtaggagaacgaaatggaaaaggaattcgaagactgcagaaacatgaactctagtttgatcaggtaatatcaaaattatatgaaaattcaattatcttttgtgaaggattgacatcgcatgaaaatcatttaccctgttgcatttttctgttttgttgtgggatgtagaatgattgaatgaaccaactttttagttctctgctgtataattatcttacactttcatcctattcttggagtgtttcaacatacgtccataaccctgttgtagcacaattctgctatggcttgtgtttgttaatactataaccttgaacctgaaactttttaattatacacattggacataatatgcttaatttgactaaattggaaaagaagcctgctatggtactgtctcttatgttttggtgttgcttttccatgcagagaactagatgaaatacaagcaggacttggaagatacttgaatttcgatcaaatacaatccaacgttgtaagaattcagagtgacagagaaatgattgttataaatttttctttgctggtggttttatctgtgttgtaccttttgcaggttgcgtcttccaccagaggagctgagcaggttaatcaagctcataaacatttaatggtttgatgattgaatatatgtaccataagaatcatagtctgaatagttatacttactagtattgaacattgttttgcatacttaaaattgctttatagggaagattgtttaacgcctctttccattgaaacaggcagaaacaatgccaactataagtgaaatccaagaggaggtggctatttcacatagtaaaaactatgatagaggtgcactagtgaagacagatgaggggatagaccggtcaatcctgcagttcaagttagggaagttaatgaaggacctcgaggaggccagaacactcaattgtaaatatgaaaaagatcataagtcgcagttatctcaacaagaagacattgaagtagtccgtgagcaagtcgagacagaaactgctagaaccattcttgagttgcaggaagaggtgattgctctccagtctgaatttcaaagaagaatctgtaacttgaccgaggaaaatcagtcgataaaagatactataactgctagagagtcagaaataagagcacttaaccaagactgggaaaaggctaccttagaactgactaatttcatcgtcgatgggtccaaatccatcaaaaatgcctctacacagattgaaagtatcatctgttcatttccacaagtgaatgcgtggataggtgattatgttgagaaggctgcaaaaaattgtataaaaaaggaagaaacaattttacttttacagaaaagcttggaagatgcaaggatattagtagcagagatgaatttgaagctgaattctttaaagggcgcaacaattgctctcaacgaatttcaactgggtggcaatgctgcaacgactgaagaggctttcaacttgaataatgatgtagacaggatgagcgatgaggtagacacgcttgagagtaactttaaagcaaatcaatattctattctgaaaacagaacgacatgccgaagctgctttagctgttacaaaatggctttctgattctagagatcaacaccaaatgatggaaaaagtacaagatcaatcagttaaagaatttggtacattaagttcaatctctgcttctcttagtgcggaagggaatgctgatattagtttgtcaagggatggacatctaagtgacgcaacatatccaaagggtgatgagctttcaacatcaagctctgacttttcaaactgtagatggcaacatgattgtgcactgaacgtaaaatgtcaaggagtttcaagttctgaatctgacgctcaagaaagtaataacaagattacatcagcagctttaattgctaagaatggttctgcacattctgtttactgtggaggtatacttttgcttgttttctcttattcaccatcctaaatttaagatctgaaacgagtaatcttgaatgactaaaccaccagttttattttatatgtaaataaagaagctacagattttgtttcatgcagaggggaggcagtcagttgagaagccattgaccattatgatggggagagaagaaacagaatacaaatgcagtaaaccggtaagcttttattagcatcgtttcattttgtgaaggtatataaagaaattggttacatgtcagtgacaaagtaaaccactgaacttatatctatgcagctttcttctggggtatatatgggtcttatgcagagaatggatcctgttagaactttcttcgatcgatttgaggaagtcaatgctaccatgaaagaagctgatctcacaatatgtgaattagtaaaggccaatgaaaaatcaaatagtgttactgaaatgtggcttcaaacccatgaagagttaataagtaaggaaaaaaatttgatggatgatcttgaacaggtcaagtctatactatctgcttgtgaagaagaaaaacaagtcttgctaaatcaaacacacaccactttggcggacatggaaaattcagtgtctttgcttgaagaatattttcaggaaatgaaaagaggagtagaagaaacagtagaggctttgttttcccatgcccgtttagctggaaaagagcttctccaattgatttccaactcaagaccatcacttgaacagattgcatctgaattcatggagagagagttcaccatgtatgcaacataccaatgccacattgggaaactgatcgatcaaattttggatcagagaaaacaggttatcactcccaacctttcaggccaagaaaccaatcagtcagtgaagattaatgccattgggtataatgccgaagatgaagtcactaaaaagcaaaacagagaagagattgtcacaggcttagaaaatgatgaagttgttcagtcacatgaaagcctattatatgagaacttgtatctgaaaaaggagcttgagagaaaagaagctttgtttgaaggcttgctttttgattttaggctacttcaggaatcagcatcaaataaaagagatatcaagaatgaaatggatgagctgtttgacgcattatgcaaagtacagctagagctggaactgaaagcaagtcaagttcatgagctttttgttcataacgagaatcttgaaaattgctccattgacttgaaaacggcgttgttcacgtcacagtcagatctagagcaggctaaagagaggatacaaattcttgcggagcagaatgatgagttaagggcccttgttagtgatctctgtaaggaaaaggctgcagctgaggagggattggacgaacaaagggatctctgagagccaga

SEQ ID NO: 139728 - DNA, 2748 bp, Arabidopsis thaliana landsberg
atgcacgtcaaatctcagggaaaagtccatgtaagattgtcccttccttatcatacatacatgtccttaactaaagaaggtaatttccaatatgcgtcaacctcggcccacggctgcaccaggacaacatgaaaaataaaattaaaaaccattaaggaaaaaagcaagcaatttgtttcatgaatatttatgcatagatataattaattaccttgcttgtttttcaggtgatggattatataaattaccacggctatattttgtaaagtcaaagaattcgttgattggacgacgctgcagcgagccttcttggcagtagtggttaatgagttcccatgcgagttccacattcttcatcgaaatcaacatcttgctggctacttttaattcactactagaactgtcgagcaagtaataacataaccctaatgaaacaaattacacgatcttatgagcgtgaagtggctacgaggtatttcataaagcattttaattttgaaaatcaacttcactatccaaaaagttcctaaaatctagagaaactagttttttaagcgatttgtttttaagtttgttacaaaatccaaaaattaatttaaatatatattcacagccaaaaatgggctacgaggtctattgacccaatgggctttttaagacttaaaccaggttagaaaaaatgaaagaaaagtcgtaaatgcctcgtgtacaaaaaaaagtggttaaacaaaacaaaacaaacaaacaaagcgggctttgaaaactccgcctccgtttgttggctatttacactcactctgtctccgccggtagatttgtcagctgcgtcttcctcgttttctctctctctgtctgtgtctcttagaatgcaatcagctatggcgctttcgttctcccagacgtcgtttacaagaccaaaccacgtgctcggatcatctggttctgttttctctacgcccagaagtctccggttctgcggactccggcgggaagcgtttggtttctcaacgtcgaatcagttggctattcgcagtaaccgaatccaatttctaagtaggaagtcattccaagtctccgcttctgcttcaagtaatggtaatggcgctccaccgaaatctttcgattacgatttgatcatcatcggagctggagttggtggccacggagctgctttgcacgccgttgaaaaggtttgaagtttcttatataacctgatttgatgaaagtaaaagatttgctctgcttattatggaaacattggtgattttgtttgtgttagggacttaaaacagccattattgaaggagatgttgttggagggacttgtgttaacagaggatgtgtgccttctaaagctcttcttgctgttagtggtcgaatgcgggaacttcagaacgaacatcacatgaagtcctttggtctccaggtaaatatcaactcatgttctctgtttaaagttgcaagctttgtctttggtgtgaaatggttgtagaagatcgagctagttcaggaattactcattacctttcactatcttctggtttttggttttcctttgggaaacaggtttcagctgctggatatgatcgtcagggtgtggcagatcatgctaataatctggctaccaaaatacgaaacaatctgaccaattcaatgaaggcaattggtgttgacatattgactggatttggcagtgttctggtcagtactcagtagtacgttctattctttcacgtttactaactgtagacaggaacatgatacaaacttttcttaaacgatgatcctaactcatatcaatattttgtatttctgcagggtccacaaaaggttaaatatgggaaggacaatattattactgcaaaagatataatcattgccactggatctgtgccgtttgtccctaaaggaattgaagttgatggtacgtttcttgttttggacgtagagttgttaagggagcatgcagacttgattattccttgaatgtttacattttggcgctgcaggaaagactgtgatcaccagtgaccatgctttgaaattagagtctgtccctgagtggattgcaattgtaggaagtggttatattggtcttgagttcagtgatgtttacacagctcttggaagtgaggtaacatgatgtttctgtactaatgatattactttagtacgactttgtgatgttgtgtccttgtacttgagattgtaataactgcaattagcaatgttctccaattttctagttctttgtttggtctcttcctgtattgagcttgtttttgtgtaaatagtagaaaataagattttaaggtaccaatctgttggtttttcgatttaaattgtagttagtgatcgaaaacggaaaccttttgtgcaggtaacttttatagaagcactggatcagctaatgcctggatttgatcctgagatcagtaagctagctcagagggttttgataaatccaagaaagattgactatcatactggagtctttgcaagcaaagtgagcctgttatatcatgcattgcaaatactgcttctctttctctatacagtgtgtccatgtattcatctgttaaacttaaatctattcttattcagattactccggcaagggatgggaaaccagttttgattgagcttattgatgccaaaaccaaagaacctaatgatactttggaggtaaccaatggaatttaaagataacatgatcttgtgtctcacaaagagaattttaacagttac

SEQ ID NO: 139729 - DNA, 774 bp, Arabidopsis thaliana landsberg; identical to SEQ ID NO: 13462

SEQ ID NO: 139730 - DNA, 4688 bp, Arabidopsis thaliana landsberg
ctaatgctgggaacagcgatcgtcctgcgatttctagcttagatatcccgccttttcttgctgttgagctatgcagggaaactatggtacagaagtagttaaagagtgtgttggtatatagatgagtgaagatcacattgttaaagattgtttttatggatgcagggtgatcatccttgtgacaggcgaagaagcgtcactgagtacaaggctctctttccctctattgatttctcaattgtaagaaaaacatcttatttggttaatatctatctctgtggaaatgttggcaagttgcttatgctttgacctctatggttttagattgaaaccgacaaggatgttctgtggaaaccgagtccacgagagagcctagaagaagttgcagccagaggtgtagagttcatcaaatggtgagtttcatttttgttacttatttccacatgaagatatatgtaaacatatgtatagctgaatctctctactgccatttgctttgtgaaggatatggacaaggaaagagaaggagatagcaattgtatctcacagtggcttcttgcacggtctcttgagttctttcgggaaagattgttgcgatgacctaaagaaagagctgtctatacagtaagagcttaaacaaaaacttgatgtctacaggcaccaactttttgtataacttgaaactgtttaactaatcaacatctctaactttgttcagtttcagcaactgtgagcttcgctcaatggttatcgtggatcgagggtaagcaataattacaataagttttgacagaatataaatataatttgagagtgtgttggattatttattatggtgttgggtgtgtaggaacctggggactgactctgcagagaccacaaactatcctgggaaggttcctcaaggacttgataatcctagtggctaaatggctgaagagtaagagagagaattctgagatagtttttctttctaaaataaataaattacatgatgtttccattggactagaatctggcattttcagttatttgatgaacattagtgttggtatgtagccatgtaggttgactctgctgctacatgaatttattgtatgattgttattatccaaaatttagcggtagctttaatatttctgctccaattctcattttagctgtgattatacaattgtggaaataatagcattacaagtagaggaactggtagatgcaactaaattataagtgtgaatcttagatgagtagatttatctctatcaacatgagaaccagcagaaacttaaaacattatttatgtaagatcaacttcatattttatggcagctgtgttgaattttcttatggccaagcattttaataaaacaaagagaaaattccaaaaattacactcagcttttcttagagtactaggttttatcttttggtgttgagattttttatgaaaatagaaaatgttttaagtgtttttatagaagtagatcaaagtttaatactcttcgtacgttctatgtatttggactttaatataagcgataatcgtattcagattctttatagaaattacgctctctccaaactattggagaaagcttttaccattaggaattcgaaattttttgttccccaattttgaacatatgataagatcttttaaagaacactcgacaatgtaaaatttaaagtaggtctagcttcttatccgtttaagagaacgattttttttttttaaatgatatgattcacggtttgtaaagttatctattggaaaataaaaaaactgtaagtacaatactgtgatgtcaaaaagaaaaaaaaagtacacccaaactaaatttgtaccacgtgcgagacaaattgtagtctgcgatcttactcactacccgacaatgacatgccccatgccttagttcttgtaagaaaaaagtgatatcctatatacttcactaattattggtaaaattatgcaaaactttcagtgctaaaagtttgatttatactggactagatgttatttcaacgtagacataccaaaatgtttattcaaaaaagcctatatacttagcaaagtaaaaaagaatgtgacatgtttggtgaaccattgagaaaagtcaacatcatctaacttgcgtttcaagaacacatttaattgtgcattgtctcgagctgctaatcaaaaccataaattaactcttaactatatgcatctaataataatatcatgaagtgagctaagttaagcacatccaactcttaaaaaatgttatcataacgttaggcttataatcattctcttaataaataatttatcctaaacaaattattgcaattttttattctccctacttgcactaagtatcattacaccagtaaaagatgatgatcccttaaattaatactaattaaacaagcaattaaggaatgaagaaggtgagacgaaaccgcgtaaaagacctttcttctttgcaccatcctctctccttcatcatttcacaaatccacaaaagaatcaatctttttaacactctctaatgattcaacgaatccaattacccaaccagaaacagcaacacatatagagatatatactattaaacaataacataacaaagaaaccattttttctcttttgttattgacttaaacaaaaactatcaacgaataattatccttttttgagtttttcccatttcttcttcgtctccatttcatcgtcttctcgctgttctgctatattccggtactagatcctctgttttctcatgtttcttttattaccaaatgatttcttcatttattgttgtgtctttgattcttttttgggatctctaatgatcgatgaacatttaaagctacgacttttcaggagctcttgtctttttttctttaatctttgattatgttacaaaacaattatgttttttgaagcttgatctgatgtgggttctttgatttcgttccaaagtttgatacttttttggcttctctttatctgattttttttgtgtatgtttgttcatgaaacagtttcgttggatgaggagaagaagaaagtgaaaaaagttgtgaaatagagagagtttgtttcatgggcaattcatgtcgtggttcttttaaggacaaaatctacgagggcaatcatagtaggcccgaggagaattccaaatccaccaccactactgtttcctctgttcattctcctactacagaccaagatttctccaaacagaacaccaatccagctcttgtgattcctgttaaagaacccattatgcggcgtaacgttgacaatcaatcttactatgttcttggtcacaagactcctaacattcgtgatctttacacgttgagtcgtaagttaggacaaggacaattcgggacaacgtatttgtgtactgatcttgccacaggtgttgactatgcttgtaagtctatatccaagaggaaattgatatctaaagaagatgttgaggatgttaggagggagattcagattatgcatcatttagctggtcacaagaatattgttactattaaaggagcttatgaggatcctttgtatgttcacattgtgatggagctttgtgctggtggtgagttgtttgataggattattcatagaggtcattacagcgagaggaaagctgctgagttgaccaagatcattgtcggtgttgttgaggcgtgtcattctcttggtgttatgcatagagatttaaagcctgagaatttcttgttggttaataaggatgatgatttctctcttaaggccattgattttggtctctctgttttcttcaaaccaggtaatcgttagttgcgagtttctcattgttctgaatctatttaagtaccatgatgtgttttgtggtatacattagtgtgactttctattcatcaaatgagtaaggaaatgtaaatgtttcagctttgcataatgtgtagtcttactctaatatcaggccaaatattcaaggatgttgttggaagtccatattatgttgctcctgaggttcttctaaaacattatggtccagaagctgatgtgtggactgctggtgttatactctatatcttactaagtggtgtcccgcctttctgggcaggtatgcgcgatatagctgtttaagtgcgttctcttaattagtgccattgacaaggtttcctgaagtttggttttgtgtttttgaaatcagaaacacagcaaggaatatttgatgctgtgttgaagggatatattgactttgatacagacccgtggcctgtcatatccgacagtgctaaagatctgatccggaagatgttatgctctagtccttctgaacgtttgactgctcatgaagtcttgcgtacgtaatcaattacacttaaataaatggttacatttggcagccacacaacaatagactatatctcttgtatgtatctctttttttcaggtcatccatggatctgtgagaatggagttgcaccagatagagcacttgacccggctgttttgtctcgtctcaaacagttttctgcaatgaataaattaaagaagatggctttaaaggtcagtttgtagttatactatatatattattgtctctgcatctcactcgtttgagatatgtttactcatgttagttgttatggaatgatcaggtgatagctgagagcctctcagaagaagagattgcggg

SEQ ID NO: 139731 - DNA, 1446 bp, Arabidopsis thaliana landsberg
atgaatgatgagggagaaacatacaactctaaagaaagtaaaggagcagcgatgaaatcggttgtccgcaaacaacggatagatctgtcgatgttcgtttttggaactccgcgttgaatcagcgtcgatgtttctcgtaagtttgcataatccaaaaactcgttttcgaattataaatttcatcaaatccccgcttattttgggtaaattcaggcaaaaagggtttttgcgttcttcgatattatctcttattactattaggctattatcatcgccttattggggaaaaagcttcaaacttttatataaagtctcttcctttttctttctttctcggtggaatttgcagcaatggaagataaaccattagggattctcagggttcatgtcaaaagagggattaatcttgctattcgtgatgccaccaccagtgatccttatgttgttatcacattggctaatcaggtttggttcatgtcctttttgattagattatgcatcgttttgggtttgattctttggtgatcacaaatggaatgtggattatgaaatcttattagagttatagtcacatggtggaggtacaatgtgagggactgatcattaccatgtgatggtttttgtggccacccatgtgagaaagatctcaatttgatctttgctttgtgtttctttggctaaaaaacaaaactttataagacatcctatgcaaaatcttgtcatgttctgaaattacaaattcttgtattagtcttgtgttgcgaaacatatatttctttttcaatataaaattttgttgaagggtattagtctttttacgattagtctctatgcataatcttgttgaagagtcatctcccaaaactaatgagcatgtataggctcttgttgaagggtcatttcccaaagctggcaaatcataattacataatcttgttgaatggtcatctcaggatcacagtttgtcaaatagaaacaatgtcatctgggttaagaaagttgaaagtggacatgattgacttggcttagatgattgtgtctctatggttgtactttgtgaagccttctttatcattatttgtactatgtaaccttttgtttgtgtatttctttttcatatcttcttgacccgtttttatctcgttcattcagaaactgaagacgcgtgtgattaataataactgtaatccagtgtggaacgaacaactgaccctttccatcaaagatgtgaatgatcctatccgtctggtaagctatcgtgtctattacaatttacgacggtcttctaaagaaaccgattgttggctcatattatggtctgtttatgcagacggtgtttgataaagatagattctcgggagatgacaaaatgggtgatgcagaaatagactttaggccgttcctagaagcgcatcaaatggagttagaatttcagaagctccccaa

SEQ ID NO: 139732 - DNA, 1389 bp, Arabidopsis thaliana landsberg
cttctcttttgattctctcgctctctctttcttcatcgcctcttcgagcttcgatggttgggaatattctggtgaccggtggtgctggttacatcggaagtcacacggttcttcagcttcttctcggaggctataacaccgtcgttatagacaacctcgacaattcctctctcgtttcgatccaacgcgtcaaggatctcgccggagatcatggacaaaatctcaccgtccaccaggtttggctatcttttcccttgctctgctctttggatcattgcattctgagaatttcggtaatcatgacctcaaaaattgagagttttttttttgtatctcgatttgcttacaatgctttgggagttatgtttgatcaaattgcttttagtcgcagtggatttctggatcaaattgtgttcgagattatcgttaatctgagatttttgtttctgcaaatgttagatggctaatgtatcttatacctgcaggtggaccttcgcgataaacccgcacttgagaaggttttctccgaaacaaagtgagttttgtagtagcctcttcttactgatatactcatttcctcgcaaaaacatgttcaagtttaaatctcatgaattttgactttcatttcgtattcttaatagaccttatgataatatatgttgatccgaaaagcctaggaagagaggacagggaaattagttttgtatgtttcgtgctaaaatctgaatctacagtgaaatgcttcttgtttccagtcctccagagatgtgatttagtgctctatgtggctgtaatctaggtttgatgcagtaatgcattttgctggattgaaagcagttggtgagagcgtggcgaaaccacttctgtattataacaataacttgattgcgactattacacttttggaagtaatggctgcacacggatgtaaaaaggtaaaatccccttttggtctgtattgcagatttttggtattccttatgtatgtgagtatgtgacagtgaaacatgatttaactttctctcattgatctcaatcagcttgtattttcttcgtccgctactgtgtatggctggccaaaggaggttccttgtacagaagagtctcccctgtctggaatgagtccttatggacggacaaaggtactcagtcgttttcgatagcaaagtggaagcttttattgtagatttgattggtatttatactggaatgtttctcatttcgtagctgttcatagaggacatttgccgtgatgtacaacgtggtgatcctgaatggagaatcataatgctgaggtactttaaccctgtgggagctcaccctaacggtaaaattggtgaggatccttgtgggactccaaataatctcatgcctgatgtccagcaagtc

SEQ ID NO: 139733 - DNA, 4508 bp, Arabidopsis thaliana landsberg
tctattttcacttctttctctttcagttctttaattttattggtcagatttcatatacattatctgttctttaatttattaggtgttcaacccattggggctattataatgactcctcttcttactaagcttcttgctggtcagcttgttcccgttgacgctgctgtgagttttctctataactattttgaatcgtttcattcaaaattgcattgataagatacatttctttttatgtatgaaatataagatacatttcactaagctaaaatatgaataatcatggttcagtaaaagttattgaatgatttaaagtagaatgaagcgcaagaactctattagaatatagttgcagccctccacaacgaaagcttatggatccatttttttacgtcagggacttgctcttagtacgttccaagtagtgttggttcctaccataattggaggtaagtatggtgctacgtgtttccggaaaaatgaatttgtgcttatatatccttagggactaatgtctttttctgcattgtgtgcagttctggcaaatgagttctttcctaaatttacgtctaagatcataacagtgacgcctctaatcggagtcattctgactactctgctctgtgccagccctgtaagttcatatatccagatatatatattttttttattgaattttgagactggaattggcattgattactaccttatcttttctgaaaagattggacaagttgcagatgttttgaaaacccaaggagctcaacttatactcccggtggcactccttcatgctgcagcctttgctattggctattggatttcaaagttttctttcggcgagtccacttcgcgtaccatttctatagaatgtggaatgcaagtaagttactttctcctataccgtagatatacattgccgtttgctttactaaggcttctttttgaaaatctgtgtactttgcaaaccgcagagttcagcgctcgggttcttgcttgcacaaaagcatttcacaaaccctctagttgctgttccttctgcagtcagtgttgtctgtatggcggtaagttttcatagccatttcactaaagttcacatgcaaattccttaagtttaattatgttcaatggcattctgcagcttggcgggagcggcctggccgtgttctggagaaacctaccgattccggcagatgacaaggatgacttcaaagagtaaatgaagtaggaaaggcggtttgcatcttctccaaacgatgtgattgttttgttgtaatgttagtaaacattacaaaatttgtgttgaaaaacatgaaacaaaatgtgtttaagagacatagaaacaagggcgtgcatgatgacaactttgtggtcaaccttttttttatttctcaattaatggacaaatcttttttggcacaccttctccaaattttgaatctaagtttcagattgggattagcgttgttcccggaatcctgtctactctcacaatgcactccctcatttccagccatgacgtctcttagctcatatacgtcttttgtcagcaatgataagttttgatgtttttagcattaggtggttttggtgaattttcattttaaattagatttgagtgtttccttttctgatgaaaacacatcttccaacaattaacataagtaaacatgtaaagttgattggaatgtggccagttgatctcggtttcaataaggtgaagagtctcattgtattttggtctttacatgattggaatagtactatgcttctggagttctggtctcagtgtataaatggtggtaaaaaatgttttcagtttacagtaaaaaatgtttagctatattttaacatttcttttactgtagaatgtttcccatatagattttctgtttttttttaattagtaatatttttagttttcatatttttttaatatacgtgctaattcatttgttgaaagagccaaagaaatagtaatctagacaattatacattttgacacacgtttaatccgcgttaaaggaacagaagaattgatgatgattgcatttgcaccggagagacaccgaatcaaaaatggcctttagcctttaaccctctcaaacaaagtcgtcacactgtaaaaacaacagcaacaacaacaacacacaaattcacgactctttctctcccaatctcagatcgaaattttgcttcatttccctctgatcatcatcattcaccaaatttcgtattcaagaacaaatcgatcgcattcatcttctccccgaggtttcttacatacgactaaaattagggtttaagcttcccattttggatccgattgttgcaaaaggaccttctagccccggtggcttttgctataaccaagtcaaagaactgggggcgaatcagtcccacccccgccattatcctggcgtttccgatcattccagggtaggattctgggattttctacgacctcttcttaataatcctcctcgaaacaacacgttacagtttatcgattccgttggatctgatcggactatggattccgtctctagaggtaccgttgcttcaacaaccggcggtgctgtggaagagccggagtatctagctaggtatcttgttgttaaacattcatggagaggtcgttataagaggatcctttgtatttcgagcggcggaattgttacgcttgatcctaatactcttgctgttactaattcttatgatactggaagtaattttgatggtgcttcacctctggctggaagagatgagaacacggagagtgttggtggtgagtttactgtcaatgttagaacggatgggaaagggaaatttaaggctatgaagttctcttctaggtgcagagcgagtattttgaccgagttgtatcggcttagatggaatcaaattagacctgtggctgagtttcaggtgctacatcttaggagacggaacgcagaatgggttccttatgtaagtagttttcttacagtggctccatcttcaatcttttatgcatggtttctctgatagtatgatactgttgctttggttttgaggtcaagtcggactaggcttttagctgctcaacatatttgaagtttctgatctttagatagttttagccagagtctggtattaggcattaagctgatgttagtatttttcgatgtttgatgtgctcttaaatttttgtaatcatgaactaagcagggggagttctttttgtttcgcatgagtagccttattcttattttctatgggattgattttaatttttttcaatttttgttattgcaagaagcaagagtcatttgaaagttgcgactggtagtagaaattatttgaggtgcttttactaactgtttcgaattagattttggtatgaagtgactttttcttttttctttttttcttttgcagaaattgaagatcacctttgtcggtctggagcttgtcgactcaaaatctggtaattcacgctggattttggatttcagagacatgggttccccagcaatcattcttctctctgatgcataccggacaaaatctgcggactctgctgggtttgttctgtgtcccatgtatgggagaaagtcaaaagcttttagagctgcacccgggacaacaaattcctccattgtcgcaagtttggtataaatgatatgcttgcacattagttgagaagttggtgctaacttattgttaatcttgatgattgcaaatatcatttgcaggctaagactgcaaagtccatggttggggtattcttgtcagtcgatgattcacaattgctgacagtatcagagtatatgacacgaaggggtacttatatttgtgtcttgtctagatcacttttttatttatgatttctttatattatttttgatgccaattattgactatgcagctaaagaagcagttggagctgaagaaactcctaatgggtggtggtctgttactagattaagatctgctgctcatggaactctgaacatgcctggactaagcttagcaattggccccaaaggagcacttggtgagcatggggatactgtagcccttcagcttattcttactaaggcctcccttgttgagagacgaatagatacctatgaagtaagttggcaacacggttttagacacaatttctatctatattactactttatgctgcgttcctattctttgttctaatgtttttgtttctggttttattagagttttaatgtaaaaagtttcccatgatatagctgtgccttaagttgaacataagtcaaataagttacaatgtttgggatgataaagtaaagactgaaaatgagtaggacgtagctttaactttctacttgtccagtttggttttgttttgtcaaatactgagaatactgcttagatgtgtgcaggttgttatcgttcgtcctctatcttcagtaagttcacttgtccggttcgctgaggaaccccaaatgtttgctatcgaattcagtgatggatgtccagttctt

SEQ ID NO: 139734 - DNA, 912 bp, Arabidopsis thaliana landsberg
attctctatcttattgacacataaacatggaccggtccactttcatcttatctctactcttcacactcaccgtctcgactacgaccctcttctctccggttttcgcaggaacgttcgacacagaattcgatatcacttggggtgatggtcgtggcaaggttcttaacaacggagagcttctcactctctccctcgacagagcctccggctctggttttcaaaccaagaaagagtatttgttcgggaaaatcgacatgcagctcaaactcgtccctggaaactccgccggaaccgtcactgcctactacgttagtgttacttaacatcataacatatataacatggccgtttttagaataacgtgtggaaagctccaattaaaaaaattctttcttaaaggataaatttttgaatatttcctatttcctaaagaaaaattatcaacagagattcttaaataatttgagacggtcatatacgatgttactaacttaccatgtgaaatttttattatttggatattaattagaacagtttgtgattgtgtttaattttccatgcagttgaagtcaaaaggtgatacgtgggacgaaatcgatttcgagtttcttggtaatctaactggtgatccgtataccatgcatacgaatgtgtatactcaaggcaaaggtgatagagaacaacaatttcatctctggttcgatccaaccgctgatttccatacttactctgttttatggaaccctcatcacatcgtgtaagtatataaagatacatacacaacttagaaacatgagttagtctttttgtttgttctaactataatttccaacctttgggctgacataatttttgtaggtcaaaaacacgttttgatcatacttatggctgatccgcaaatataaatctttc

SEQ ID NO: 139735 - DNA, 2679 bp, Arabidopsis thaliana landsberg
tacccccaaaattccacaacctggtcaccgttttggattaataaaaaatgacaaaaaagcccttgtcgttccacgtgtaaatgccgagtaaatggaggttgttttcgtaacattagccacgcttttgacattggaccatatctcatgtaagaaaagcttcatttttatttttgttgctttaccaaaaaataagagaggaaaacataaaaaccaaatcattaatgtgttaaatcattaatggttgtcatgtttcaaaaatcattcccaacacatttcttcttcgttgtcaaaaatacatcagaacgttctgatttcgccgcgtgactcttatctccgtcaacgccgataaattctccggtaaagtaaccgccgcgatgtcgtttcttttccgtaagaacggtagtagttcacggaggaagatcaaagaaaaactccgtggtcgtcactcagatcgaggtgggaagagagaagaagatgagagatacggcggctccggctccgatttacctccaccaccgtctccttggggatttctcttcccggaggattttgtaagaatcgacgggaatctcaaagctgttattgtagatgatgaaggattagatgtgatttactggaagaagcttctagagttggaaaatagcgggaaaattagaaaaaaccctaaacctagaagaagaggagacaaatccggtgacggatttagaagaactggagcagatcaagacgataacgatgatggtgatgatgaagtaggagatgaatctatcgaagaggcgttttcgtttcatgtgaaaaaatctcaatctgcgtcatcgtcaggtggtgaaattagagatcagagtaataatggtggtggtggaggaggaggaggaggaggaggaagatactatacttcttcttctgcttctccgtcacgaccttcttcttcttctgcatctgctgcttcgccgtcgcgaacttcctatgctacaagtgccggtagtgattatggtggtggtggtggtggaaaacaatctcaatccaaatttcaagctcctggcggcggttcatttccctcttctccgtcgcagatccatagtggtggtggccgttctccgccacttccgcttcctccgggtcaattcacggcgggaaatgcgtcatttccttcatcaacacagcctcctccgggtcaatacatggcgggaaatgcgtcatttccttcatcaacaccgcctcctccgggtcaatacatggcgggaaatgcgccattttcttcatcgacaccgcttcctccaggtcaatacccggcggtgaatgcgcaattgtctacatcctcaccgtctgttccacttcctccgggtcaatacactgcggtgaatgcgccattttcgacatccacacagcctgtatcgcttcctccgggtcaatacatgcccggtaatgcggcattgtcagcatcgacaccgcttactccgggtcaattcaccacggcaaatgctccaccagcaccgcctggtccagcaaaccaaacttcaccaccaccaccacctccaccatctgctgcggctccacctcccccaccaccacctaaaaaaggacctgctgcaccaccaccacctcctccaccaggtaagaaaggagctggaccgccaccacctcctccaatgtcgaagaagggcccacctaaaccccctggtaatccaaaaggaccaacaaagtcaggtgagacttcattggccgtaggcaaaactgaggatccgacgcagccgaagctcaagcctttacattgggataagatgaaccctgatgcaagccgttctatggtgtggcacaagattgatggtggctccttcaagtaagtattaaagtctatataatgtggaatgtgatattcttaagtactgtatgattttgagttcttatgcggttataatatttgtttcttgggtagctttgatggtgatctcatggaggctttgtttggatacgttgctcgaaaaccaagtgaatcaaacagtgtaccgcagaatcagacagtctcaaacagtgtaccgcataatcagacttatatccttgatcctcggaaatctcagaacaaagcaattgtgcttaaatctttggggatgactaaagaagagatcattgacttgttaacagaaggccatgatgctgagtctgatacccttgagaagcttgcaggaatagctccaacgccagaagaacagacagaaatcatagatttcgatggtgaaccgatgacattggcttatgcagattctctactgtttcacatcttaaaagcagttccttccgcgtttaaccggttcaacgttatgcttttcaagattaactacggctctgaggttgctcaacaaaagggatctttactaacacttgaatccgcgtgcaacgagctccgtgctcgtgggctgttcatgaagctgctagaagcaatcttgaaagcaggtaatagaatgaacgctggaaccgcgaggggaaatgctcaggcttttaatctgacagctttaagaaaattgtctgatgtgaagagtgttgatgcgaaaactaccttacttcattttgttgttgaagaagttgtaaggtctgaaggaaagcgagctgcaatgaataagaacatgatgtctagtgataatgctagtggcgagaatgcagatatgtctagagaagaacaag

SEQ ID NO: 139736 - DNA, 774 bp, Arabidopsis thaliana landsberg
caatttctcaagtttcgttcgtcagctcaacaacttacgtacgtttataataatcatttcttcttcgattccttctatttccattgttcttgatttaatcaatcctcttttttattcacagggattcaaaaaagttgtaccggatcgatgggagttttcaaacgatttctttaagagaggagaaaaacgtcttctccgtgagatccaacgtcggaaaataacaacgacgcatcaaacagttgttgctccttcgtcggaacaacgaaaccagacgatggttgtatcaccgtcaaattccggggaagataataataataatcaggtgatgtcttcgtctccgtcgtcgtgtattgtcatcaaacgaagacgactgggaatggtggtttatcagtggagttattggaagagaacgagaagcttcggagtcaaaacattcagctaaaccgtgagcttactcagatgaaatctatctgcgataatatctatagtctcatgtcgaattacgtcggatctcagcccactgatcggagttattctcccggaggtagtagtagtcaaccgatggagtttttaccggcgaagcggttttcggagatggagattgaagaagaagaagaagcgagtccgaggttgtttggtgttccgattgggttaaaacggacgagaagtgaaggtgttcaggtgaagacgacggcggtggttggggaaaattccgatgaggagacgccgtggttgagacattataatcgaaccaatcagagagtttgtaattaa

SEQ ID NO: 139737 - DNA, 2714 bp, Arabidopsis thaliana landsberg
gtacattcttttggatcggttccattgaaaacgtatcttcctgatggagacattgatctcactgcttttggtgggctgtatcatgaggaagaactggctgccaaagtttttgctgtacttgagagggaagagcataacttgtcctcccaatttgtggttaaggatgtgcagttaataccggctgaggtttgtttacataatctctgtgttattcaaattccagaaactagagtctgcagtgaccaatgagtattccaagtatgtatatggtgtttatgcatgcttatcattttgattgttatctcctcaagtacctaaatttcttttcttttgcaggtcaagcttgttaaatgtctggtgcaaaacatcgtggttgatatctctttcaatcagattggtgggatttgctccctctgctttctcgagaaggtaatctgccctcttcagtatgactaattgaccatgctgtgtcaaaaaatttaactaatttttttaaaaggtaaatacagtttaggcttagtttatctgtttaatatatgaaagcagaagttgaatatcactaacctgccataatgacattggttccacctaactgcctgatgggtttctggtaactcaatagattttcttgaatattgcaaatcgtttgcaatatcacatacatgcaataatatgtttgaggcgcatttatctagaagaatattcatattagcaattttcgaagtacgcgtttgtagaagacaaagatttacttctggaaaattgatgttgactatatgattacgcagattgatcacctcattggaaaggaccatctctttaagcgaagtatcatactaattaaagcttggtgctactatgagagccgtattctcggggctttccatggattaatatcaacatatgctttggagacattggtcttatatatcttccatctgttccactcatcattgaatggaccactagcagtaagggtcttcagcaattatgagggatgcttcatgttttagtctcatcttgattcacttaactttttttatcccataggttctatacaaatttttggactacttcagcaagtttgactgggatagctattgcattagcctgaatggtcctgtctgcctttcctctctaccagatattgttggtaaggatttcctgtagtatacagaaaatttagttctttttgcgatttcagtatctgcaatttctttctttaatttctgtagttgagactccgcaaaatggaggggaagatcttctgctgaccagtgagttcctcaaggaatgtctggagatgtactctgtaccatcacgaggatttgagacaaacccacgcgggtttcaatcaaagcatcttaatatagtcgatccgcttaaagaaactaacaatcttggacgcagcgtaagcaaaggttgactgccttcttcaaccatcacagtttttattgtcctactgctatctctctctttatggatttagatgtttgagtctttaagaggcctaagacagtagcttttgacctgtccctgtccagagtattagcgttatagaatatttatggtgggtttacctgaaattcttgggctagggtatgtaggttttaagcgcaggctaaaataaagattgtgatattctggtatgtattttcaccctggaaatgaaccaatgtattaacatgagataaaaaaacctctaaattttagtttgctctggtaatcccgtgaattttatggtctagatgactctctttattggtaaatttttaaagactatggattttactttcttcttacacaggtaacttttatcgtatacgaagtgcattcacatatggtgctcggaagcttgggcaaatgtttttgcagtcagatgaagccataagttctgagcttcgtaagttcttctctaacatgctactcaggcatgggagtggccagaggcccgatgtccatgatgctattccatttttaaggtacaacaggtacaatgccatattgccagcttccaaccatttccaagaaggccaagtggttaatgaatcagaatcctccagttcgtctggtgctactggaaatggtagacatgaccaagaagactcgttggatgcaggagtaagtataccgagtacaactgggcctgatttaagtggatcacctggtgaaacagtgccttcggtttcagaggaacgattttcgggagacgcaaaagacttggctactttgaggatccaaaagttagagatttccgatgatgcaatgaaatctccgtgccttagtgataaggaaagtgtctctcctttgaatggtaagcatcattcttttaatcagatgagaaatggagaagttttaaatggaaacggggtggggaaacaacaagagaattcctggcatactggttccagaagagttaaagatatacatattaatgagaatgagaatgagcatgttggttatgaagacctgccattcgcaggagcagtaccttggccaccggaggacatgcatctccactactcaggtcattgtgtatctggcactacgaatatgctgtctgacctctcacgtgattacgagagtcagcttaacagtttgcgatttgggcgctggtggtttgattatgtccaaaatggtcctatgtctccactatcacctcctgggctgcctcaactgccgaacaacaattcatgggaagtaatgcggcatgc

SEQ ID NO: 139738 - DNA, 2714 bp, Arabidopsis thaliana landsberg
ccaattatgacaaaagttaggattttgtacgcggaaaatactcttttgctggtcaacgttcagagagaaggacacgtgggtttgtcaaacctacgactttgtcttctctcatactattataatgcaaaatatctttttcttactataaccagctgcaaatgacctttctaaatgatttaaacaatatatatatcgaaacaatgatcagaaattatggtttagcgagggtatatgtacattactaactgtaaataatattttattggtataagtcatgactaaaaataagcccttgtcgataagtcataaatcctactctccgcgcgatatgtttaattttggtaattacctatccatttactgtagttctttttttgttcaatgttccttctccaactcctctttaagttccttatataagttaatgttaatttagttgtcggcacatataccttttaaattatcgaatataaagccattgataaatcttgattctgatgttgaatgagaaaaaactggtcacattatattggacccaccaatcttaaagtgactagccctacaaaaattaaatctatcaaaaacacaaatgtctctctatatatagttacacaacttctttggacttcttcacattcactcatatcactacactttccattaattaccaatatatttttactacttaaaaaagatattggtcttgaaatggagagttacttaacgaaatggtgtgtagtgcttgtgttgttgtgtttcgggtttagtgtagtaaaagcacaagcacaagctcaagttccatgtttctttgtttttggtgactctttggttgacaatggaaacaacaacggtcttatttctattgcaagatccaattacttcccttacggtatcgatttcggcggccctaccggccgtttctccaacggcaagactactgttgatgtgatcggtatgcaatcttattaattagatagagttgttgctaattagatagtttatgcgattagaaagttaatggtcttaatctaacatgttttgacctttttttttgatgtaatgaagctgagctacttggatttaatggctacattcctgcgtacaatactgtgagtggtcggcaaatactctccggagttaactacgcttccgcagctgctggaatccgagaagaaaccggtcgacaattggtaactgaaacattaaaaccttttttcttaactctctttattcaaaaaaatattattgaagttccaacgttaatttttttttttttttttttttccggaaaatgaagggacaaaggataagctttagtggacaagttaggaactaccagaccacagtatcgcaagtcgtgcagcttctaggagacgagactcgtgcagctgattacctcaagagatgtatttactctgttggtttaggaagcaacgactatctcaacaactacttcatgcctacgttttactcttctagcagacaattcacacccgaacaatacgctaacgatctcatcagtcgctacagcacccagctcaatgtacgtttttttcttttcttgtgactagtttatctctgttttcatgttattaaatgatacaaaaggtttggctctctcgagtttacccatttagcagtgatagtaaggtttttagacgtgggtttggtctatcttttaactttcgtattatgactcttttcatttaaatacgatttggtttctaatatgaaaatacgactttttgaggcagagaattacaaaaatagcaatttatagctttatagtacaagactacaagttaaggtctcacaccagttaatttaaacccaattttggtcttcacttgtagtacacaatataaagtttctagcttaagctttttctgagtgacctatcttgtgagaaatgtttttatttttggaaaataatataaaggatgaataataaaatttatgcaattttgtaaaattttcatcggagttttacttccatttttcggggtttgtgcaggcattatacaactatggggctcgaaagtttgcattgagtggaattggagcagttggttgtagtcctaacgcgctcgcaggcagtcccgacggtaggacttgcgtagaccgcatcaactcagcaaaccagatcttcaacaacaagctaagatctcttgttgatcagctcaacaacaatcaccctgatgcaaagttcatctacatcaatgcttatggcattttccaggacatgatcacaaatcctgccagatttggtatatatacacacaaacacaagtgtggttttcttttaagtatgaacgaaaccgaaattgttatctgatttgtcggaaacgttttttgttttcagggtttagagtgacgaacgcgggatgttgcggtattgggaggaatgctggacagatcacatgtttaccgggacagagaccgtgtagagaccgcaatgcgtacgtgttctgggacgcatttcaccctactgaagccgcaaatgtgatcatcgcaaggagatcgtacaatgcacaatcggcttcagacgcttaccctatggatatttcaaggctggcacagctttgaagaaacatagtaaaataagaattaaagaagttccacaaaccaatgtgtgatcttgttgtgtaccgtaccgctatttaagattttcttgacgtaattgaaatcgagtaaaacattattctatatacatt

SEQ ID NO: 139739 - DNA, 1903 bp, Arabidopsis thaliana landsberg
gatcaaatcctcttctttgaatgattctgaaataccctatgaaaaggcgtctcctttacactgtgtattacgaatttgttctggaaattgagctacagaaacccagaaattagtggccttttggtgttcttagagtcgaattagttttgatcttgatcgtttatccaaattctcggtattctggttccaattgctgatgatgaattgttttcttccaattgtagaggagggaagaagtgagctagggattggttcagagtgaacataaatggctctcaaggcattagactacgatactctgaatgaaaacgtcaagaagtgtcagtatgccgtaagaggtgaactttatctccgagcttctgagctgcagaaagaaggcaaaaaggtaaacactttgggttgtcttcatgtcttgtgcctttacatcttggtttactcaataataggtgttatcaatgtgtctctgactctgtatctaactttaaatatgaaacaaggagctttagatagactagacctgtggtcctttgttggttagggacttgatgtgcagttgcaattatgatctagcacttgatttgtccatagttattggcagttcctaacttgggctataacagattattttcacaaacgttgggaaccctcatgctttaggacagaagccattgacatttcctcgccaggtatgtgtgtatagacaattattagacagccagacttcaatctccgcttgagcctaaatagtaaaacgaataccaattacaggtggttgcgctttgccaagctccgtttctactagatgacccaaatgttggaatgctatttccagctgatgctattgcaagagctaaacattatctttccttgacttcaggcggtttaggtatgaccttatgagcccatctataatatgtagattagtgttgacaaacagaacagttagttatattgcctttttctgtttcaataggtgcttacagtgattcaagaggccttccaggagttaggaaagaggttgctgagttcattcaacggcgtgatgggtatccaaggtgattgttttcatctgcacaatgaaatagatttttgttgtagaaacaaacccagcttaggctttttggttctttatttttagtgacccagaactcatctttctcactgatggagctagcaaaggtgtgatgcaaatcttgaattgtgttatacgcggtaatggagatggggtaatgctctgtctcaagaggtcttttctgctatgatttaccttctgacatttcatttataagttttattttccgtttggcagattctagttccggttccacagtatccactttactcagctaccatatcactgttaggtggtactcttgttccttactatcttgatgagtctgaaaactggggacttgatgttgctaaccttcgacaatccgttgctcaggctcgttctcaagggataacagtaagcactctttttccttcttctcttgcaataatcggtgatgtctttcttgctccagttacaaattgtcttgaatgcatgtacaggtaagggcaatggtgatcattaaccctgggaacccaactggccagtgtctaagcgaagctaacataagagagatattgaagttctgttataacgagaaactggttcttctgggagacgaggtttatcagcagaacatataccaggatgagcgtccctttatcagctccaagaaggttagcttctatatttggtttcatgtgtctaaccttgtgcctgatttgtgatctctcttttgatacgaccattcttaaaaaatcataggttttgatggaaatgggttcgccgttcagcaaggaagttcagcttgtatcttttcacacagtctctaaagggatattatggggtgaa

SEQ ID NO: 139740 - DNA, 2895 bp, Arabidopsis thaliana landsberg
  unsure (1)..(2895): unsure at all n locations
acaaacaacatagccgtgaagaagaagtgccaattcaagagccagaaaccgggtaagcgacgttcttcatgagctcttctgcgaagaaagaagagctctttggccatgaatatctgtataaccacaaccatagcccaaatgtagagatgacccatgtagattataaacacaactccaccgagcatccagagagatgagcatgtccttatccacattgatctgtacttgttcttatcaccaagtaacaaattgcttactctgcttacattgcttctgttcacctcagctaaattctgatcaatattgaaaaagacaatcaaattttggattcaaccggaaaagagagtatgacattgtatagatacctcgcttgatcgcctgcggtgtcgaatgcgagctgttggagagctaggagtataattgcaatcccttggtgaattaggaatgttgggataatgggtatctctctggttattagtattcattcgagacgttggtgtagtagggtaactagtatcccttagctttctaatccgtggagaatatggactgagatctttctccattgccattgagatccctaggaaatgctctcagttcctggattgagttcttgaaattcagttaatcatgaggatctgggtttctttatacatccgagtaaatgaatctggggttgatctagaatttcaaaatgtcaaccataactcgagcttatacacgtcttaatgaaacacacacattgatatctgatgagagatagcttgtgtaacaagcatataatagaggatttagatttgaatgtgtaagcctagaaatctaaatgattcatcaaagcaaaacgtgatgattcacatacaaaggataaatttcataagtgaacattgcaacaaaatgggatcatgacaagtagaaaaaagagaatgaacttacattaacgaaaacgtggtgggatgatggtgattgaaaatgcgaaaccctaattaatgaaaagaaacgtgaagaaagaaactcaaaaggtgagggaagaaggaggaggaggaaggtggtggatgagcacttagcggtgaggtttcatcaaatcatcggaagagagaaccaataaactattcatgtcgctgcttcatgtttaaacccggaatgagtgacacgtgttgtcttgatctgtttgggctgggtcagatatttaagcccattaaggaaagccttttaactattcagacatgagcatgaggagtcaacgaggtctgtgagatcagtggtcaaatcagtaaataacgcgaaaagacagggtctctcacctttttgctgttgttttttcctcattaattattgagttccgtaaaatgggtcccacttttcccatttcccaacctccataaccaaagttggagatttctctgtttcctatgctctctctctctctctcttactctcacagtgactattcgtcgcttcagatctaaaagagaggaagataaaccatttggattcaatatcgattaaggtaagaaagccatcttctacttgttggattcgattagtttcatttcagctcattgcctctttacttcttcaatgttgatttcttgctttggctttggttttatcaccaatgctgtttgatttctttgaagttcctttcgagcttttcttgagcttagtttcacattcttagcttcactaagttctttgatgtgtttttgttcccaagttcaaaatgttgtttctgattcaatttggttttctaaaaaagattgcaactttggtttcttttagtgtatagttagtttggatcttcactaaatatgttcgttgtttctacttttgtaggaaaccttttaacttcacaagaatggcagtgacagaagcagaaaatcctcttcttggtgaaatcacttgtggcaccttactacagaagttgcaggtagatttcgcaacatacacacttatccttttaatatatggttccacaaactcaatgtacaaacttgttacaggaaatctgggatgaggttggggagagtgatgaagaacgagacaaactgcttctacagattgaggaagagtgtctgaatgtttacaaaaagaaagttgagctagccgcaaaatctcgtgcagagcttcttcagactttgtcagatgccactgttgaactttccaatctcacaactgctctcggggaaaaaagctatatcgacattgtaagtaatctcacgtcttacaagtggtaaagagatgagatggttacagtgtagtgtgattcaatgtctttgtttccattgcagcctgataagacttcaggaacgatcaaagaacaactttctgcaatagcacctgcgcttgaacaactttggcaacagaaagaggaaagggtccgggcattttctgatgtacaatcacagattcagaagatatgtgaggagatcgctggcggattgaacaatggacctcatgtggttgatgagactgacttgtctctaaagagattagatgacttccagaggaaactccaagagctccagaaagagaaggtaaaatatnnnnnnnnnnnnnnnnnnnnnnnnnnnnnnnnnnnnnnnnnnntaaaactgctttgtgtttgagcagagtgataggttacagaaggtgctcgagtttgtgagcacggtgcatgatctatgtgccgtccttcgtttagatttcttaagcactgtcaccgaagttcatccgagcttagatgaggcaaatggtgttcaaaccaagagcattagcaatgaaacacttgcaaggttggctaagactgtcttgactcttaaagaagataacatgcaaagacttaagaaggttagtcaaaatcatggtctttgtgatctctgacatgagcttggtcagtttaggctgcacatatgttaa

SEQ ID NO: 139741 - DNA, 1636 bp, Arabidopsis thaliana landsberg
  unsure (1)..(1636): unsure at all n locations
ttcagattccacacggcgagcctcgaggcttcgtcttttgctattttttccttcgccgagggttccggggagatgggttcgggaccatcaatcccgctccgccgagctgctctatttctagctgccatctccatctcccgcttcgtcctttacagagccgctgattccttgtctttctccccttccattttcgatctctcttcttatctggttagtcttctcttctcttcaccacaagttcttcgcnnnnnnnnnnnnnnnnnnnnnnnnnnnnnnnnnnnnnnnnntttaggttcgattgaaattgctgtgaaatttgaaataacatagctagttctggtgcttagagattgcatgtggattgttcttatgaactagctaagtgttactgcgatttatgttatctgcgattttctcatattttgattattatgaatttggaaccaatgagtatcattgtgaagctacaagttttgtgaatgcatattcaaatgctgaatttgtttgcttatgataggataatgaggaacctaagctagaagatgttctgagtaaagctgcaacgagagacaggacagttgttttgacaactttgaatgcagcatgggcagctccaggatctgttattgatctcttctttgagagttttagaattggggaagaaactagtcaaatcttggatcatttggtgattgttgcattggatgctaaggcttattcgcgttgcttagaactgcataagcattgtttcagtcttgttacggaaggagttgatttttccagagaagcttattttatgactcggtcttacttgaagatgatgtggagaaggattgatctcctaaggtctgttctcgagatgggatacaattttgttttcacggtaaagttccagcatcttcatatttacttaggtactagcatagggaactgatgaaagacttgtgtgaaactcagtgttctggttcgtttttcctttttctccaggatgctgatgtgatgtggttcaggaacccgtttccacggttttacatgtatgcagatttccagattgcttgcgatcattacctcggaagatcaaacgacctacataatagaccaaacggagggtttaactttgtgcggtccaacaatcgaactatacttttctacaaatactggtatgcttcaagactcagattcccgggatatcatgatcaggatgtgcttaactttctcaaggcagaaccttttgttttccggattgggttaaagatgagattcttgaacactgcttatttcggcggtttatgtgagcctagcagagatctgaacttggttcgtacaatgcatgccaattgctgctacggtatggagagtaagcttcatgatctcagaatcatgcttcaagattggaaagatttcatgtctttaccacttcatctaaaacaatcctctggtttctcctggaaagtccctcagaattgcaggtactcttcaactacacttcctatgaatttacggtcactatcatcgattcgagacgaatccatgaacctttttttttggttttttcagtcttgattctcttcgacgctatgatgaatctgtggaggatgatgaagagagtgatccaccaggagaatcccaagactga

SEQ ID NO: 139742 - DNA, 1056 bp, Arabidopsis thaliana landsberg
aaaaaaaaccattttaatttcctagaattctgggttttaactttgacacttgtggaatgttgatcaagactaattaaggcatataatacttcaaagaggctagttaagaaagaccaatatagagctttttcatatagagcgcatatgcagcttttgacattgaatcacaagaagtgacttaaacgatacctatgaaatgcaggatcttccttctcctgaagctatccaaattgcaaacaacatatcaaatcttggtcagatctacaacagagaggatagttcaactgatgttcaggtaaagcatgaataagcttgcagatatggaccagttagggatcctgtacatattatacataaacaaagctgagttttccacatatttccaggcaagaggtcaagtaatcggagaagacggggttcgtgttcacagtatggttctaccaggactaccatctagtacacaagtctacttctcaagtccaggagacgtaattaataatacttgacctcttgttagatcactcaaaatcaaactgaaaattggatactctattttaaaatttaggctacatagctcattaaaattcttctgatacaaaatgctgtccacaggtttacactgttaaacatgacataattgacgtaaggtccctaatgcccggcctactcctagcaatcagaaaggtggtacgcctcaaggtaacatggaaacaagcaagaattctccatccattaatctcttactgttatctaatcacttgccattattctctttggttttccagaatctggtttatggcctcgagaaatttctgtaggaactgaagtgtttcaccagtcaaagataacatcatcatgaacagctcatgtcatcctgcaagacatatgaagttaggaaataggttgatattttctttcatcatgatacgagtgttcaatatttaaggtgagaacactaacaacgtcgaacagtatcccaaggatttcatattaaacaactactacattactaatagatttacggcctggaaaataagatgttcaatgcttttggtt

SEQ ID NO: 139743 - DNA, 3526 bp, Arabidopsis thaliana landsberg; identical to SEQ ID NO: 3609

SEQ ID NO: 139744 - DNA, 1042 bp, Arabidopsis thaliana landsberg
atgttcctgtattagaaaaccaagatcttttatcctaattgttgattctaatggtggctgttacaggacagatgatggagtgagcatgaaaccgatatgtttgttgcagctgtgtcgtataggcgtgataatgtacgattggttggacatttcatggctaaagacttattacaatttcgggttcgatcacttcaacatttcttggaagaagaccggtgtgagaggtctcgttgattgcctaatgggaaacgcaggtccttttgcttctggcgattggatcttacctgatctcacaatccaaggctcaacaagtattaactccaatctccagacgttcccaaacacttactacttcagctacgcgactaaacgcacccgcagagtcatgggtatgacaatcccttcaggtgttcttggaatccacccgatgctcttcctccgcgtctttcagatgagccaatggaaattcccacaagatgtctctcctccttataaaggctacaggtactcaaaaacactcaaaaatttaacattgatttttgaagcccttgctgcattggtctaagaaaacatgtttgaatgaagggatgaggactggcaagagaacgacggggcattgaacacaatatcaatgacacatccgaggctacctgttgagcatccgagccggttcataaggagcgattcggaatgtcaaacattacaacccgggatctggtaagtgaatcatatatgaactaatgacgttgatggattgagaaaatctgaataccttgttgttgcaggtattataagatagtggaagcagatcacataatgttcatagtgaacagagagagagctggtgttcagtttgatctgatatactacagcatcttccaacgttgcaggaaacatgtttttagaaagattcctcagactctccccaatcaatctccttcttctcctcgttcatcatcatcacccagaataaacaactttgtacattgatcacatgcaaaaaaaaaatgttttagggttgttaccgttgagggcttaagtt

SEQ ID NO: 139745 - DNA, 1871 bp, Arabidopsis thaliana landsberg
acctccggttattggaaactgtacgaatctttaccggttaagactcaacggtaacagactcgccggaagtatcccgtcggaaatcgggaatctgaaaaatctcaactttgttgatataagtgagaaccgtctcgtcgggtcaatccctccggcgatctctggttgtgaaagcctcgagtttctcgatcttcacacgaatagtctctccggttcattgctcggtactacactcccaaagagcttgaagttcatcgatttctccgataatgctctgtccagtactctgcctccgggaataggattgttgacagagcttacaaagctcaatctcgccaagaacagattatccggcgaaatccctagagaaatctccacttgtcggagtctacagcttctcaatctcggcgaaaatgacttttctggtgaaatccctgacgaattgggtcaaatcccgtctctggcgatatctcttaatctcagctgcaataggttcgtcggagaaatcccgtctagattctccgacttgaaaaaccttggagtgctcgacgtatctcacaaccaactcaccggaaacttaaacgttttaacggatttgcaaaacctcgtctctctcaacatctcctacaacgatttctccggcgatttacccaacacgccctttttccggcgacttccactttctgatctcgcctcaaacagagggctttacatctcgaacgcaatctcgacccgacccgacccgacgaccaggaacagctccgtcgttagattgactattttaattctcgtcgtcgtcactgccgtacttgttctcatggcagtttacactctagtccgggcaagagccgccggaaaacaactcctcggagaagaaatagattcgtgggaagtgacgctttaccaaaaactcgatttttcaatcgacgacattgttaagaatctgacgtcagcaaacgtgatcggaaccggaagctccggtgtggtttaccgtataacgattccctccggcgagtcactcgcggtgaagaaaatgtggtcaaaggaagagagtggtgcgtttaactccgagattaaaactctaggatcgattcgtcacagaaacatcgttcgtcttcttggttggtgctctaatcggaatctgaaactcttgttctacgactatctccctaacggtagcttgagttctcggcttcacggcgccggaaaaggaggatgtgttgattgggaggcgcgatacgacgtcgttcttggtgtggcccatgcacttgcttatctccaccatgattgtctccccacaattatacatggtgacgttaaagctatgaatgtcttattgggtcctcactttgaaccctacttagctgatttcggtttagctagaaccatctccggttatccaaataccggaatcgatttagggaaacccaccaatcggcctccgatggctggctcctatggttacatggctccaggtaagcttgagaaagtacttgtacacttaactaagtttggagttttgattttgatttgttttgtttgttgggttttacagaacatgcttcgatgcaacgtattaccgagaagagcgatgtttatagttacggggtggtattgttagaggttttaaccggaaagcatccgttagatccggatctaccaggaggtgcacatttggttaagtgggtgagagatcacttggctgagaaaaaagatcctagcaggcttcttgatccgagactcgatggacggactgactcgataatgcatgagatgcttcaaactcttgcggttgcgttcttgtgtgttagcaacaaggcaaacgaacgacctttaatgaaagatgttgtggcaatgctcacagaaataaggca

SEQ ID NO: 139746 - DNA, 1595 bp, Arabidopsis thaliana landsberg
aaaaccccaaattggaaagcttgccgcttcattctcggtaacgttctaatcgtttcaccaatctttttcttcattattgtcgtataggacctggaccagcttaagtaatggcctctcgtgtcccctgttttttaaggtccactaaaaacatttacatgtaaataataaatgtaatgattaaaaagagattatatacgattaaaagcaaattgaatgatagagaacaaataaaatttaaaatattattggaaatgtttagttttgtagggtgatcactatgaaaaaagagttataaacctaaaatctgctctgttttcttcaaaaaaattgtctaaataaagaaagggccattatattttttttattatatagcttgggccctgattggatctatccatataagattaaccagttttatgtgttttgtgtaggaaatgagtgctgtgaaagattggcctactatggcatgggcactaaccttgtgaattatcttgagagccgtctgaatcaaggcattgctatggctgcaaataacgtcacgaattggtctggaacatgttatataactcctttgattggagcctttatagctgatgcttaccttggacgatattggactattgcaacttttgttttcatctatgtctccgtgagttttacttgtttcttatcttttggttaaaaatgtgaatcttttggttaaaactaattaagtttgttttttctcttgaagggtatgactcttttgacattatcagcttcagttcctggacttaaaccaggtaactgcaatgctgatacttgtcatccaaattctagtcagactgctgttttctttgtcgcgctttatatgattgctcttggaactggcggtataaagccgtgtgtttcgtcctttggagctgatcagtttgatgagaatgatgagaatgagaagatcaagaaaagttctttcttcaactggttttacttctccattaatgttggagctctcattgctgcaactgttctcgtctggatacaaatgaatgttggttggggatggggtttcggtgttccaacagtcgcgatggttatcacggtttgctttttcttcttcggaagccgtttttacagacttcagagacctggagggagtccacttactaggatctttcaggttatagtagcggcttttcggaagataagtgttaaggttccagaggacaagtctctgctctttgaaactgcagatgatgagagtaacatcaaaggtagccggaaacttgtgcacacagataacttaaagtaagaaactaaagtttgaatctttatcctaacttcaaaaatactctgttttcaaatctaaagttttgaaaacatctcaggttttttgacaaggcagcggttgagagtcaatctgatagcatcaaagacggggaagtcaatccatggagactatgttctgttactcaagttgaagaacttaagtcaataatcacacttcttccagtttgggccacaggaatagtcttcgccacagtgtacagccaaatgagcacaatgtttgtgttacaaggaaacacaatggaccaacacatgggaaaaaagtttta

SEQ ID NO: 139747 - DNA, 1203 bp, Arabidopsis thaliana landsberg
gtaatgaatgctacaaagaagatttaaagttaaacaaatttaaatcatgaaatcgaataattaaataaaatacaaagaaaaaggaaaaaaaaataaaaaaaaagggagggagacaagatgctgcgatggttcacgtgccaatgtgccttttacttttcatcaactagttttctttttaattattaataaatcaactcaatttcgcaattttatagttagtgacgtcacttctctctcctcacagagtcgagtttctctcctacgctcttcatttcatttcatttgatagagagagagagagagaaagagcttcgtcttcttcatctccatcattatctccattgacattgttctcgattgcgaataataatcataattattcacacaaccaaagcattcatctctcagattctcttaaaaaaatggagaaatcagatcctccaccagtcccaaagcccggcgccactatcatcccctcctccgatccaattcctaatgccgatccgattccatcttcttccttccaccgccgatctcgctccgacgatatgtccatgttcatgttcatggatcccctctcctccgccgcaccaccttcctccgacgaccttccctccgacgacgatctcttctcttctttcatcgatgtcgatagcctcacctctaatcccaatccctttcaaaatccttccctctcctccaactccgtttccggcgctgctaatcctcctcctcctccttcctctcgtcctcgccaccgtcacagcaattccgttgacgctggatgcgccatgtatgccggtgatatcatggacgctaagaaagctatgcctcctgaaaaactctctgagctttggaacatcgatcccaaacgcgccaaaaggtccttcttcttcttcttcaaatttgtttctctttccacagaattgaagaattgcaatgaaattagggatttgattacaggattctagcgaatcgacaatctgcagctcgatccaaagagagaaaagctcgatacattcaagaacttgagcgcaaagttcaatctcttcaaaccgaagctaccactctctctgctcagcttactctctaccaggtttccatattcggcgattcctcgtttgatcccaacagaataggaaagttctttcctctgttttacatacatagacagatcttgatttcaatggtgttttgattgat

SEQ ID NO: 139748 - DNA, 1287 bp, Arabidopsis thaliana landsberg
cttcttctcttcaaagaaaactttgcttctctttctataaggaaccagacacgaatcccattcccaccgatttcttagcttcttccttcaatcctctctttccctctccattagattctgtttcctctttcaatttcttctgcatgcttctcgattctctctgacgcctcttttctcccgacgctgtttcgtcaaacgcttttcgaaatggcgattttggattctgctggcgttactacggtgacggagaacggtggcggagagttcgtcgatcttgataggcttcgtcgacggaaatcgagatcggattcttctaacggacttcttctctctggttccgataataattctccttcggatgatgttggagctcccgccgacgttagggatcggattgattccgttgttaacgatgacgctcagggaacagccaatttggccggagataataacggtggtggcgataataacggtggtggaagaggcggcggagaaggaagaggaaacgccgatgctacgtttacgtatcgaccgtcggttccagctcatcggagggcgagagagagtccacttagctccgacgcaatcttcaaacaggtttaaaatctcagaaatcttcgaatttggtgtttgcttgttgttttatatggaattgagtatggtgattgttttgcattgcagagccatgccggattattcaacctctgtgtagtagttcttattgctgtaaacagtagactcatcatcgaaaatcttatgaaggtttgctgttacttgtttctccttttaggaattgaattgcttgaaaatttatcagagacgaataactttgttgttgctatcattcatgtagtatggttggttgatcagaacggatttctggtttagttcaagatcgctgcgagattggccgcttttcatgtgttggtaaaagaagatgttttttatttccagcaatgttacattgttatacgtataatgatgagtttagtgattaagttcctctttgattcttctttcttgttgcagtatatccctttcgatctttcctttggctgcctttacggttgagaaattggtacttcagaaatacatatcagaacctgtgagtaattactattctccagccattactgtaatttttattgaagacaagtttgtatcatgaagaacttacaagttctgttttgaaaatgctcaaggctgtcatctttcttcatattattatcaccatgacaaaggttttgtatccagtttacgtcaccctaaggtgatactgtttttggg

SEQ ID NO: 139749 - DNA, 925 bp, Arabidopsis thaliana landsberg
ggactggatgtgaagcaaactgtttcagccattgaacaagcttgttcgatgtaatgatttgcaaaacaatgtgatattcgactttaaaaatatcaaagttaatttcaataaaactcgatgtagagatggttggttcatgatactacttttacatgaaaagctttttaatcgatgataacgcgaaagtcttggtctaaatttgtgaattggattcatggaacaataacctcgtaccaactgtacggtacggacggctgtactttggttgagttacccaataatagtcttcttccaataacttgttgaccacgaaaacaatagacatataaaaggcagacagatcatttaaatcaaacaaggaaaaataagaaacaagaacaactagggtttgattaacctagcttgttttttatttaaagttctatgaagataacaactttcatcataagatctttatcgttgttatctatgatctatcaaatgcaaagtcttttgacattgatagatatataaatgattccttttgaacttttctcaagacaccattccgcttgatttttttgatatctttctttctattcaacaaaaatgatttcgctaagtttcatcgtgcgtctagcaaaccaggagaacagacgaaacagaaggtacgaaactaacattaaggatcgtcttgtctcgggggagttatcggacggtagcagaccagccagagatcaaaacggtgtcccgagaggacatcttgcggtctatgtggggcgcgaagagaggcaaaggtttgtgataccgaccaagtatcttcaatatcctgaatttaggagtttgatggatgaagtagcggacgagcttgggtacgatcatgaaggagggattcatattccatgtaaagaaagtgtttttgaagagattttgattagatacatgt

SEQ ID NO: 139750 - DNA, 1815 bp, Arabidopsis thaliana landsberg; identical to SEQ ID NO: 43918

SEQ ID NO: 139751 - DNA, 492 bp, Arabidopsis thaliana landsberg
caaatctcatataaatacatacatacatacgtctttattctccactgctctatttctcaatctctctcctaaatcaatcaatctttgtattttcatttagccagaacaaaaaaaatggtggagcaaaagagatacgctctgtttctagcgactttggactcaaagttcgtgaagaaaacttacggaggataccacaacgtgttcgtgacgacgttcggagacgaaggagagcattgggactcctttagagtcgtcagcggagagtttcctgacgagaaagatctggagaaatacgatggcttcgttatcagcggaagctctcacgatgcctttgagaatgatgattggatccttaagctctgtgatattgtcaagaaaattgatgagatgaagaagaaaattcttggcatctgctttggtcatcaggctcttttcttttttctattatcccctattttaaatatattggattttttttgtcatttcaacttt

SEQ ID NO: 139752 - DNA, 2288 bp, Arabidopsis thaliana landsberg
  unsure (1)..(2288): unsure at all n locations
ctttgaggcaatggcgctcgatagttctgttgctctgtcacctcgccggcggcatggcttgttgcgagatcaggttcagcttataaaaagaaaggactctggaagatatgagatagttccaatagaggatccattgtcttttgaaaaaggtttctacgctgttattcgtgcttgtcaattattggctcagaagaacgatgggctcattttggttgggttagctggtccttctggagctggcaaaaccattttcactgagaagattctcaattttatgcctagtattgctatcattaacatggacaactataatgatggtactcgtgttatcgatggaaactttgatggtatgcacctctatgtttcacccttctggattctggttatggatttattcaatcattcctttcttatgtatatataatctgaatataaagaacatttgcgattctgttatattttgttacagatccaaggttgactgactatgatacacttcttgacaatatacatggtctaagggatggaaaacctgttcaggttccaatatatgacttcaagtcgagttctcgaataggttacaggtatatatattcttcgttggtgcatttactactatttcaaacttgtggacagacggcgttatacttgaattcctgggaaccacttgttagttgataagagctacacagctgcaatgacttatcagtttcttcgtgctttgtatagaacgcttgaggtgcctagctctcgcattgttattctagaaggcatatatgctttgagtgagaagctacggcctttgctagatcttcgtgtctctgtcactggtggagtgcattttgatcttgttaagcgtgttttgcgggacattcnnnnnnnnnnnnnnnnnnnnnnnnnnnnnatccatcagatatctgagacggttttcatgctagtctttgctatcttttattttttagcccagattaatcacccttgctgtcatgcctgctgtttggagttgcttcaaatatggaaaaaacatgaaacgatgtctcctactcctactggatgttttgagttttttttacagtaaaattttgcttatgtttttttctccaaccaggtttatcctatgtacaaggcgtttattgaacctgatctgaagacagctcagattaagatccttaataagttcaacccattcagtggctttcagaacccaacatatattttaaaggttacagaatttatattgttcataagtgtagtatcgtagcatattatataatctgcaactagctatagcagcaatactttcccggttggagtgatttttgttatcttactgtagtcatcaaaggctgtaacacccgaacaaatgaaggcagctctatctgaagatttcaaggaacgtacagaggaaacttatgacatctatctgttaccaccaggcgaggatcctgaagcatgccaatcatacctcagaatgaggaaccgagatggaaaatacaatctcatgtttgaggtttggccaatacctgtccagactagtttttcttctgtaaacaccatatcatatcaaagctgaacgaatggtttattaatttgatgaatgattaccgttctatgtgttcttaggagtgggttacagatcgtccatttattatatcacccagaataacttttgaagttagtgttcgtcttctcggaggattaatggcactgggttataccattgcaacaatcctgaaaagaaagagtcatatctttgatgatgacaaggtaattgtgaaaactgattggttggaacaactgaatcggacatatgtacaggtaagatctgcttctcttatgtctctcaaaacgtatatactgtctttagagtggtattttgacattaatgatcaagtttgtccaactctattttgaaggtacaaggtaaagaccgtacctttgtcaaaaatgtggcagaccaacttggactggaaggttcatatgttccacatacatatattgaacagatacagctggagaggcttgtgaatgatgttttggtatgagttgtttttaactttttaatacacacagatccggttgattttgtcatgatggtaatttgatatgttccctggtcatgttacaggctttgccagatgacttaaaaacaaaacttagcttagatgatgatacagtttctagccctaaaaaaaccctctcaagagcttctgttgatagtagaatgaaatattttcacgggtatcctcttggtccttcttcatgattggcaaaatctgagatagagt

SEQ ID NO: 139753 - DNA, 1094 bp, Arabidopsis thaliana landsberg; identical to SEQ ID NO: 25302

SEQ ID NO: 139754 - DNA, 1974 bp, Arabidopsis thaliana landsberg
attggacataacaaagagagagttctaaacaattattcaggacccaattcgttacctttgcttgcaggacgtttgagtaaatcagaaacggagacgcttaagtttgtcgccggagaagatgaagaaggagacgacggtggaacaaaagaactcaaattagaatttttcttaacattgcgtggcgcattgggattgtatcggagcttcggctgcgtatctaaagcagctctcactatagtagagctcgctgatagaatcgccatttttgaaaaaacctttcagctttttattttttaagcttcccttatgttttgacggtaataagatcaggcggtgacatttatttatccacgtggcgtgtttttacttgtctgtttcacaaaaataaatacacactagcgtacctttagcattacgagctttgtctcgtctctcttctggcactctcacctttcgtcgtcccaatttgtaaaaccctaacgactagatttcagtacctgcaactcctttttctcaactttccgatcatatttctcaatcggagaaactgattcgacgaacatcatgagtcgctacgatagccggaccggcgattccacctcgtaccgtgaccgtcgaaggtaagtgtgtttcctttcgtatagactccatttgaactatagtctcgttgtttttggctatgtatttgaacgaatatgaagaaaatccacttaattttgatcaaattcgtggaatagtgcgttatcaaattctctatgggtgtgttggagaagaagagtttgcttcattttcaaatttgctttatcttagtgactcagggtttggtgggacttcatcatatggaagctcaggtagtcatacatctagcaaaaaggataacgatggcaatgaatctccaaggaagctagatttagatggtttgactccttttgagaagaatttttatgtcgagtctcccgctgtggcggctatgacagacacagaagtagaggaatatcgaaagctaagggaaattactgttgaaggcaaagatattccaaaacctgtcaagagttttcgtgatgttggctttcctggtaaactcttgaatttggcaatcatgtagagcttgtgattagtttcacttacatgtcttagatgtatgatgtagcatatatgcctgttttatttttggatatacctactgatatagtttcctgattggctcagattatgttttggaagaggttaagaaggctggttttactgaacctacgcctatacaatctcaggggtggccaatggctatgaagggacgtgatcttatcggcattgctgaaactggttctggaaagactctttcttacttactacctgctattgtccatgttaatgcccaaccaatgttaggtaatgcttgatttctgctcctggagttctttttttttttcgttcttgtttgatggaagttgtaaaaggctgtactgattgaaataaaatttcccagctcatggtgacggcccaatcgtcttggttcttgctcccactcgtgaactggctgtgcagatacagcaagaggcatctaaatttggttcatcctcaaaaattaagaccacttgcatttatggtggggttccaaaagggcctcaagtgcgtgatctccagaaaggtaaattgctttagttcagtgcctttcacgacatttctggaactattagtttttcttaattttttgttgatcattctgattgtgattgttggcctgtggatataggtgtggagatcgttatagctactcctgggaggttaatagacatgatggagtcgaacaacacaaacctacgaagggttacttatcttgttttggatgaggctgatcgaatgcttgatatggggtttgaccctcagatccggaaaattgtttcacatgttcgtttacttactcctgtcttcgtcatatatatgtgtatgctagttgctttgtctataaccttt

SEQ ID NO: 139755 - DNA, 5388 bp, Arabidopsis thaliana landsberg
  unsure (1)..(5388): unsure at all n locations
ctgatttagataatgccaacgttgatttaacagaatgtaacctagatccagagccttgctcaaaaaatgttcaaggcacattccataaagtagcagaagataatgataaagatagtagtgataatgttgctgaggcagcagcaccagcaagatctgcccagccaggtggattaacatactccccaacaaaagttcgaaagaaactgccgtttctacttaagcattctttgcgtgagtaccaacacattggtttggattggcttgtcacaatgcatgagaaaaagttgaacggtattctggctcataaaatgggtcttggaaagacaattatgaccattgctcttctagctcaccttgcatgtgataagggaatatggggtccccatctgattgtggttcctacaagtgtgatgcttaattgggagactgagtttcttaaatggtgtcctgcatttaaaattctcacctactttggtagtgcaaaggagcggaaactcaagagacaaggatggatgaagcttaactcttttcatgtatgcataacaacctataggctagttattcaggacagtaaaatgttcaagcgcaagaagtggaaatacttgattcttgacgaagcccatttaattaagaattggaagtctcagagatggcagacactattgaacttcaattctaaacgcagaattttgttgactggtacacccctgcagaatgatcttatggaactgtggtcacttatgcactttctgatgccacatgtctttcagtctcaccaggaattcaaagactggttctgtaacccaatagcagggatggtcgagggacaagaaaaaatcaacaaagaagttattgatcgcttacataatgtcctccgtcctttccttctacggcgcctaaaaagggatgtggagaagcaacttccttcgaaacatgagcatgttattttctgtagactgtctaagaggcagcgcaacttgtatgaggacttcatagcaagcacagaaacacaggctacgcttaccagtggaagcttttttgggatgataagtatcataatgcagttgcggaaagtttgtaatcatcctgatctctttgagggtcgtcctattgtaagttcttttgacatggctggcattgatgtgcagttgagttcaacaatctgttcgctactattggaaagtccgttttccaaggttgatcttgaggctttgggattcttattcacccatcttgatttttctatgacttcttgggaaggagatgagatcaaagctatttcaacaccctcagaattaatcaaacagcgtgtgaacttgaaggatgatctagaagcaatccctttgagtccaaaaaaccgcaaaaatctgcaagggacaaatatttttgaagaaattcgtaaggctgtctttgaggaaaggatacaagaatctaaggatcgggcagcagccattgcatggtggaattctttgagatgccagagaaagccgacttactctacatcactaagaactcttttaaccattaagggtcctcttgatgatcttaaagctaactgttcatcttacatgtattcatcaatcctcgctgacatagtcctttcaccaatcgagcgttttcagaagatgattgagctagttgaagctttcacatttgcgattccagctgcacgagtgccttcacctacttgctggtgcagtaaaagtgactctcctgtttttcttagtccatcgtacaaggaaaaagttacagatttattgtcacctcttttatctccaattagacctgcaatcgttaggagacaagtatattttccagataggcgactgatacagtttgattgtggtaagctgcaggagcttgctatgttattgaggaaattaaaatttgggggtcacagagcgttgatattcacacaaatgaccaagatgcttgacgtcttggaggctttcattaatttatatggttatacctacatgcgtcttgacggctctacacctccagaagagaggcagacgttaatgcagcggtttaatacaaatcccaagatctttcttttcattttgtcaacccgaagtgggggcgttggcatcaaccttgtgggtgcggacacagttatattctatgacagtgactggaatcctgctatggatcaacaagctcaagatcgctgccacaggataggtcagacacgtgaagtgcatatataccggttgataagtgagagcaccattgaggagaatatcttaaagaaagcaaaccagaagcgtgtgcttgataacctagtaattcaaaacggtgagtataacaccgaatttttcaagaagctcgatcccatggaattgttctctgggcataaggctctgactacaaaggatgaaaaggaaacaagcaagcattgtggggcggatatacctctatcaaatgcagatgttgaggctgctctaaaacaggccgaagatgaggcagattatatggctctcaaaagagtagaacaagaagaagctgtggacaatcaagagttcacagaagaacctgtagagagaccagaagacgatgagctagtaaatgaagatgacataaaggctgatgagcctgctgatcaaggtttagttgcagcagggccggccaaagaagaaatgtcattgttacatagtgatatcagggatgagagagctgttatcactacttcaagccaagaagatgacactgatgtattagatgatgtcaagcaaatggctgcagcagcggctgatgctggacaagctatctcatcttttgagaatcagcttcttcctattgatagatatgcgattagatttttagagctttgggaccccatcattgttgaggctgcaatggaaaatgaagcaggatttgaagagaaagaatgggaacttgaccacattgagaagtacaaggaggaaatggaagctgagattgatgatggggaagagcctcttgtttacgagagtaagtgtaaccttttttgctcattcaattcaatagtttaactgacaataaaccttgacgataatgtagttttgtataatgttaatttatgggctggtttgtagctcacatgagattttaatactattttcagaatgggatgctgattttgcaactgaggcatacaggcagcaagtggaagtcttagctcagcaccaggtgagattaattagtgcatctaccatgtcctgcatttcagcttggtcacgtatttacttatgtttgtagttaatggaagatttggaaaatgaagctagagagagggaagctgcagaggtggctgaaatggttttgacacagtaagacgctttcaaacccacacagttcattgtcgatatgataatctaggacgctgctgttcagtcggagagacaagcagtgatttctacttattttaaaccattaaaacaagtagataatttgaaccattcttttcctcaggaacgaaagtgctcatgtactgaagcctaagaagaagaaaaaggcgaagaaagccaaatataaatccctgaagaaaggatcactggctgccgaatcaaaacatgtgaagtcagttgtgaaaattgaagattctactgatgatgataatgaagaattcggctatgtgagtagcagtgactcggatatggttacaccgctttcgcggatgcatatgaagggcaagaaaagagatttaattgttgacactgatgaagagaagacctcaaagaagaaagcaaagaagcacaagaagtctctcccgaattcagatatcaaatataagcaaacaagtgcactacttgatgaactggaaccatcaaagccgtctgacagtatggttgttgataatgagttgaaattgacgaacaggggtaaaactgtagggaaaaaattcatcacttccatgccaataaagcgtgttcttatgatcaagccagagaaattgaagaaaggaaatctgtggtctagagattgtgttccctcgcctgattcttggttgccgcaggaagatgctatattgtgtgccatggttcatgaatatgggcctaactggaattttgttagcggaactctttatggaatgacagctggtggggcttacagaggacggtatcggcatcctgcatattgttgtgagagatatagagagcttattcaacgacatattttgtctgcttccgacagtgcagtgaacgagaagaacctcaacacaggttctgggaaggctctccttaaagtcactgaggtaaggttgactatggcatagcgttaggttagctactcactagcgtccatttaagaagttattagtgatatattagaatttgtcttgtaaatgtgtcgtgttaatcaactcaagaagattatagtggaaaggagatggttttcactaatatcacatatttggtgcaggaaaatattcggacactcctaaatgttgcagctgagcagccagatacggagatgctcctacaaaaacatttttcttgcttgctgtcatcaatttggaggacgtctacccgcactgggaatgatcaaatgctctccttaaacagtcctattttcaacagacagtttatgggttccgtgaatcacacccaagatttagctagaaagccttggcaggggatgaaggtcaccagcttaagtagaaagttgttagaatccgctctccaggattctggcccgagtcagccagacaatactatttcccgttctaggttgcaggagactcaacctatcaataaattgggattagacttaaccttggaattcccacgtggcaatgatgattccctgaatcagtttccaccgatgattagtctgtccattgatgggtcagattcattaaattatgtgaacgagcccccaggggaagatgttctaaaaggttctagggttgctgcagagaaccgttacaggtttggaactctgatatatatgacttttctttccatagtttttgagagcagtaatagtcactaatggattgatggtcttgtttgnnnnnnnnnnnnnnnnnnntgtattgaagattcatttggatgggcttcaaacacgttcccagccaatgatctgaagtcaagaacaggcacgaaagcacagtccctggggaaacacaagctatccgcctcagactcagccaagtctacaaaaagcaaacaccgcaaactcttagcagagcaattggaaggggcatgggttaggccaaatgatccgaatctcaagtttgatttcacacctggtgatagggaggaggaggaggagcaggaggtggatgagaaagcgaattcagcagagatagagatgataagttgttcacaatggtatgatccattctttacctcaggccttgatgattgctcattagcttcggatatctcagaaatagagtag

SEQ ID NO: 139756 - DNA, 1722 bp, Arabidopsis thaliana landsberg; identical to SEQ ID NO: 32880

SEQ ID NO: 139757 - DNA, 2061 bp, Arabidopsis thaliana landsberg
ttagtcaacagttgattgtcctgtaaaggttttgtaaaaagttcaccgttaaaaaactgtgtataaaaactatggcatttctttgcagatatgaaacaggtgaccatgtaggtgtatatgctgaaaatcatgttgaaatagttgaagaagctggaaaattgcttggccactctttagatttagtattttccatacatgctgacaaggaagatggctccccattggaaagcgcagtgccgcctcctttccctggtccatgcacacttgggactggtttggcaagatacgcagaccttttgaaccctcctcgaaaggtgaacgtctgtttgtttggagattagcctcacaagcttgttctggttgctttggtctttgcttgttcctaaatatttaacttgtatttttttggtttcagtctgcgttagttgccttggcggcctatgccactgaaccaagtgaagccgagaaacttaagcacctgacatcacctgatggaaaggttctgaaatcattggtgtatctatttctttgtgattttaaggtttcatgagttaacaccgacggtttctttgttgtcggatgagtactcacaatggattgttgcatgtcagagaagtcttttagaggtgatggctgcttttccatctgcaaaacccccactaggtgtattttttgctgcaatagctcctagtctacaacctctttactactccatctcatcctagccaaggtgattatttatttttgaaatatattttgtggcagaaggaaaactattcttgatcgtctctggcattcaaatcactctttaccgttttttacaatacagattggcgccaagtagagttcatgttacatccgcactagtatatggtccaactcctactggtagaatccacaagggtgtgtgttctacgtggatgaaggtacttcttaccttctttttgactatctgccagttcactgttttttttcttaacagtttgaaaaattcagaatgcagttcctgcggagaaaagtcatgaatgtagtggagccccaatctttattcgagcatctaatttcaagttaccatccaacccttcaactccaatcgttatggtgggacctgggactgggctggcaccttttagaggttttctgcaggaaaggatggcactaaaagaagatggagaagaactaggttcatctttgctcttctttgggtgtagaaatcgacagatggtgagactttcacaaccaaaaacaccttcttcatttgctgtgtcatcatgcatgttgagcttctgctgagtgcttatatgtatgttgcaggactttatatacgaggatgagctcaataattttgttgatcaaggcgtaatatctgagctcatcatggcattctcccgtgaaggagctcagaaggagtatgttcaacataagatgatggagaaggtaaatatatcaagtgatgcatcatactttgggaaaaggaatgtcacataatctctttaattttgcattttctatttgttcaggcagcacaagtttgggatctaataaaggaagaaggatatctctatgtatgcggtgatgctaagggcatggcgagggacgtccaccgaactctacacaccattgttcaggagcaggtatgaatgagcattgtgatgaaatttaggtttttcactttggttccctttgatactcgactatttttatctttacaaaatttcaggaaggtgtgagttcgtcagaggcagaggctatagttaagaaacttcaaaccgaaggaagatacctcagagatgtctggtgattgatgatatgatttattggtaattctcttctgctttctcaacttttcttggtacgctgtccttaccatttagatatttatttgtttattttccttcgtctcccttcttttagtcaaacatgaatgatttgtcaaagttttctttgtatgaacaaaagtataaactacaaaataaatctgtgagagtgataaaattgagagaagatacccaagatttcatcatcatgctttctactgtcgatagtggatcatcattgtga

SEQ ID NO: 139758 - DNA, 1747 bp, Arabidopsis thaliana landsberg
cgaacgagtttccatgtttatctttaacttttctttctggaccattgggtttaaaatgtatcattttggggattcttgtttgccttggatatggggtgtaacctgcttttgtttctcactagtccatacttgtatatatcataaaagtaaatgtgtctctctctttgagaacagttgaagatgcaattgtcaaaatgtttggtgattttggacaacaaagaatgatttgttatgttctatctaaagttctgtttgactaaactatgtttggttaatttcaggtccacaagggccacaactgcagaaggtactggaaagacttactgggcaacacactgttcctaatgttttcgtatgtaagtagtttaatccgtttacatcgatcatatcttcattgaaactctgttttccttatatatcctacctgcttcaaaagatgaaacctttagatgtcccaaagaagtgaacaacatagtttcagttaatagctagtcataacagtgtctaatctttgtcctaatgagcaggtggcaagcacattggtggctgcacaggtactttcctccttctcttctcacctctttggtttcttctacttctcaaatgtgagatgcctcagttttggatattgtttcactcaactattggcattatcttcttgttcttgtgctacagatacagtgaagcttaacaggaaaggagatctggaactgatgttagctgaagccaacggtaaaaacggtcagagttgaggagatgttgaaactggttcggagatttttgcatacggagcttggaaagttttctcatttttgttattatcattgtacctcatttgaatacaataattatagttaataaataacatatacatatcatgtaattgttgatctctctttgtttttcaccacttgaattcacagttttcaagccttcagagtaatccaaatattaccaatcccaggctgataaataaagaaggaaaaaagtggcctaatatatattctagaaaatccaaaatcagagagaagcgtggcaagtttaggatcacaggtcaatagagtgaaaaatgatcccaaactgaaaagagatgtcatcttctgaaacaggggaagttgcagagaatctagcgagaccaatggctactctggtctcgtctccaacttacatctaccattgtcatattagtaaacaagctctttatcaggcaaaagaatcatactctcatcgtagaatttcccgtcataatcacagagaaagactcgatttttctcatagaaaccatagattgacaataactagaaagcagcaacctttgtctttcaacaccgtgtgttttgccgcagacgagccctccgaaatcaggtaaacttcgacttcttctaaccttattaaattgggtttcgtctttagatttgaatgaattatggtttaggttctatctgtgtcgttgttgaatcaattttagtacttggtaggtttatgctcattgacatgatgaaaggttaaaactttgaatgcaagaatgttatctcacaccttgtgtaatgtcacagctaagttatctctgtttatggtttcagtgctgatgctagaatccgtagtgaggttctgtctccgttcagatcagtccgtatgttcttctacctcgcctttatagcaagcggttcattaagaggactaatagccacttctaggctcataggtgccctggcgaatccggctagatcaggtgaagttcttgaga

SEQ ID NO: 139759 - DNA, 1426 bp, Arabidopsis thaliana landsberg; identical to SEQ ID NO: 37253
  unsure (1)..(1426): unsure at all n locations

SEQ ID NO: 139760 - DNA, 560 bp, Arabidopsis thaliana landsberg; identical to SEQ ID NO: 63480

SEQ ID NO: 139761 - DNA, 799 bp, Arabidopsis thaliana landsberg
catggctcatttggataaggaactcgctggctattgggcaaaattaccaatgattaggaggttgatgttgtctcatccagaagttgagtggatctggtggatggatagtgatgctttgttcactgatatactgtttcagatccctttggctaggtatcagaagcataatctagtgattcatggttatccggacttgttgttcgatcagaagtcgtggattgctttgaacacaggtagttttctgctgaggaattgtcagtggtcgttggatttgttagatgcttgggcgcctatgggacctaaagggccaattcgtgatgaggccgggaaggtattgacggcttatctgaaaggtagaccagcttttgaggcagatgatcagtcagcattgatctatctcctgctttctcagaaagatacatggatggagaaagtgtttgtggagaatcaatactatttgcacgggttttgggaaggtttggttgataggtatgaggagatgatagagaagtatcacccgggattgggtgatgagagatggccatttgtgacccatttcgttgggtgtaaaccgtgtggtagctatgctgattatgcagtccagaggtgcttgaagagtatggagagggcctttaattttgcagacaatcaagtgctcaagctgtatggttttagccataggggattgttgagccccaagattaagaggatcagaaatgagacagtcactcctttggagtttgtagacaagtttgatattcgcagaacgccagtggaaaccaaaccacagaactagagg

SEQ ID NO: 139762 - DNA, 884 bp, Arabidopsis thaliana landsberg
aaaactcgctgtagatttctcaggtaaagtctttctcacaaaaccacatatatctatctctccatcaagtatgaccttcaaatactttctctctcttcctaatctaattggttttttaatctgcctacttgtgtctagccgagtaccttggtttctcttcatacccacgtgcattcctaagccgggaagcaagcaacgagaatatcctgatcggtgccaactttgcatcagcttcttcaggatactatgatgccacatctgttccatttgtaaaggagacaacacagtcaaacatcattacacacatacccaagaaatgatccataaggttttactcttccttttgcagggctcgatctccttaacacgacagctgagctattacagggcgtatcaaaatagagtaacgagaatgatcgggagggggaacgcgcacatactgttctctagaggtatccacattttgagtgcgggatctagcgactttcttcagaattattacatcaatcctctactcaacatcctaaatacacctgatcagttcgctgacattctcctgagatccttctcagaattcatccaggtacttctaagtttagtaacgaacttgtagaactcgatattcataataaggcaaccatatgaatgtgcaaatttacaagaaacacaaaaaaatcgtatcagttatttacccttttttgtgtgaacaagaatcatactgtcacttgtaacagaatctgtatgaactaggagcaaggagaatcggagtgatatcgctaccgccgatgggttgcctgcctgcagctatcactcttttcggtgcaagaaacacaagctgtgtgagagactgaacatgatgctatcatgtcaatactaaactgaga

SEQ ID NO: 139763 - DNA, 1023 bp, Arabidopsis thaliana landsberg
tgcgataggatcagcattgttggtggaaggcaaagtagtactaggtgttatggcttgtcctaagcttccattggcatcaactggtggtaatgcactcaagtctttacctgaaaaagttggttgccttttctatggttcggttggcaatgggacttatgtccagtctctcagtgtcgactctcttcctgtgaaggtaaactacttgaaaccactctgtttccatgcatttactatcaaatcttttcatatattgctaaagaaatgatcaaatgcgctattaggtggaggttagcagcatagatgatcctgcgaaagcgagtttcttcgagtcataccacacacctgtccccatccataacaccattgctacggtaaaacatcttcctcacattctctatacgtatcttcttgcttactctaaattttactctgtttccgcggtgacagaaattggggataaaagaatctccaatcaagatcaacagccagactaagtatgcagctttatctagaggagatggagaggtttacttgaggtttactcgcaaagcaagacccgaatcaatatggaatcacgctgctggctcaatcattgtttcaggtaaacccatttagctcttacctacatagcttttggtctattatagttcatgaatgatcacacaacaaatccttgtatgaaactttcagaagcaggagggaaagtgactgatgcagcagggaatccattggacttttcgaaagggaagtatcttgattacaagagaggaatcgtcgttacgacgcagaaactgttgccaaggcttttaacagcagtaagagaatcaattaaagaagaagaagaggaagaagaaaaagctgcttctctaaaacttcactaacacgcaactgtaatatacttattattgttgtctttgggtatactctgttgtctctgtgtttttcacacagtctatttattgaaaaccagaaacaaaaaaaaaactcacctttgatatatataagaaacactaattctctttt

SEQ ID NO: 139764 - DNA, 2644 bp, Arabidopsis thaliana landsberg; identical to SEQ ID NO: 28539

SEQ ID NO: 139765 - DNA, 1021 bp, Arabidopsis thaliana landsberg
atattttttaaaatcaaaagagagagtagtcttaaattctagaacagaagtcgcgacgaaaatctcagtatttaaacaaaacgtgcttaaacaaatagagataatcattcagatataatgcaaaaagacaaaagagagttgaattaaatcacgtggaaaacaaggaacgcgacaaagcagaacagtctcactattcccgcgttagccactcaatacaatccgccacgtgtcccatcttcacgcgccagtcagcgttgatcttcttcctcacttgccacttccacttcttcatatataaatcccacacagccgcaaattcgaaatcaaccagaatataacagaattaacctacacaactgaaactcgagttaagaaccggaaacagaatccaattcaaccaaaccgaatcgaaccgaaccggagtttttatccaatggtgaagcaagcgatgaaggaagaggagaagaagagaaacacggcgatgcagtcaaagtacaaaggagtgaggaagaggaaatggggaaaatgggtatcggagatcagacttccacacagcagagaacgaatttggttaggctcttacgacactcccgagaaggcggcgcgtgctttcgacgccgctcaattttgtctccgcggcggcgatgctaatttcaatttccctaataatccaccgtcgatctccgtagaaaagtcgttgacgcctccggagattcaggaagctgctgctagattcgctaacacattccaagacattgtcaagggagaagaagaatcgggtttagtacccggatccgagatccgaccagagtctccttctacatctgcatctgttgctacatcgacggtggattatgatttttcgtttttggatttgcttccgatgaatttcgggtttgattccttctccgacgacttctctggcttctccggtggtgatcgatttacagagattttacccatcgaagattacggaggagagagtttattagatgaatctttgattctttgggatttttga

SEQ ID NO: 139766 - DNA, 2612 bp, Arabidopsis thaliana landsberg
gaaaagccgagaaagatcgatttttggcgttcggggttgatgggttttggaagatttttattttaacagcttcagcattcagtggcggtgaagatgaacaataataataataacgatctaatgggtaataaaaaagggtcaactttcatacaagaacatcgagcattgttaccaaaagctttgattctgtggatcatcattgttgggtttataagcagtgggatttatcagtggatggatgatgctaataagattagaagggaagaggttttggtcagcatgtgtgatcaaagagctagaatgttgcaggatcaatttagtgttagtgttaatcatgttcatgctttggctattctcgtctccacttttcattaccacaagaacccttctgcaattgatcaggtcagtgtgtgctttattaaaagctcaaagctttggtgaaatttttgattcataaatgcaaagctgactttttttggaaccagaagtttttgaaatttactcttttatgtttggttattgagtaaatgaagggaaatttaggcctttgctttactcattggtttgtggctaattttgcaggagacatttgcggagtacacggcaagaacagcatttgagagaccgttgctaagtggagtggcttatgctgaaaaagttgtgaattttgagagggagatgtttgagcggcagcacaattgggttataaagacaatggatagaggagagccttcaccggttagggatgagtatgctcctgttatattctctcaagatagtgtctcttaccttgagtcactcgatatgatgtcaggcgaggtaatataaacattatcagacacttatggttttgttttttcggttaagtatccgacctgcacctcttctgaattttggctatcttttctcaggaggatcgtgagaatattttgcgagctagagaaaccggaaaagctgtcttgatagccctttaggttgttggaaactcaccatctcggagttgtgttgacattccctgtctacaagtcttctcttcctgaaaatccgactgtcgaagagcgtattgcagccactgcagggtaaagttcccatctgattactggagcaaacttttgcttgtgatcatgtaaaaagagattttcgagatttcatgattggtttatgtgtgtgatcatgtaaaggaaagaggttttttgagatttcaagattggtttgtgtgtaaagtaaagattgatgcttgaatttgaaatgcaggtaccttggtggtgcgtttgatgtggagtctctagtcgagaatttacttggtcagcttgctggtaaccaagcaatagttgtgcatgtgtatgatatcaccaatgcatcagatccacttgtcatgtatggtaatcaagatgaagaagccgacagatctctctctcatgagagcaagctcgattttggagaccccttcaggaaacataagatgatatgcaggtaccacacagaaaatcttaaagctaaaatactctctgatatctaaaaactgatatcttgtttgaacaatttcgagtgcaggtaccaccaaaaggcaccaataccgttgaatgtgctcacaactgtgccattgttctttgcgattggtttcttggtgggttatatactgtatggtgcagctatgcacatagtaaaagtcgaagatgatttccatgaaatgcaagagcttaaagttcgagcagaagctgctgatgtcgctaaatcgcagtttcttgctaccgtgtctcacgagatcaggacaccaatgaatggcattctcggtactacatcttcaaacaaattccagtactgttgcctttcatctttggtttctcaaactgcctcaaagattctgttttaaaaattttctgcaggaatgcttgctatgctcctagatacagaactaagctcgacacagagagattacgctcaaaccgctcaagtatgtggtaaagctttgattgcattgataaatgaggttcttgatcgcgccaagattgaagctggaaagctggagttggaatcagtaccatttgatatccgttcaatattggatgatgtcctttctctattctctgaggagtcaaggaacaaaagcattgaggtaagttttcaatccaaggaataaagatacatctatttggagttgtggctgctgatttcttgatttcaaatttggcagctcgcggttttcgtttcagacaaagtaccagagatagtcaaaggagattcagggagatttagacagataatcataaaccttgttggaaattcggttaaagttagtccctatttcaatctctgcctttgttggcagcttgtgtatatgatttttgtttgatcaagatgttgtctttttgacagttcacagagaaaggacatatctttgttaaagtccatcttgcggaacaatcaaaagatgaatctgaaccgaaaaatgcattgaatggtggagtgtctgaagaaatgatcgttgtttccaaacagtcaagttacaacacattgagcggtttcgaagctgctgatggtcggaatagctgggattcattcgagcatttggtctctgaggagcagtcattatcggagtttgatatttctag

SEQ ID NO: 139767 - DNA, 1233 bp, Arabidopsis thaliana landsberg; identical to SEQ ID NO: 33600

SEQ ID NO: 139768 - DNA, 1183 bp, Arabidopsis thaliana landsberg
gcaaatgaccctactcccgaggcgaactggcttcaagggaatataataacgaatctctatacgagcatggtacagccagtcgaagcagttttcaccgtgagtctggaaaccgaggctcttcttgggattccgaatcactgaggaggaggaggaggagagttgaggaagaagttgagtcagaagatatcacaaatttgaaatgtcctctatgccggggtactgttttaggatggaaggttgtagaagaagtaagaacgtatcttgatcataagaaccgaagttgctcccgagaatcctgctcatttactggcaactaccaggatctgcgccgccatgccaggaggactcacccaacaactcgtccttcagacactgatccatcaagagagagagcttggaggcggcttgagaaccagagggagtatggagatatagtcagtgcaatccgttctgccatgcccggtgctgttgtagtaggagattatgttatagaaaacggagataggtttgcaggtgagagggaaacgggaaatggtgggagcgacctttggaccactttactattgtttcagatgattggctctcttgacaatggaggttctagcgctagtgggagtggtggtggatcaagatcccacaggtcaagggcatggaggaatcatcggcgttcatcttcagataggccgtacctttggggggagaatctattgggtctacaagatgagcgcaataacaacgatgatgaagagtttcgtttgcagaatgatgcaggcggtgcttctactcctgttccaagaagaagaaggagatttggacgtcctagatcaagcggaaatcatccgcgataagctgaagcgtcccggtaaaaattcgatataaatcattgggtttttggttgtagaaaaacctttgcgattactgaaactggttttgtctttaggtgatatcgatatctctcgggtcagaaccaggccgatgcaaagggaaaggttttactaaaaacccgagagccttaggattgtttggttttatgtaaatgtcattttgagccttggctcattgtatactactaagtatggcttcttatgcaatgtcttttgttacttaactcgtggattattttcttttgcgttgtgatgaagtttgttatttaggaaatcgaccacgtataaatattttatct

SEQ ID NO: 139769 - DNA, 2310 bp, Arabidopsis thaliana landsberg; identical to SEQ ID NO: 27099

SEQ ID NO: 139770 - DNA, 951 bp, Arabidopsis thaliana landsberg
  unsure (1)..(951): unsure at all n locations
aaatncgcgccaattttcacaaactcggcgttaaccaaaacgacgtcgtcatgctcctcctcccaaactgtcccgaattcgtcctctctttcctcgccgcctccttccgcggcgcaaccgccaccgccgcaaaccctttcttcactccggcggagatagctaaacaagccaaagcctccaacaccaaactcataatcaccgaagctcgttacgtcgacaaaatcaaaccacttcaaaacgacgacggagtagtcatcgtctgcatcgacgacaacgaatccgtgccaatccctgaaggctgcctccgcttcaccgagttgactcagtcgacaaccgaggcatcagaagtcatcgactcggtggagatttcaccggacgacgtggtggcactaccttactcctctggcacgacgggattaccaaaaggagtgatgctgactcacaagggactagtcacgagcgttgctcagcaagtcgacggcgagaacccgaatctttatttccacagcgatgacgtcatactctgtgttttgcccatgtttcatatctacgctttgaactcgatcatgttgtgtggtcttagagttggtgcggcgattctgataatgccgaagtttgagatcaatctgctattggagctgatccagaggtgtaaagtgacggtggctccgatggttccgccgattgtgttggccattgcgaagtcttcggagacggagaagtatgatttgagctcgataagagtggtgaaatctggtgctgctcctcttggtaaagaacttgaagatgccgttaatgccaagtttcctaatgccaaactcggtcaggtatattttttttgggaaatacggaatcatacgaatttggaaaatcgaaataactatacggaatgaaatctcataattaactgaaaaacataacataagtaaatacctatatacagtttgtatt

SEQ ID NO: 139771 - DNA, 965 bp, Arabidopsis thaliana landsberg
actcaaagtaggcgctattttgtagaagctgtgtcatgtattaatgtttgtgttcatgtctgtttatgtgattattgtctgtgtagggagagttagtgcgtcttttaggtggagctaaagcttcaacatctcttcttggtgtaccacttggtcacaactcttcttttcttcaaggtcctgcttttgctcctcctcgtattcgagaagctatttggtgtggtagcacaaactctgccactgaagaaggtaacatgggtttcattagaaacttttaaagtttcatgctttgtatagcaacagtcttgattctgaattatggtttctgttgttattggatcaccttgcttgtgctgttctatggtttatacagtcattgatgattggttttgacctttgtgtttggtagacttgtttgtcttttgatattgatctgttgaatgaattgcagggaaggagttgaaggatccacgggttctaactgatgttggggatgttccggtacaagagattagagattgtggggttgatgatgatagactgatgaatgtcataagtgaatctgtgaagttggtgatggaagaggtaaagctatttgacagctctagtgttacgccacttcatgtatttagtcttttgtgatacttactagatcatttttatgtacctaggggctaaaagttttctgttttgacttttgacatactggtttaaggtcaatgaatctaaaagtccaagtaactgagcatttgtttgttgtgtcaggaaccattgcgtccgttggtcttaggtggagaccattccatatcttatcctgttgtgagagcggtttctgagaagcttggagggcctgtggacattcttcatcttgatgcacatccggatatatatgactgttttaaaggaaataagtactctcatgcatcttcttttgctcgtatcatggaaggtggctatgcgcgtaggct

SEQ ID NO: 139772 - DNA, 875 bp, Arabidopsis thaliana landsberg
gtaggtgaaatgatgcttcatcaactgggataagcttcacaccgcaagtaatcgtagtttccattggtgaagtatgtttcttctgtctcctcttgaataatctggttcttttttttcttggtaatcttgcctctaattcttgagataaccatactctcggtgttgctttcaggacattgcttcaaaggttatatcgttctcgcatcaaggtccacgagcgatatgtgtcttatccgcaagtggtgctgtctctactgcaactcttcttcagccagcaccttctcatggaactattatatacgaggttttattgaatcatcactcacattttattatcttttagaagagaaaaacattacttattttggtgtatactttgaaacttatagggtctattcgagctcatatctctctcaacttcttatctgaacacaactgacaatgactacccaaaccgcactggaagtctagcggtctcacttgctagccccgatggtcgtgtcattggtggtggaattggaggtcctctaatagcagcaagccaagtccaggtgagcttacgcttgttatcaaattccttggatgaatttagatttcttatgcttaactatgtgtgtttgcctccttaaaaggtcattgttggcagcttcatttgggcaattccgaaagggaagattaaaaaacgtgaagaaacttctgaagatgtccaagatactgatgctttggaaaacaacaacgataacacagcagcaacgtcacctcctgttcctcagcaaagtcagaacattgttcagactcctgtaggcatttggtcaactggttcaaggtcaatggatatgcatcacccccatatggacattgatctaatgcgtgga

SEQ ID NO: 139773 - DNA, 1171 bp, Arabidopsis thaliana landsberg
gtgcagacaaagcctataacctcgatgctctcattgactcatcggattccaaattggcggtgaggatacacagacctactcctcaaatccttaacgtactcgtaagcccatatccgatttttcttttcctgtaaatttaaattttattacaaatttctcaaaatcgcaaaagctttgccgctttcttctctaatcgaactaaatcttaaaactttgctgattgattgattttcgattccggtatgtatctttctttagttttcaattcgctgcttgcttcttccctgggaattttagggtttttagggttttgtaatttccgattgaaaagtttcgtgctttacgagtctctgtaactcaatttttggcagggagaagaaaaatggtatctgggttgattaatgagaaccctatcatttacccaaagaaagagaggcgtcttcgtactgatacaagcattactgatgagcttacaccagaaccaattgatcaacttgagatttttgatatcctttcttcatcaagttttcttagaactactctaattgcaaaccttaattggtgaattggtttgattgtgtgtgattgtgaggatgtgattatcgtcttacagctattagcatctgaaattaagagtagctagtgtatgcataggttttggaacaacttgacatgcctctcagcttgaagtttgcttctttacactattagaagtcatgaatcttttgttctcatatgcatatcttttcgaagtaggtgttggaaccatttgacatgcttcttagcttaaagcctacctatgaatcttttgttctcgaatgctaaatttcttgtaattatgcgtggtatcggtttggtaatctgtgaacaaatggaatctatgttttagttgatacagaatgatattggattatttctgttgttttctttaacaatacacaaatcatataagagatatcaaagatccagagcatcctaatactctggaagatctcagagtagttacagaagactcagttgaagtggatgatgagaacagttatgttaggtaaaatgttgggattgaacgttttgttatggatttttagtgttcctttgagccaatctgttgagctctaccatttcttttcagggttacgttcactccaactgtcgaacattgtagcatggc

SEQ ID NO: 139774 - DNA, 1367 bp, Arabidopsis thaliana landsberg; identical to SEQ ID NO: 28786

SEQ ID NO: 139775 - DNA, 1518 bp, Arabidopsis thaliana landsberg; identical to SEQ ID NO: 56374

SEQ ID NO: 139776 - DNA, 2521 bp, Arabidopsis thaliana landsberg
  unsure (1)..(2521): unsure at all n locations
ctaaaagttctttgaatgctattattattagagcttatttgctgaacctgctgcatttcaaactttggggatagtttctcgcttttctcccacaatattgataatcccattgtattggtgcttatatacctaatgacaggccagggcgttacttgaatggcacaacgtgtcacaattttgtggatcatgtggaagtaaaacttttccaaaggaagcaggaaggagaaatcaatgctcagacgaaacatgcagaaagagggtctatccccgtgttgatccggtatattggtgcttcttacattttgtagatttcactaagagtatggccattgtggaccttctggctgattggtcatccgtctattacaggtggttataatgttagttattgatcgagaaaatgatcgcgcacttttaagcaggcaatctagatatgtaccgagaatgtggagttgtttagctggatttattgaggtatgaaaacctcactgcgaaatcatctcaactcgatatttaataataactttctctttgtcattttttcatccaactcccctggataggccattccacttattttactcttgcatggagatttgtatgtataatctatgctgcttttgctagccaggggaaagcttagaagaggctgtgaggcgggaaacatgggaagagacaggcattgaagtaggagatgttgtataccacagctctcagccttggcctggtaattgagtagttaagaaattaatatgatttttggtttgggtttcttctgcctcacatttatatatctatctatgtttattagcttacgaagtttatatttagctaatgtacaatgcatgcattcatgagtgttataattcctttaccacgtagtcctcataaaatactgctattgatgagcaatttagtaatagagcagaatgaaaaggagaatttccttatgagcaaatttgcatctcgtagcaaagtattctttaatgtatagatttgaaacttattcaatttaaccttattattatgtcttccgatagctgtcctgtcacattctgtttttatgcttttccatgtgtagagcttagtatgcctctacagtggttgccactgctttattctaggtagttaggactcttgattttaatgccaaaagttctttcaaattgttttcgaaatgcaagtttaacataaacgagaatatgggtttctgaaattgtagtgggaccaagtagcatgccatgccaattgatgctcggtttctttgctttcgccaagacgctcaacataaacgtagacaaagaagagttagaaggtataatatatgttctcaaacaactctttggagtgccagagttttgttttaagtccatcacattcttaacatgtttgtgtgttattgttgttgcgcagatgctcaatggcacagtagagaagaggtgaagaaagcattggcggttgcagaatacaggaaggctcaaagaacagcagctgcaaaggtagagcagatctgtaaaggtgtggagagaagccagagtctatcaactgatttcaatcttnnnnnnnnnnnnnnnnnnnnnatgtttatcccggggccatttgccatcgcgcaccacctgatctcagcatgggtaaatcaggctcctgacgatgttcactcaaaacaacaagcgggtgtctctctctcaagtttgtagctagaaagatgaacttagatgcttagaaaccaaacgtttgctatggcttctatgcttattttgaattgctgagtcctaagtgtgtggacttcgctcgaagttatttctttgcaacgacgatttagatcaataaaaattaatcaaagattgacctcaataaatttgagttttatagttcgtttttctttagtggctgtgttcttcgaaatcagatgtttactgcttcttcctaatgttctggttgtaaaacaaaaaaaaaagttaacaaatgagaattccactgttcttagagtacacatctccatagcgtagcattcactctccttccccagattctaaaaccccctccctagtcctcctccaaaccattttgttctttctcagagatctaaaccatcatggctacttccttcttccggcgactcgctaggtcagctccgattacattccctgtcgcatttggatctcaaagcaaatctggttctggcgctttccgattctccaccggtgcaatcgcggcactttccggtggattctcctattactacttgacatccggcaacaatctggtgaacttttctatctaatgtctttgatttctatgtaatagttgatcacttcgaattccgtttaatttttcgtcgagctggtttttgatccctttctcttgcattttgtccaatgtgtgtgtttgttgtattttcatattcaatcagacgagtttatacgatcaatacaaagtatgtagatcttcattttcgtttgtactttatgatctcaggtttatctggatcaagctaaggaagagacaggaccaaaaaccg

SEQ ID NO: 139777 - DNA, 1460 bp, Arabidopsis thaliana landsberg
ataatatcccgctgagtgaagtttactggtctctcgttaacaaagccgataagaaattctccaagatcagagacttgcccttctatgaacgctccaggtacctcttcccattcccctgagataaccgtacctagaattgttgattagagagttggtagatattgattccgattgttgttgatggaattgttcataggtatgagaactatttcttcaaggtattcaaagtatacacacaactatggaagtttcagcaagagaataggcagaagcttgttgaagctggacttaagagatgggagattggagagatcgcttctcgcattgcccagctttactatggacattatatgcgaacaagtgatgctggttacttatccgagtcctatgtattctacgaagcaatactcactagggagtacttcaaagatggattgtttcaggatctcaatattgcaaacaagcagcttcggtttcttgcaaggtttcttatggtgtgtttggttcttggccgccgtgagatggtgcatcaactcgttgatcagtttaaacggttgattgatgaatgcaagaggacattccaggttttcttctgataccctattctctccatctttaggtgtaactgttttagtggaacaatgataacaattaggttgcctgccttacaagagatcccgtctctatctattttttttttttcggtgttacataaacaacttttcatgttatcaggaaaccgattttaaggaatggaaggtggtggcgcaggaaatagttagatttctgaaatcggacactgcattcatgaacattagacctctaagatacagtcttgtattggatcctaatctggatgctggtactccgcgtgcaagtaggtctttaaggttgacggatgctatcttgagcagttattactgtaacgaggtaattttttacttgttcatgtttagtatgaacgcatatttaatatcttaccctctgaaatttgaaaacttgctgtatgatttccaccaggtcaagtattcggagctcacgctcgattcttttaggatgcttcaatgcttagagtgggaaccgagtggttcactatatcaatcaactggtgctaaaatgggtcagaatgctcccgttggagttgctcgtattaactcccagagcatgaatgatcctactttgccacctaaccctcgcaaagctgtcctttatcgtccatccataacacattttttggctgtaagtcgatttttggttttttacttgtctatctggaattattggctctatggaacttcattctgttaaccctgtttttatttggtaggttttggccaccatttgtgaggagcttccttctcatggcattcttttattatatctgtctgcttctggtaatgtgtgtagtttaagtctggtattatgcttcttctctttggaatattgagttccttcgcttc

SEQ ID NO: 139778 - DNA, 1124 bp, Arabidopsis thaliana landsberg
ttgactcattcttagtgatgacagtataatgtctgatgcttattatcatcatcatcatcatcggagacattcttcctcttcacgtctatggattttaatgccggagttcccatgtcttctctttcacctttgatgaatcaaggtcctatcaatttcttctttcttttctctgttttgatcggcaaattttggttattggttttgtttttaaacggattgggtttaatctcagtttcttcttcttggtttgggttgggatttatgatcagatgcaatgtggcaaatgaatttgagttcacatgaaacaatggaaactggttcttaccctgaacgaccaggagagcctgattgtgcttattacataagaactggactttgtaggtttggttcaacttgccgattcaatcatcctcacgaccggaaactggtactgactctgtttctgtgtttgttctttcctctgtatcttgttgactcaaagtttgtagctttgagggtctgtgtgtgtgtgtgattacaagctgatgaatagtctcgtatccaatttctaggttatagcaactgcaaggattaaaggagaataccctgaaagaattggtcagcctgaatgtgaggtagctctgtttcgaattactatcatagtaatgtcttctagttatcacattgtctcaaagcttctatttttgttgttgtgtctgtgcagttttatctgaagacagggacctgcaaattcggagtgacttgcaagtttcatcatcctaggaacaaagctggtattgatggaagtgtatcagttaatgtcttaagctatcctctacgtccggtatgtatacatttcaactttctaatctcaccactgctttgtaaaattttgcctctctcatgagttctgtttgcagaacgaagatgattgctcttactttttgagaactggacaatgtaaatttgggggaacttgtaaattcaatcaccctcagactcaatcaaccaacttgatggtttctgttcgtggctctccggtttactatgctcttcaatctctaactggtcaaccgtcttattcttggtcgagaacatcttttgttgcaaaccctcctcgtttgcaagatcttctactgagagca

SEQ ID NO: 139779 - DNA, 1995 bp, Arabidopsis thaliana landsberg
gcataacgcaaaaaaaattcgtataccattattttgtagtgttgagccgattaattccttaatatttgaagaacttagacatggttaaaatatcacaacgcgtcaaaaatatgatttataagtaaaatggttaaatcataactttataaaatagtatatgatatatgtgtggttatggggaagagacgtcactgtacaccgcgttggcgtcagcgtcgtgatatcatgccaatctcttaattacatttttaaaaattgtaaaaaaattcattttcattgactcggtcttcaattttacagatcgatgctcttatcttattttataatttgtaatatattcgccacaaattcttcgggtaagttcgaagctgacaagtgacaacgtgagttacgtgctccactattcctttaaaactaacataggctaagtataataatgcagatttttcgagatatatgtggtacattattaaatctttaattatatgatatacactacgtcactattattagaatgacataagctcttagaaaataagctatattagttattgacaatctaaacaatttgagtagctaataagtctttgtcatgttgttgttgcagggaaatagtaagtaaatacagtagagaagtaagagaagtgggatttaaaatagaggaattaatatcagagagcttaggtttagaaaaagattacatgaagaaagtgcttggtgaacaaggtcaacacatggcagtaaactattatcctccatgtcctgaacctgagctcacttacggtttacctgctcataccgacccaaacgccctaaccattcttcttcaagacactactgtttgcggtctccagatcttgatcgacggtcagtggttcgccgttaatccgcatcctgatgcttttgtcatcaacataggtgaccagttacaggtaccttgattacctttaattcctccatttgacttgtgatattaaaatttctagtttaaaccaaaaaaataccaaccattactaaaagagtggtgggttggtttcgacttcaactttagaatagatgatttctgttgtaccaaccggcctagtttcggaccataaaaataaatgtgactcggcccatgaacttcggacttaaaaagaaaagaattactagtctttacgcaatagtttctctctactcaactacccaataaattgagatttttaaaacaattacagagaatttgttatagggacatttcaaaaagtacctctaaaaatcttagggaggaagagtgtcaaaacttttcaaaatatttattttaaaaaatgtattctggacgtttatttattttaaaagttcgggtactgttagaagttaaaagttttaacattgattaaaaatatgatttttttcttttcttgtaagacaaagtgttgtaagaaatatcatcatttaaacgttactaaaattatgaacatattatagatttatttggttaataaagggttagagaattttcagagaataatagccaatcatcaagatcgaatgtttgtctagaattaagatcttaattaactgtgtattttcaggcattaagtaatggagtatacaaaagtgtttggcatcgcgctgtaacaaacacagaaaatccgagactatcggtcgcatcgtttctgtgcccagctgactgtgctgtcatgagcccggccaagcccttgtgggaagctgaggacgatgaaacgaaaccagtctacaaagatttcacttatgcagagtattacaagaagttttggagtaggaatctggaccaagaacattgcctcgagaattttctaaacaactaagatacatatatctttggcctttgtgtttgtctagtaggcatatatatacaagtcaatgtaacagcattgatgttcgattctacattcctaccaacattttgttctagacgtatgataatagtaggaatcatgatcatatgtcttgataataactatcatgggcata

SEQ ID NO: 139780 - DNA, 1789 bp, Arabidopsis thaliana landsberg
ggtcacgttttattacatgtgtggtatgatcccaaactttaatttctaattaaattcccctctagataagataatattttgtagtaagacctctgccaagtgtagttggtaagacgggaatgctaagtttattattgtacatatgtcctacagtccttgttaatgctttgcttcaatcagaatcttagattccaatgtaaggagtttgctattagatgatttcattgcctctacgtagtaggaagtgaagcaagggttttgtgatcagttagatttagatcaaaagttaaggggttggctacgttacgaatatactgttagagttctggacctcgtagaatttttaactaaataagaattttcaaagcaagtgtattagaatttagtaattaaaattttgtgttttacacagctcttcatgaaaatttgttactaaagaattttataccaagtgattctaaaattttacatgtgtgtatgagctactggtgtttatttacatgaggattttgttgtgtgcaggagctttattattttttgctctgctgggtctatctggatgcgtcataacctgctatgatcgaagggttcgcaatgacttagcacagccttgccgtgaattgtgtctctgttgttgccagcctgggtacaatttccatacttcttcctttgtttttgttttcagtcattggcgttttcctgattataagtgttcctcatttggtcacatgatagactttcgtaaaaaatagtttgctgaatatgtgggcttttgctttacctggttcctgggtgatttatgtttgaataagcgacatcagagactagaaatggtgagacaagccagaggaattctgttacacaatagttagtgaaaaattagaatactaactagatcctcttcttttgtctgctaaactctatctatattatctgccaaactactatgatcgagtttattatctgccaaactacaacacaacaaaattacatacactattgaaaatattttgtcagctcccatttaataaacatatatatcatcaatatgcaggatatgcacagactgccatctaccaggaaccatttgtatgtgggcagattgcaccgcatgtactgaaggctgtgcaagtgcagttagtgagtgtggaggttgccttggaggtgcaggggaagccggattgccattactcttcataacggcattagtaattctgggtctatttacagttatcggtatattctatagcgtattggttgcaaccatggttggacagcgcatttggcagcgccattaccacattctcgccaaaagaatgctaacaaaggtaagttttttatttaccttctacggtttctaattgtttatcattcaatgtttctttataccttctttatttggtgtttgtaggagtatgtggtcgaggatgtagatggcgaaatgacggggtcagaatggtctcccccggctttaccaactgagcatgtccagcagctgaagacgcttggccttctgtgaaactatatggcttttgattaaaactatgggagatctttaactgcacgcagggaaatgcatttgacaagtggtgagagagagaactcacagaacgatgaaatctaatagatcttttgtatttgtaaagaaaagactccaacttattaaagagtccgtgatctctcccattgagtcagagacctctccaattcacgaactgagcttgtgttgaatgtttgtttctaatataggtaaatatccgaaataactattttactttcggattatttt

SEQ ID NO: 139781 - DNA, 804 bp, Arabidopsis thaliana landsberg
ctcttctccgtactctcttaactttcaaaacctcacgaaatcatgcttttaaacatttcttcttctccaatttctcatcgaattcctcatttcctctctgatttcaacaatcccacttcaaatttccctccgaaatccaaaacccatctcccaaaatctaatctctccactttatcgaaccatagcctctacggcaccaagaacagagctttctataaaaacaagagaaacccttataacagaacacaagctctcggtcgattcgatttcggaagtctcgaatcagttctcgaagcttccgctgttctcactgcgatcatcgtcgtacacgagaccggtcactttttagctgcttctcttcaaggtatccgtgtgagtaaattcgcgatagggtttggtccgattctagctaaattcaattccaacaatgtcgaatactctcttagggcctttccattaggtggatttgttggattccctgataatgatcccgacagtgatatccctgtagacgacataaatcttctcaagaatcgaccgattttggatagagtgagtgttgtttcagctgtaattgtcgctaacgttatcttggcatacgctataatctttactcaagtggtatctgttggatttccagttcaagaatcttttcctggagttcttgttccggatgttaagtctttatgaaaagcatgctcgtgatgaattgcttccgggaaatgttataaaaaaaaaaggatggtgctgagctatcggactccggttctgattcggtttataaaggtgttgctttatggaagg

SEQ ID NO: 139782 - DNA, 1179 bp, Arabidopsis thaliana landsberg
  unsure (1)..(1179): unsure at all n locations
caagccatagagccatttccaagttttttcatcaccatgacccgaagaacaatggagaagccttttggctgcttccttctcctcttttgtttcaccatctccatttttttctattccgcagcggctctcaccgatgaggaagcttcttttcttacaagacgccaacttttggcattatcagaaaacggagatcttcccgacgacatcgagtacgaagtcgatttagacctcaaatttgctaataacagacttaaaagggcttacattgcccttcaagcttggaaaaaggcattctactctgatccgttcaacactgcggctaattgggttggtccagacgtgtgttcttacaaaggagttttctgtgcaccagcacttgacgacccaagcgtattggttgtggcggggattgaccttaaccatgcggatatagccggatacttgccgcctgagctaggtttattgaccgatgtcgccttgtttcacgttaattccaacaggttttgcggagttattccgaaaagtctttcgaagctaacgttaatgtatgaattcgacgtcagcaataaccgtttcgttggtccgtttccgacagttgctctttcttggccgtctttgaaattccttgacataagatacaatgattttgaagggaaactaccaccagagatctttgataaagatctcgacgccatcttcttgaacaacaatagatttgagtcgaccatccccgagacaattggtaaatcaacagcttccgttgtaaccttcgcacacaataaatttagcggttgcatcccaaaaaccattggccagatgaagaacctcaacgagattgtgtttattgggaacaacctaagtggttgcttaccgaacgaaatcggttcgttgaacaatgtgactgtgtttgatgctagcagcaatgggttcgtcggaagtttgccatcgaccttgtcgggcttagcaacgtggaacaaatggatttctcgtacaataagttcaccggatttgtcacagacaatatctgcaagttgcccaaattgtcaaacttcacattttcttacannnnnnnnnnnnnnnnnnccaaagttgtgtgcctggatcgagcaagagaacagtttgatgcacgacaattgcttcagacagccaaccagagtcggtataaatgttgcggtggta

SEQ ID NO: 139783 - DNA, 1349 bp, Arabidopsis thaliana landsberg
gttttacgcaaaacatgcgacaagggcaaagattgtcggaaagctaacagaaatttaggtgagctaggagagacgagcggtggatcgatcctcgtaagggaagcagtgaccgtcggtccatatgaaaccgataacttccccaccataactgaggccgttgctgccgcacctaatcacacattcccggagcaaggctacttcgtaatctatgcaagggcaggtctttacgaagaatatgttgtcatttcaaataaaaaaagaaacataatgcttattggggacggaatcaataaaactatcatttctggaaaccacagttttattgatggttggacaacttataattcttcgacctttggtacgtatcttttttgttcttacattttccttgcatctgaaataagtcctagatatcttcatagagactagaaaataagaataaattttgatggcgtttgtagcggtggtgggagaccgatttgttgcggttgatgtgacattccgaaacacagctggaccagagaagcaccaggctgtggccgtaagaaacaatgcggatggatcgacattttatcgatgtagttttgaaggctatcaagatactctttacgttcattctttgagacagttctatcgtgaatgtgatatatatggtaggatatatcattttatcttcaactataaactaaaacaacaagtcaaagcaagtatatatattttgaggttaaaatataatcttgtttgttataggtaccgtcgattttatattcggaaatgcagccgcaatttttcaaaactgcaacatatatgctcgaaaaccgatggccaagcaaaagaacgcaataacagcgcatggaagactcgatccaaaccagaataccggaatctctatcatcaattgtacaataaaagccgccccagatcttgcagctgagcctaaatctgccatgacattcttagggagaccgtggaagccatactcaaggacggttttcatgcaatcatacattagtgacattgttcaaccagtcggatggctcgaatggaacggtacaattggactagacacaatctactacggtgagtatagtaactttggaccaggtgctaacacgaaccagagagtgcagtggttagggtacaatttattgaacttggcagaagccatgaacttcacggtctacaacttcaccatgggagatacatggttgcctcaaaccgatattcctttctatggtggtttgcttagcaaagaatgaaattgatgaacaacatattatatgtaaacatatttaattatacgtacttcctcatttaaaaaataaatcaagaaattttcatttgttcta

SEQ ID NO: 139784 - DNA, 972 bp, Arabidopsis thaliana landsberg
ctttcttcaactctgtgatcaaactatcgaagaaaaaacaaaccctagatttatccgcccctcttcttcctctgatgataagaaagtcgaagactttgagaatctaaagctgaaaatttttgtttttttcattgagggaatcgaatcgagttatgtacaaggatcggagtggaggaggaataatgggtggtggtggatcatcgagatcggagatccttggtggagctattgatcggaaacgaatcaatgatgctttagacaaacatcttaagaaatcttcaccttctacatctagggttttcacttctaaggacaaagattctttcccttctacttcaactgctaaatctcagcttcattctcgttcccccgatggttaattgcttatatctcactcaatttcaatttcatgtggttttagtactttctgatttgggtaattataaattttgattctttgtggatgcagttgaatctgacacggatagtgaaggatcagatgtgagtggttcagaaggtgatgatacctcttggatctcatggttttgtaatttgagagggaatgagtttttctgtgaagtagatgaagattatatacaagatgatttcaatctctgtggtttgagtggtcaagttccttactatgattatgcacttgatctcattttagatgttgaatcatcaaatggtaagtgaagggtccatttgatgaatttaggttttactttgtctgagaattgttgtggagaagtttgatcaataagacttcacttcaatgatccagaaaggagaataacattgaggtaaagaggtcaaaacatgaacaatacaatggcaagttcttgtatataccaaggaatttcaaaagcctgtgctcaaggcagaagaagtgggaaaccaaacatctaattttcacagctgatgatttggtaaatctaatctcagctcttctacaaccaccatttggtcaat

SEQ ID NO: 139785 - DNA, 3337 bp, Arabidopsis thaliana landsberg
tatcgcggctcaatcgatcggtgagccgcggactcacttatctctaaatgctcttcagtcagcggcagtattcgcagtgtgtaccgctttcacatgggccagccccatatcatggaaaactcatctccaatagggctttggttcttcctgcacgtacacgtcacgggcatcctgcctttctatgttatatacacctgtctgaaagtattgagagcgcagatattatgcatagcgtggctattccaccaagtagttttcttttagttcaaaatgctcgatatgtggaatcagagcaagtgataggtaacagtcgcgagggaacatacacttttcattttaaagagagggttagaaaatatatttattctgactcagagggcgaaatgcactggagtactgatgtgtcccatgcacccgaatttacatatagtaatgtccacctcttaccaaaaacaagtcatttatggatattatccggaggttcatgtggatctagtctaattcgtttttcgatccataaagatcaagatcaaatgaatataccctttctttccgccgaaagaaaatctatttctagcctctcagtgaataatgatcaagtgagccaaaaattttttagttccgattttgccgatccaaaaaaattagggatttacgattattcagaattgaatggaaacttaggtactagtcattataatttaatatattctgctatttttcatgagaactcggatttattagcaaaaagacgaagaaatagatttctcattccattccaatcgattcaagagcaagagaaagaattcataccgcagtcaggtatctcggttgaaatacccataaatggtattttccgtagaaatagtatttttgctttttttgatgatcctagataccgaagaaagagttccggaattcttaaatatgggactctaaaggcggattcaatcatccaaaaagaggatatgattgagtatcgaggagtccaaaaaattaagacaaaatacgaaatgaaagtagatcgcttttttttcattcctgaggaagtgcatattttccccgcatcctctgccataatggtacagaactatagtatcattggagtggatacacgactcactttaaatataagaagccaagtcggcgggttgatccgagtagagaaaaaaaaaaaaaggattgaactcaaaatattttcaggggatatccattttccggacaagacagataaaatatcccgacacagtggcatcttgataccgccaggaagaggaaaaacaaactcgaaggaatccaaaaaatttaaaaattggatttatgtccaacggattacaccaaccaagaaaaagttttttgttttggtgcggcccgtagccacctatgagatagcggacagtataaatttggcaacactcttcccacaagatctctttcgggaaaaggataatattcaacttcgagttttcaactatatcctttatggaaatggcaaaccaactcgaggaatttctgacacaagtattcaattagttcgaacttgtttagtcttgaattgggacaaaaattcttctctcgaggaggtccgtgctttctttgttgaagtaagtacaaagggtttgattcaagatttcataagaattggcttagtgaaatcccatatttcatatataagaaaaaggaataattcgccagattcgggattgatctctgcagatcacatgaatccgttttattcgatttcgcccaagtctggcattcttcaacaatcacttagacaaaatcacggaactattcgcatgttcttaaatcgaaataaggagtcccaatctttgttaattttatcatcatctaattgttttagaatgggtccatttaatcatgtaaaacatcacaatgtgataaaccaatcaataaaaaaaaatactctaattacaattaaaaattcgtcgggccccttaggaacagctaccccaatttcaaatttttattcgtttttgcctttactaacttataatcagatctctttaattaaatattttcaacttgataacttaaaatatatttttcaaaaaattaactcttatttaatcgatgaaaacggaataattttaaatctcgacccatatagtaacgttgttttgaatccattcaaattgaattggtattttcttcatcaaaattatcatcataattattgtgaggaaacgtccacaataattagtcttggacaatttttttgtgaaaatgtatgtatagctgataacttgtacatgattcaccaaaatagtctagttgaaacaactataatttgaagttaaataggctaagttgaaacaactataattttgagattcaactattcttgggttacggatttttacattattattaaaatattgtgttattggtttggggggttttaaatttcctcaaatgaatatcttcttatacgaaaagattagttttctttgtaattttattaaaatgatgattatatttagatgtggtcatgtggatgtatccaccaccagtgcaccaaaaacagaaaacgacgcctaccaacttgatgggcttttaatagatatagttagttaggcccagtttagtgttaatacgataccgtttgacgtagtttaacggccaccgacacgaacgaatccaaaacggcaccgcgtcaatcgcatccaaagctctgatgtaagaaactctacacttgttcgagtttcccacgacggagaaaagaaacgatgaggaagagatgaaacgcggtggaacaagacggaagcggttgttcgggaagacgattctcttatcatctgtggttttcttcatcggttttggtttgttgttgctcacgctccgttccgtagatcctaattcgtctttcatcgacgacgacgatgacgagtccgaatccgaggaggcttcgagatggagcaactcttcttcgattggagaggctatggtcgatggagctaaactctgcgcgacggtagaagaaatgggaagcgaattcgatggtggtttcgtagatcaaagtctcagagttcgagatgttatccatcgccattttcaaatcaatggtgagatattttgtttttgaatcgattcttatataagcggaggtgtttacgatgaatcaatgtcgatgtggttattgtggtttataggagcttcagcgatccgtgagctgcctccggagcaattttgtagacatggttatgttctagggaaaacagcagaagctggatttggaaacgaaatgtataagatcttaaaataagcagcattgagcataatgttaaacagatccttgatcattggccagacgagg

SEQ ID NO: 139786 - DNA, 2022 bp, Arabidopsis thaliana landsberg; identical to SEQ ID NO: 24671
  unsure (1)..(2022): unsure at all n locations

SEQ ID NO: 139787 - DNA, 763 bp, Arabidopsis thaliana landsberg
ttcatcgatgatgtctgagataagctcaacgagaagttgtatatcgtcgatgaattcggaaaaagaacaaccgtcaaaagagagaaaaggatggtcaataacggtccatgatctctccggttcacccgtggctatggcctctatggtaacacctttcgtaccatctcctggttcgaaccgggtgactcgatcaagtcccggagcgtggcttattcttcgacctgacggttgcacatggaagccatggggaagactagaagcatggcgtgaggctggttactctgacactctaggttatcgtttcgagcttttccaagacggtatagccaccgcagtttctgcatcgtcgtcgatcagtttgaaaaatggcgggagttttgttattgatgttaccggcggtacaagcacaacggcgtctacgccgacaacgagtcctcaaggaagctgggatctcggatccggttcaagcgccggttcaagacccgcgtcgagaccaggatcaggatccgggtcggatttcggatatctactaccgcaacatccgtctgcggccgcgcaaaacagagggttcgttatgtcggctacggttgaaggagttgggaaacgaagcaaaccagaagtagaagtcggtgtgacgcacgtgacatgtacggaggatgcagcagcgcacgtggcattagctgcggcggtggatctgagtttggatgcttgcaggcttttctcacacaagctaaggaaagagctgagacagcaaagccagctt

SEQ ID NO: 139788 - DNA, 1856 bp, Arabidopsis thaliana landsberg
ccatttcctactcccttaatgtctcttcccccgataacttacttgaacatttcacacaacaaactcaccgggcggctttcagcaaatctttcttgcaactcacagctgatgtttgtagatatgtcatcaaatcttcttaccggaaagtttgcctacttgccttaaaccgagttccggcactagcagagatgttgtctatgcaagcaactgtttggctactacgaatgaagatcaacgtccggtttctttttgtagtaatgaagctcttgctgttggaatcctaccacagaggaggaacaaagtttccaaagtgggtattgctttaggtgtaaccgcaagcattctcggggtacttctcctcgccggtgccttatttgtggttcttaggagattaaatgctaagaaaacagtgacgaaatcttccccaagattgattagagagaatgcttcaatggggtacacatcgaaactactatcagatgcaagtaagaggataaaatatctctcacatattgtcacatagattacatagaacttgtcttcattgataacttgtgctgtaactgcaatactttgaagggtatatctctcaaacaatgaagctaggagggctcggtcttccagcttacaggacattctcactggaggagctcgagtatgcaacaaataactttgaatcctctgctttcatgggtgaaggttctcaaggacaggtacagcagtgaagcttcaatctttctttagctagtttccattttttgaacagttgaatcaaacaagatttttgttttcattgttcttttcagatttatagagggagattgaaagatggatcctttgtggcaattaggtgtctgaaaatgaagaaaagttgcagcacacaaaacttgatgcatcacattgagctcatcgctaaactgcggcaccgtcacttggttagtgtgctcgggcactgcttcgagtgctacttggatgattcaacagtcagcagaatgttctttgtctttgagtatgtcccaaatggagaactcaggacctggatttctggtaccacactgaaacatcatgtgttttaagaatgaagatgatcattatatattttttaataactaaatcggattgttcttgtctctgctgtgctagatgggcacatgggaagattgcttacttgggaacaacgcataagcgtagcgataggtgtagcaaaagggatccagttcttgcataccggtattgtgcctggtgtttatgataacaaccttaaaatgacagacattttgcttgacaataaccttgcggcgaaactcagtagctataatcttccattgcttgtggaaggtcttggaaaggtaaatgacgatgtcaaaagttcgaatgtttttgtttcttgaattttgaatctcttttgctttcctttctaaggtggggcaagtaggatctcggagcggacctaaaggcactccaaggtgtgtaataatcttctttactctgtttctcatcagcttgtaaacccggttatatggtttaatcctctgtttctcaaaagaatcaaaaacggtttatatggtttaatcctctgtttctcatcagcttgtaaaccggtttatatggtttaatcctctgtttcttaacagcatcaaagacgaagataaaatcgatatctatgattttggagtgatattgcttgaacttatagtgggaagaccattgagagcaaagagtcaagtcgatgttctaaaagagcaggtaacaccattcgatatatatgtagcttgatgtggaatcgctatcatctactttaaaaactcttttttatttgttgtagtaacaagcaagcatttcagcggatgatggag

SEQ ID NO: 139789 - DNA, 1901 bp, Arabidopsis thaliana landsberg
tacttatgcttccttttgctgtactaggttttgtcatcaaacccttgcatctgaaaggtgcgtgtctgaagttgcaaacacacacatcctatgtccctgatggagttcagctatttctaataaatcttgtatcttcaggttttgctccagatgatacaggaaagccccggacagataacttaaacgttttgccagttggttatgggttctcagctgttatgaaagatttgaaattgcttttggtagataaggtttatgttacaaacattcttggtaaccattttcccttgtcatgtattaaaaagcatctgtgttcttgtatgatttattgattacctgcaactgttttccttcttttctcagggtatattgcttacaactttgttttaggcgcctattcatattggggaccaaaggctggttataacatatacaagatggtaaaatattaccagagcgtttcgtttccatgtgtagaacagtagaagtatatctcttgatgcctttatcccattgcaggaaaacgctgatatgatatttggaggggtcacagttgtatgcggaatcgttggcacattatcaggaggagtgattctagattacatggatgccacaatttcaaatgcttttaaggtaagatcatcaacttggaagacaaattattcgcacatggatggaaattccacattccaaacatatatttctaccacttatgatcttggaaaactagtacttgatcgtctctttctgtattttggaggttctttcagtttcaacgtttataagaacaatattttgctttgctgttttctgtttcaagagcatgtatgcatttttagctctttttgctgttggtgaacttcttgtctttgccacacaggtaatctcgacttccaccattcatatacttcatgttttgcaaatccacctcttctgatttatttcatgatgtttagggtcctgtgaatttcatagttctccattgtgtcaaaccaagtctgagaccacttgcaatggcgatgtctactgtctctatccatatctttggagatgtaccttcctcaccactcgttggagttcttcaggtttggtttctcagctgtatccacaaaattcttgattcagagctctaatgtcttaatcaaattaagcttcagttaaacgcgattattcatctagattagtttgagccatcactgtatccaacttcagaatgttttctcttttactcacgcaggactacgtgaacaattggagagtgacttctcttgttcttacattcgttctctttccagctgctgcaatttggtccataggttaggcttttagccacaccgggatctcaaagttcaaatggttctttttttagtataatgtggtaatgatttgttgtgtttgtgactctacagggattttcctgaatagtgtggatcgatataacgaagattccgagcctgatgcagtaaccagagaatcaaccgttgcgcctcttctccaggaagcatgagacaaaaaaactcaaaaggtcactgtgagaattttatggtttattctcagttctttatctactttcttgtacaaatagaattgtggctgaaacataaacaaatgtcaaattaccttcatttgtatattcttgtttcactgtttgcaaaattatgaaaggaccatccctatttctctacagaaaaaataacttaatagtccattacgacatgaatctcggttctttgagatcataccgggaaatgtttttcaacatcatcattcacaagatagagcttaaggagcatccaaagaaatcgcaacaatcttccaatctagctctccttcatcaatcatagccaaaagcagctaaaggcttaacctttagaacgtcaccaatctcaacaacatcaact

SEQ ID NO: 139790 - DNA, 950 bp, Arabidopsis thaliana landsberg
ctcttctgctactctcagttaattcgtttggctaatatattcttgagatttgaagatcggggtttgttgtgtttcaagataccttcctacgcctaccaaccttaaactatgggagctccataagaaagtgaagaactcgatcaaaagaatcatagattcaaggctaaaatcaaaatgtaagacctatggctatggggacgatcttctaggggtcatgttgactgctgcgaaatctaacgagtatgagagaaagatgagaatggatgagatcatagaggaatgcaagaatttctactatgcagggcaaggaactacttcgattctattgacatggactacgatgttactaagcttgcaccaaggttggcaagagaaactcagagaagaggtttttaatgaatgtggtaaagataaaatcccagatacagacaccttctctaaactcaaattggtaatgttcattttcattgtgttacttgcgggtgaagaaaagggttttcttacacctattaatcttgcagatgaacatggtgttgatggagtcgcttcgtctgtacggacccgtgattaaaatttcccgagaggcaacacaagatatgaaggtaggacacttggagatcccaaagggcacaagcattatcataccgttactgaagatgcacagagacaaggccatatggggcgaagacgccgaacaattcaatcccttgagattcgaaaacggcatttctcaagccaccattcacccaaacgctctcctcccgttctcaatcggaccaagagcttgcattgccaaaaactttgccatggtcgaagccaagaccgttctcactatgatccttcaacagttccagcttagcctctcccccgagtataagcacacgccagttgatcacttcgatctcttcccgcaatacggcctacccgtaatgcttcaccctctcggatag

SEQ ID NO: 139791 - DNA, 1869 bp, Arabidopsis thaliana landsberg
gcctactcgttggactcgactccagccaaatgttcccatacttgtaaatgtatatacaagactcaatattttactttcaaattaatgaacgatttagcatgatcgggaaccaatatctaatcatcgattagatatatttaagtctagtaactaattagtatattttctacaaattgtttaattaaacatatagtatacagttggtaaaggggaaacacgcgtaatctatatgtatgtattaataatatataggtcttggtatgatcttcttagctatttatttactaagctttctagactttaacaatatttgaatgaaaaaaaaatataattaaccgtcgaaaaaaaagtcataaatctggacgcagaatactaatccacagatttcaacggtcaacattccaattcagttcacaaacctaaatcaaacgttccatttcataccttttttctctttcaagcttatacaacctttgaccatgtctcactttattaataagtacaaaaccaccttacattacatgcatatatataaataaaacacgttaaggaacatatatttatacaaatcccataaaccccatttcattcttcatcgaatagtcgaagtttttttgaactttcttaggaaaccaaaccaacaaaacgaaaaggaaaacgaaataatggtgttaccttggagatcaagaggaggagtagcaaagagacgtaatcaattgatttccggcgatatctccgtcgtcgaaaccaagattccagttcaactccgatcgccatcaaggatagagcggattcagtcaccgcgcgtgctgttgacgccgcgtgatgcggtggagataagtcggagattggaaaacgcagcggcgcgtgaggagtatgccgagtgtttggagattgtgagcaaaatcaagaacttgggaagaggaggggacacgaacaagaagtgtttggtccaaaacggaagcgttttggctttgtcttcttgttttgaaagattcgcggcggcgcgtgatggacacatgcgtttattggaggaaatcttgtttgttctatcgacttggttgcctctgaatcgatcagaaagtttcaacaagatgggatcaacggcttctcttaactgtctcgtacggttcttgaacggtaaggacgctaaaacgagacaaaacgctgcgttttgcatcagagaggttattgcagtagacaagaggtatgtgtacgcgttaacagatgtggaaggagcttgtgaaggattagttaagatcatcagagactctgtttcgaatagcgccacgaaagcatctttaatggtgatttatagagcgatttcttctaacgacaagatcactgaaaaatttggaaactgggtttggagagtgatcacagagatgatgtgaacaatgccgaaaagagcgtttgcgagagatctctagttgttttaaacgctacatgcgataacgagcaaggcaaagaagatgttcttagaaacgctttgatcgttcctcttctggtgaagaagattcttagagtttcggatctcgcgacacaatgttcggtttcgatactttggaagctatggaagaataagaaagacggagaatgtgatgatcgtttgttagttgaagctcttcaagttggtgcctttgagaaactcttagtgctcttacaagtcgagtgcgaggataagacgaaggagaaagcgagcgagctcttgcggaatttaaaccgttgtagaaacgagatcgagaagacaaattgtgtcgattcttcaatgcatttgaagaatgtgaagaaatcattttagtcaaacaaacaaaacacactattattctttgtaattactctgtttctaaataaactgattttttgaaa

SEQ ID NO: 139792 - DNA, 709 bp, Arabidopsis thaliana landsberg
ttcgttttttatccttaaaaactttatctgtatatcttcttttttctattacatatgcataaattttaagatagagaaggtattcatgttattcaatagggaaacttgaagtcactgtgacatataagctggtaggagaaaacagattgaaaatggtgatgcaagcaaaggctaaagagaaaactactccgttgaatttggttcatcgttcttattggaatcttggtggtcataacaatgaagatatcttctctgaagaaattcaaattctcggttccggttatactcatctcgacgataatctcactccaaccgggaaattcctcgccgttaaaggaacacccttcgattttcgccaactccgacctattaaagacaacatcaatgagcttaagacagggtaaaagttttaaacaaaccggacctatcttgaaccggtttgtgctacataatttttttaattattaatgttggatcaactaatatgtattatttgttttatctttcgaatgcaggtatggtataaattattgtctagatggtgttgcaaataagatgagaaaagtcgtggaggttgtggacaataaatcgaagataaaaatggagttatctacagaccaatccggtctaaggttgaaaaccactaaaccaaaaaatggatcggttcataaagcttactctggtttatgtctagaatcacatgcaatca

SEQ ID NO: 139793 - DNA, 2326 bp, Arabidopsis thaliana landsberg
  unsure (1)..(2326): unsure at all n locations
aaagacgagttgctaaaccttgctaggttctagttgggccgtgttaaagggcctactactgaaaagccctttttatgaagaaaaattacaaaagtgccattggggcttcatctccctcacaactcagaagaagaagaatttctccggctaaaaccctttcttctatcatctatgcgaaagcttcatcttcttcaaagaaaatggtttcagtgttattccaatcttcatgttcctgttcactttctagctttcgctctgtaaaattcggagcccgtttagtctctcctctgtatttcgtcggcaatcatgttcatgtcacttccggtagtcttccaatcggaaaaggtaaagactttcaaaacttttaagctttgtgacttgcttgctactatatggtctatgttaaagccttcgaaagtttgtgactttacttgcttctacatggtctatgttaaatccttcgaaagtttgtgactttacttgcttctacatggtctatgttaaatccttcgaaagtttgtgactttacttgcttctacatggtctatggtgttgttgattttagaggattaagactaagtcttgctttagttgcttacaaatggaactatttatctcaaagtttctgtctttcgtcaaatgctattgaaaatctcttaacttgcttaagagtccaaactatatcttattgcagtatcaggtagttatagtttccattagatttactggtttgatattgttataactactgtgaaatgtctcaggaagtttattgaacctcaagagtgaaagacctcagagatttgttatctcagctgttgtggatgataaaagtgttgtagctaaagaggagaagaaagatggttctgaagaggttgttgtagataaccagagaatgatcaaagtttgtgataagcttattgaggtttttatggttgataagcctacaccatctgattggagaagattgttagcttttagcaaagaatgggatagtatacggccacatttctataaacggtgtcaggaacgagctgattctgaggataaccctgagatgaagcataaggttcatcgacttgcaaggaagctcaaggaggtgagtttattcatgttgcttgctctctctctttatgtatttgtcatttgattttgacattggtttgaaatcaggttgatgaagatattcaaaggcataatgagcttctcaatgttatcaagaggacaccaccagctgaaattggtgaacttgttgctaggcgtcgtaaagatttcacaaacgagttttttgagcatttgcatactgttgctgaatcctactatgacaatccggatgagcaaaatggtaaaactttatatgccctgtcagtgaaataagttaagggattgaacaatactgatattgttcaatgataacttttcttattggtaagctcttgcgtcacttgggaagttgtctatagctgctgtacaagcttatgacacttcaacagaaagcattgatgcgctaaatgctgcggnnnnnnnnnnnnnnnnnnnnnnnnnnnnnnnnnnnnnnnatgctgcctgtagaaagattgatagtttggctgagaagaatcaacttgattctgcgttggttcttatgatcactaaagcttggtcggctgctaaggaatccaacatgatgaaagaagaggtactaaactcataaaaccgttatcttaggaatcgttaacattatcgttgtataacattgaattcatacaacttaggaatctacttagtccttagaacccactacatagcttctttgatccattctggtgttggttcttgacaggtaaaagacatattgtatcacttgtacgtaacagcaagagggaatctgcagaggctgatgccgaaagaggtgagaatacttaagtatctactatcaatagaggatccccaagaacagataagcgctctacaagatgcttttacccctggggacgagctcgaagggactgatgtagactacttatacacgtaagaatgagaaaactagacctggtcatcttatatatacacatttatgtagatatggaaccttaaggtgtgtgtacaaatggaaactctgtaggacgcctgagcatttgcagagcttgatgaaaacggtgttggaagcgtatcatttcagcagagaagggagtctagtgaaggaagcaaaagaccttatgcatcctgagctcatcgccaaaatcgaacaactcaagaagcttgttgaaaagaagtatatgtgataaaaaactttacagatcctaagctctcgtaatttgttactatgtatgttttgtatatggnn

SEQ ID NO: 139794 - DNA, 509 bp, Arabidopsis thaliana landsberg
tcaaagatagataaattttaaaggcatatttttttcatttcgactcagatgggttttgatgatacatgcaacacaggtcttgttcttggattaggtccctcaccaattccaaataattacaatagtaccatcagacaatcctccgtttacaagctcgagccgtcgttgactctatgcctctcgggcgatccctcggttaccggggagtgaccggagctgaccagctatgccgtcagacgtcatctcacagcggagtctcttctttctcaagcgggagggtggtgaaaagagagagagacggtggcgaagagtcgccggaggaggaagagatgacggagagagttataagtgattaccatgaagatgaagaaggtattagtgctagaaaaaaacttaggcttacgaaacaacaatctgctcttcttgaggaaagcttcaaggatcatagcacccttaatcccgtaactacatatccttaatcctaattcttttttattatacgttactag

SEQ ID NO: 139795 - DNA, 1401 bp, Arabidopsis thaliana landsberg
  unsure (1)..(1401): unsure at all n locations
tttgattaagaagatcatatgtcatggtgctcatgactttactagagctactcttaggacttcgtttctcgcttcntgtgtctctgcttgccagagccggacaatgagtctttctgatacagtaactgttatggctcaaaggtaatcatgcaatcttttaatttctctttaagtataattctaaagcagatttggggtgcttagactggttggctgtttctatttttccctgtttctttttattttgcttcactcacgggaaccttaggtatatttgtagctgcacaaatttttccttactggttatagtgtttggttatatctgtatgtaattggttgtcaggataatcaaatgacactgctagttttgtgggcgctgatgttactaaatgtcatagacaaaacaattccgcttaagaaaactttaaatcagtttgtttaacatgtgagttcatatttggtttgtacatgatgtataggttgcatgagcgtctccaagagtgcaacggggatgagattctaaaagcagaggctggtgccaaagttcagaagttcactgaatgggctctcaaatgtataggtttccactcccgatgccagggggcaaaggatagagttagccaaaattcggctgctgaaattgaactacaactttctgctttcaagatgttcttagatctagcaggaaaccatctctcaggaagagacttcactgaggcctttgatgcagcttgtttcccgctcactctgttctccaactcgtttgatcctggctgggcatctgggatgtcagctactgttatacagggactgctcggtatgcttgttgaaggtggcgcagataatgtgaaccaatgtttccttgaagcttcacgttttggtagtacagaacttgtccgcgtcttattgcaggtaagcttccattcttttgattgcttctagacttatagaaggtctcttttcgtgctcaaatattgtatttcctggagcagattgcccaaaggaacagcttagatgttgatgtggacttagctcttggttttgcctcgcattattgtaaaatcggaacaatgaagtgcctagtggaagaaggtaatgccattgccttcttgggtcccttaatgagagcagcagagagaggttgcatgcaagttgttcaatggtttgtgaaaagaggttgccgtgacatggagctttgcttggctctaacagcggccacttcaagttgccaagtcgaggtagctgcttatctcctccctcgtgttccaccacctgtcttaaccgctctcagcatcgaaatccgtcaaagcagcaggagaaagaagcggagggtctctccaaggagtagagtttcttctcaaatcagacttcttaggagatccacggctaatactcagtcgc

SEQ ID NO: 139796 - DNA, 838 bp, Arabidopsis thaliana landsberg
gtcatggagttgcagattccttgtttcctgtttgtttagggtttagcttgattgtcatgtatgatgcaattggtgttagacgccatgccggtatgcaagctgaggtaaaaagttaaaccaaatctgcttcaagttttgagttttggagatttttacagagtttgactttggtcttattaaatgctttgtctattctacaagttgactagattttcatgttgatgagtgtgtatagtttaatgtattactatttccatgttgatgagtgtgtatagtttaatgtattactagaatctggtgatggattcgactttcactacattgttgaatgtttgtgaatgcttttatgtgtaaaagttggcgtgcttgagttttcaatgtgtgcacaattgaagtacatcactagatttggaattatggagagttagatgttgatttctgttcttggttcttgaatcttttatatgatggttttgcattgttgagagcgtaatacaagtttctcgaaattatggacattgggcacatgttgatgatagctgttattggttgtagaatgaccttgataaaattgcagagaattaagagttttgaaagagggtctgtacagagtctaagtctagtttgttgttctttgtaagataagattaacaatgttttgtatttgtgatgtcaggttctgaacttgatcattagggacttgttcgaaggacatcccatcagtcaaagaaagcttaaggaactgcttggtcacactccttcgcaggttcttgctggagcattggttggtattgtgattgcttgcttttgttgccaaggctatctcgtctcagcctaa

SEQ ID NO: 139797 - DNA, 403 bp, Arabidopsis thaliana landsberg
aggaaatatacatcgcataatgacgataatgatcaagtttctcctgttagctctgctcgtgatctctccgatttgcgccgagaaggacctgatgaaagaggaatgccataatgcacaagttccgaccatttgcatgcaatgtcttgaatccgacccaacctccgttcatgcagaccgtgttggcatcgccgagatcatcatacactgtctcgactctcgtctcgatatcatcaccaagcaagttttcccttctaataaccatacatatatattaacttagatatatgacaatattctctaactaatatatcaatctttttattgttctagtaacattacaaatatattgtcactgggaggaggaacgaaagaagtgagaaaaatcttggaggattgcagaaat

SEQ ID NO: 139798 - DNA, 755 bp, Arabidopsis thaliana landsberg
attttttttccctctttattttccgagaaaaaataaataaaattatcctctagttttcgatctcgatcatctggatccaagaaattactacgattgctataatgtcgatgtctcggctcggattgttgttgttcgtcgctatattgctcgtcttgcttcagtcttccacttgtctgattagttctccaagttctatcatcaatccttctaaagtcaaacaggtttcgtcgaagcccaggtttgattttactctttctcttgtctatttagtgagaaatgaagcaaatttggaaactttgaacctccaactgtgtgtattgactgtttcttcagggcatttgtgtatgaaggttttttgacggacttggaatgtgatcatctaatctctcttgtgagtgcgaattttgctctttgggtttgagctcaaatttggaaactttttggcttaaatgtgctagtttcagtatctaattttggttttttttttttggggaaaggcgaaagagaatctgcagagatctgcggttgctgataacgataatggcgagagtcaagtcagtgatgttcgtaccagctccggcacttttatctccaaaggaaaggtgcaattttaattcggcacatcagatctcattgaatggcttgattggaattgatcttgattctaatttatgacactcgacctcaagaactctgaatctctgatgtgatttctgatactaatggatctgataagtcaaacccctcaagatctg

SEQ ID NO: 139799 - DNA, 1418 bp, Arabidopsis thaliana landsberg; identical to SEQ ID NO: 38657

SEQ ID NO: 139800 - DNA, 893 bp, Arabidopsis thaliana landsberg
ttttgtctgctcgtttttcttttcataatgggagccttggaagcagaaagagccgccaacaatgctacggcgttagagacacagtcgtcaccggaagatctcagtcaaccatctcctctgcgtaagatcatctccgtcgcttcaatcgccgccggtgtacagttcgggtgggccttacagctttctcttctgactccttacatacaactcctcgggatccctcacaaatggtcgtcttacatgtggctttgtggtcctatctccggcatgattgttcaaccgatcgtcggttaccacagtgaccgatgcgagtccagattcggtcgccgtcgtcctttcattgccgccggagtcgcactcgtagccgtctcggttttccttatcggattcgcggcggatatgggacatagttttggagataaactcgagaacaaggtaaggactcgagccattataatcttcctaaccgggttttggttcctcgacgtggctaacaacaccttacaaggaccatgccgtgctttcttagccgatttagccgccggagacgctaaaaaaacgcgagtcgcaaacgcgtgtttctccttctttatggcggttggaaacgttttgggttacgctgctggatcttacactaaccttcacaaaatgtttcctttcacaatgacaaaagcttgcgacatctattgtgcgaatctcaagacttgtttcttcttatccatcactctcctccttatcgtcacattctcgtctctatggtacgttaaagacaaacaatggtctccacctcaaggagacaaggaggagaaaacatcaagtctttttttctttggagaaatctttggagctgttagacacatgaaacgtaccatggtgatgcttctaccgagtca

SEQ ID NO: 139801 - DNA, 1127 bp, Arabidopsis thaliana landsberg
  unsure (1)..(1127): unsure at all n locations
tctctctgtataatcatcttccaattcaagtgaaagaaactcgtacgtggtcgtagtggagatgagttcggctctacctttgaagcttttgttgcctcttacaacaacttcattgctaccttctcctttccgatcggataaccataacttctatcgccgtcgttcctcttcctctacttcgtgttcttctcaatcccaatcgtttcagcttttctctgttagacgacgccgatccagatcctcctctccctctattcccatggtaatttctgatcactcgccttcttattctattactgctttttgattcgagattgattctttgaagactttgttagccattggtataggttgattatgtggccaattgattaccttctcttaagaactcaaatagttattcattgcattgaataagacgatgcactcttttgatcgtcaatgaatgaaaagtttagttttctcagaacatcagctttgatttgtcgaagatgtggtgtgccctctttgtttcgagcttaaatgctcacaacatcccaataatctatgtgttatgaattgcatttgggttttcactaatgatttactcccaggggctctgtttctatgtgatgctgtatagtgctttcctgaacaaacgaaagatcaagacgacgtggatagttgggtgaacaaagaggacaatgtgacttgtaggtttgactcagatgaagacaccaccaccaccggactccggattccaacacaagctcaagctatcgttgaaggacctggttcacttgctgtgtcggagctacaacgagtccctgatgtagattatatacaagtaagttcaactaattttcattgccagtacaatggaagatcaaatgttttattagtcttttaggttgtgaacatatgnnnnnnnnnnnnnnnnnnnnnnnnnnnnnnnnnnaggaccaagaacaattggcttctttggaactagaaatatgggtttcatgcatcaagagctcattcagattcttagctatgctatggttataactgtaaggcattttgcctacaaggctacaatttctgaatcatatgtttggttcgccacatcgtatagccatctcccctgtgatttatcttgcagaaaa

SEQ ID NO: 139802 - DNA, 1951 bp, Arabidopsis thaliana landsberg
aataaattttataacggcctaggtcaaaattatcaagacactgtataaacattaaaattcttgccaaatccctataaactatgacgacgtaatacccaattagagatagccacgtggatgtatgaccaatttaggagcattcagttttcgtgttttgcagtgataaatatctctgagagctaaccccggagagcttacagaattcaagctaaacattgttagagagaaagagagagcgataatggcgatgaggggcttcacgttgttttcgatccttgtgttgtctttgtgcgcttcgtctatcagaagcgaagagacggagacgaaggagttcgtgttgaccttggatcacactaacttcaccgataccatcaacaaacacgatttcatcgtcgtcgagttctacgccccatggtattcaaattttgtgacttttcaatctttttactatttctgttgacatggtttttttttggtaaaaaattcacatgggttttgtgtcgtgttcgtgaatctgggggatctgaatctatcatctgtgtttttggatttgcatgccaatgatttcttattctctcgcttgtgtgatttgaattggcgtagctgatctgttttactaatcagaacttttgttgcagttttgtaatttgtaacgatttgatctattccgatctatgttactatgtaactgagttgtctgatttgaatagtggtctcattttaattttactctgtaattgatttgtgaaagtatttgatctaaatcttcatcatttggtaatccgtattattgcccatcttcaggtgtggacactgcaagcagcttgctcctgaggtactatgactttttcaatcacttaaaataggatttgcaagtggagttttttttttactggtctaattcatgtagcgatggctaatgggtggttttatttttgtttacagtatgagaaggctgcgtcagctttgagcagtaacgtcccaccagtggttcttgctaagattgatgccagtgaggaaacaaacagagaatttgcaactcaatacgaggttcagggtttcccaacaatcaagattttcagaaacggaggaaaggctgttcaagaatacaacggacctcgtgaagctgagggtattgttacttacttgaagaaacaaagtggacctgcttctgctgaaattaagtcagctgatgatgcttctgaggttgttagtgacaagaaggttgttgtggtaagtacaaaacatgttcttcagcttttctctctgttttatgattttaatcatgtatggtagttaaataatgtctatttctattgttttaggttgggattttccctaaactatctggctccgagtttgattctttcatggccattgctgagaaattgcgctctgagttagatttcgcacatacctcggatgccaagcttcttccccgtggagagtcatctgtaacaggacctgtggtcaggctattcaaaccctttgatgaacaatttgttgattccaaggtttgtatattacattggttctgttatatagtatattgttgcggaatgtttgtttgatttgcttctttgcattcaggatttcgatggtgaagctctggagaaatttgtcaaagaatccagcattccccttatcaccgtctttgacaaagatccaaacaaccacccatatgttatcaagttctttgaaagcactaataccaaggtaactcatcctagagttatctaatatctcaattccattatgctgtaaccagttcatgatatactacatagatggattcatattatgccatttaattttaatggagaattatgtttaaatttatgaggattgtggaatgagtttatttgtaaaagtacctattccgtattgaattatgttatggatataaaaggaagtgtgagtgtgtgtcatattagttagttggactctagtg

SEQ ID NO: 139803 - DNA, 1062 bp, Arabidopsis thaliana landsberg
aagaataacagataaaactctctgtgtgagtgagtgagactcaaccatggcgtctttggctcagcaattctcgggattgagatgttccccactctcttcttcttctaggttatcgaggagagcttcgaagaactttccccagaacaaatctgcctctgtttctccgactattgtcgccgcggttgcaatgtctagcggtcaaacaaaggagcgtcttgagctgaagaagatgttcgaagatgcttatgaacgatgtagaacttctcctatggaaggtgttgctttcaccgtcgacgatttcgctgctgctattgaacaatacgacttcaattccgaaatcggcactagggtttgtctattctcttttacctacttcagattctttgtggaatttgaaatatagttctaaagatatgagttttattacatgacaatggtggttctgtagaaattgtgtatcatttgtggttaatgatgttgttttaggtaaaaggaacagtgttcaagactgatgcaaatggtgcattagttgacatttctgcaaagtcatcggcttacttgtcggtagaacaagcgtgtattcatagaattaagcatgtggaagaagctggtattgtacctggtatggtggaagagtttgtcatcattggtgaaaatgaaagtgatgacagtttgctattgagcttaaggaatattcaatacgaacttgcttgggaacgttgcaggcagcttcaggctgaggatgttattgtcaaggctaaggtatgtttgaaacttgtttgctactattgtggtttctgtggttatagtttcaggaatttgattgttatgtgtaggttattggtgctaacaaaggtggattggttgctcttgtggaaggtcttcgtggatttgtgcccttttcgcagatatcatcggttagtagttgcctcagaactgtgaatatttcaaggttttgttagttgattttacgacgacacacaacctgatatatatgaaatgtgttttcatctacatttttgtcagaaagcagcagctcaacagcttcttaagaagtaatcc

SEQ ID NO: 139804 - DNA, 1425 bp, Arabidopsis thaliana landsberg; identical to SEQ ID NO: 9966

SEQ ID NO: 139805 - DNA, 3253 bp, Arabidopsis thaliana landsberg
ggccgagttctctcatttcagtaattagtcgtctctaaaattggttttcgttccccgaggaggtttcttccctagtagaccataagatcgctgagaatatgtcgtggctgcgaacggccgtgaataaggctgtggaggtcggaaaccgcaaaaacatcacacgaaccgtcaaaaactatgccgactccgtcgtccagcacgctggccaagccgtcgctgaaggagccaaattgttccaagaccgcattgtaatttctcctttccttttaattattcccatttctaattagtatttgggtcttatttttctagattccagttttgattttggtattaagggcttttattacaatacagttgtaattatgacacaacagttgcattactttaggactagagtgaataatccggactgtaactttgcagggtgttggggcttataagagtgttcatcagacaattcagagattggaagaagctgcagtctcatatagaggtcaagaaagggcattgctgattactagatggctaagtgtgcttaaggagattgatagagctactgacagttctctaaaggataaacaattgagttcagaggaacaacttgcttctgatgaagcaaagaaacgtgaatgggtattatttttattcttttttttttttggataagaggaaaagaagaagttaacaattctcccacatcgtaaaatatcaagactagtaattaagtagagatgattgtgatccttagtgttgctgcgttagaatcttatatgttccttaactggttttgtcaaagagaaagaggaagatgtcatcatatcatcctcctgcattttagaatataaaaaaaaaagtattacttaaagtagataagattgctaatctgtagtagtatagggtaactttttctgctaaagggtttttcattaacagtgacttttgcattactattctgcgtcgaatttcatatgttgtatttatgacctttttccaacagaattctttctgaagatccctttgcatgtgtaggttttgtattacgatccagatataggcggtgagccacttaacttccgtgatgtttttctgcaaagtcaagctctggaggggatcgttctgtccatggtattcttttgcaacctaaatttgatcttttggtggctatctgataagtgataacagatacgtagtaccattttacctttatatttgggtgatgtgaaaacatatgtgccgtctatgggggttaaaggtttgactgttttattacagattattgaaccaccacatgacgaagaaatcacgctactcctggagatgtttgggtgagtctgctggcattccatattgcattgccaaaatttggattccaaaaggagtcttaaactgtttcttggaaagtcaacacaattcattgctattttcattcgtactgcaattattcatagaacttaacattgttttcagcctttgtttgaatggaggaaaggaagttcatgatgccatagttagcagtatgcaggatcttgctacagtcttttcaagttacaaggatgaagttttggtaagcgcttgatcagtaaaaaagtcagcatatgttaatttatgggcgtttggatctcctcctaacttttctattcttctgtgttgctttggctgcttttggacaggttaagcaggacgaattgcttcagtttgcccaaaatgccatcacagggttgaagattaatgctgaaatgctgaggtgataaatgaagataatgatgtgctttttgctcttgtttctctttattaatgaataatgagtcatagggcactactcatcttgcctcactgttgattgaattcatgttttcagaattgatgctgaagcttctgatttgagaaagaaactcgaaaagatgaatgcctctcaaattccacaggagagtgaagacaaggaacataaagagactcctttaacaatagaggtgaggataatagtatctccaagcctcttttttctccctaagctcatttcggtagctctgtgtgatagacttctcgttttgcaggctttcaaagaaacacttgcaaagattcgtctttgctccagattagaaggtcttctaattagaaagagacaactaagcaatggtgactcaccagatatacatgctcagaaagtaagtctgtgagctttattagtctcaatttatacaagttaattcgtattgttaattatcatcttactctactttttgtgctgatatggtatattaagagtttcatgtattccatgacagcatatacatttattgacttctggagtagaatgttacttatggaagataatagatattttgtctttgaaccaggtcgacaagctcagggtgttattagaatctttagcaaattcaacttccaaagccgagaaacgaatatcagagaacaggttaaacttattatcgactccagttagtttccttttatctgcaaaagactttttttatggttaaattttgatatgacatggtaaatttaccagaccggaagaataggtaataagtttcttattctttgtgttactatatgcatgttcagcaaatactactgattcaatgtgcaattctttccttgctatagtattttctgattaaagttagcttatgagtagcaaatttgaattatgggactgcaagacaatgccgatttataataaagcttgtcttgttatcacttatcccttagtgctattgagcggatgattagtcattggaaggaaaaataccatcaatggataccaattgtcatttgtcttttcgcagacttcagaaagaggaagcactaaaagctcgtgtggtgaaagcaaatgaaaccggtgaaaaggaaaaggtctttatctcccacttttatttgttcttttgagttttgattattgactgcgaaaaaaggaagattaaaaaaaacaaaacttaagcgtggcagcgttcgttggcatgtttatccagctgacagtattaaggttatgatttattatgtacaggagttgggtgccgaaattgcacagcttgagaaacaaagagatgagctggaagccgaactgaagagggtaatctatttttctatttatcgggtttcttgctttatcctggaggtttacatacacactttaaacagacgaaaattttgtcacttgacgtaattatataaacgtaagctcatcatgctgttgaactgaaatataatgatattattgattctatgtatg

SEQ ID NO: 139806 - DNA, 1306 bp, Arabidopsis thaliana landsberg
tcatgattcttgttaaaatttgtctctgcagacctttcttgagatgaagctcgagaaaaatgagggtgggataaaccactatatcttcactgattctgatatagctgtggttgacgacgtcgggactatatttgacaagcattcaagcttccatctagcactcacattcaggaacaataaagatcagccgttgaattcaggatttatagcagtgagaggcacacgtgaagggatcctaaggtttgcatttatccttcgtaaacttgaagcaaatctattatagttaaaagacatacttgtctcagcatattgatgactttgtcttacatgtgatcccaatgcagggccaaagtttttcttgaagaagtcctaaaagcttacaaaaccaaatacatgaaagcttcgcgcatgcttggtgatcagttggctctggtatcggttgttaaatctcatccttcctttgacgcaaagagattcacaaagccacaagctttcacagaagaaatagctggagcttcagtgttatttctaccatgtgctctatacaactggacacctcctgaaggtgctggtcagtttcatggcatgccattagatgtcaaggtactctaaatccctaaaaccataaaccctcaaagcatcatcagagtctcattactcgtttttttgcagattgttcacttcaaaggatcaagaaaacgtttaatgctcgaggcatggaacttctacaaatctacttcaaacattccagatatgttgtgtcttgttctaggtagtggaagaactaaatacgatttctgattgttgacgatgacaactctgtttttttctttcgttaatctcttttatttgatcaaatcaactagaacagacaacagtaagaagtaaaataaatgaattaaataaaattaccgaaatgggttatgtgttcaaatctgttacaacaaattcccaaaaattactcaaatcaattaaaaaaacaagaaatcaaaagatcatcatcaaccagaaaaaaagatcatctagcggcggcttttttgtcgccggagtaataactcaaataccatctgacaaacttcttcaaaccggtttgcaaatccgtagtcggtttataaccaagctcacgttgagctaaactaatattagcatgagtaaacggaacgtcaccgtttcgtggcatcttaatcaaattcttcttcgccttcactttcaattgtctctccaatatcctcaccagatctgaaaccggcaccggcgacgtgtttccgaggttaaacactctcaattgcgccggacctctcttctt

SEQ ID NO: 139807 - DNA, 1363 bp, Arabidopsis thaliana landsberg
gccttatatatatatttatccctttcgtttaactttgcaatataattattactgatcactatattttggtttgaaatggcgcaggttgtaatgaagaacgtgactagattatgctcaagcaagccaaccgtgaccgtcaacggtagatatccaggtcccacaatctacgcacgagaagatgacacgttgctcatcaaagtcgttaatcacgtcaagtacaacgtctccatccactggtaagcttctacttaatcttcatttgaatcatcatttataaattcacaagttaattgattggtaactttggacgatcaggcacggtgtgagacaagtgagaacgggatgggctgatgggcctgcttacataactcagtgcccgatccagcctggtcaagtctacacatacaactacactttgaccggccaacgcggaacgctctggtggcacgctcatatcctctggctccgagccactgtttacggtgcattggtcatccttcccaaacgcggtgttccctatcctttccccaaacccgacaatgagaaagtcatcgttctaggtatctcaatcagtatatattttcaaccacaattataaagtttggattcattaaaattttaattctcttgtccaatagaattgaaatttggatcgaccagtcaaaattataagttagaaatttcatatcagaatggatgtaatattcattcagtcattcattgcaatgtgatttatagttgaaagctcgtaaaactaaacaccactactatctttagttgctacaggttttttacatttcatgcaaatttagcatgactagatacataacggtcataataattgtaggtgaatggtggaaatcggatactgaaaatattattaatgaggcgcttaagtctggattagcccctaatgtctctgactctcacatgatcaacggacacccaggcccagttagaaactgtccatctcaaggtaatctcttaatttccaattttaatttataagatttttaaaagattataagctaatcatgaaagcctctttctatatccgaaggttacaaactgtcagtagagaatggcaaaacctatctgctacgactagtcaacgctgcacttaatgaagaactctttttcaaagtcgccggccatattttcacggtggtagaagtagacgcagtctatgttaaaccgttcaagaccgacaccgtccttatagcccccggtcaaaccaccaacgtcctcctaaccgcctcaaaatccgccgggaaataccttgtaaccgcttctcctttcatggacgccccaatcgcggtggacaacgtaaccgccaccgcaactgttcattactcgggaacac

SEQ ID NO: 139808 - DNA, 1308 bp, Arabidopsis thaliana landsberg
agagatacaaaaccaaaactttcaagcaaagcaattcaatttcaatcaaaaaccaaatcgaagatctttgaaagtttcctttttttccgaaatctgagcttgggtattgttggataagcttctcggagattgagattgaggattttgataggtgaggagattgaaagatttggatttttgggcggcaaaaatggtgatgcagacggaagctagggttggtgtgagctcaggacatggcgtagcttcgtcttctcatcgtttaacgcaggaccagagatcacatatcgaatcggcgtcgcagctcttagccggaggactcgctggtgcttttagcaagacttgtactgctcctctatctcgtctcaccattctcttccaggttcgtcatttcatcgagcgagaagaagaaaaattcaaccttttgtttcattacaacccaatttgttggtttattgaactaagaccaattcaaaatttcaagttcaatgtgtaatgggataatcaaacaatttggggatctgtggaaatgagaaagctgaattgagctctgcgtatagatagaaaatctattagtgtttgactataccaaatcttcttagctgcacttgtttctaactctgaatgcttaaaaagggaaattttgtgttaaagctgagttttttttggacagcttcttgattgtatacactatgttgtatttaggtgcaaggtatgcacacaaatgctgcagctttaagaaagccaagcatattacacgaggcttcacggatattgaatgaagaaggattgaaagctttttggaaagggaatctagttactattgctcatcggcttccatattcttctgttaatttctacgcatatgaacactacaagaaggtctgagaatctaaactaaattcttagtgtgacattactctccactgagcctatttctgattttggacttttttactcgattatttacagttcatgtatatggttgatgggatggaaaatcacaagaagagtataagttcaaaccttgttgtacattttgtagccggtggtttggtctgaaatcacaacggcatctgccacttatcctcttgatcttgttagatctcgtcatgctgatcaggttggagtttttgaacataagtatttgtctatttgatatgaactttgttacgcagccttgttttctaattttacttgttgaaatttcataactgaagcattgttgcattagctgtctgttaacattattgtttgaatcaatggtagacaaaagtaatctactactcgggtatctggcatactctgcgc

SEQ ID NO: 139809 - DNA, 1305 bp, Arabidopsis thaliana landsberg
aaatctcacttaattcacaaaaaggaaccaaaaagccctaatctttatgttgtcgacactctttcagttctctcgacgccgtccatcgccctccgtcatatcgccgccgctaaagtactggcagaggtaaattcgtctcttgttccctgttctgtgggatcagaaagtattaaacttgttctgtttctgtctttcattgctctcatccttgattatctctacctagagttcacaacaatggagtacgtaaaccctgaaggtcttcgattagatggtcgccgattcaacgaggtatgtttgcatctctattcactgtctttgtaagccactgccttcacaagttaatcggtctattcgtgattgcttgtaatgaatctcagatgaggcaaatcgtagctgaagttggagttgtttctaaggctgacgggtaaaactcaaaatctgtctcttatctttttccgtatctcagttctatattcggcacttttatatgaacaaaaaattccaactttgtttccagttctgctgtcttcgagatgggtaataccaaagtaattgcagctgtttatggtccaagagaggtacttgattactctgttactcacctatcaagattgatactttaattgtataattcagcgaattggttatttctgttaatgtgctccttcagattcaaaacaagagccagcaaaagaagaacgaccatgcagtggtatgtatatgctttgatcttgtttagtattgttcttggtgaatatggaatgcttattgctaattgtatgttttggtaggtgttgtgtgagtatagtatggctcagtttagtactggtgaccgtagaagacagaaattcgacaggttacattttactatatagctgagagactctttgctttttcttacgaaaatcataaagtttgaattgttgtgtattatgatggtcaggcgatcaacagagctatctcttgtcatccgtcagacaatggaagcttgcatattaaccgaattgatgcctcactctcaggtttactttttactctccggcgatattgaaatctaaattttctttcttcctcctccttttgcttgcttcctgatgaattgtttcctttatgcagatcgatattttccttcaggttctacaaggctgatggaggtaaaattaaactaaacctctgttctgaagttgaccttttgatctctttcaatctctgatcagccattagtgttatgttctgtaatcaggaacaagatcagcttgtatcaatgccgcgactctagctctagcagatgctggaattcca

SEQ ID NO: 139810 - DNA, 975 bp, Arabidopsis thaliana landsberg
ggataactcgttaatgaattattacacgacagaataacagcgaaccaaggattttacttgttgggactggacaacacttcaccaacatttgcttcctccatgcaaaactctgttcccgccattacctttctcatggctgctcttctcaggcacctactctacacatctctccattttcattctcttttgatttataaaaataaataacaatattttggacagcttggatatacaagaaccactttaataatgtccatttgacttttcaacgtaaaagaaacggataataatacacgtagacaatatttaatgccgtttccatttgcttacaaaatagtgataatcatagtagtaacaacaatgtaacatactgtttatgtactgtatgtgaaaaaaacaataattcaggattgagaaagtaagaataacagaagagacgtatctccaaaatcttaggaacagctctttgtgtcgccggagcttccgtcatcaccctctataaaggtccaaccatctacactccggctagccacctccacgctcatctactcaccacaaactccgccgtcttagcgccgctaggaaacgccgcgcctaaaaactggacccttggttgcatctacctaatcggtcactgtctctcgtggtcaggctggcttgttttccaagctccggttcttaagtcttatccagcgaggctctcggttacgtcttacacttgtttcttcggaatcattcagttcttgatcattgctgctttctgtgaaagagattctcaggcttgggtttttcactccggttgggagcttttcaccatcctctacgccgttagtttttctttcatctgttataattaattcgtttttggccctaatgtttcaaaataatcaatttggtcctaatgaattgatttaacttcagggaatcgtagcgtctggaatcgcgtttgcggttcagatttggatgtatgacaga

SEQ ID NO: 139811 - DNA, 463 bp, Arabidopsis thaliana landsberg
taaacctatctccggtggtaacaattccgccgccgtagccgcagaaattcccgccggagatggtcccgttctcgtccagctattctcgtctcagggatgtaaaacatcgcccgcggcggagatgttgatgtcccggctaggtcgaggtgatttcgacgctcagatccgtggcgaagatggtggatctggatctccgacgatggttttggtgtttcatgtggattattgggattacaaggggtggaaagatccgtatggatcgagccaatggacggtgaggcagaaggcgtatatagaggcgttgaatctggatacgatgtttactccgcagcttgtgatccaaggtcgttctcaattgatcggaaacgaagaggagacgctgctcaaatctatctccgaagcgcctaggtttccttctccagccttccgggtgagttttcgtaacattgtaaactattcgatt

SEQ ID NO: 139812 - DNA, 1026 bp, Arabidopsis thaliana landsberg
atgcttcattacgcttatggctctgtaagaaatctgttgaagcgtatgttacacgctccggtggacacgtcatcgaggtacagttaccttttccggttatttcggcggatgagattattgaccggtttaggattggtttagagtctggtaaagcgaatggtaggagagttaggttagctttgattgatcatgtgacttctatgccaagtgttgtgattcctattaaagagcttgtgaagatttgtagaagagaaggtgttgaccaagtttttgttgatgctgctcatgggataggttgtgttgatgttgatatgaaggagattggtgctgatttctatactagtaatcttcataagtggtttttcgcaccgccttctgttgctttcttgtattgtaggaaatcgagtaatggtggtgttgcggatttgcatcatcccgttgtttcgaatgagtatgggaacggtttggcggttgagagttcgtgggttggaactagagattatagtgctcagttggtggttccttcgatattggagtttgtaaatcggtttgaaggcgggattgatggtattaagaagaggaatcatgagtctgttgttgagatgggtcaaatgttggttaagtcttgggggactcagctcggttgtccccctgagatgtgtgcgagtatgatcatggttgggttgccagtgtgtttaggagtgtcgagtgagtcggatgttttgaagcttagaacgtttttaagagaaaagttcagaattgaaatcccaatctactttaggccacccggggatggagagattgatccgatcacgggatatgtgcgtatttcttttcaagtttacaacaaacctgaggattatcataggctcagggacgcaataaacgggcttgttagagatgggttcaaatgcacgtctctatcttgttgaataaggtacattgtagttcccaagtttcgctttccggctatgtttcagtcaccaaaaacctatgttgattgttgagtagtgagtcagtgcttgc

SEQ ID NO: 139813 - DNA, 1673 bp, Arabidopsis thaliana landsberg
taaaggaagtctttactcagagaaccaaaagaaaaataaagagaaaagaacccaaaaaaaaaagccattgtaaattcagaataaatggaagaacatctaaatccattagcagtgactcatcttcttcaacacacactaagaagcttatgcatccatgagaactctcaatgggtttatgctgttttctggaggatcttgcctagaaactatcctcctcccaagtaagcttatcttcaaaatcaacctcctacatatataagaaatctaaaactcgatttttcatttcgaaaatatttctactttcttgttattatttttcaattattctgcaagtattattgtgagtttgttttggggaaaataggtaatttttcattaagaaacacaaatctttcaatggtaaatatgtactgatcatttcatgttgttggcaagcagatgggatggtcaaggagcttatgatagatcaagagggaacaggagaaactggtacaataaaacaacctatatatgtcacaaagttgtatgtatatctaaacatttcttggtgtatataattaagatatatatgttgtatgtaaataattggcaggatcttggtttgggaagatggtttttgcaactttgcagcttctgccgcggaaatgagctccggagaaggtagtggtggcggtggtggctcagcggcttatggaaatagtgattttcaacaataccaagggcttcagcctgaattgttcttcaagatgtctcatgaaatctacaattatggagaagggtctgtgaggataatttttcagcaaaaattaaatgatatttacacaaagaaatataaccttttttctatttatatttttgtatatagtactttctctcttttgggtttcactttttttgttaaccgagtttttggacccaagtccatactattttctaactcacattttatatccatatgtatgtatatgtaaataagttggttttagaaatttatgagtcaaagtacctcttttattctatttttcaaagtttatccgtaactgttttaaaagtcttgaacattgtttgcaaagtgtttgatcaaaaagctgataagagaagagtatttaagtatttttttttggcgaaggaagtgttagactaatcattgtcaactaaatattataatggttgttaattaatttaataatactctaatgattgaaaaaatgttattaaattttgtgcaggttgataggaaaagtagctgcagatcacagtcacaagtggatttataaagaacctaatgaccaagagattaacttcttatctgcttggcataattccgctgactcagtaagcatatgcttataacctacctatatgctatacactcctttacatactcacatgcatgctagttccgttttataagaagaaaaaaatgtatcagtgtgtatgtgaaatttacacatatgtataagcattcttattcactaacactaattgaaatttatgtaattgtcagctaccctagaacatgggaagctctagtttcagtctggtatcaaagtatatttctccaaatcttatattatatgtacataattccatttatgcatgataataaaattaacttgtaaaagtgtgtctctttatatatgattacatgaaaatgtttttcagaccaatgc

SEQ ID NO: 139814 - DNA, 433 bp, Arabidopsis thaliana landsberg; identical to SEQ ID NO: 33511

SEQ ID NO: 139815 - DNA, 1890 bp, Arabidopsis thaliana landsberg
  unsure (1)..(1890): unsure at all n locations
atgttcaaagttaaagtcttattcattgtttcatgatcttattatgtatcctctgcnatattgcagggtcagtatctcgttgttggaaatgttggggattccagagctgtaatgggtacaagagacagtgaaaatactctggtcgctgttcaactaactgtggatcttaagccaaatctcccaggttggattatcttatgtgaatgtatgatgttgtcctgtggatgtatgatggatccattaatcatgtttattgggtttttttttattccctcaattgaacttgcagctgaggcagagagaataagaaagtgtcgaggacgagtgtttgctcttagagatgaacctgaagtttgtagagtttggctgccaaattgtgactcacctggacttgctatggcacgtgcttttggtgacttttgccttaaagattttggcctaatctctgtgcctgatgtatctttccgtcagttaaccgaaaaagatgagtttatagtgttggctacagatggggtaaatactctctctctcagacacatatcttttctatttgcaatttttgctgctcacatttctttctattgtgatagatttgggatgttctctcaaatgaagatgtagtggcgattgtagcttcagctccatcgcgttcctctgcagcaagagctttagtcgagtctgcggtcagagcttggagatacaaatacccgacttccaaagtcgatgactgtgccgctgtttgcttgtatctagactccagcaacacaaacgccatatctacagcttcttccatctccaaacttgaagatggagaagaagaagaactaaaagccacgactgaggatgatgatgcatcaggaccaagcggtctaggccgttcgagtactgtcaggtcggggaaagagattgctctcgacgaaagtgaaactgagaagctgataaaagaagcggataacttggattcagaacctggaacagagtattctgcacttgaaggtgttgcaagagttaatacacttttaaacttaccaagatttgtgcctggaaagtgaatagagaaagaagagttgaagtgaagaagttgagaggtgattaatgatatcaaataaatcacccaagacaaggtactgtgtctttttgttcttttgtttttccttttcaactttcttcattgatctctattcttttttgagtcataattcattggttttggaacctaaatttttgtcagttttgtctttggtttatgtctttctctcttgttaatgtttatgttgttttttggtcttgtcagtaaagaagagtgaaaaaacatcacatcatgtaataatggcttgtgtctgtaattctgtgaatcccctcaggcttaattttgtcagtctgttgggacaatttcctgtttctgtcttttcaaaaagctccaattccagttacagaatttgtgtcaatccctttctctcgatcatgaaagtggcaattgtttttcaagaaatgggaatcagttcctttaatgataaacaacagaaggaataaactttgtcccaagagggtttttatctgaaactataaagcaacgttacagaagaaaggaattaagagagaaacaagtgtaagaagttttgtaatagctaaagaagacgaccatgagaggttgtgagcaccaacagtatagattgctccactttcttcatccttgacttgtattcctcctgagcctgtgtgattcagtatttcattacagtcaaaacacacctaatacatcaaatctcatagaatttgtggcaataaagacaaagataggatttgtaatgcttacagttgtgattggtccatccaatgacttggttttcgatatcgtagacaactaacttgttagagaggcgccatgtc

SEQ ID NO: 139816 - DNA, 969 bp, Arabidopsis thaliana landsberg
gtgtgttttccaaatttggtagctttttaggttttgattgtaagatcaattttggttgatcattttagggctctcattttttctgcaggcaaggcaagttcatccagacaagaaccctggtgatcctcaagctgctaaaaactttcaggtgattttttcctttcaccttaaaatatagaatcatctctattgctatgtttattagtttgcttaacgactttcacaagggttttcaaggagtgtttgattggatgatattctggatcactctaacctataaattggtgttgtgtgaatgaagatactaggtgaagcttatcaagttctaggcgatccggagaagcgtacagcttatgacaaatatggaaaagaaggggttcaacagtaagttttcacactttcattcctcatgattcattctacatttgaagattttcggttttccccacataaaaagcctagagataacttctgtgatgtttatatgtcatttgagaatgtgattggtataattgctatagtatgttaatttcacttccattttcttgcagggatgcaatggttgatcctgcagctgtgtttggtatgctctttggtagcgagctctttgaggattacgttgggcaacttgcccttgcttcagcagcctcaatcgatgctgaattagaatcgtatgagcctgagattagaaaacagatgcttcaggaaaagatcaaagtaggttgttttccctctctgtttactgttttcttatgccttaatgtttatatttctctatgttttcttgggattttttttgcaggcgatacaaaaggacagagtagacaagctcgtcactacactgaaaatcaaacttgaaccattcgtggaaggacaaaccgatgaatttgccaattgggccaccgcagaggcaaaaaagctttaaacagctggtattcaattctttctcagttgctgtatcaggtttgc

SEQ ID NO: 139817 - DNA, 857 bp, Arabidopsis thaliana landsberg; identical to SEQ ID NO: 51674

SEQ ID NO: 139818 - DNA, 3354 bp, Arabidopsis thaliana landsberg; identical to SEQ ID NO: 70620

SEQ ID NO: 139819 - DNA, 1166 bp, Arabidopsis thaliana landsberg
cgaaaaattcatttcacttttcctataacaattcaagattaagctatgggttatgaaaccaaatcgactttggacaccgagagatcgaccgcgccaggaaccgccaccacgacgaagagttgttcgatgactcaagttgtcctaagatttgttctgtttgcagccactttgacatcaatagtggtaatggttacaagtaaacagaccaagaatatattccttcctggaactcccattcgtattcctgctgcagagttcaccaactcaccggctcttatgtaagttcatcctaataattcattaattaatattttcttttattttctcgaatttgattgatcatctttagtaaatgtgactaagggccagagttcatatgtgatttgtatatctcatatatagtcaaactaagtagacaatataattatgggttgttgtgttgtttggagaagtaatagaggttgttttatcaaacacgggtcttaaaccatatcttaatcctaacttagaagaagtcatgtcaaattaggatagtgtaatacaatgatcgcttgatcggtcacatgtatggaccattgaaaatctggtcagagcgtggattttttcatgtatacaaaaatatatatttaattttgagaaaccaagaggattttggtcatgtatatggaaaagaggatgtagtatcacgtaaatgtttacacatatacttaacaagtaaaatttatacatacaaatcgccgatcttatatgaattgtttatttacgtgtgggagtagttggaatttcgaaacaaaggttgtggaaagtcaaaagtaagttggcgaactttagttaacgaaaaagactcaaaattatagtaaatgttcagtgataatgataaagcagcttctttctttcttttttgtcaacctattttaaaaaacatctttgtatcagatgatttaaatatcgtataaatcttttaatttatgtagtatttaattaactaaatccacttttttcgtttgctaatgtgtagatactttgtggtagcattatccgtggcatgcttttacagcattgtatctacatttgtcaccgtatctgctttcaagaagcattcctgctctgcggttctcttgctaaatcttgccattatggatgcggtaatttattctatctagctc

SEQ ID NO: 139820 - DNA, 1516 bp, Arabidopsis thaliana landsberg
agaagagagagatcgcagatcgatttctcttaaatctctcgtgaatcccatttgccttctctctgctagattctctcttcttctcttcacccatttctcgctttctcctttgttctctcatctgggttcttctcaaagcctcttcctttttttgccatggtgggtgcgtcttcctcttacgcatctccgttatgtacctggtttgttgctgcttgcatgtccgtctctcacggtggaggagatagccgtcaggctgttgctcttcaatctggtgggcggagtcggcgaaggaggcagcttagcaaatgctctgtcgcttctggatccgctagcattcaggctctcgtcacttcttgtttggattttggtccttgtactcactacaacaacaacaatgcattgtcttctctctttggatcgaatagtgtttctttgaatcgaaaccagaggagattgaatcgtgctgctagctccggtattacatttatctcctttttttattttctcttccaatctggggttttgtttttatgtggcaaggtttagtttttatagttcgatgttgttatgggtttatgttagtgatgaaatttagaggtaaagttgaagtgggaagcagctgacatgtgaaagtttgaatttttattgtgattccatgttttatcatctttcatatgaaagcaaactctgtgaggttagtctctagaagatacagagcttcgaaagctgaccaaatggcagtgaacttttatatataaattttgaagttggctgtgattctattgagatgtggtttgtggatagtagctgattaagtttatctaccatcaactggctttgtgggttttaggtggagccatggcagtgatggagatggaaaaggaagctgcggttaacaagaaaccacctacggagcagcgtcgagttgtagtgacaggcatgggagttgaaacatcattgggtcatgacccacataccttctatgagaatttgctacaaggcaacagtggtattagccagattgaaaattttgattgttctgaatttcctacggtacgtattatttatatcaggatctcttggaagctttttggtgtgcggaatttctccgtttgcttttgtgtgtactagaatatctttctttgttttacctttgtcaagcgaattgcgggagagatcaaaagcttctcgactgaaggatgggttgctccaaaactttctaaaaggatggacaaattcatgctctatcttctcacagctggtaagaaagctttggctgatggtggggttactgatgaagtaatggcagagtttgacaaaaccaaatgtggagttttgattggctcggcaatgggaggaatgaaggtactttctcgagcccgggcttgaatgtatagaaagtatgaaaacagtttcattttaaggtttctgttcagtatctcgcctgattgttccttcattaaccatgctttcactaacaaaagagtcacatgaatattaatctaaaattagggag

SEQ ID NO: 139821 - DNA, 1431 bp, Arabidopsis thaliana landsberg
caaactaccctcagattctagcaaaatgccacttgaacgtctcagacacgagagacggctcgattatgcctgcatgtgttcctcgtttagaatcaaacctcgtcctcacaaacttcaccaagtcacaatactcaatgagtttgaacgattccaagtttacagggattggtattggtaaagaagatgattggatcgttgtagtcctcactaccaacacaccagaaggaagctattctacagctactcctacaaaacaagagtctaatggcttcacctttggtattggtctcgttagttatttagtcattttcatgtactcttccttttgtttctttctcttttgagatatcaaatgttttgatgagttatcaaacactctttcctttagactatcaagaataaattttgttaaagattagttgttataatttctgaaacttgacgcttatggcatgtgatgtcatgataggacgtacttaaaatactgtattttgtcggtgagtttggtggagaaagacaagattatgcaacgaccgacacaaatctggatattttacacgtgggaagtactttatgctctccaatactgaaaaagcccaataagaaggcccattaagtaacgggtaaaatatttaggattattgaaagggtttcaacggaaaaatcacaaaaactaagcttttaattctgaaaaacagatcgagtttctctttccctcctcgaaatttcctaaatccacacatcacgaagccgaagcagccatgagtaatcttcactgatctctctacacattcaccgtcggcttctcaaatgcaggatattctcggatcggttcgccgatccttggttttccggtcgtctttggccggagacgatggtactagcggcggaggtcttagcggattcgtcgggaagattaactctagtatccgtagctctcgaattgggctcttttctaagccgcctccaggccttcctgctcctagaaaagaagaagcgccgtcgattcggtggaggaaaggggaattaatcggttgcggtgcttttggaagagtttacatgggaatgaacctcgattccggcgagcttcttgcaattaaacaggttaattttgaatttcttagttctggttactttcagttgcctttaatttatgatttcttctgctgatttgtgatttttttttttggataataggttttaatcgctccaagcagtgcttcaaaggagaagactcaggtgagttattgctctatcttttaaattttgcaattttcgataaatctgttaccaatttggtaacaactttggtttcctttggtcttgaatccttgttttagggtcacatcccccagcttcaggaagaagtacaacttcttaagaataattcaaaaccgaacatcgttgtgagttggcgaatccattcagcta

SEQ ID NO: 139822 - DNA, 911 bp, Arabidopsis thaliana landsberg
tttgtttcacatttattattctcttcttgttttacttgatctacctccgtcgtagtagctctgatttttcttctcttggaatgcgaactactttcatccccgggaactctctctccacggtacactctaatctctgtttgatgggtttgtcagtgtaaagatctgtgctttatctggtttatttgtgtaatgattgttgggttttgtcacatgaacagattgaattaggattgagcaaagagctgagagagatgcttcccattgttgtctttaaagagagcttcaccataatggattcacagtgagtttcatgtttcttatctctccaaaatttgtgatctctttttactcaaggactcaccaccataagtgagattattgcaggaaaaaaggaatacgataactgatagaaaagttcaaaaacaattaggttacatgatttatgaattagacctatgttgtacaatttaaggaagtgaaaaaagatgagaggtttctaatctttatctctagtggttagaatttctggtctgccttattaaagtggcacaacagttgcttctatgatcagataattgtaggagattatgtttgatatagtttcaggacaatgtgtattatgttatttggaagagttgttattctaattcgcataggtcattggacttatcctctgacgctgagagtccaacttgtgatgactaagaatcagaataatctgattttggacttttgatttacagatgttcagtgtgccttggggactatcaaccaaatgacaagcttcaacagatcccggtatgtaaacacacttttcacatggactacattgatctttggctcacatcacataccacttgccctctttgccgcctcgctctaatcccgagtcgatcccgtcaaagccaagc

SEQ ID NO: 139823 - DNA, 1162 bp, Arabidopsis thaliana landsberg
  unsure (1)..(1162): unsure at all n locations
actacatatgctgagttaaactcgttggttttcttgctcatcttctttcagttggttctttcgtggcatatgaatgctgcaacagcgtgtgagttttccaggcaagaatttatcagtggattacaggcattagggtgagtgaaatgatcaagggtctttccagttttcttttatgttgtgacctgatcaagggtcttttgatgtggagtactnnnnnnnnnnnnnnnnnnnnnnnnnnnnnnnnnnnngggaagttgcaggaaaagctgccatttatgcgttctgagcttaaagatgaacgtaaggagaaaattgagtcgccattcttttatctggtttacgatttgattgatggattgtcccatgttagctgacatatgtgtaatgtttttcttgtgcatttatctttttcagaaaagttccatgagatatacaactttgcttttgggtgggcgaaagagaaggtgacaaaacttgatttgaagtagttgcttttagaagatagctgttttttcttggtcggtgacaaatagtgtaactgtaaaatgtttcaggggcagaaatctcttgccttagacacagcgattgggatgtggcagttgctctttgcagaaagagagtggcctttggtaactcactggtgtgatttcttgcaggtaaactctcgagtataataatatcatcaaggcatgttctatcatatttgttacttctgatacaattttgtttcccaaaatcaggatcgtcataacaaggccatatctaaggacacatgggcacagctactggaattttcaagggtaaaagaaaaactagatacagttgtgctattgagcttacattgattgcaactatgggcttagcgttgatatatggattgagacaatattttgtgatgcagatggtcgacccagtgctgtcgaattacgatgcagaaggagcatggccttacctgattgatgaattcgttgagtatttgtatgacaagaatgtcgttgagaagtgaccagccaactgggagaagtaatcaactctatttgacaatgttcctttcttctcattattttaaatagacttgcttatctcacagatttttctattgtgtttgtcagaatctttaaattgatgattaaataagtaagcttttcaaccttaagactaa

SEQ ID NO: 139824 - DNA, 1011 bp, Arabidopsis thaliana landsberg
aagtgatttactccttaacttgtcaaacgatgtgatatgtagaattgctgtgggaagaaaatatagccgggaggaaaacactagcgattttgaaaatcaactgagaaaagtcatggagcttctaggcgcatttcctgtcggagattacataccgggtttggcgtggatagataaagtccgcggcttggatcgtaaaatggaggaagtaagcaaaacttttgtggagtttctagagagagtggtgcaagaacatgtagatgaaggtgagaacaaagagacatttgattttgttgatatattgttaagattcaactagagaagacaaacgaatttgagcttgaaagaagcgacatcaggctcatcattttggtaattaagactaatcatcctttgcataacaagttaacaacactatcctttgaattagaaactcactctatttaaattagtcacaatgttaataaacatgaaattttgtgcatattttataggaattcttcctaggaggaaagacaacaactttcacggccatcgattgggcaatgacacttgtcgtaagacatccagaatctatgaaaaaactccaagaagagatccaaacatattccaggaataagttatatgtaccagaagaagaagttgagaacatgaaatacttaaaagctgtgattaaagaagtctttcgtctacatcctccaggcccattgtcaattcccagacagcttagtgaagatgtcaaactaaaggatatgatcattccggctggcacaatgataattatcgaaaccacgaaaccaaacaatcatatttgataagtaaactatatagaaaaaatatatatcacattcacatatgttggttgagtaggtattcatcaacgcttgggccatccatcgagataccgaaaaatggggaccatatgcagaagagtttaagccagagaggcatttggatctaccactgtatttccaagagcaagagctctacttcataccactcggatgcttagtg

SEQ ID NO: 139825 - DNA, 2376 bp, Arabidopsis thaliana landsberg
atttgcccttggtatccgatcgggctgtgagtgtcacgtacgcgggaacgacgacgctgacattgttaatgaggttatttatttaaatccggaaactaataatcagtcccattctttatgaattcaagagcacatgtgccaatttggttcaagagctacgataagtaattgtttttaacaatgttatttcttaattatctatgatctatattcactgtgataacaggatgataaaaatgacgtgaatgcaagatatattaatacaaagctttttttaaaaacaatttactcatttacaaagataatgataacattctgagttaccataacatattaaaaacagagatatctgaaatggtaagttttttccatgtcttaataaaatatatattttcaaatttttctataaaaactattaatttgatattatgttttatgtttcttgcgttttctgcctatcacttgttaatggttcgtaaagagttggaatgagatgatatagtttcatcccctcttataattcaagagtaatcagtgattagtattaagcatcttcttcgtcatgaaataccaacttcgatgctcccttggtatagaaacttcaaggaaagtataaatacacagtaactagtatgtatgatgtgaatgacaaagataatagtattcgcatcaccgagttgtatgtctaagtaaaggttcttggagagattgaaaaaacgtagtattattaaggcagaatcaatgcttttgcatcataaactatcatagattttttgtatgttttttctatttatgcgtttatttttcagaactacaaaaatgacggtaataatatgtcaattgacataaagttgtctttaactgaagagcagatgaagcattttttgaataactataacaaaaatccaagaggatttcttggtattttgagactatccataactaaaagaaccaacaacatgcgtttgcttaattagtggtcaacacctatatcactaattaagaaaaaaaaaagcttacagttcttgttatattacactttcaaatgttttgtggtctttttgtttaaacatttcactagtcttttttcgaaaaacatgcaaattaaataaccgtttataatatattatctccgcattttgaacaagatttgttccaatggtaagataacgataccattgttaatatttttgtccaacaaaattatgcgattatcaagggtctctcatagttaattttaatggttttgttggttacaaaaatagtagtagaaattggactttagtatataaacaaactcatagtacagtattattctaaatctttaatccagtacatctccaaagtgaatttcgaattatttggttctgtgtgaataaataaactgggctttattgggcttgaggcccatctccgttgtcgtcttcaaggtcacgcttacagacttggctccgccgctccggcattgagctccgtcgagagaatggcgagtaatcaacaaccaccgtcgaatctacagacctacggtgtaccaatttacgccgtcgactggattctagaggaagctgtcagatccaaaatcactaaggatcaggatgatgatgatgatgatggatcgtcgtcgtcgtcgtacatcgttttatccggcggaggaggagaaggacgaagtggaatacctaatgtcatcttaatctgtcgtgttgatctccacaccaattctctctctgaacaacctgtaagtgcgaataacaaagctccttctcttatgatgaatcattcacaattctctgaacattctcaatgtttttcgcagattggtaggcgtgtgattggcactgatctaccttatcgtatggctattcatcctcgtcaaggtggtcttatttgtgcattgcctaacagttgcagactgtttgattgggaaaacattatagaggatgataatgaggaagagtcagagaaagttgttaaagagttaaaagatgttggacaacagttgtctctctcgtttaatcaggatgggactgttctagctactggtgcagaggtaggaaggatcttatattcattctcttgagaaagaaataaactttggtggtggttcttcttatgtgtttggtttttgatgcagtgcaggatgggactttgagggtttttgaatggccaagcatgaagactttacttaatgagtctaaagcacatgcattaattaaaagcctaacttttaggtgagaaagggatcatcttttggagaaaatgattgtaaaataaatatttcttgatagtgaatattttttttccttggtttttggcccaaacccggaaaaaagggttggggggtttaaaaaagggtttttttttttcccttttttgggg

SEQ ID NO: 139826 - DNA, 1189 bp, Arabidopsis thaliana landsberg
gatcgagccgatcaacggctctgattcatcagattctggtcgtcttcatcatgaacctgtgattacttcctcacgaagcaacgagaaccctaaatctgatcttgaagaagaagatgaaaaacagagcatgaactctgttttagatgttcaatgggctcaggggaaagcaggggaggatcgtgtacacgtggttgtatctgaagacaacggatgggtctttgtcggaatctatgacggattcagtggtccagatgcgccggattatctcctcaacaatctttacaccgccgtgcaaaaggagctcaatgggttactttggaacgacgaaaagcttagatctttaggagaaaacggcatgaccaaaaccggaaaatgttctgatgaggaagatcccgagtcaggaaaagagaattgtcctgtgataaacaatgatgatgcagttgcttccggtgcaagaaaccaagcgaagagtgtgaaatggagatgtgaatgggagaagaagtcaaataacaagaccaaatctgataacaggtgtgatcagaaaggatcaaattcgacgacaacaaaccataaagatgttcttaaagctcttttacaagctttgaggaaaaccgaagacgcgtatttagagctagctgatcaaatggttaaagagaatccagagttagcattgatggggtcttgtgttctcgtgacattgatgaaaggagaagatgtttacgtgatgaatgttggggatagccgagcggttcttgctcgaagacctaatgtcgagaaaaagaagatgcaaaaggagcttgagagaatcaaagaagaaagtccattagagaacttgttcatcaccgaaagaggactgagtcttctggtccctgttcagctcaataaggaacatagcacaagtgttgaagaggtgaatcttttcgcgactcctgattcagtgttttgttttgcgaacattagacactaacgatcttttgatgtgataggaagtgagaagaatcaagaaggaacatcctgatgatatattagcgatagagaataatagagtgaaaggttatctcaaagtcactcgtgcatttggcgctggatttcttaaacaggtatatgtaatcatgattttaatcaaatagtttcaaaattttgcatgttttatagtttttagggttggattattaggtctacgaggttt

SEQ ID NO: 139827 - DNA, 816 bp, Arabidopsis thaliana landsberg; identical to SEQ ID NO: 70036

SEQ ID NO: 139828 - DNA, 1043 bp, Arabidopsis thaliana landsberg
gatcttattttgttttcttgaaacaggatgttgctactccaaaattatggaggacaaactccaatgtgttgaaggcgctatgcatcacaattgcccggtttgttttgaggtataagaatcagattcacccatttcttaatgcaacataatggtttcttacaattgaacttgatgtggatgtatttgttctcagtatctgcttgattcaacaagagatatcactgtcctacgatgtggtcacactatgcatctagaatgcacgaaagatatggggctacataaccggtaaaagaactctcaaatcttttatgcaaccgatgaatgaagtcattgataaacaaagattaaaaaaattcttgatgctttgtgtagatacacatgccctgtatgctccaaatccatatgtgacatgtctaatctgtggaagaaacttgatgaagaggtgaggtttcttgatctgatgttcggtctccttgtatagtctcttatgtttcactaagtcttacatttaaaattttgcaggttgctgcatacccaatgccaaagttgtatgaaaacaagatggtaaaccaaaattaaattcgatatttgattctcgtgtgtgtgtgtgtgtttgtgttatgtagactttctgatttggattgaaaatgtgatgtgttgagtcaggtatggattctctgcaatgactgcggctcaaacacgaacgttcggtttcatttgatcgcgcataaatgcagtagctgtggttcctataatacaagacagacacagagaggctctgatagtcactcttgctcctctggaatgcctcaggttgttggttcaaccggttaatttttaaccagagctggttttggtgtctgaatttcccatgaggagattatttgtactttctatagtttggtatcagtcaatgcctttggttgttaacaattatatcatcacagattcaaaagctgctttgagccaatccaacttgcaagtctagaccattatagcccaaaacaaccatatcttgaaataaattatatatattaatgttt

SEQ ID NO: 139829 - DNA, 1328 bp, Arabidopsis thaliana landsberg
ggaaaaagcttcgtcctttcgcaaacccagggaaggggaaggtgaataagctctgcaaaatccctcccttcccttcttcttcttctacaagatttcaccatttctccatcctaaaccataacaacagagatatagagaagatgaagcactacagtcacggaattgatggtttacgaagcggtctttcaccttccgctaaacctttcgcaatcggttcttcttcttctcctgccttctctctcaaatctgaacacgaagattctatttggggtgattatactttagacctttcctttttatcctctgatgatcagagaagtggtctcgatgatgatgattcgttatctaacttgtctcgcgatgttgagactaataaaggtataacacaaaatcttaatactcttctcttcttgttgttaaaagttgtgtgtttgaattgggaatagagtttttggtgtaaagttctcatctttggtgtaaagagctaatgttgtggaggttacttgtgaatttttgcagaaggattggttttagaggagaagatagctagttctggaaaggttttggtaaaccctaatccaagtttctcgaaattgcctgaggtattgatgaagtcctcagatgttgttggtgatgcgaagttgggtttgtcctgtgtctctgagaagtcttctacggagtctgacctagatgagtctgaggaagattctccttgttggaaaggaatgctttctcataagagtctggcttctggtactaaatctatgacttccaggcgttctactgatgatcttagtgggtttcgtaagttgaatcctttggcacctcagtttataccatctagttctaagaagaaacttgaaacggatggggagaaatgtgaagagactagttcttcgtcgttgaagaagtctttgtcctcgacttttccttcgtcgtctggagaatttgatttaactgaccctcctcttgaagatggaagaaatgatgcagcagaaaagacaagcatcttgacccacaatgcagatgaaattctcggttttgtaactagtgatagtgtttccaagactgtgagcatgttggattctagaaatgaattccaaccatctaaaaggttggatcctttggcccctgtctttgttccctctagtgcaaaactaggtccttctgttcatgagaagctaggagattttgtggtaaatgcatattcaacttctgctcttgcttcttcacatgttaagtcgctagataagggcaaggtagtgacatcttctggagaagttggccacagttttaagagtcaatatggtggtcatgattttggttcg

SEQ ID NO: 139830 - DNA, 1120 bp, Arabidopsis thaliana landsberg
ctttttggtgttgatagaattggtttatagcaggttgagagaagatggtttcagagacttggtttcgtaatctgtggaggtttccaaagaaacatgatggtcataaagataaggcggttctaggagtattagcgtttgaggttgcgagtttgttgtcgaagcttgttcatttgtggcagtcattaagtgataagaatgttgcaaggcttagggacgagattacacattccactggtataaagaagttaatttcagaagatgatgattttattgtgaggttaatacgtgatgaaatgatggagaacgttgagaatgtagcgaaagctgtggctaggctggcgaggaaatgcaacgatcccaagttgaagtgctttgagaattgttttagtgatatgatgaagactggagctgacccttatggttggcagtttgggtggaagaaaatggataagaaagctaagaaaatggaacgtttcatatcatctaatgctagtctctaccaggagactgagattcttgaagatcttgaacagactttcaagagaatgaagagcaatgaatctgctactgacaatcttttggagtatcagaaaaaagttacatggaaaagacacgaagtgaagaatctgcgggatgtgtctctttggaaccgtacttatgactataccgtcattctcttggttagatcagttttcacaatccttagcaggactaaacatgtttttggcattagttacagagtggaagcaagtgatgttagctctgcagattctgattttattggccgcagccactccgtttctactattttaactcctgtatctcataaatctgagtctagtggtcttcctagatttgcttctggcccccttggaagatttaccggtccagcatcgggttcagctgctacaaggtccacgaagatgagtgatttcctttcgggttctctcagcgccgaatcacctaagtcaggtcctcttgttgcagaaaaacacaaacgtttcaagttttactctggtcagcttgggaagatcacctccaaatcaggaccacttatcggaatgggcaaaaacaacaagaagatggggcagaccccaggaaaggccttcaatttcctcag

SEQ ID NO: 139831 - DNA, 1406 bp, Arabidopsis thaliana landsberg
ggggtttttttcaacttttttcgggtggtctcctttatcttcaatttgagttttgtcctgttttctctggtgaaagcaaagtttttatctttttcttctttttgtgtggttatatatgtggttgtcggaaatttacctaatttagggttttttcctgtgtaagtgcttgcatttcactttaacaaaacctcaagttagagttgtgagtgttcagagttcagatcgattgaaactctcagttgctactcaacagaaattggactttttgtttgttgagatgtattgtttgaagttgctttgttccactagtgtaaaataacattctcttctctgcatctttagacttatcaaggaatcaaacccattttatcattgcaggtgacgtggatatatgaagcagatgttttggggaaccagagttctgtaaatagaaaccttcacgcgacgttgaaaggtttttgagacgaatataggaggagaagatgggatgtgtttcttcttgcttccgggtcgaggacattgatgagtacatgaatccaaacagctctgtctataggaactgtccctgcataagatgccttgctcataatttccttaacctggtaactgcttgcttcacattgctatttcagttttatgcttcttatggttagatatctcgaaagttttcatgtttctatagttacaatttctagttcttgtcacagttatttactttgatctgtaatctgattttttgagcccatattaatcgttgcagtatatttcggtcttcagaagaggggaaactcgctctctcccatcttcggttcaagctactgcatcgataacttcctcttcttcacacgataactttttgtctgaagcattccgttctactccaagacctctgccttatgatgctgatcctagatacttccgctcactcgtctcaagacgagagaagggttcaagtcattctcatgaggaagttgaacctttaagaagcgatagcgatgcagattctgaatctttcggggtaggagggtgcaaatgggctaataataagtccaccctctctgataaagattccaaagaagagtactctagtaaatccagtctcaggattttgagatcaaggtccaagtcaataatggccgactctgaaaacatgtatatattgtctgaagacgaagatgtctgcccaacttgtcttgaaggtaataataatcccattcaacagtctcctttttgttccttcagtattcatatcttgttggttttttgcagaatatacatcagagaacccaaagattgtgacaaaatgttcacaccatttccaccttagttgcatttatgagtggatggagagaagtgaaaactgtccagtctgcggaaaggtaaccactttttttttctgcattctt

SEQ ID NO: 139832 - DNA, 1099 bp, Arabidopsis thaliana landsberg
agtgctaatctatgagtacatggctcgtggtagcgttgagaacaatcttttctcaagtgagttttagagttctttacactcattagtcttctcgctggacattactcttgaatggattaagaatgctgagctatgtttaacctctggtaggagtgttgcttcctctttcatgggcaataagaatgaagattgctttcggagctgcgaaaggacttgcctttcttcatgaagcaaagaaacccgtcatttatcgcgatttcaaaacttcgaacattcttctagatatggttagtagtagtagtatagtagtattacatcaaagctcttctcttttcctgtggtggaggtttcatatggctgttgtaacaggattacaacgccaaattatctgattttggacttgctaaagacggtctgtaggagataaatcccatgtttccactcgtataatgggaacgtatggctatgcagctcctgaatacatcatgacaggtaagaaatccagtctactaactcacaagttacacatttgtagaatgtactatgctctttgaaatctaatcttctaaaagcatgacacttttagctatttaaagctaaaaggacaacacaatgagtttgttgtatttggattctttctgattagatatgtattggtgacagggcatttgacaccggggagtgatgtgtatagtttcggtgtagttctgttagagcttcttacgggaagaaaatcattagacaaatcacggccaacacgtgagcaaaacctcatagattgggctcttccattgttgaaggagaagaagaaagtcttgaacattgtagacccaaaaatgaactgtgagtatccggttaaagcggttcaaaaggctgcaatgttagcttaccattgcctgaaccgtaacccgaaggctcggcctttaatgcgtgacattgttgattctttggagcctcttcaggccacagaagaggaggctttactagtccctcctgttcagaaagcagtaattactattatcgacgaaatgcctaagaatggattgaagaaagttgaagaattgaagaaggttgaagaagtgaagaaggttattaggat

SEQ ID NO: 139833 - DNA, 864 bp, Arabidopsis thaliana landsberg
ttcaatttcggcgaaactatcttaacctatacctctaatagttccaactattcaacgatcaaaatccctaaccccgattcatccaagatcggcggtcttaaagacatagtcaacaccgtgattctcactctctcgttcgttgtttgcgtctacgaagctcctctgtatctccgtgaaaactgcctcaataccctcaagaaccatttgattacttgtcatacacggcgagctactatatctctgatgaagcttctagggtctaatttggaagagcagtggatgagaacagtgaatctagcgtttacaaattggatcatcgagcagcgtcgtagtcagtcaaccaagatcacaacaactcctttgttctcttacgctggttcggcttatggattgtggaaagtgcaattgtattgtcccgttgaagccatggaagtagagagatcgagcaacccaacggctgattcgagattgttgttctctctcaagtttaatcagcttgaaggtgtgatgcagttcaatcacaaagttgtagttagagacaattggatcgatgtgatcgtgaagatagacaacatcaggtacacatatgttactaagacactcttgttttgttaaaatggcctaaacagtaaaagcttctattttcttataaactcttcaaacccatttgtgttgcaagattgtagataacgagatgattctttcttttatgccaagtttctaattgaaccaaggttttagacattttgtaataaaacgatcaacaatcatgtgataactaatggatgcagatacgatgtaataaagcttgtaaacgagaaactgatgtcgagaagaggagcaggggagcacgaaaagcatttc

SEQ ID NO: 139834 - DNA, 896 bp, Arabidopsis thaliana landsberg
catcaatgtgattggggtcgaaatgaacaacggtttaaaaaagagaagatggtacgcttccaaccatattcttcccgactgtaaacaaatcgtcatgggatgtcaaggacaattcaactacgagttctttcccaaaacgacaaaccctaacgtagtcgcgttaccgtttttggccgagactcatgatcaaggacaagagaataatctttatccttttgtgtttatgaataccgatgggaatctatttatgttcgctaataacagagcgatattactcgactatgttaagaacacggtggtgaaaacttttccggcgattcccggtggtgatccgagaaactatccgagcactggctcagccgtgttattaccgttaaagaatcttgaagcggataatgtcgagacggaggttctagtgtgtggaggtgcaccaaaaggatcatacaacctcgctagaaagaaaactttcgtgaaagcgcttgacacgtgtgcaaggatcaagattaacgatgccaaacctgaatgggcggttgagaagatgccacatgctagagttatgggagatatgattcctttgccaaacggagatgttttgctaatcaacggtggatcttttggtactgctgcatgggagcttggtcgtacaccggttttagcaccggacctataccatcccgagaatccggttggctctaggtttgaatcgctaaggccgactacaatcccgagaatgtatcactccgcggctattcttctacgtgacggtagggttttagtcggaggaagcaatcctcatgcgttttatatctacaccggagtgcttttcacgacggagttgagcttagaagctttctctccggtttacctacaacgggagttttgaatcaacgtcccag

SEQ ID NO: 139835 - DNA, 1048 bp, Arabidopsis thaliana landsberg
ctttcctctcaaacatttcctaattccatcctaataattttcaaagctttaattctaagaaataatatctacaagaaaaaattatctcatgtatttcttcttcctccttgatttttaatctgatttttaacctttggatttggaaaattatatcttcttctgtcccaaatctatttttaggtttgtcaaaacgattattttgtttaataatcgtaataggtatggagactaccggagaagttgttaaaacaaccaccgggagcgacggaggcgttacggtggtgagatccaacgcgccgtcagacttccacatggctccgaggtcagaaacttcaaacacacctcccaactccgtcgctcctcctcctcctccaccgccgcaaaactcctttactccgtcggcggctatggatggtttctcaagcggaccgataaagaagagacgtgggcgccctaggaagtacggacacgacggagcagcggtgacgctatctccgaatccgatatcatcagccgcaccaacgacttctcacgtcatcgatttctcgacgacatcggagaaacgtggcaaaatgaaaccagcaactccaactccaagctcattcatcaggccaaagtaccaggtcgagaatttaggtaactatagatttttaaattttttgctaatcttgtgtctaaatctatgttttgtttagaactgaatcttgagttctcgtgacttcaaaagtgtttaaaagagattttttgggatctttctgggtcttaagttgaaacatgcaaagaaagaaagcttctacttcaagtggtgggacctcttattacaactttttgtccgtacatatacggtcatatatacatgtatatatacggtataataataattgcatgtttattgaagagatttttggtgatgttgttttgtgcttgtgaaggtgaatggtctccttcctctgccgccgctaatttcacgccgcatattattacggtgaatgcaggcgaggtaattatgtcaaaataaatatagattaagaatgtgtttatttttaga

SEQ ID NO: 139836 - DNA, 3263 bp, Arabidopsis thaliana landsberg
tcacaggattggacgaacaggtagagccggggctaaaggaacagcttacactttcttcacagttgcaaatgcgagattcgccaaggaacttaccaacatactacaagaagctggacagaaagtgagtcccgaattggcttcaatgggtcgcagtaccgctcctcctcctccaggtcagttagcagaaacaaagatctttgtcagaagatttcaatgcttaatttgtcaactgatgatcattctagtcgagtcttgatttttttagtaatgtgtggttcattgggaaacagggcttggaggattcatagaccgtgggagcagaagagggcggagctgatcactgattctgtatcttgttatggctttagggctcagtgattttctttctccagttatatctgttgtttactatttcgtgcctcaaacatttgacatttacagcaaaacattaaacatgtaagataacatttgatctgattatccaaattaattagagtaagataaaccgaaaattttcagaaaaaattggtgtagatgatatgggcttagtttaatcaattatgtcatggatttatagaaaaagtgttttgaaaaaatactattagaagaatgatttacttgtcttttttttcacaaatgtaacattatattaaacattcgatgcaatacatagccaaaataaaggccttttaagagattacagaaagttgaggccctacctagagcctaccatagtaacaatgccgactgaagaagaaatatcaacttttgacccaatctgaaaccacgtgtcatcaagaggatataacctcaacacgtattagacaagtaatcggaagatttccgataacaacttttgccgttgagcaccgatcacggtgagagaatcagcgtcgataacaatcgaattgtgattcttttggtaatcatcgaagttaaaccatcgaagctccaatataatttaacagcataagaatatccgaataagcgtcggaaaattcttcgtttcttcaaccaaggacgccatctcttaataattcttgtaactctaaaacctcaaaagattgaattggagattaaaaaatttaagccatacaaacctaaagattcatcaccaactcatatctaaagcatttattaaaaaaaactataagaaactaaaaacaagagaaacaacgtttagaactcagtcttaaactgatttgcggtggaagaaaaacagcaaaccggccaaaaactcatgtgggagcagaatttgccgggcgaaagccaaccatctccgctaacagaaccggaagatgtcggaagagaaaccgaccaaccatccatggatgtcgggctaaagccaattgaaaccatttggacggccttgccgaaaaactccggacgacggagaaagggacatgagagcaatcgactttctctctggaaaatatgaagagataagagagataaccgtggcttctgaaatcgccctttctgggcaagagagagaacggagctttttggctatgaatgatttacttttagaatgtaatccgagaaaaaaaataataatcaaattttcattaagagtacaattaaatttgaaaacaataaaaaaatgattcttaataatataggataagcaaaagtaaatccctaaactaaacttgaagaagaagagtaaaagaagaaacctgggaagaagtgagaaactcatctgatcgccatgagtgaagaaactccgaagcttttcaccaataaacccaagaagaagggtaacaactaattttcattttttggtttcttcttctccgattcactaaacaaaaacagaagaagctgtcgcttttttcaacagctcactcaacgaatctttcacacaattttttggatttaaattattttgactttttgtgttgatctccatttcgatttgtgatctgtatccagccattatcgctcagcttaagcacgttgaagccaatttcaacaatcccaccgttcctccatcatctaaaccgtctccagctgcagcagcggcggcttcgtatacgatgggtggtgggttctgttcctcctccgcctcctcctaaggaatcattcgctcgtaggtacaaatatgtctggccgcttctccttaccgtcaatctcgccgtcggaggtaatctagcgttttcactggttctcaattttgtatgccttgtcccaaaatcccaattagggtaacgatttgggaaagattttactggttactagtagtagtaacgattccttattaagttaagagtttagaatcattaggtctttttgatcaagcactaaagcttggaccattgagatctgcttcagattatgccttctctgctatatgagtgtttgtgaatgtctgagtttgttgatacactttcacttcaggattttgctcatctttagatgaaaaccgtatcgtaatgttgcagactaatatttcttaaggttcgctgcttgtattgtgtgttctctgaagcatgactaatccttgttttatggataacctttttccccacatctgattaggtgtttagttttatctttatgatgttaagagtcatttacgatagttatatggatccctcgccatcgagattcttcctttagatagtttctttactcatagaactgtgttgaagttacaatcttgatggaaatgctgtcacagagactttcatcacagatactgatggttctttgccttattcgttttgcaggttatctgttctttagaactaagaaaaaggacctagatcctgtagttgaagagacggctgctaaatcgagttcagttgcagctcctgttactgtggaaaaaactttgtcttccacagtggttgcagagccagtggtgatcaaggcacgtgagccaattccggagaaacaacaacgtgagctcttcaaatggatgttggaggagaaaaggaaagtaaatccgaaaaacgcagaagagaagaaacggaatgacgaagagaaagcgattctcaaacagttcatcggctccaaaaccattcctactttctgattcattaaagtgcagattctgttgatttttagtttggtttcacttcttactttgtggatatcacatgttttgcttttggaaaaattgttcgtttcattgttgaaaccagtcactttggtatcttcagttccaacattgatccattgtccggtcttgtgtttctgtgtcattgtgaaacgttgaatgctagagaaaaaggttcgactttttatgggctaaagag

SEQ ID NO: 139837 - DNA, 1610 bp, Arabidopsis thaliana landsberg
  unsure (1)..(1610): unsure at all n locations
gttttctatttcgtcctctgtggtttggtctgcaactgtagttatgttcatcgttcttaacagcggataagtaaagactaaagagttcttattaggctattctcctgtcctgttcttatcagtgaaatatccannnnnnnnnnnnnnnnnnntattgacacaacaacatctatatattttgctgtgtaggtaatttgttacaagctgcattttggtacgggcttgttgtgcatttcagggtctatcctattatctatgccttgccaaccatcctggttcttgatacccaggtatttagatctggtcaaaagccggctcttttgtattggaataccggtcaggccaagacacctgccagtaacatggagagaaaaacattcctcttcaatctcttgaccaccttgaaaagtttattttccagggagagaatcatgtttgctttgatatccgggggagtttttctagcttgcaatgctgtttccttctatttttatggacaagagttcctgcatgaggctctcttatatcaccttactcgaacagatccaaggcacaacttctccatctacttctatcacatatatcttcactatgagcgccagttttcagctgtggagaagcttatctcgtttttaccccagtttacagtacagtttgctctagtcttctgcttctcccaggatctagtgttctgcatctttctccaaaccgttgcatttgtcactttcaataaggtatataatgcatcactctattctcatactgtccaaaaaagtcttcaattgttcattttcatatacattccccagtgagctaaaactttctggtttttgcaaatgttgatcgcctcatttgtctctaggtgataactgcgcagtactttgtgtggttttattgcctgctacccctgattctaccatggagccatatgaagctgaaatgggaaggcttgttatgcatcattatgtggatcggagctcagacacattggctcttatggggatacatgctcgagttcaagggcgttaatgtctttctcccgctatggatcgcgagtttgctgtttctggctgcaaacaccttcgtccttgtcagaatcatacaacgccatcgattctctcctctcttcagacggtatgaatcgtcctcttcttcaaacaatgttaccaaagaagactgagactagccaaaagttatttgctttgttgagtcattaccatctactgagactttcaagtttacggcttttgtatatgattcatgatctgcaaattttgttggtgtctgctttttgtttgatatgtattctaaaggttcgttaggatttttctcaagaaaagttcattgatgaatatgaaacatttgtagaccttgcttgtcctcagattccttgtacaagagagactgcaaatagctgtataaaaacaacaggtcataaaagcatcatcacacaaagcgtagattgctctttacatttgttttaatgtgagagtatacaaactttgatacgtatatcattaattatgaaattccgggcttttgccacataatctccccataacatgatccatattccatactatggatctttgataaaaaaaaaaagtgat

SEQ ID NO: 139838 - DNA, 1474 bp, Arabidopsis thaliana landsberg
gagcgagacaggaacctattatgcacttcatcttggaggctcctactttaggataataaaggttcatctaggtggtcaaagatcatctcttgaagttcaagatgttgaacgacattccataccaacatctttgatgaatagcactagcgaggtgacaaggctttctccaacatttttctattcgaagctcaattcttatgatctgacagattaaatgctcagatgattcttgttacttgatttttcaggttctcttcgactttctcgcatcatccttgcagaggtttattgaaaaagaagggaacgatttcagtttgtcacaacctttaaaaagggaacttgcgtttactttttctttcccagtcaagcagacatccatctcatcaggagttctaattaaatggaccaaaggttttgcaattagtgaaatggttagtacagggatgcttacattgcttcttatattctctgcaaactgtgacttgtctttgaaatatccttccaaatctattaacttgatatcctgacgcactcttcggttgacaggagttgatgcccttgagctttaaattattacttgagttgtaattttgtgaaaatggaatccatctcttggtgttttcctgtttggtgtgagtcaaacatattcaaatttcaagttatttaatcgtataacaagcaaatccttattattttaggttgggcaagatatagctgaatgtctacaaggagctctgaacagaagaggcctaaatatgcatgttgcggctcttgtaagtgctttgtcactctgcaacagcatcatttccttggcaaaattctggcactaccaccaaaaaatttcaatctttctttttgttttccttacctttttctttatgaaaatatcatgaaatgtttcagttttctctatgagcaggtgaatgatactgttggagccttgtcgcttggatattatcacgatccagatacggttgttgcggttgtatttggaacaggtagtaatgcatgttacttggaaagaaccgatgccataatcaagtgtcagggtctgcttacaacttctggaagcatggtactaagaatcattgcatggtctatttttagaaaccagctttagacccaaaagaaacatgtttaagattgattccctcttatgtttcaggtggtaaatatggagtggggaaatttttggtcctctcatttgcctagaacttcgtatgacattgacttggatgcagagagttcaaatgcaaatgatatggtaatctttgccatacttccctgtttttccgatttggtattgcgttattagtttttaaccaattaacgtctacatcatttggggtttcttacatagggatttgagaagatgatatcaggaatgtatctgggtgacattgttcgtagagtaattctccgcatgtcagaagattctgatatctttggacccatctcgcccgtgttatctgaa

SEQ ID NO: 139839 - DNA, 1161 bp, Arabidopsis thaliana landsberg
tttttaaatttgtatgttttgatattcaatggatccctgtcattagggcttcttgatctttggtcgtcatgggatctttgattctatattttatgttttttgggcgtatgtaaagcctggaatggtggtcgtttgagcttcttatactaatgtcaggactcttaccaaactcaaagctcgaaacatcggtcctatccatttggtattgtacagatatcactttctacaaattttagtataacattttttcattcaaacaagcttttgacctctcagtctttattctttgaacagcctaacaatgtcgtctctgcattacgttatcgtgaatgccataggagcagcagcgaggttttatagtttcccaactgttcataacaatctatcatatctatttgttcttgaaacatttctctgaaccattgtttttgtcatataatagcacacatgtctcaaacaagctaggagctggaaatccaaaggcagctcgatccgcggctaattctgcgatttttcttggcatgattgatgcagccatagtaagcatcagtctctacagctacagaagaaattgggcttatatattcagtaatgagagtgaagtcgctgactatgtcactcaaatcacaccctttctctgtctatcaattggtgttgacagctttctcgccgtactctcaggtaaacagttcacatcaaaatcgaaagtctgtatacattagaatgtacagatcgaagcctttgcagctgttacttgaccaccaagaaagctaaatgttcttgttcttagaaaccctaaaattcttgcttcttcaggagttgctagaggaacagggtggcaacatataggagcttatgcaaacataggatcgtattatctagtcgggatcccggtaggttcaatcttgtgttttgtagtgaaattgagagggaaaggactttggatcggtatattggtaggttccactctacaaacgattgttcttgatcttgtcactttcttcaccaattgggaacaagaggtatatatacctttgccttttttatattgtatttttcctcttctgttttgctagagttttgaatcttgttctgatttgggttttaggtagcgaaggctagagacagagtaatcgagatgataccacaagaaatcatatg

SEQ ID NO: 139840 - DNA, 667 bp, Arabidopsis thaliana landsberg
atctcctcggctttagtctcataattctctaatcaccgatctgttcttcatagtgtaatgtgtgttgggattgttgatttcaggaggtaaattggtgtatcaaaccacaaagaagagagctagtggccccaaatgtcctgttactggcaagcgtattcaaggagtaagtcttctgatttcgatttggcttcgtgtgatttggtttacatgattcttgtatctagagtcttgatttgaggtctagatagagttaagagtttgaattttttaggaatttgatggctatgtataaccaaatcaatcagattgagtgttttagaatgttttgagtattgatcagtctcatttttaatgggcatgtcttcttatttcaagaaaccatgttacttagttaatagtattgtgcttattgacggtcttgtgctgattagataaatcccacatcagtacataacataaatcataagctaaattgtcggtgccactttgtctttcaagttgttccttgtattacataaggatttgctatccacctttggcataaattttcagttttttcccaactatatatgtttgattatgcaatggcatattccttttgcattatgtgaataactttgtttgtttattcagatccctcacttgaggccctctgagtacaagaggt

SEQ ID NO: 139841 - DNA, 607 bp, Arabidopsis thaliana landsberg
aagaagataagatgatctcaatctcatgatagtaatggtccatacaatccaataactctaagtaatgtggtgaaacaaagtaaatggccctaagactaaaacagtacaaaagtatggggctccattattgttcgaacaaacaaaaaaagaaatagagagagactcaagaagagaagagagactagagagagatccccattcagaaaataaaaatagaacccaacaaaaccaaaattcccaaattgaccccaaaatttacgttcctcgtcaatgaccccgcgttccctggacctcccgccgctgttcctggggtagtcgagccactggtgcccggcgccggagcagatcccggcgaaggagcagagcccggtgctgcatcttctgtgaaactcaacacacggtgggagcccaaattatcaggaccgaaaggatgtacaccgggacgaccgttggtaacattgccgccgatctgccatacctgattcacactatcagctcccgccggaaccttaaccgtcgtgaaaatggcgatcctaccgccgcttaacgactcggcgcgtagattccaaaaatcaaaagcaagtttaccttcgacgagactgctgta

SEQ ID NO: 139842 - DNA, 1246 bp, Arabidopsis thaliana landsberg
tggaaacgccacgatttcttctctcttcttggctcttagggctcgctaaattttctcagggctgtgaccatcgaccatcgtcgtcttcgcggagctcagttgaaagatgttaacggctgatataccaccaaatcagtcaatctacataaaacatatcaatgagaagatcaagaaagaaggtaatgcttacgaaattcatataattgcatcggtgattttctaagagtttttgcaatgcttaagtagcttggtaatgcttgtgtgagcttctcttgaatgagttgtctgagtttaaagttgcttaatttgatgtttacgaaggttagattagatgcatttagagttatctttctaagtattagggatttagaatttctgtctaatcttaatagacctgaactagagatactctaacaaaggtgctttatttaagtaattaagtaggaaaggcgattgcttttgccatgaaatttgtttagattgtttgattgaagtcaatgaccttaagttctttagctgctgcttttgtttgtctaagagtaatgctgttcaagcagatcattgtttaatgtttccacttgtttttttcagagctgaagaggtctctttactgtttgttctctcagtttggaagattacttgatgtggttgcgttaaagactcctaagctccggggacaagcatgggttgtttttactgaagtcaccgctgctagcaacgctgtccgtcagatgcagaactttcctttctatgataagcctatggtacctttttcctctcttatgttccaggtttatctatcccgctaccgaaaaatgattttatcttgttatgtgagactagaagcttagaaagttgcagagatttacttggagggaaaattgagtttacttgctgatacttgttgttatataaaattgaaggaagtacaacgacattagatgttgagggtatatcattacacaagtgattactaagtaaaagactagaaaaagctaaatgcaatattattattcaaatcgtgatgtgtgatctctgtgggtgcagcggatacaatatgcaaaatcaaagtcagattatgttactaaagccgaagggtcttttgttccaaaagaaaagaagatgaagcaagaagagaaaggtttaaactttcgtttccatcacaagttcagatcttttcagctcatttcatctgtgttttacttcgcatctgatgtttaacaaaactgcacatcactttcagttg

SEQ ID NO: 139843 - DNA, 971 bp, Arabidopsis thaliana landsberg
caatttcgccgacgacgaatccgacgtcagtaacttccgaccgcagtttccgaaactcgtgatcgctttctctttcgaaaatgttggcgtcggtacgggtgaatcagctgcaaagacttcttctctctgctcgtcgattatcttcttcaccaataatacctccgtcgcgtttacttcaccagcggctattctcgacctcagacactgatgcttcggctgcatctttttcttcttcgcatccgaaaatacaaacgcttgaaggcaaagcttctaataaaagccgaagcacatcgtcaacaacatctttgaatgaagatgaacttgccaaattctctgccattgctgatacctggttcgtctccttcactttaaaattctggtgatagttacttagctataatgcatggtagaccaggcttttaatttgaaggagagggagtttcatttctaggaaacgatcaaaagttggatactttgaaattatacttggcttgttatcttttggattgaggttaatcctttttatagttgtttggagaagttggtttttattcatgcaattgaatcttggaatgtattcatggatgcttaaaatatagagtcttgagtgttgagggttttcacatgatttctctgctctgtgttcttatataaaggtggcattctgaaggaccctttaaaccgttgcatcaaatgaatccaactcggttggctttcatccgctcgaccttatgcaggcacttcaggtgcatttcttgtgaatacttttggtttccttctatccttctctgttggattaatatatttcttttccagtaaggatccgagttctgctaagccttttgaaggactgaaatttatcgatataggttgcggtggcggactactttctgaggtattttttcatgagttcctgcataccttagttggcatatgattctttttattctaccttttatgagaccagtcta

SEQ ID NO: 139844 - DNA, 554 bp, Arabidopsis thaliana landsberg
tagagtttgtgacgatattaaggtatctatctaattaacattaatatcttaagatgatgggaatgttaatacactggttgttatgcttagagttgtattgttgtatcacgattcaatagactagataatgaaaccatttcatttcagttctttaagcttgatgttgcgattttgtcaatgtagctggactcagacaagacatattcaatcctgctctatgggagtggtgcgatagttgctctctacttaacgtctgcaatcgtcagttcactcgaagcaatccctctggtaagtactctcaagcccccgaaacaaactctgtttgatataattgtagtaacctttcatatttgatgttacagtttcctaagctaatggaagtagttggtctcggatacacactctggttcactacccgttatctgctatttaaggtaagctaaacataggcttaatcgactgagttttaaacttaaattcacgatattttttctcaaaactatttatttatttgcagaggaacagagaagaactcaagacaaaagttagtaaac

SEQ ID NO: 139845 - DNA, 1522 bp, Arabidopsis thaliana landsberg
tttaggtcagattgtgttacaagatcctaacttttctgtttgtttcattgattgatcttcattacttgaacaattgcatgtcattgatggaatcccgcagctaattttcgctcatacaagctacacaatcgaggtctgtgcttaagtttgattctgcaaataattttttttttttttgtcaaacattctgcaatttaatctatgttatgaaagtgtacattgactaagattttgaggtgttatacaatgtagacagttgaagctgaacggatatcagttgatcatgttgcacatcttaaaccatctgacggaggctcagcagcaacccagtgtgagccttatgtcactaatacatatcatactccacttcctgagtcttactgtttttggctgattattcgttcatatgcagtggctgctcatcttactggtatacatagtgccatcaagatgcttaatagcagaatcagagtgctttaccaaaatcttgctgcaatgcagaaaggtatattctgttctttcccaagttccgattcttatcaccgtggtttcatgtttaccagtccaggattctagctgaagatagtcaaagttgtgtaagtgtaataatttatctgccaactcatttatgtgtgtaggtgataaatcttgtgacaactcagttctgagacaagtatctagcctgctaagaagattgcctgccatggaatcagagagatttcaagataatttcttgatggtgagttagttagatctgcacttgattcttttcagtgtagcttattgtcttagatatttcgcaacttatgctggcattttttctttttgcaggagtacaacgacaaattactaataacttacctagcgatgattacaaattgttccaggtttgtacctaatgcaacattctaaagtatttgaaagcaagtatataggctagcgaatgctctttaactagtggttctttaggaactgtgaaagatacggttttcaccgggctggtggattctgttatatcagttaataattttgtttgctcaatctgcagcaacatgaacgagatggtcgacaaattcaacaccgcatatgacagaaacactcgaagaggtggaagaactgcattcatgtaaaagatcctttccagcgattctagttctaaagatcttctcttggttcctgaaaccatttttaacattgcctctgtgagaatctataactcagacggcaagactttatcctcttcattgtttctatatctataagaacatctgcttatctatcaaagctcttgtttgatcttgaacaagtttctattgttagtaaaaagattttaaggtttgattctatcagtctctctagttacatccacatcagtctccagttagcaattgcagtattgctacacaacactcacttttttcttctttgttgatttcaatataagataaagaaccagtaaaaaagaagacaaaaccaaggaatgaacaataaaacagcctttaccttccccaaagtttgaaac

SEQ ID NO: 139846 - DNA, 723 bp, Arabidopsis thaliana landsberg
acggtttgtttgcgaggcagcagagaaagctttaacagcatttttcaaatatgtttccccaaccttgctgttaccaaagctgcaaccttgtctcaaaaacaggaatcctcggatccgtgccaaagcatcattatgcttttctcgaagtgttcctcgactggtaatacaagttcaacttcatatatatctctcacaaaggcatcgcatgtcatgtaaaaatttcaacaataccttgcgttataatacatattccagggcgttgaagggattaaagaatatggaatcgacaaattagttcaagcagccgcatctcagcttagcgatcagctccctgaatcccgtgaggctgcacggactgtcctactagaacttcagagcgtatatgaaaaagctcatcctctcatcaaccctgagacatcatcaccagaagaacagcaaatcccggaggtagagccaattacttgggaaactttctgcaagtcaaaactgtcggctcttagcgcacaagccgtgcttcgtgtcaccaatgttgtcactgttactgctcgggagggtttggttactacaggttcatcatcttcatcccagttataaacattttctactacaaattttttaaaaaccgtttgctacgagtcatacggtttacatggtattctccggcatggcggcatgatctaccaaattggcaaattatggaccgataaaaagagtgaacgttcg

SEQ ID NO: 139847 - DNA, 983 bp, Arabidopsis thaliana landsberg; identical to SEQ ID NO: 58786

SEQ ID NO: 139848 - DNA, 1180 bp, Arabidopsis thaliana landsberg
ggttgactttcttgctctctcgatgggaaagctccaacatggatctcatgagtgcgagttgacctcgcgggggatcgtcgcaaacgggatctgcaacatctgcttcaaagatgaacctgttgaattcgcctgtgacccttgcaatttcgatctctgcaaagcttgctcagatcttccccagaaaatgtcacaccatcttcatccggagcaccctctagaatttcgtataggcgaagatgatcagaagactaaacacatggtgtgcgtcgtgtgcggaaacatgtcttctggagccaaatactattacgagtgtagcaagtgtgagatctacctcgatttgggctgtgcacttcagaagaacatagcgacgagttgggaagccaaagaaatgctccattacagccatgaacacttacttaaaaggtgtaggccaggaccagattccaaagactcttgccttctctgtgagcaacctctctccttcactgcaatatgttacggttgcgttcattgttacttgttttttcacgagcgttgccttgatctaccaaccgagattcaacatcccgtgcatcctatgcaccctctcaaacgccttaattatatacaaacttttgacggtgagaaatcttgtaatgcctgtcacggccaatttgttggtgtcccatttggttgcttaggatgtgggttttaccttcatctgagatgtgcagatgccttgttgcggggtttgttgtataagtcccatgaacacaggctattttatgtagaaagtactcgtcgtgttgctgatgaaagagtaaaacaaccatgtctaatatgcaaggaaaccgtggtctatgacagattctattatttatgcgtggaatgtgatttgaaatgtcataccaagtgtcttgagatacctgaatatgtgatcaagaaatcctatcacatccataaacttagatatataagagtcggaggggaggacgattttttggagtattgtggtgtttgtgagactatggtaatttcacgatatcctgcatattcctgtgaagaatgtgattttgtcggccacactgaatgcattctacgcgaggtaattaatatttttattacagctttattttttcttataatgatgacgatatccgttgacgaaaatgatatgagctaatactcttcttactcaata

SEQ ID NO: 139849 - DNA, 4608 bp, Arabidopsis thaliana landsberg
aaggaaatggaaagcgcacaaaagcgaagataacaaaaagagtttgaaattcaaaagagaagagcaacacgaagaatcttggaaaattgagatccactatttcacggcgaagaagatgcattcgcctcttcagactcagcaaccggagcagcgatgccggccgatgacctcgacggtgtcggagatcgaggaagttctacccgatgaggactccgatagaacgactcttcttaacggtgaaccgttacgtcgtcgagtttccgggaagtcgccggttgacgaaggacctcgtcggattttccggcagcaatcgttcggtcgcgatatcggccacgcggcagctgaaacgtatctaattactggacttagcttcaagcttcttcgatacctcgggtactgatctcgattgtccctgtttttggatttaggtatattgatgattacgcttagggaggtaattcgtgtagatattagctggctttgccttgctctgcaaagaatccaatgatatataaaagttctctgtcttttattttggaactttactctaattatgaaagttactccatgtgctgttgttttgctcttgtttaacttcttctttttatatttccagttgagcaaggattgatctaattgttaagttttgttcagggtaggctatcgatggatgacaaaattacttgcccttacatgttatgctatgcttcttatgcctggctttcttcaaggtttgatttttttttttttttctttgctgataaataaattcatagaaaggatttttccttttgattaagatgttgttttaattggaaaattagtctttgattcctcgtctcaagtttgtattatcttgtgcagttgcatatagttattttttctcaaagcaagtccggaggagtatagtgtatggagatcaaccaaggaacaggtttgtgtgtgaactgaatagaatcttaccttctcctttcacatcggccttaagtggtatgttgaatgcctgcttttatcacatcacctttgtcttgagattattgatgtatgaacggtgatttggtaggctggatctgtacttgccaagcaacaacgatggcttgaagccggttgtggtttttgtgacgggtggagcttggattattgggtgggttgcacatcagatttacagcattctcttctgcataatgttgaaatttgtttgttttgcaatttctcgtgtcccacttatagaagttttccccttcactgttcttttgttgatgtttgagttacaaaaagaaaaaagtaaagatcatgatgtgctctgtattcttatctcactgactcactcaagtttcatcttcttgtactagctggttgcttgttaataagttcatgtttgctaatcttgtactgatatttaggtacaaagcttggggctcgctcttgggaatgcagctagcagaaagagatatcattgtagcatgccttgactacaggtaaacaaattacacaattcaaaaaactagtcgtcttttatgaatataggaagaactttcatgcatttaccaagcaatccgttctttatggtataggaactttcctcagggaacaattagtgatatggtgactgatgcttctcaaggaatctcatttgtctgcaataacatctctgcatttggaggtgaccccaacaggtttcatctcattggctttgtttttatttaccatttgatcttccaattggtctctcggctattgaactgcatgtatctgcttgtctctctaggatctacctgatggggcaatcagctggtgcccatatagccgcttgtgctctattggaacaagctactaaagaattaaaaggagagagcatctcctggacagtgtcccagataaaagcttattttggattatctggagggtatcttctaagcttttggattcccgttggcttctatgtgctttttggtgtacagcaattgatctgcttatcattttgaacttcaataggtacaatctatacaagttggttgatcacttccataatcggggtctgtatcgctcgattttcctaaggtaaatgcttggttaaccaaatcctaaacgcagtctgatcagatctaatgttcaactccaacttgcagcataatggaaggagaagagtcctttgagaaattctctccggaagtaagactgaaagacccagttgttggaaaagctgcttctcttttacctcctattatacttttccacggatcctcagattattccataccatgcgatgaaaggtatatatgatcatcttcttgaagtgatacattactgatgaaaccttttgggatactaaaaccacctcgtttgcagcaaaacttttacagacgctctgcaagctgttggagcaaaagccgagcttgttttatacagcggaaagacacatactgacttatttcttcaggtaagccacataaatcagtcaacttaccttacattgtgtcacacacacaaacacttagctcagtgtgagtacaataaaactcatgagagtattgtttataggatcccttacgaggaggtaaagacgaactctttgatgacataatctctgtgatacatgcggaggacaatgatgggctgaccaaagactcgttggctcctcccagaaagcgtcttgtaccagagttgttactgaaactggctcgtgagattagccctttctgactgccaagaaaggaaaacaagctttgtttgttgatcctcagtttttacctttgttagttgctgtgtttttaattgcatcagtagaacatcatgtaaataaaaacaaactttgttgctccaccaaatttatttgacccatgtagatttgaacacatgaatatgattacttccacaagtttgaaatctaataaaagctagtaaagataatatcgagttttatcatattctcaaaaaggtgattgagatgtgacaaacacttgatagacttatacatgttttgtaactatgaatatgatggtgatcataagcaaattggacttgtataaacagaccacaggtgatgttgatataactatcgttattcaccttaatttggacccaccatttgcttcaacttgtggctcctaatctctagagactcgtagcgacttggcagattccaattggctccttggatctccaccgttggccaaatcagcttgaccgacttgatgtggaaggaaacaaagttaggacatgccatatctattatctccaacatatcaccaaaaaagacacctagcatcattcgaagataacaaatggttaagagtcataatctttttaacaatgctaaacagtgatcatttaatttttataattgaaatcatgagacgatgagagaaacctgaacagttagaacatggcaaaagttaagaatcaagataaacattaggctaatggtcaagccaaagagctactaaagtttccagctttaccaaaatagtagtagatgatacaaaaatagttagaagttgcacgtttcagaacctaggtaacatgtggatgggtcctatagaagattacataggaagaggtgtttacacttattgaggaagaaagagagaaaaagtagtaactattggtgccattgcaaagatataagaagacaattagtttttttctttctttcacatttcgtgctggttgatgattccaaagctgtaagcatctctgcactggaccccttctcaaaaactcagccagccacaagatgatcactcaacatcaaacccacaaacttctcgccacgtgtccagccctcagaattctatccttcctttccatttccattcaacaactaatatagccttcttagtcccctgctgcctttagatacgatctcactcaccatcaaacaactacaacatctgcggttagtatgttgaaagtagagagtaactgggcacaagcctgtgatacatgccgatcagccgcctgcaccgtgtactgccgggctgattctgcctacttgtgctccagttgtgatgctcaagttcatgctgccaatcgtcttgcttcccgccatgaacgtgttcgagtctgtcaatcatgtgagcgagccccggctgcctttttctgcaaggcagatgctgcatctctatgcacaacctgtgattcagagattcattccgcaaacccacttgctagacgccatcaacgagttccaattctgcccatttctgagtactcttacagttccacggccactaaccattcatgtgagacaacagtgacagatccagagaacagacttgtgcttggtcaagaagaagaggatgaagatgaagcagaggcggcttcatggttgttgcctaattcagggaaaaacagtggtaacaacaatggcttctcgattggggatgagtttctgaaccttgttgattatagttcgagtgataagcaattcacagatcaatccaatcagtatcaactagactgcaacgtacctcagaggagctatggggaagatggagttgttcctcttcaaattgaagtatcaaagggcatgtaccgagagcaacagaactttcagatgagtatcaactgtggctcctcgggagcttttgtcagctatcaatggtt

SEQ ID NO: 139850 - DNA, 1017 bp, Arabidopsis thaliana landsberg; identical to SEQ ID NO: 12907

SEQ ID NO: 139851 - DNA, 1733 bp, Arabidopsis thaliana landsberg
  unsure (1)..(1733): unsure at all n locations
tttgcttacgtatgtacactctacactatatacatgtctcgatctcgtgctgttacatgtctcgctcttataagtcagagtggttatgcatgtaatcatcttgctaaattacgagtatagttattgggatgccgctatcagattttccaaattagccgacgcatacatattcgtcgactaagagccacatatgaatgttgttatccaagtttcaacgaaataagcaaattgctgaaaacaannnnnnnnnnnnnnnnnnnnnnnnnnnnnnnnnntctcccgcttcgaaggcgagcgccttatccattaggccacgcaaacgttcattattaaccagattagaatatactagaacaacggtctaatatataatttacactatgtaacttttctatatatataaaaaattcatagagaataatgtttaataatatgaatatataaaatgaagaatacaaaacattacaccaataacataacaattgtttcttgcgatcataaaaaattaatatgtttattggattgatttatttaatattaactatcataacttttctatatatataaaaaattcatagagaataatgtttaataatatgaatatataaaatgaagaatacaaaacattacaccaataacataacaattgtttcttgcgatcataaaaaattaatatgtttattggattgatttatttaatattaactatcataacttttattttgatagttatcatagaattatttacttacatacaactaaaaagtatagactgaaaaacaaggaaactagtacagtataagttaagaaattaggcaaaaacgttaggaattccttactttaccaatttgtcataatgcatccaacacttatttggttggaccgatcttctttctataagattccctgtcgtcatttcgtatttgatttgatcactcattctctcaaccatttgagtcacccgaagcacatctctttttatctcttcgccaagaaaacaaaaagcatagcctaacagaacagaatctaggtatgcttaagtaaaactcaagtgactttatatttatttagatgagtttcattctaatgggatcttttatttaatgttttggttataatccaacgcagtgagccaaatcaagatggtgacgccaactacaattagaaccgtggatctccgctccgacacggtgactaaaccaacagagtcaatgcgttcagcaatggcaaacgcggaagtagacgacgacgttttgggaaacgatccaacggctctgcgtttggagaaagaggtggctgagatcgctggaaaagaggcggcgatgtttgttccgtcagggacaatggggaatctgataagcgtgttggtccattgtgatgagagagggagtgaagtgattcttggagacgactctcacattcatatatatgaaaacggcggcgtttcaagcctcggtggtgtgcatccgaggacggtgaagaatgaggaagacggtacgatggagattggtgctattgaagctgccgtgaggagtcccaaaggagatctccatcatccggttactaagcttatatgtcttgagaatactcaagcacagtaagtgttagttttatcaagcaaataaaaacaaagcctaattataatttcataatgttttgtgaacatgtgttagctaaagttggtgtagaggtttattttacgtttcttttagaggacttataatagaaaaatg

SEQ ID NO: 139852 - DNA, 1727 bp, Arabidopsis thaliana landsberg
aacaattgatctatccttgcttaaaggtcgggctttactggctgatatgcctcgctctaccattgtacaggttttattgcattaagctttctctgatgttgtagttaaatttgtagattgtgtggagcaaatggtgctaaacatgcgaaagaaggatgagattgtaccatctcttcgggctataatcaatcaatttgatgaagcgaaccaaagaccatctgatacgttttcttgtggtcagcagacgaccgagtcatttgatatatcacatgctaatgatgctagctatgccgacgatgatgaaggatatgagaactttggaacttcttttgattatgagggtcaatccggtgatgttgatgaaaactttggccccaatgatgcagaaccaacatattcaaattttcatgaggttattaccatcgctcttctaatgatcttttttcttaatgaattttatttggtactgaaaacctgatgttttcactttgcaggaagatgaaccagcctccctgcaagacatggattcagatgacagactggagaatgttgatgactatctctttttgtcgttgggaatctcatctaagcaaaattcttgggcaggtcctgatcactggaagtatcgaaaaacaaaaggtatgcacttatatctctgatttcaagaaataacataagtcctcttagttatcgattttcttgtgagggttaacattctctgaactctttgcaggtccagatgttcaatctgcttcagaaaacaaatcctcaccaccagcgaagaaaaccaggaaaaagaagcaagcagagcctgaactagattttgcaaaagctttggaggaagaaatgcctgatatttttgcccctccaaaaaacccaaagactttacttctcccagcaagtagaaccccttgtcaaacgaaacttccagaggattgccattatcaacctgagaatctaataaagctatttctactaccgaatgtgatggtatggcttgccaaacacagacccagtcactactttgctattgtttttctgtgtttttttatcttttcttttccattttgtgtcatcttttctgaatttactctcctgaatgataacagtgccttgggaggaggagaagaaaaaactcaggtaacacttccagtcattaagaaaatcatcacgtgttggtatccgtggcggtttatgaggcgtataacagtgtctttgttttctttactgatattaaattgccgtaacaaaggaaatggtttcaacaaattaccactaaatctgtattgggtttttgaaaaaaaatacttatgttacacttggtttgttatgtgcatattccaggtgaaacttcaagacagcagcgtgatgaccatgaacatggggaatcctggggaaatgataatgtgtatgatgatgatgatggcccattcgatgataatggaaatgatcaaagtgatgcagaggatacaaacacattaatctctcagccacgccaggtatgtatagattgatctgcatatggttacagcattacaaatcatttcaaaaggctgtagctatctatcttaggaatgaaacattgttgtaattatcctacacaactcatgctttaggtcaacaaaattgatgtccaatacgataaagcttcaaaacaagttgatgtgcaagtgctaaaggaaactctttgggagtgtcttcaggaatctcatcaacctccaattcag

SEQ ID NO: 139853 - DNA, 1923 bp, Arabidopsis thaliana landsberg
gaagcttccaacttcttagctctggaattttgcccaaattgatccatgttaagatattagtttcttatttcttatagatttgtgttatggatgggattcaaagatcatagggggatctcactttgtaataaaacatgatcctaaaatatgtcatattatggtaagtgcctaaaaaattagaagagtaaaacacttgaactatgtgaatgtgtgaagataacattctaggttatgttgctggacatatgtttgatgctgattatattctccatcaagtaaacaaaattgataccactaattttagtctttttagacacataatgaattaatgatcccatcttgttgcaataaagacacaactagtctgaaaaaagaagaaagaggacaagacatgtgaacacattacagatctgtttaaatttgtttgtgcttattaaaccaagaaatttaactgttttctgtactgttccaacaacatttcaccaggattattactcatccatgcaaaaaacttggggaaaaaaaactaataatgacattggattcgatatttctctttttcccattgtaatagtagtaatttataaactcagatctctgttttgactagcgagtctcctacatgaaaaaagcttatcttacacttatttcgctaagtgtcactacctccaagattctaaaaccgtaacccacaaatctcgtctttaagacaccattaaagctcaagaatctctgtgtgagagacttcaagaacttggatccgagccatatccaagaagaaaaatggcgggattcaccatgagcttgaacttgcttctactagtagcaatggtagctacaaacatcctctcactctaccacctctcctccaccacaaatttcttccaatccaccgtcaaatcctcacaatcctctgttcccacagttcccgatcacctcctccgtcagctccacactatccgcgccgctattaaccacctcacaactcaccaaccagacaaatcaacttcaacctcgacctcacgcgccgccgtctcctcctcctcctcctccaccgcgcctaaagagcttttaatctactctaagctctcacctatagcttcagcttgtcataactaccctgaccttctccatgagtatatgaactacactcctttctctctttgtccttctgacaccgatctcgtcgagaaactcatcctccgtggctgccatccacttcctcgccgtcgttgcttctcacgaacgccgcgaaatccttcagattcgaaacctgaatctaatgttatatggtcttactactcttgcaagagctttgattgtttgattactaagttctctgatctagggtttgatctctccttagagaaatccaaatctcagttctctgcttacaaatccgagcttgatttaccgatctcgcagcttttccagatcgctaaatctgctaattctgttctccgtcttggtatcgatgtcggtggtggtactggatctttcgctgcggctatgaaggctcgtaatgttacggttttgaccacgacgatgaattttaatgcgccgtatagtgaagctgtggcgatgagaggacttgtgccgcttcatgtgccgttacagcaacggcttccggtgtttgatggtgttgtggatttggttaggtgtggaagagcggtgaatcggtggattccggtgacggttatggaatttttcttctttgatttggataggattcttcgtggtggtggttatctttggttggatcggttctttagtaaaaaagttgatcttgaaaatgtttatgcaccgatgatcgggaaattggggtataagaaggtgaaatgggcggtggctaacaaagcggattcgaaacatggtgaagttttcttgacggctttgcttcaaaaacctgttgcaagatgatga

SEQ ID NO: 139854 - DNA, 338 bp, Arabidopsis thaliana landsberg
tgaactttccaagagttgaagaaaatcacagaaagccttagcacagagaagagagattgaagaagtcatggatgtttcaggaagcttgaattgcgttgttgtggcggtagatggaagcgaggtgagtatggaagctctgaggtgggctctagacaacctcaagctctcttcgtcttcttccgattcatcattcgtcgtgctccacgtccagccgtcgccttctgtagccgccggcgtgagtcccggcaccatacctttcggtggtcccagttgagtctcgttactactaattttgtgattgtttaatgtatatatgatctcgaccatgtggtgtttga

SEQ ID NO: 139855 - DNA, 1685 bp, Arabidopsis thaliana landsberg
cagcgagatccacatgaggatttgtttggaaggaggttatcatgtgcttgatgagtctacacattagggtagtggcctaataccaactgcaaagcaactgtggaagcctaacatcggtgtgcttgagctaggggtcttaaatgcgaccggtttaatgcccatgaaagctaaagaaggtggtaggggaaccacggacgcgtattgtgtggcaaagtatgggcagaaatggatcagaactcggacaattattgacagctttaccccaagatggaacgagcaatatacttgggaggtttttgatccgtgtactgtagtcacagttggtgtgttcgataactgccatctacacggtggtgacaaaaacaacggaggaggaaaagattcaagacttggaaaggtgaggataaggctctctactctcaaggctgatcgagtcatcacacgttcatatcctcttttggtgctacatcctagtggagtcaagaaaatgggagagattcacttagcggtgaggtttacttgctcttcattgctcaacatgatgtatatgtattctatgcctctcttacctaagatgcactacctccatcccctcacggttagccagctcgataacttaaggcatcaagcaactcagattgtgtcgacaaggctaacacgagcagagccgcctttgaggaaagaagttgttgagtatatgcttgatgtgggatctcacatgtggagtatgcgtagaagcaaggcgaatttcttcaggataatgggagtcttgagtgggataatcgctgtagggaaatggtttgaacagatctgcgtatggaaaaatccgataacaacggttttaatccacattctcttcattatccttgttatctaccccgagctcatcttgcccaccattttcctctacctcttcttgattggagtttggtactatcgctggaggccgagacatcctccacacatggacacacgtctctcacacgctgactcagcacaccctgatgagctcgacgaggagtttgacactttccctacttcccgaccatcagacatcgtcaggatgagatatgaccgactcagaagcattgctggtaggattcaaacagttgttggtgatcttgcaactcaaggagagagatttcagtcgttgctaagctggcgtgacccgcgtgccactgctctcttcgtcttgttctgtctgatagctgcagtgattttatatataactcccttccaggttgtggcttttgccattggcttgtatgtgcttagacacccgaggctcaggtacaagctcccatcagttccacttaacttcttcaggaggcttccagcaagaactgattgcatgctctgagttacttaagatttctccatttcaagaaagactcctctgttctagtttgttatcgttttgaagtccttacctcttctttgtgatgttggatgatcatgtttttttctgtttgacattatttatgtttatgtccttttgaaaactttctttggaaagtggtaactagtaagataagtttgtgtttttggattctcttctgtttagcctctctctctctctctctctctctttaagtcgaggagatgccaagaggaagaagataaatgcggaaagtatattttataatgtaaccaaaatttcagtaaaccgtaccaaacctacttaa

SEQ ID NO: 139856 - DNA, 796 bp, Arabidopsis thaliana landsberg
cacactttggttcatcaattgcttcaaaagacactcaactaactgactcaaaagaaaatcaaataagcccccaaaatattttgagaatcatgctaaagatggagattaacggtggggtcgctacacctactgcttccgccgtcgccaaggtgacagaaaccaccactcccgttaactctccttctcccacttcttcacctccgccgcctccttcgccgcaacagccgccacaaccaccggttgtactaagcccttgtgcggcttgcaagattttgcggcggcggtgcgccgataaatgtgttttggcaccgtactttcctcctacggacccggcgaagttcacaatcgctcaccgtgtctttggagctagcaacattattaagttcttgcaggtactaactttcttcttcttctttctctatccgttacacgtgtgtatttcatatgtctatgacaatatgtcattacccacgtgtgtacatgagtagatatttaacatcaaaattataaacgaggacaatttaacacaaaatatcgcttacttacactataaaagaatttaaacaacagaaaatatttagtaatgttttgcagtaattaataccaaggatttataaggatatctaatttaatagatattaagagaatgatgtttttgttctttgtattaaaataatatattttgaaaattttatatggaaaaaaatgaaatctggtttgcataatgtgaaagggaagttaaagtggttaaaagtctagatgctgcccaataatgggttcataactcatgtgagcg

SEQ ID NO: 139857 - DNA, 900 bp, Arabidopsis thaliana landsberg; identical to SEQ ID NO: 49659

SEQ ID NO: 139858 - DNA, 2269 bp, Arabidopsis thaliana landsberg
atggattcctctctgctctcggcggctacggccgataccttcaacggcaatgcggcggatcaaattcctcctccgttacagcctccgggaacggatatgactggaatttccttcagggatcagctctggatcaattcataccctcttgatcgtaactacatcttcgattacttcgctttgtctcctttctacgatacaacttgcaacaatgagattcttcggagaagatccattcaccctctcgatctctctcacctctcgtaagctcctcctcactgctctacagatagggttatgttgaaactcataaaggtttcaactttaggtcgaattagggtttggtctcacctgggatactgttagagaaatggagatagatttaggtggagaatttagtgacaatgtttgattgaaaccattgtgattatattatgtaggaagatgacaggtctagaatatatgttaactgatgctactgaaccaaacctgttcgtctttcgtaagcaaaagagagatggtcctgagaaagtcacaccgatgctaacatattatatcttggatggttctatttaccaagctcctcagctttgtagtgtcttcgcagctcgagttgtaagtttcttcctcttttgatttgtgtgttgctgatgatagttgtctgttttagtttctgaaacgttttgttttcttctctttctcattttgtatgtttgaattagagtcggactatttataatatatccaaggctttcactgatgctgcatcgaaattggagaccattagacaaggtaaggtttcgttctcttccaaaagatcgatggctttgtatgaaactggacgaaatatatatgttgtttgtatgaactatttgtagacttgcaagtgtgcttagttgcaatagtcttaagtttatcagttaacttaggaagctactttttgttgattttcaagctcatggccaatggtgaacaagtttatggctttaacaagttcttgtgtaacagttgccctttgctgcaacttgaggtagataaattacttcatcagtattgtgattttttatctatatgttctagttgatactgaaaaccagaacgaacctgctgagtcgaagcctgctagtgagacagttgatctaaaggaaatgaagcgagtcgatgtcattcttacctcattatatcgcaaggtacatttgtatttgtgaaaaaatctacttactgtatcactaaagatctcttgttggcatgacgaatgttactgactctacttcttatacttctcttctgattgtgagacttgcttttttgtgttgcgttgtgcagttagcgccagcacctccacccccaccctttcctgaaggttatgttagccaagaagcattaggagaaaaggaagagcttggaacacagggaggagagtcacaaccgcctcaagttgatccaattatcgatcaaggtcctgctaaaagaatgaagttctaagctcatcaagattgtttcttcatctatgcttgtacagaatttttaggtgctagcaaaggctcttctatcatcgtttaatatgaactcgttacacaaagtcatctcatgcaaactacctcaaggtcaactaatcgcaatagttgcaacatgtatttattgcaatatctatcaggtagatggtgatatcagaagatagtgtatatcaattaccgtgtgaaatcaaaatatagctgcatcatcaaaactaatggcttattttggtcaatagtaactagatttaatctcttaaatattttattgctaagtcctcttcttgaccaaacgtcccggctatataatcatcctctcaccatggttccaagtttcaacagcaaattggtttagttcaataagattttcacattcacacatcttaaagctgcaatgaaaaccgggtcagcaaaatccaacatcctcctatatgtttttgttctctcacttgtcttgtctccaatacttccatgtcaagccgctagtgtgcttctaggaggtaagctagttatctatgaatatcctccactatactgtatgtatgactctctctctctttcagttttttagagggattaatgattttatttttcactgaaaaggtggagggcgtaagctgatggcgccgtcaccaccaattcgcatgtgtccacagtgtgtatgttgtgcaccggctccacctgattcttgctgcccatgtcgttgtccaggcggcgcctgaagactgacgtttgctctcaatcaaatgggttatttt

SEQ ID NO: 139859 - DNA, 964 bp, Arabidopsis thaliana landsberg
ttcctttctgttttagaaaagttgataaagacttgtgattcacttagttaatattcatattgttggtttgttggctctatacagaaccaaagaggaggaagagtgaaactccaccctatcgtctcacctatctcagaattcgaacatgctgaaaaaggagatgctttatatggtaaaactttaagcaaatatactatcttaatcctaaaataacaacttttctttttttttaaagatacagatatttattagtttactaatctttgttttcagcaatggagttggctctgtctctagagaaactcactaatgagaagcttctaaacgttcacaaagtaagttccctaacttatccatttgatcatcaaagattaaacttatagtcattttcctaatactaactaacacgtacttttggccaacaaaacaggtggcctcagagaacaatgatccccagttagctgatttcgttgagagtgaatttctgggagagcaggtaaaagttcttttgcctttgttcggattacaactagtgacttgtataatctgtacatgttctgactcagaatatattatggactatttctagattgaagcaatcaagaagatctcagactacatcacccagctaaggatgatcggcaaaggccacggtacgaatcaaaaccctatattgagatagtgttctaagacttgaatggtatttctaaaagcttatttacatttgttctgtctttgcaggagtttggcatttcgaccagatgcttctgaactagacttggacctctataagttcactttcagatgaccaatgttggggttaaaacagaagaacccgaagattctgtaaaagctttagattgaacattatggactaataagattgtagtagtaagctttgtgttcaagatggtttttgtaataacttcgtaagcttaatcaatgaagtttttgttttactata

SEQ ID NO: 139860 - DNA, 354 bp, Arabidopsis thaliana landsberg
atggtgagcccatttagatctccatgttcttcacccaaaaaatcaagaaaagcaagcaagaacccttattcaaatcgtggacttgataaattctctgagcttctctccgagctagacgagaagaggcaaagcatctactcgaagaagctcgattccggtggcccgcctcttgttcgatttgtgttcacaagctccggtgagtgtgtccccgttgtgatcagatcatcttatcttcacaagaagaacaagaagacgaaagatgttgtagctgataaagtcaaaacagaagtcaaggaagcaaaaacagaggaaatcaagaacacagagcctgaaacagagcaaaaacagagctgg

SEQ ID NO: 139861 - DNA, 618 bp, Arabidopsis thaliana landsberg; identical to SEQ ID NO: 43717

SEQ ID NO: 139862 - DNA, 1192 bp, Arabidopsis thaliana landsberg
cttcttcttcttataatcgtcttctttccggtgggtttgattgtgtgtctcatcatcacacagcattgagtactgtccggacccgcagaggggaataagggaagcgtacagggttctcaagatcggtggcaaagcgtgtctcatcggccctgtctacccaaccttctggctctctcgcttcttttctgatgtctggatgctcttccccaaggaggaagagtacattgagtggttcaagaatgccggtttcaaggacgttcagctcaagaggattggccccaagtggtaccgtggtgttcgcaggcacggccttatcatgggatgttctgtcactggtgttaaacctgcctccggtgactctcctctccaggtcttttacctcccacttcaccttttttactttcttctctctttgatacactaaacttatcactcaaatgctgcagcttggtccaaaggaagaggacgtagagaagcctgtcaacaaccccttctccttcttgggacgcttcctcctgggaactctagcagctgcctggtttgtgttaatccctatctacatgtggatcaaggatcagatcgttcccaaagaccaacccatctgatccttctcttctaggacatgatcattgtatcattgtaaacccctcttgtggtaaagaaagattcgagtcctatctatgaacatgcggaatatcattaaccttctttctttacatgtattactagattttcatgttgagatatctatgctacttgttcgataaattttctacaaacttcgattcccaaactcaattctgccaacatatatcagtctcaatttgatcaatgttccacgatctgtaataatgcaactaaggtagagtattatatatccgaccaacataaaaaatatcattacctattattgcttgcactaaaacacggaaattaaaacaaaaactcgcaagtcagcagagaaaccaatggatgagagtgaccatcaatccgcatagctaaccagacctctctttcctggtggagaaggtgagtgagaagggctgagtgattctgcaggagaggtgcgtcctcctctgatgggggatctctgtggcccgagacgggatttcaggtcttggctaattggctgcctctttctagggctctggctacggctacgatgcctcggactctggctcctgcttccgtc

SEQ ID NO: 139863 - DNA, 1887 bp, Arabidopsis thaliana landsberg
agcatgtcttgtcaaagggggaggccgcgaggacacttagagacaaagagcagctcgtcagctcacccgtctgaagtatctcgccagccggcccgtctcaagcagctcgtcagctcacccgtctgaagcatctcgtcagccggtccgtctcaagtagctcatcagctcgcccgtctcaagcagctcgtcagctcacccgtccgaagtatctcgccagccggcccgttaaattttcccgatggagattcttccgattccggcggagagtttcaaggtaggattcatcggagctggtaaaatggcggagagtatagctagaggtgtggttgcttccggtgtgcttcctcctaatcgtatatgcaccgccgttcactcaaatctcaatcgccgtgatgtcttcgaatcctttggcgtcaatgtcttctccactagcgaagaagtaagttctttttcaatgtcttgttgttgttgttgtggtgatgaactaaattgagattgacgatcttcaaaaaaatgacaggttgttaaagaaagcgatgttgtcatattctctgtgaaacctcaagttggtatatatatttcttacctatccattgattatatgattgattcatcaatgtaattttgtgttgacttaaagttgtacctttcatatgatgtagttaagaaggctgtcacagaattaaagtcgaagctttcaaagaataagattctggtttctgttgcagctggaatcaagttgaatgatttacaggttttgcatcatttatactcctatacatttgccatttaagttgtcactatccatggtgttgcattgtgagtttctagagctcaatttggttaaaaaacataaaggtctctcctttttgtttttaggaatggtctggtcaagatcgattcataagggtgatgcctaatacacctgccgctgttggtgaggcagcttcaggtatagtttatcagagtgttcgcatttgtgatatttctgaattttgtttgtgatttctgtttctctctgaagctgtcaaatgcttacatttgccaattatgttgtgtgtatatagttatgagccttggcacaggagcaacggaagaggatggagcaattgttgctatgttgtttggcgcggtggggaagatattgaaagctgatgagaaaatgtttgatgctgtcactggtctcaggtacaggaaaacactgtagctgctgaaatgcttgagttgttcaagtcactaatcaagaaaatttcaaaccttttacagtggaagtggaccagcatacatatttttagcaattgaagctttagccgatggaggagtagctgctggtttaccccgagagcttgcattgagtttagcttcacagaccgtcagtgaacatctacatcgcttctttaatctgctttattatggtattgaataccgaaactagaaagagaaccctaagctttgaggttttttgtttcctattacaggttcttggagctgcaacgatggttagcaaaactgggaagcatccaggtgtgttgaaagatgatgttacctcacctggcggcactacaatagccggagttcatgaactagagaaaggctctttccgggcaacacttatgaatgcagttgttgctgcagctaaacgaagccgcgagctctcacagagctaaatgatacatatgtagttgctgctattgtttcacctcacagattaatcaaaataagggttatgggccttatggcattgcttgtttttaggcgagagttttatcccacttgtcttcgatggtagaggtgaagattatttatctagactatgatgtattagttcagacagaactcagatacttttctataattcttaatctaataaaaatcactttcagtttt

SEQ ID NO: 139864 - DNA, 2382 bp, Arabidopsis thaliana landsberg; identical to SEQ ID NO: 29266

SEQ ID NO: 139865 - DNA, 861 bp, Arabidopsis thaliana landsberg; identical to SEQ ID NO: 14847
  unsure (1)..(861): unsure at all n locations

SEQ ID NO: 139866 - DNA, 2235 bp, Arabidopsis thaliana landsberg
gtgataattttcttgacagacctgaggcatctttatgcgggctcagtcacagaaacataaatcagcttaaggggggctatagcttgctctgcatgccctaactatgtatttcatactacatgggcgatgagaattgatgtatgggatggtgtccaattggaagggacccctgagatcacagaagacatttcaccattcaaggtggtgggtgataacttgatatgtcattttagccatgaagagcatcctttaaggctccacaaggacgacgtcattcatgatgagggcatacgatgtgcagcatgtattcatccagttggatttggctccatctacgtttgtgaagaagaggaatgttgctttgttctccatgaaaagtgtgctaatcttcctatgaagaaaagacttgtctttggcaccagaccatatacattaaagaaaggtaccagagttatagactgcaagctgtgtggaatgttatcttatggtttcgcatacatcacccaagactgctgtgatgtagatgtacattgtggttcccttaatgagccgctctaccatggtggctatgaatatcccttatattttgctaaaaaagagcatcaccgttgcgatggatgccaaaagattatagatgagcatatgcttcgttgtaattcttttgactttgatttgtgtttgtattgtgctactttgccagaagagatttggcatacgaacgatgggcaccctctcactttatgttatggggaaaaggaaaaagcgagcggtaaacattggtgcgacatttgtgagaaataattagatccaagtatatggttctatacatgttatgaatgtggagtccccttgcatgctcattgtgtactagaagatttctcacgtctcatgccaggatgcagttaccactttgggaacaaacaaatcaagtttgaggtggttcctaacaatcacaacactcggccattatgcatccagtgtcactctcgatgcaaggtctccgtcatcctaaaggagcataatgaagacaatcggtatatatgttcccgttcatgtttatcgagttatttaggtgaagaaatttgaacttatgtttactgataatgagcggtttcgttctatcatggttgtattatttcattagcttttgtttctcttttatttgcaagaactgatatgtaatagagagtgatttttgttttctaatggtaatgctggttattatatattatattgatagtcacatttttgttttctaatggtaatgctggttattatattttatactgatgaagtcacatatacttttatatattatactgtgagaaatgtctgccaaattctacatgcttcggcagaatcatccattatgtgataaattgttatgtagaatgaagactatctccataagaaaactctgaaccgtccctaaaccacttcaatcacaattcccaaattactgtgcttatatttggaaaaccaagaacacaacttctcgaaatttagcaagagaccatgttcttaatttcttttctgtgatgtttcagcgtgcagtcttcaatatgacaaacataagcgatttgcatgacgatttattgctgaagattttgtcattccttccgacaaaagacgttttggcgactgactgttttgtcaaaaacatggtgctgtcttaggaaacattggagacatcatgttgttgattatgtagatatttgtggtgaatgctctgaaagtggatgcttactcaatataaactcgacgtggaacctaaagatcctacgctgaagaaatttgattctctgctgtcaaaactcatagacaaatcgtgtattgagtgcaaacgaaaaattcatacacacaaaaaaacgactattttcatcttagattttggacccccaaatcaacatgctcttatatggaccaagttggaagagaagtaggagatgcagcttgagattgtgcttatgcacaggactctctcaaacttttgtctttcgcttatctgagttagttttgtggtttgatagttaatatcaactctagtttctttcttctccatctttggagtttgccaatttgcctttttgtcattgtcatgaatttgccttttttgccattttcatccttgtgatttgatatgaataaaggttacaatgctaaggatgatgtcattccacaactacttacctttttgcgaacaataaatatcacaaatctcatgagaccccaaac

SEQ ID NO: 139867 - DNA, 998 bp, Arabidopsis thaliana landsberg
atgcatgaatatggtaaaggtggcgtaattaaggagtaaggacccagtaatatagtggatattcgagaaaaacttttctacgtgaacaaaaataacctacgtgtaagttatcctctctataaagccctcatcaagtctctgagtccttcaacgactcataactcatagctatatcttgtcttaaaaagaagaagcaaagagaattagtggagtacgataagcagagaagtatgttaaaggtggtgttgttgatgatgataatgatgttggcgtcacagtccgaggctcagctgaaccgtgacttttacaaggaaagctgtccatcattgttccttgtcgtgagacgagtcgtgaaacgggccgtggccagagagcctcgcatgggtgcttctcttcttcgtttgttcttccatgattgttttgtcaatgtaaggcactttttttcaatgcaaaaacgaagcatgctttgtatgttcccatgaattactcctaaaacttagtaaatgctaagcatatgatttgataggggtgtgacggatccttactgttggatgacacaccgtcttttttgggagagaaaacctcaggacccagcaataactctgtgagggggttcgaagtgatcgacaaaatcaagtttaaggttgagaaaatgtgcccgggcatcgtctcatgcgcagacattctagccatcactgctcgggactccgttctcctcgttagcacctctacccttttactctttgtcatgtcttacatagatgcatgtaataattgttgaatggttaagtggcttagtgattcggattcatttattttacctagctagaaccagagttcgaatcttctagtaattaatcaattgtcccttttcaaaacttaaaaagaagggtaaaattgtagtgcaacttgcatctttttccttctgattttcttgtaaaacattcaaaatctaaatcattctcacatacatctagccaaaatagcatagatctacc

SEQ ID NO: 139868 - DNA, 741 bp, Arabidopsis thaliana landsberg; identical to SEQ ID NO: 28307

SEQ ID NO: 139869 - DNA, 917 bp, Arabidopsis thaliana landsberg
ttagtatagttggtgctgttacatgggttggtacatcttccatgtagatgcaattacaagtactccaaaggggggggatcagtttctctgtaaactatatacaccatagacacttgagtcttgttaggtttggaggagcttcactgtctcaaaaaaatagaacggtcatgcttgaactgttgaataaggtggtaaataaagaaatatatatcgttgcgaataccagcttgaagcgttgtgagatgtctttgagatgttctgtcaacaacaatccttgtcatcatgttgaagaagctcatgatttgctatatctttcttctaacaactgttttttgcagataccaacaacttctctgtgtcggttgcccttgcagcaaactttacattcgtggctcgggatgctcagacaggcaagtcaactccaattaaccaagtcgtgccagaaaactgagcatgaaaaatttctgtggaaagaggcagaagagaggaacaaactacgaaaacaaaagagagcacagggtaaagaagagcatgagaagttgaaggacttagagaggctaaatgagttattagcagaaggacgagtattcctggacatgccagctcttgcagatcggaacagcatcctaattaaggatacttcccatgaaaactcattgatctgccagccacagcaacgaaatattcatggcagaatttttggaggcttcttgatgcgcaaagcttttgagttggctttctccaatgcttacaccttcgctggggtttcaccacgttttctcgaagttgatcgcgtcgattttatcaaaccagtgagttcatttctttctcatcttcatctagttatggtgtgatgtgaaaagaaaaaagacagtgagatatatgatagctttagaagaaagcgattaaggggctct

SEQ ID NO: 139870 - DNA, 688 bp, Arabidopsis thaliana landsberg; identical to SEQ ID NO: 49308
  unsure (1)..(688): unsure at all n locations

SEQ ID NO: 139871 - DNA, 1799 bp, Arabidopsis thaliana landsberg
  unsure (1)..(1799): unsure at all n locations
gatatttattcaaactgggtatcctctagacttgccgtctgggactcttgggagttattgcatctatgagtaccacatggtacggtagatataatcactggttacttttatcaagttgttaggttgtttataattgtagcatatcgtaatttgagctaatatttgnnnnnnnnnnnnnnnnnncttgctcaatgggatttgcgactggtggaagaacattctttttgtggggaggatgtatgatggtatgtatataacatataacatggtatatagaatgtttgttttgtattccctgctacagctaattttggtttatgtttccaactatttgtagatgcatgctgatgatttcagacaagatcggtacggtgttgtctctggcttacgtgatggtggatattcagatgatatgacacttgcctctctagcaggtaacatttgcttcaaatttccctccaacttatagttgacagttttttcatgtttccacttaccttcttctttccaggtgctcataagaggctcattacatctcctcctgttgctgttttccctcaccctctcgcgagtgatctaagttttggacggtacattctcatatctacttgtttgaaacataagatactgaatatttcagatgcttaacaatttctattcttttttgttttatagatactggaactacttgagaaaacaaacctttgtgctagaatcatacatatcgaaagttaactggataatgaacaaggctttgtttgctgtccattgttatctttcatggggttttgttgcaccatatgttatggctatcattcacatcacatcagctttaagaatctacatcaagggctatcatcaacttgaagacacgacctctgcttctggtggtgagcatacttttcttcttatttaggtgggttatgtgtttaagataccagaaatttgttctagtgccacgatgattgctcgtgtgttgggggatcttagaactgttgtgtagaagcataatgatttgtcatcttcaacttaaattgtaggattgtctgtttttcttatgctacatattgacccgaaggatgaggttctatgtaggtatgatgcttgttataacgttggcgatctgcaccttcatcgagcttctgtcaatgtggaatttgacgagacgagaagttcagctatgcaatatgttatcccctgaggctccccgtctctctcttgcaacttacaactggggacttgtatgtgctttcaacctccttttattaattagaattagattaaactcttgagtaatagtgtcgaaagttatggggatgatagatatggaggtaacatattcgttttggttggggggaaatttacaggtttttgtagcaatgcttgtagacaacttcctatatccgatatcagctttccggtctcatttttctcaatccataaactggtctggaatcagataccacttgaaagatggaaagatattcaaggtaaatcatttgtgtctccaaatagttttctcgttatcatttcacttaatgttcacctagagaactgtgtaatgtatgtaattgattgcaatgtgatatcagattgagagacgaaaggatatgggaccaacaaagactgatttaggaggcaaacatttgtatggtaagaaaggagctcctcagaaagcttcattcttaagctcattgggaagaaatttggctcactggcgacaaccgaaaaaattcgatgtttaaaaaaaccgtatttatacagtagaagaaagctctaaagtcgatttttgcccggga

SEQ ID NO: 139872 - DNA, 552 bp, Arabidopsis thaliana landsberg
cctctgtatcttttgtgtgtagagtttgcagcaaattggtggtagaacggtgaaagtgaacttcccggaggtgccgattggcggtgagaacgaagtaatgagaaccaaaatccgtgataataaccggagttatgttgatagtcctcataaggtatatgcaggaaaccttggttggaatctaacctcacaaggtttaaaggatgcatttggtgatcaacctggtgtgcttggtgctaaagttatctatgaaagaaatactgggaggtctagggggtttggtttcatctcgttcgagtcagcggaaaatgttcagtctgctttggctacaatgaatggcgtggtaaggcttcttctcccttcttgtttggttgggtggtttgggttttgagactcactagttttggtttttaggaagttgaaggacgagcgctgaggctaaatttggcttcagagagagagaaacccactgtgtctcctccttccgtagaagaaggagaaaccgaggaggccagtctagagagtaacgaggtgctttcgaatgttagtgcatga

SEQ ID NO: 139873 - DNA, 1193 bp, Arabidopsis thaliana landsberg
  unsure (1)..(1193): unsure at all n locations
agcttttgaagatcaagaggtgaacattcggagtgatgaatcggccaaaggttcagcgtcgtgttggaaagtatgaggttggaaagacgcttggacaaggcacttttgcgaaagttcggtgtgctgttaatactgagacaggagaacgcgtggctctcaaaatacttgataaggagaaggttcttaagcataagatggctgaacaggtaactctctttcctaataagataatatactagatgcatcttcagtccataagtatgatgtgtgtctttcctgattgtttttacagataaggagagaaatttgtactatgaagctgataaaccatccaaatgtagtgcggctgtatgaggtatatctccatttttctatttgtgtctctatttttctttggcttgctttagagctctttgtatgtgaagccaatgtgctgaagctaacttttaaggaaatgattgataccgttccaggttttggcgagcaagactaagatatatattgttctagagttcggcactggtggagagctttttgacaaaattgtgagttttccttaatccctcccaatggatttataattgttacttgatccatctattgttgtttgaacatgtatgctaagctctggtcaatcttgatagatgttcctgtttcttacaattgaaacgttctcttatctctgatgtagatttaacctttgtagatttaacctttgcattatgtgtaaacttgtgaaggtacatgatgggcgcttgaaagaagagannnnnnnnnnnnnnnnnnnnnagcttattaatgcagttgattactgccatagcaggggagtgtaccaccgggacttaaaggtatgatattttttggtttatgcccaagtttgcagtatgtttctttaatgtgcagataattgatacttacaatttcactgcagccggaaaacttgcttctagatgctcaaggaaatctgaaagtctctgattttggattgagtgcgttgtcccgacaagtcagggtaatcactgagtcttatttttctttcttagcatccttttgtttacctgaattctcactgatttgtccttgtcctattctaatgaagaaacctgtagttcaacgacgatgtgtctcattgactgtttatacatatatttaataagctctgaatactgaccattctagattctcagcttatg

SEQ ID NO: 139874 - DNA, 1310 bp, Arabidopsis thaliana landsberg
ctcttgacttgaactgtagctttatcttcaaatatgtgattcaaaactctctcttcgcattgtttgtttagtgaactgcctgagttcttgggtggtaagcgcacctgcgcagacaaaggtggatgtatgcgttcagacaaaggtccatggaacgaccctgagatcttcaaggtagttctatagaactaactaccttaagaaatccttgatcaaaaacattatattacaatgtaacttgggattaatatgtaaactatttatacacagttggttcagaacggtgaaggtagatgcctgcgaaggagcttgtcagggatcgaggaaaagacaatctctgagtataacaacgaaacaaaggtaagaagcaaagatcttgaatgtttttctctgaaatttggttcagtaaaatctaatcttttgagaacttttagaagaaatgcgaaccagaagagactcacaagcaatctgctgcggagatggagaagaagttcatcgacaagaatgtggatgctgcagcggctgctgattggcctacaaagcttaacaaggctgaaaaaaaccctaccgaccttaaaggttagtattctcgtcaaccaaaccgggcttgcttgtgtataagtttcttactccgtgaaactctatattcagatgtgtactcagctgtgaatccgttggagaggaaagggtacttatatggcagcgtcatggcattgctaatggggatagtgggagtgatgaggctaaccaagaacatgccaaggaggctcaccgaggcaaatgtttatagccgtgaaggcagcgccgtctaccaggacggagtgactgttatgtcgaagcaggagtatattgcgatggtgaagaagataacagatcttgaggagaaatgtaagtccatggaagctcaggctgcgttttatatggagagggagaagactctagacgctgcacttcgtcgtattgaccagctcgagcttcagttgtctgaaaccaacaaggtaaagcttttcttctctctcgctagtctcttgctctgtttgctctgttttgtgattgctctgttttcaaaaacttaggcactagacgagacaatgacgaggcaacatgagataatggctttcatcgagaagaaaaagaagaagaagcggaaggttagaaattcacataaaacaaaacacctaagactgattactgattactttattgcttgtagtttgctatattcgaaataatatctctactttttttcttgcattttcagttcttattattctagaagactgcatcagaggctaagaagcctggaaaataaa

SEQ ID NO: 139875 - DNA, 2305 bp, Arabidopsis thaliana landsberg; identical to SEQ ID NO: 66084

SEQ ID NO: 139876 - DNA, 1709 bp, Arabidopsis thaliana landsberg; identical to SEQ ID NO: 10783

SEQ ID NO: 139877 - DNA, 1345 bp, Arabidopsis thaliana landsberg
  unsure (1)..(1345): unsure at all n locations
ctaaaacatcaccctcgttttatattagcctactgtaatatcattgagttttgatggattatgcatgtatttgcaggnttgtttgagaaaaaactgatgtgttaattaggaaatcatataaggtttgtttatgtgattgtcttttgagttgagcatgaatcatcttcttcgacgatcacaagtcggtagcttgttgaggatttttccttgtaggttttccatattgcgcttccccaaaactgtttctttgccgtttggagagcaagagtgaggaagatttgctccgggagcaggagcgcaaaagaaggatagaaaaactacggaaatttatgcggccccggacagaactaagaagcatttatcagcgcgagaaggacggtgaaaagatggaatccgaaggagtaccgattcacaagatgttagcttcttacatatatgtatttgacctaaatggaattgaaaagtatttgaacaagttagaggagaaaagaccaaagggatttgctttagatatgctgcgtaagtcagagccgttactggttactaatgagtattacaatatcctcggaccatttagagtctttcggattctcagggaaatgtataagcgtttcggagaaaaggaagaccttacgccgtttgtggaacttagctaaggacatgaaagtgtctaaggacatcaatgaatatagttgcatgattctggcgttgtggttgaaagatgatatcgaaggggctcacgaacttcttgaagagtgggataccggagagcatcatctttccaaagtcaagctaaacgatattctgggttttgtttactgcagaaaacttgtaatacaaggcaccgagttgatggtgaattatatgttcgaagaacataaggaagaggaggagaagaagaagacggcaatggaggtgaggcgtaacggatgggaccccaagaaaaatcttgcattgtctgcgtacgcatgtgttcaatatgtggagggccagagagacattgagagtacagttgatgttttgagattgttggggaagcgtgagccacaagatgctattatggatgaagaccgattgagtaagaaaatggtagaggcaatgagaggaggaggatacgttggtgatgtttgaacaagatgatgataattatagtgaagatcaggtatataaacaaataccaaaacgaatatcaattgattagagatattcattttttaattttgggcgattatgttttcgtttgctacaactacacacgtttgcgctaattgttagaccagcctaactcaacttcgccacataaatgaattttaaaatatataaggcgaaatgtttttagtagaaa

SEQ ID NO: 139878 - DNA, 891 bp, Arabidopsis thaliana landsberg
cttaaggatctctggtttctctttctctcctctgtcttatcttctccaaagttacgctttttttcaatgaaaacattttcttgattcctgatttcaaatttcacaatctggatttcgtgtttcgaattcactttgaagaaaaagtttctcaatttcgcctgaaaacccacatgggattggaactaaacactagactgacaagaagaagaagagtaatcatcatcgagtgtttattacgattatgtccttaacgaaatcttcagaatcagttttcactgaagaagaagaagaagattcctttagcggtcgatacacgttatggatcaaagaagcattagaggagcttccacacaatttcacaatcaccgacccgtttatttcgggtcacccgattgttttcgcgagcttagggtttttgaaaatgactggctattcacgagaagaagtgatcggaagaaatgggaaagtttttcaaggacctaagactaatcgaagatcgatcatggagattcgtgaagcgattcgtgaagagagatcagtgcaagtgagcttgttgaattatcgtaaatctgggtctccgttttggatgttgtttcatatgtgtcctgtttttgggaaagatgatggtaaagtcaccaattttgtgccggttcaggtcccgatttcgggacgagaacatcatcggaagaagttgagaaatgtcggagatttgtcgtcggatacttctccgacatttggttcttgtcgaagagaggtttgttttggtaatttcgtgtgtcaggatcgagctttaccagtggaatgtgatgatgatgaccaaggtaagaaaatttaaagttatgcgttttacttgtttgatgaaattccccagagagcgtttaacagtcagag

SEQ ID NO: 139879 - DNA, 1628 bp, Arabidopsis thaliana landsberg
ctagatctgacttctccattaatattcaccaatacttgtttctctctctcaagttttgaggatcttggtcctcatgggactggcagacacatggatcacatgttacctgagatcccaaggcaagatttcagaaagggtgcacaggtgaaaaactgttaacttaatctctcagttgtggattgttcttaagttgttgcttctctaagtctgtttggtaatggtattgttgaaattacgtaaatgtgtaattcccacttttctcttctggtggtagtggttcacaatgaagcgtcaacacgctgtaatagtgatggctgatggtctctactactcgaaattccgggagtattgcagagtaagttcggtattcctttataccaaagtttttgtttgcatgttacagcctaccatatatgactgagttccgttgtaagaaattgttcataaagacaccaagctttggttcatctcaagcatatctcttttgctaatatcaagagtcctcagggttttcaaaaacttgagaaaagtttcagttttgtcttactctgattctgatttgaaaatcctcagcctggagtagaagcaaacaagaactgcatcgcggatgaacattacctgccaacattctttcatgtgaggagattataacaactttctctcttttaaaagctttcactgtgattcttgtcccttaatgaaatctttgttccttaaagatgcttgatcctggaggaatctcgaactggtcagtcacatatgttgattggtctgagcgtagatggcatccaaagacatatagagcacgcgatgtctcactcaagctcttgaaaaatatcacggtaatgttacaacactttattcaacacatcaatcaagctcgtatgctatcacagagtaaagcaggatcatcatccggtttatcctgttagcccaaccagatggttgttactagtcacttagaagtggttaactaaatattttccttccattgtttattgcagtctgacgacatgagtgtacatgtaacaagcgttggcaaggtacattactcgtttactgcattagaaaacactccaaaatgtgaaatgcttttcttgatttatcttctgcgtttttcttatcttagcgcggagaagagctgcgttggccttgtacatggaagggaattagacgaccatgttatctatttgcaaggaagcttcactcagatgctctttacaaactggtcagactctttccaaattacacaagcacagtggtctaagccagagacaaattcttgaaactaaaccatacgattcttgaaaccggaactaaacacttccagatatgccgagattggatcgcaatttactgtaaatttttgctttctcttgctgagatttagtgtctctttacatggtactctacttttattaaggtttagtataagaagaaagttagaagcagaaattttttggtcaaggagagatttggttatcgtgattttagccattgttcggttagtgttaagcggtatatgttgttgtaaaagctataagtagtttagcacaacgggttaagaattttggctgtgttcagttctttgacatctaaacataatgataccaatatgaaaaatactt

SEQ ID NO: 139880 - DNA, 2920 bp, Arabidopsis thaliana landsberg; identical to SEQ ID NO: 35545

SEQ ID NO: 139881 - DNA, 1215 bp, Arabidopsis thaliana landsberg
gcccatgaactactttcaagaagaagacactatcttacaccatatcattgcctttggtatttcgattttttcctggtgtgtgatgaagatctatacacagcctttcatttgtttctccagatcgaatctgagaaccattgcactagtcaaatgcgaggcctcatagatgaagttagcatcaaacagtcgcgggattgttgctctcgaaggtatatccccttcttctttcctcattgggacttgtggaatcctagatgaccatggttcttggaacctattgaatactatacaaaattaactttctaaatggagtagaagacttatacattgatttctgagtgtcttgtagatatgaagaaccgccaggacgaagaacttgtgcagcttaaggatctaatccagacgtttgaaagtgccttactatcacctgtaaaactcattttcttgctttctttttattagtttttctactaatgcttattttcttcctccagaaaaaggaatagcaaaactcactcaaggtggacaggtctggataagaagatgcctttcttcgtatttgtaactgctatcacttgctatatatatacatctaacctgtttcttgttttttatttagcagatgcctgtggctgctgtagtgattatggcctgcagtcgtgcagactatcttgaaaggactgttaaatcagttttaacgtgagatactatactgatttaattcttataccacattttgattgaactatctaatggctatttctttttttatacagatatcaaactcccgttgcttcaaaatatcctctatttatatctcaggtacttaatttgcagggtggtggtctcttagactgttttatattcaacgaattactaaccatggtcttttccaacaggatggatctgatcaagctgtcaagagcaagtcattgagctataatcaattaacatatatgcaggtaatttaatctagcgtgatttttctcctcactgttcaagtagataaatgaggatgaaggctcgttttcccctttttagcacttggattttgaaccagtggtcactgaaaggcctggcgaactgactgcgtactacaagattgcacgtaaggactggattatcttttctctgcgtccctccagctccattactgaaacactttttaatacaggtcactacaagtgggcactggaccagttgctttacaaacac

SEQ ID NO: 139882 - DNA, 1246 bp, Arabidopsis thaliana landsberg
ttactagttaaggattattctacttatatgtatgaaatggactcaccaattaacttagaacatatgtacaaaactacaaatgttgacacattaaaaatgaaacatatattgcagggatagaagttgtggagaggctatcaacaatgggaatagcagtgaatttggtaacatatttgatggagacaatgcatctcccaagttcaacctctgccaacattgtcactgatttcatgggcacttccttcctcctatgcttgctcggtggttttctcgctgactccttcctcggccgtttcaaaaccatcggcattttctcaaccattcaagctctggtaagactctatctaaaatcttatatatagttttaaaaaggtcattgtgattagttggttttaccatctagtagtagatgcgtctaagagaataaataacctgtatttttctccaagatctccgattctaaaactactattataagcaaattatcaattagagctctattaaaaaaattcacttagaaaaaatcaaacaaaatgttcgctatcaaatctgctaaggtcgttaacttagttggagtcttggagacggttttaatatcttgtatacagggaactggtgctctagcggtagcaactaagctgccagagctacgtccaccaacatgccatcatggagaagcttgcatacccgcgaccgccttccaaatgacaattctttatgtttcgctttaccttatagcccttggaactggtggtcttaaatctagtatctctggatttgggtctgaccagtttgatgacaaagatcctaaagagaaagctcacatggctttcttcttcaacaggttaggtttagagtttattttcatgcatggaattataacattgttatagtgttccctttttcaaataaaattttaattggcacatgcaggttcttcttctttattagtatggggacattgttggctgtgactgttttagtttacatgcaagatgaagtgggaagatcttgggcttatggaatctgcactgtctctatggctatagctattgtaatattcttgtgtgggactaatagataccgttataagaagagccaaggaagtcccgttgtgcaaatatttcaggtcatagcagctgcgttccgaaagaggaaaatggaactacctcaaagcattgtttatttttatgaaaataaccctgaaggcattagaattgaacatactgatcagtttcagtgagtt

SEQ ID NO: 139883 - DNA, 2518 bp, Arabidopsis thaliana landsberg; identical to SEQ ID NO: 37393
  unsure (1)..(2518): unsure at all n locations

SEQ ID NO: 139884 - DNA, 752 bp, Arabidopsis thaliana landsberg
aagattttgatcgcgaagttcggatattggcgaaagcgaagcaccctaatctagtatcgatcaaagggtatttctggacaccggagttgcatcttctggtgtcagaatacatccccaacggaaacttgcagtccaagttacacgaacgagaaccctcaacaccgcctctttcttgggacgtaagatacagaatcatcctcggtacagccaaaggactcgcttatctccaccacacattccgtccaacaaccatccacttcaacctgaaaccgacaaacatcctcctcgacgagaaaaacaacccgaaaatctctgatttcgggctatctcgtctcctaacaacacaagacgggaacacaatgaacaacaacaggtttcaaaacgctttaggctacgtagcgcctgaactagagtgtcagaacttaagggtcaacgagaaatgcgatgtttacgggttcggggttttgatactcgaactggtgactggtcggagaccggtggagtatggtgaagacagctttgtgatacttagtgaccatgttcgagttatgttagaacaagggaatgtgttggagtgtattgatccagtgatggaggaacaatactctgaagatgaggttttgcctgtcttgaaacttgctctggtctgtacttctcagataccttcgaatcggccaacaatggccgagattgttcagatcttgcaggtcatcaattctcctgttccccaccgaatcatggatagtttctaa

SEQ ID NO: 139885 - DNA, 1009 bp, Arabidopsis thaliana landsberg
atgatcctgtcaactgtgaattcggaaacacaatgtgcacggtgacgaactcgtacggcgcctttcctgaccgctctatatgcaaagcagcaaaggtggagtacccaaggacggaggctgagctggtctctatagtggctgcagccactagagccggccaaaaaatgcgggtcgtgactaggtactctcacagcttccccaagctggtttgtactgatggtaaagacgggactctcataagcaccaagtttctaaaccatgtggtgaccaccaacccggaggccaagactttgacggttgagagcggcgtgactctaaggcaactgatcgaagaagcagctaagtttgatctggctttgccatacgcaccgtattggtggggacttacggttggaggaatgatggggacaggagctcacggaagttctttatggggtaaaggaagtgcggttcatgattacgtgaccgagataagaatggtgagtcccggtttggcttctgatgggtatgtaaaggttcaggttcttagcgagactatagatccggaggaatttcgcgcagccaaagtttctctaggtgttcttggtgttatctctcaagtaactttcgaattgcaaccaatgttcaaaagatcgttaaattatgttatgagaaacgattcggatttcggagatcaagcagtgagttttggcgaaagacacgagtttgcggatttcttatggttaccgagccaaggaaaagtggtgtatcgcatggatggccgagttccgcttaatacttcgggagatggcttgttcgattttttcccattccgttcacaactctctttagtgttagccatagatagatccttaggtaaatctttatttctcaagataattaataccaatatttttgatttgcatagctataatgtttcttatatatatacttttgcttcatgtcatgcagaggagagtgaagagtcacttgaagatgcaaacatgaagtgtgtgagggcaaagctagt

SEQ ID NO: 139886 - DNA, 1252 bp, Arabidopsis thaliana landsberg
taaaatctttgtatgattctatgcccaataaatatgtgccggtgaaccataaaagcttcctctcataatgacaaacgaaaagaggcttatgcttcatcttattatataaacctcatcaaacctattcttattttttgctctaatctaaatattaaagaatcaaacttaatctttcacccataatgggtttacaaatattatggttatttcgcaaaatattcatcatcacatacatctcccatgcctcgtgttctccagataaaggtatagtttcttttacgtatcattcaatgtgtaacgataaaaatattcataaaaaattgaattcttgatgttaatatagggatattttctttcttttttcttaaacgtgaagctggctattacagttttatgaaagatgcaacattagcaccaatgttcgctcggtttgattacataatcatcggaggagggacttcgggttgcgcgttagccgcgacgctatctcaaaacgctagcgttttggttcttgaacgcggtggtgctccctacgacaatcctacggcaacagatatcgaaaactttgccaccacactctcaaacacatcaccgaaatcttggtcgcaactttttatctccgaggacggcgtttacaacactcgtgcacgcgtcctcggtggtggctccgtgttaaacgccgggttctacacacgtgcgggagatgagtacgtgaaggagactgagtggaagactgatgaagtggaagctgcttacgagtgggtcgagaagaaagtggcgtttcaaccgccggttctgggatggcaaacggcgtttaaagatgggcttttggaggctggtgagtttccttacaatggtttcacgtatgatcatatctatgggactaagatcggtggtacgatctttgaccgtgctggtcatagacacacggacgctgatttggtggaatatgctaatccgggcaacattgttgtctacttgcatgcctctgttcacaagatcctctccaccaccaaaggtattgactattgagtcatctatacattggtctttctttattctgttatttggattataggagcaagcaagtccggattccggttgaggctcggtcagtttttctcggttttttggtggtatcggttttgtctaagcaggcatctattatgaggatggttatatcaaccatcttaaagagtttatagatgaaattgacagtttgaaagtgttttttttaagatgattaatattg

SEQ ID NO: 139887 - DNA, 953 bp, Arabidopsis thaliana landsberg
agtacgtgaagcgccggttaatgatgatgatgaaatggatatagatgatgtgattccggctccacaatctcctctctctatgttcaatgcagctagaacaattggccgtcctcccttttcgcttttggattcggactttgctagacgtgtatttgatagcgatcctcttatgccacgccctccgtttgttagtcatcctagagaggttaggcagatacctatagaggttaaggatagcagtgggccatctggacgatctagtgatgctcctactattgaagatgtgacagaaacagctcatgttcagggtccagtaactacccaaggaactgttattattgatgaagagagtgatgatgatattccttttgcaccaatgggacgaagtaggcaagacagacctgctggttctgtagccaataataataatcaagattacaatgatatagaagaagaaatgatcagagctgccattgaggcctcaaagaaagaggctgaggtaagcttctgtaagaaaattggctgtattggggttttgtcttagtgaagtagcaaatttatgaggttttttatattttcttatagggatcaagtaaccctttacttgaagagaggccacttcacatggaagatgatgatgacatagcaatagctgttacaatgtcattgaaggtctgtggttgtctcctctcttttatttttgctgccatctatctttgatcacttttaacacaagttagtgcagtcagcggaggaagaagttttgcgcagtcaagggtataaggcctcaacctcggaagtaggagcttctgcagtgactgctgctcaaggacctcaggatgcccaagccctgaacggaaggtttgttggttcttctctgtaacgctttgctactgggttatctatgagctaaaaatttgcagatgcaaaaacatctgtcaagcactctgacc

SEQ ID NO: 139888 - DNA, 4679 bp, Arabidopsis thaliana landsberg
caggcttcagtgaaggtaactgtggggtcacaggtctgggtggaagatccagatgaagcctggctagatggagaagttgtggaagctaacggtcaagagatcaaagttaattgccaaaccaagacggttagtcccttttctccaaagcaacgagacaatgtgttagttcttaaggtaccttaagaatacattgctcatatttgtgatgcatttgtttgtaggttgtggcaaaggttaatgctgtccaccccaaggatcctgagtttcctgagcttggtgtggacgacatgacaaagcttgcgtatttgcatgaaccaggggttcttctcaatctaaaagccagatacaatgcaaatgaaatatatgtacgcttcagcatgtaactcttgtcagttttccttctttcattacacccacttatgaattctatgattatctctaccattgttttgctgaaaattactgcacagttatagcaatatcattaatatttctctgaagtgtttgtagcaagctaatttcttcttgatggttacagacatacacagggaatatactgatagctgtgaatccctttaaaagattaccccacctatatggaaatgagataatggagcaatataagggcacagattttggcgagttaagcccacatccttttgctgttgctgattctgcatacaggtaatcttttgttgcatagatgaaactttaactaatgttgcactatcatttttttttgggcctcaccatcatcaagaatataaatttagaaaaatgatcaacgagggagtaagccaggcgatcttggtgagtggagaaagcggtgctgggaagacagagagcacaaaaatgctcatgcaatatcttgcatacatgggtggaaaagctgagagtgaaggacgatctgtcgaacagcaagttttggaggtagatagtctgtttacaatgcatctacattcttactagagacagactcactgagtttctctctgtagatatcttcttattcttctcgtattatgatcctgttatgcagtcaaatccagttttagaagcttttggtaatgcaaaaaccgtcagaaacaataattcaaggtggaatgtcattcacatttcttgatttttcaagtttatgtatgttcttgaagtcaaccttgacatatgtaggcaaatctcatattgcagtcgttttggtaaatttgtggagattcagtttgatgacgtgggccgaatatcaggggcagccatcagaacttaccttttggagaggtcacgtgtttgccaagtttcagatcctgaacgtaactatcactgcttttatctcctgtgtgctgctcctcctgaggtaggtcttcttagttgttctcatcttttattaaatgaatattgaagtgatagatgatataaaaatttgcaggatgttgagaggtttaagttgggggatcctaagtcatttcgctatcttaaccaatctagctgctacaaacttgatggtgtaaatgatgcagaggagtatcttgctactagaagggctatggatgtagttggaataagtgaaaaagaacaggtttgcaatttcttctttgcaatttgcctgtcacctgttgattgctaataggaacagacttatctgcttttttcttctgtctcttcaggatgcaattttcagagttgtggcttccattctccatcttggaaatattgaattttcgaagggagaagatgctgattcatcatcagtaaaagatgaacagtcaatgtttcatctccaaatgacatcagaactgctcatgtaatatatggctcttctacttttccaactaaatgctgattcttgtaatcacaatttgttattttaggtgtgatccccattccttagaagatgctttgtgtaagcgtatgatggtcaccccagaagaagttatcaagagaagtcttgatcctcttggtgctgccgttagcagggatggtttggcaaagacaatatactctagactctttgattggtaaattttctattttaatgttcaaatatcttttgtacatataacactgtgggtgacatctgctaagtcagtactcattactatgttccaggttggtgaacaaaataaatatctctattgggcaagattctcactctaggcgcttgattggagtccttgacatctatggttttgagagctttaaaaccaacaggtgatggccgtgagcatgcatggttcactttacaagcatatgcttggggtgatatcttaagtgtcaaaacacaccaagtgtcctatcgtctaatatacaaattttcagtagtcttttcccttgactttagtatgaggagttaattgaatagaaacctttactctgagctaatatgatagacatattattagctaaaattgtgatcttaggaaatgatgtcttttgtaagtttccatgactaaagagatatctataatatcacctaatcaacctctactccagttgttcactgacttcttaatgctatccctgcagttttgagcaattctgtattaattacacgaatgaaaagctgcaacagcatttcaatcaggtatgaggtcagtcataggttatggctgctgatttggctcaagagtctgttaattaatctgaacttattaatactgtacagcatgtatttcaaaatggaacaaggtgaatatcagaaagaagaaatagattggagctatgtggagtttgttgataataaagatgtcggggatctgattgaaaaggtttgttttatccagtatctgtttccttccctgtataaacacggattcatggcttaatatttgcgaccaatttggctaattcaaacactggacagtagaaattctctttagagagcatactgccatcatctaaaatacattattctacagctcaacctatgtgattacagaaaatgctagcacttgtagcttaagtccatgttggatatttttcctgaaaattgtaagaacattttgaaaggttcatgaaagcatgtaagagttctatatgttttcaatatgctctagtgtcctagcttactatgcattgttctgacttgaaaacacatccagtatcgttttttttttgtttttttttttgccatcacatgcagtgtcgttatttccattgcttcatgctacgtttttttccctgaaaatatggtttcaatcttttgcagaaaccgggtggtattattgctctgctggatgaagcatggtataataaatttttctccacttgcagctgtactttagtgttttcttacacagtaactattttctccaagtaccattattatgtgttataaacgtttcttctctctgcagcatgctaccaaaatcaactcctgaaacattttctgagaagctgtatcacacattcaaggatcataagcgcttcatgaaaccaaaattgactcgatcagattttacattagttcattatgcaggggatgtaagttgcatttcacactctgttgcttcagaattaaaagtatagagttatgatttttaaggtctctttcccatgccgttcttttcaggtccaataccagtccgatcaatttttagacaaaaacaaagactatgttgtcgccgagcatcaggatttgttaaatgcttccaaatgttcttttgtgtcaggcctctttcctcctcttcctaaagaaagtagcaaatccaagttttcttcaattggcgctcgtttcaaggtgacttgcctgcaaatccattaagacttttaactaatagataagactgcattattggaccacacataagatattgttgaaattttgatgccacattcatcatctgtacggactgacatgtttaagtaattggtgcagctacaattgcaacagctgatggagacattgaactctacggaaccccactacatcagatgtgttaagccaaacaatttgttgcaaccaacagtgtttgacaatgccaatgtcttgcatcagttacgctctggggtctgttttcttctgaataattcataccaacatctttgatgtcttgaggtgttatatgatatttgtcttatgcagggtgttcttgaggccatcagagtgaaatgcgctggatatccaacaaatagaactttcattgaatttttaaatcgatttctcattcttgcaccggaaattctgaaaggagagtatgtatcagttctccccgttaagcttggacctttcttccactcttgtatgataaattgctccttgagtctgtttatcacagttttcttaccttacactaatcaggtacgaagcagaagttgcatgcaaatggattttggagaaaaaagggcttacaggttaccaggtaaagttcctaggaagttcactaaatgtaaaaggaatcccaattttgcatgagttgaatacgtgtagaatcttcagtattctatgaaatttgagtttctcagatagcataactcccctaggtgcgtgttgatcatataaaatctaatttgcagattggaaaaagtaaggttttcctgagagctggtcagatggctgagttagatgcacacagaacaagggtgctcggcgaatcagcgaggatgattcaggggcaagttagaactcgtctgacgagagaacgatttgttctcatgcgccaaaattcagacaatatgcaagctaattg

SEQ ID NO: 139889 - DNA, 1284 bp, Arabidopsis thaliana landsberg
catgtaaattcttatagacattaagaatgtttgaagatgatggtctaatattattcttacatgtcagatactaaccagttgaatatatacaacattcttgagccatgttaccacggaacatcgctatctgcattcgacattagatcgcttccttcaagtctccttcagctaggcaaaactgaaaaacggttacctataagaaaaagaatgtttggtcgagcgtggccagttcgtgcgcctgttcatccaggcattgtccctagctggtctcaacttcttgccgacgtcactgttccttgcattgtaagtaaaccaaaaccatgtacctctctgtttcaccacttaagattgtaagctgaaacaatgaatgattgtttgcaggatgatagagttgcaacagcgtggttgaacgatccagagattaggaaagctattcatactaaagaggtctcaaactctgtctgattctattgctatgtattatgaaaacagatcattgatgtgtttggaacattatacaggagagcgagattggaaggtgggaactttgcagtgggaaactctcattctatcacgacgcaggaagcatgatcgatttccatagaaaccttacactaagtggatatagagctctcatttacaggtacttaaacaaaaacatataaaatgaatctgaagccatatactatatagtttagagagtaatgaaataagcttttctttgtagcggggatcacgatatgtgtgttccgtttactggctcggaagcttggacaaaatctcttggatacaaagttattgatgaatggagggcatggatatcaaatgaccaagtcgcggggtaatacttcttcgcctagtcgaatatatgacttatgtcgagctcctaaggtttctacattattctatgtacaatcttttcaggtatacgcaaggatatgcaaacaatctcacatttttaaccatcaaggtaagcattgaatctcaactcaaatataaccatctcattttgaaaaacaatgtttgttatattttctatgcttgtggtaatttgcagggtgcaggacatacagttcctgagtacaaaccgcgggaggctttagacttctatagccgatttctagaaggaagcaagatttaagagagctgtctcatcagtttcatatactgtgctgtatttaaaagtgatcatcttatagcaatatagcatcttgattgatttgaataagaaagatatattcttcaactcattattcaacatggtaaaaatcattttcctctata

SEQ ID NO: 139890 - DNA, 1710 bp, Arabidopsis thaliana landsberg
  unsure (1)..(1710): unsure at all n locations
tctgttctcatgaatatttaaggtgnaacttaatgttatgatgcactctgccttctttgatcttcgtacagtttgttcgggttcgtcgttctgcacatacttatgtatgctggtaacatatactattggaggcggtatcgagtgaattactctttcatatttgggttcaagcacggtactgaacttggttatagacaagttctatttgtgggattaagcattggagtctttgcacttctttgtattcttgccaatcttgacatggaggttgaccccgaaactaaagattatcaagcattaaccgaacttcttcctcttttcctgctcactgtaagtctataaatccaatattcagcttttaatgcgaaaattagcgatatgacaataataacggaatgactgtgtgatatagggtatgtttgtagttctagtcttaccattcaacatcttctaccggtcgagtcgcttcttcttcctcacttgcctctttcactgccttgctgctcctctatacaaggtaggaacagaaactgaacgtctcattgatgattgatgatgaaaaataaaaatttgatcattgtacttcaacatatccaaatcttattattcgacttctcctgcaggtaacattacctgatttcttggtgggcgatcagttaacaagtcaggtgcaagctcttcgaagtatccagttttatatatgtcattacggttggggagattacaaacatcgaataaacacttgcacagagtcagatgcctacaatgctttcttattcattgttgctgtcatcccatacgtctatcgtctccttcaggtacaatatattgatctctactaactcaataattataatttggttgttcaataaaaaaaaaatttctgacattttatgtgtagtgtatgaggcggatgcttgaagagaaaaacatagaacaagggtataacggtttcaagtacattgtgatagtagttgctgtttgcttagggatggcttatgaagtggatgacgaaaaagatcgtcaaattatttggagattgttaggtggtattacctcggctatggcagtggttttctgtacatattgggacttggtttatgattggggacttctttaaccgaacatccaagaatccatggttacgcgataatcttctcatcccacacaaggaagtatacgtccttgcaatggtgagtgataatattagtacgattttgcgatggaccacctggcatgggtgtggtcggtgcttagccaagtcttggtatcacctcgttctgcttagaccacaacaccctagctaggcagtaagtactagtttaaaaaaagttttaagaaaagtaactgatatttaaactaaacgtagatcttaaacgtggtgctgagatttgcgtggatgcaaactgtgttagatatcaaattcgagtctatgcacacacaaacagtggtcgcagtcgtggcaagtcttgagattattcgtcgtggaatatggaatttcttcaggttactactacgtactatacattaaatgactcgtttttcttaatgatactatattcgagacttttcaatcgcatttaataaaactaatcatggtacgtaaaaaacaggttagagaacgaacatttaaacaatgtcggtaagtacagagctttcaaggcggtttcattaccattcaactacgaagtggaccattaaatgttcgtt

SEQ ID NO: 139891 - DNA, 1168 bp, Arabidopsis thaliana landsberg
tttatctccccctctcttcaaacccttcaagagacaatctttcctgcgaaaatggtggtctctgctgactgcagaatctccctctctgcccctagctgcatacgtagtagctccacgggattgactaggcacattaagcttggcagcttctgcaatggtgagctcatggggaagaagctcaacttgtctcagcttccaaacattcgtcttcgatcttctactaacttctctcagaagagaattttaatgtctctaaatagtgtagctggggagagtaaggtaacaagtttcaaccttttctggttctgcttcttattcttcgattcttcaagctaatcaaaagtgccctgcactgcattaatttgtttatgtcaaccacctccaggtacaagaacttgagactgagaaaagggatccaaggacagttgcttccattattcttggaggtggagcaggaactcgactctttcctctcacaaaacgccgcgccaagcctgccgttagttgcttctctgttgcaaaatttccaatattgctgaataacctgcagcagaaagtataattaatcggtaatgtgcatgtattgcaggttcctatcgggggagcctataggttgatagatgtaccaatgagcaattgtattaacagcggaatcaacaaagtctacatactcacacaatataactcagcatcattgaacaggcatttagcccgtgcttacaactccaatggacttggctttggagatggctatgttgaggtttgatattctgtcttaatcatccattacgagccaaactggtttgatgcatctgaggcaattgtttgaaaaaattcaggttcttgcggccactcaaacgccaggagaatctggtaaaaggtggttccaaggtacagcagatgcggttcggcaattccattggcttttcgaggtagaaatcagacttaaactagcttatcatcacatcaatagacaagcggtccaacattcttttcataggatgcaagaagcaaggacatagaggatgtattgatcctttctggagatcacctctacaggatggattacatggattttatacaggtgagacaaaattacttgagctcatgtccttcatcaagaggtagttactctccgagactcatgccatgaacttcaatcggggat

SEQ ID NO: 139892 - DNA, 3198 bp, Arabidopsis thaliana landsberg
  unsure (1)..(3198): unsure at all n locations
atggcgggacctcaaccacttaccaccaacaaagctagtcgtgatctcgaaatccaaatgattaagcctacgtctctgaaaacttgtttttctatgtatctggtgccattaaccgatctccgatatcattaggattaccaaaaacaactccgcttgttttgctacctacaaaacccattggttcgtcccctgccacatgaggccagatctgaccatgaccaaactgctcttcccaagagcgagctaagtggtcttttaatatattgtcgtgttgttttttcaggagtttttggatcaaacagatccttccagtagttgtaatcctcgtactgtgagaactcctcttggggcttccccttggattcccataagacattttcttctttcacctcgacattttgtttatgttaatgcatgatgttattttaaagtatatgcgtttcaacaccaacaaattctttcaaatatttataagaactagatgaacacccatgctacgcatgggtttttgtttttaaaattgtcgaaaaatatgactatagttttttgttgatttttatgttcattttgataaattcatctatttaatataattattattttttatgattaaattcatctataattcgaactatcaaatctagtacaatatgaatatttatatatttattattctaatatttcactatcatgaacacatacaacaacattatatgatatactgatacaatgtatgtagttatattacttatgtattttgaaatttgtctaacttaattgtaacaaacaattctttattccatatattatttcgtcatctagtacaccaccacatcatgatatgctagtaatttaaatcaacactttaattctcatccctactatatagtcatatagagtctcatgttgttgttgttttggtatgtctaatgttttggataactattacgtgaaaaaattgtatatcaatgttacaaagttatcagaactcacaaaaatgtacagaaagaaggtcatatgataaatcaaattcacaaaacgtaataataaaaaaatatctaactaaaattactaaattaatatgaggttaggtagcaaacataagagttttaagagtttggattttggaattggtggtgtttgtttctcaaacttcataaattagagtttaaaatgtttttttattttttgtggtcggcataagagttgaagttttaataaaataaaatagtatctgatcattttattggagaaaacataaaagatgtagtattttataagaactcgaattggtcaattttcaaaatgttagtatgaaaaataaaatatctagttatatgtactcgtatctcttgatatttttggctttaacttagggatgttagtttgatttgtctttctggataagccagtagtaaccaaaaaagtcaaaatcttgttggctaagtcagaaattaattaaataaacaaaagggcccactaaattaattactttaataaatattttgtgtaatgatatatagtataaaacgcgaccgtctacatttttggttgtttacgagaaaagcggattacaggtacgcttcttctaagataaatctctccccgattctctctttttctcgctagatactctttttcttcaattagggtttcttctcgcttgccttttaattctctccagctgatctgatctccgttaccgatggagtctactgctaacgcactcgttgtcaggttagagatacaaccttcctttctttatttgcgaatcgtcagttttctcacagtaattgtcggtgattctgggttttcgtggcgatcgtctcgtttctgttgattttgttgcttgtaatcggtcctttccttttgaatttcgctatggatcgactctctctctctctgtctctgtattataatcttaagtgtaattcgaaaattttccagacatacttagcagtatctgcttgaatcttaaacccgaacaatgattaaaactataagttatcgtaattagaatcgtaatctatttcttcgacaattttttttcttttttttcattgaagtgatactaattttgtttgtgattatgtaggtgagctatggaggtgtgcttaagcgtttcagggtgcctgttaaagctaatggacagcttgatcttgaaatggctggtcttaaggaaaagatcgctgctctctttaacctctctgcgaatgctgaattgagtctgacttactctgatgaggatggggatgtggttgcccttgttgatgacaacgatctctttgatgttactattcagcgtcttaagttcttaaagatcaatgtgaacgctggcgtgtccactaactctgctgctccagagagtagtgggagttccacacctgcgggtatgcctaacccggtttccaaannnnnnnnnnnnnnnnnnnnnnnnnnnnnnnnngtacctaacccgatgcgtgataccatatcaaaggtgtacatggaccttgcatccaaggcctcaacttctagtcctgtagttggtgagatgcttgattgcatttccaagctagggcagctctcaattcctcaggaaagtagtccttgctcacctgttaccaagcctggttcttcaggtgcttccctgagcagggatgttccttccgctggtggaaagaaggatatctctgagtggacccagaccggaaggaaacctgttaatctgaatgaacccactggcgctcattcaaagacttctggtcatgtaccaaactcgtctggactgggtgctaatttcaacgagtgtccctttagtggcagtaccatgaattactcctgtccaaatccagttaacctcaacaagcatcctcgtcgtgtttgtcattccaaaaagagcaccaatggtgattactggacttcattgggtgtattccataagggcatccgttgtgacggatgtggagttcttccaattactgggcctagatttaagtcgaaagtgtaaggatgccttctacttactactttagaaactataaacatgctagaacttattgtgcttatatgtttcgcttgtgaatattgtgcagtaaagaagactatgatctgtgcaccatctgctattcggtgatgggtaacgagggggattacacaagaatggataagcctgtatccgttcaacatctgcatccttttagaggaccgtttacccaa

SEQ ID NO: 139893 - DNA, 1219 bp, Arabidopsis thaliana landsberg; identical to SEQ ID NO: 45571

SEQ ID NO: 139894 - DNA, 707 bp, Arabidopsis thaliana landsberg
aggtgttctccaaaagctgttattactattctctgtctgtatagctgcttcaacttataaagcaatccagcctcctccatcaaagctatgtggctctcctgatggtccatccatcacaggaccaaggattaagctaagagacggaaggcagttagcttacaaagagcatggagttcctagagatgaagctactcataaaatcatcgttgtccatggatctgatagttgcagacatgataatgctttcgcagctctactatcaccggtactttaaaaaaccctcttgtgatgaaagcttcactaattgcttacagttttaaagatgtaaaaacttttgatatcaatgtttgtaggatattaaggaaggactaggtgtgtatatggtttcatttgatagacctggttatgcagagagtgatcctgacccaaaccgtactcctaaaagcttggctttggacattgaagagcttgctgatcagttgagtctaggatcgaagttctatgtcatcggttactcgatgggaggacaagctacatgggcatgccttaaatacattcctcacaggtattacttttagaactaacatatttcttgaagggatgattttgatgatatgtgtgaatgtctctgtttgattcttctttaggttggctggagtaacgcttgttgctccagtggtgaactattggtggaagaactttccatc

SEQ ID NO: 139895 - DNA, 780 bp, Arabidopsis thaliana landsberg
ttaccttcttctttttttttgagaaagaagtttagtatttacttacagaacataaaatatatgcaaatccaacaaattcagtgggccgttgctggacttttaagcatttgataattatatgggccttacagttattataactgtctctcccataactaaaagtaaaaaccgatttgactcccggaccgatacattcccgccgccgtcgcaacgttccactcgccgtcgcagcaaacagttcatctatggctacatcaggacgctcccacggctctaccacggcggctttagcctttacactcgccgtagtatctgtatccgctgccttctcgcgtaatctctttctctctacctctctgtcacttcctcttcccaatacctgttattgagctggtttcgagaaactaacactttattgagcatgttcttgcgaagtgtatagatggcgaagacgagaagaagatttggagaataggatcaaggaatttgagaagtctttgggatctaccttggaaaaaagtgcttctgagagaaaaggtcgagtcaaagctcagcaggtgagttttttttttaacttgtactagtctctgaaatataggaatttagattcaaatcattcaaatgcacatcaaaattgatacttgtcaagattggaggaaatctctatggatttatgttcactctcttgatgcaattgaaagctgtaggctttacgggaggcgttagcacagactgagtcacatgatttacacagcacaatatacccgatgcgacctattg

SEQ ID NO: 139896 - DNA, 2800 bp, Arabidopsis thaliana landsberg
  unsure (1)..(2800): unsure at all n locations
cttatcactgcaggcaatagaactttctcaccttggaaagggtcagtagtggattcagtagtgggagttttcctaacccagaatgtcgcagaccattcatcaaggtatatgcattcaagagatttctaataagtagaagatatatgcaacagagtggtttagaaattataacttgttcacttttgcagttctgcatatatggatttagctgctgagtttcctgtcgagtggaacttcaacaagggatcatgtcatgaagagtggngaagttcagtaactcaagaaacaatactgaatttggatccaagaactggagtttcaactccaagaattcgcaatccaactcgcgtcatcatagaggagattgatgatgatgagaacgacattgatgctgtttgtagtcaagaatcctctaaaacaagagacagtttcataacttctgcagaccaatcaaaaacgatgctgctggatccatttaacacagttttgatgaacgagcaagttgattcccaaatgggtaaaataccatacacggatgatcttaatgacttgtcccaggggatttagatggtctcatctgcttctactcattgtgagttgaacctaaatgaagtaccacctgaagtagagttgtgcagccatcaacaagacccggagagtaccattcagacacaagaccagcaagagagcacaagagcggaggatgtgaagaagaataggaaaaatccaactacctccaaaccaaagaaaaagtcaaaggaatcagcaaagagcacgcaaaagaaaagcgttgactgggatagtttgagaaaggaagcagaaagtggtggccgaaagagagagagaacagaaagaacaatggacacagttgattgggatgcacttcgatgtacagacgtacacaagatcgctaatataatcatcaaacgagggatgaacaacatgcttgccgaaagaatcaaggtttgactaatcacagtgctatatatacctcatttatacattctaacaaggtgaatttttttgactctggaaattggacaggccttcttaaacagactagttaaaaaacatggaagcattgacttagagtggctaagagatgttcctcctgacaaagccaagtaagaaaattatttacaaatcttgagattatatgtagcctctggttaaagactatatctcagtaaatggaatcgatagtaattgagatacatataaatgagagatacttgatagtgactactaatggttgcagggagtatctactaagcataaacggattaggattgaagagtgtggagtgtgttagacttttgtcactacatcagattgcattccctgtaagtcaatgaaggatactgaatactcagaccctaatgaatgtggaacagatacattaatagttacgtatttttacaaatgcaggttgacacgaatgtcggacgcatagctgtaagactaggatgggttcccttacagccattgccccccgagctgcaaatgcatcttttagagttgtaagaaaaaaaaattaaagatcattcttcaaccatgaaagggaacatgagaaatttacagtagttccctttaattctattcaggtacccagttctagagtcagttcaaaagtacctctggccacgcctctgcaagcttgaccaaaaaaccttgtaagtaaattacattagcatcaaccattactctagacccttaaacttctctaactaactctaactgtatcatacaattctaggtacgagctgcattaccacatgataacatttggaaaggtacctcaaacaaatttcaagtgtttgtggaatgaaaacatcttaaagtggcttttcctattttgcaggtcttttgcacaaaagtaaaacccaattgcaatgcatgtccaatgaaggcggagtgtcgacattactctagtgcacgtgcaaggttaaaccccacaaaattctttgttattgccattaacatgaaaaaaaaaacactagcttaaagagaaagagatctgctcaaaatagtcattttaatggttgtatgttctaaatgcttgtgttatatcgcagcgcacggcttgctttaccagaaccagaggagagtgacagaacaagtgtaatgatccatgagaggagatctaaacgcaagcctgttgtggttaattttcgaccatccttatttctttatcaagaaaaagagcaagaagcacaaagatcccaaaactgtgaaccaatcattgaggaaccagcatcaccagaaccagagtatatagaacatgatattgaagactatcctcgggacaaaaacaacgttggaacatcagaggatccttgggaaaataaggacgtaattcctaccatcatcctcaacaaggaagctggtacatcacatgatttggtggtcaacaaggaagctggtaaatcacaggatttggtggtactaagcacatatgcagcagcaatacctagacgtaaactcaagatcaaggaaaagctacgcacagagcaccacgtgtgagttgccactttcaattttttcttctattataccctaaaccgtaaaatttgagactttcctcagcatttatctcatactaattctcttttacagatttgagctccctgatcaccattccattctagaaggggttagtaactcttgcaaaatgatttagcaagaatttttctacttattcccgcctttaaactgtttgattatctttttttacagtttgagaggcgagaagctgaggatatagtcccttacttgatagccatcagggcgcagggggtcg

SEQ ID NO: 139897 - DNA, 1554 bp, Arabidopsis thaliana landsberg; identical to SEQ ID NO: 28204

SEQ ID NO: 139898 - DNA, 1855 bp, Arabidopsis thaliana landsberg
acttactgttacttccattcttttgtgttaaagtaaagttgcttatgaaagagaaaaactgtttctctttgggtggttagaattttgaacaaaatgattaccgaagaaatgatatctgtagggaaagagtagaagtttaaaactttgaacacttgtgaaatttcaaccacttgctcatttattatggtctagctgaaactttatcattctatgggaacaataatttgctctatggtcattctctatcatttcaggttttctgttccactcatcttgtctcttccatccactgtcatttcattgacaaagaaagagcctctgaaggtacccattcataagcttgcatcaagatttgacttctagtagtgaaagtcttaactttggactttctggctataacggttggatgttggattctagctggtatttggtttagagattgctcaggctcatagcattgcatcttttttgtagagatctcttatctatttgataatgactcattttagttgacccttcatccattgcattttttcttattttagattttttttctctttatctggaactaggttaaagttagctctgtactgggttcgaaggcaccagctcttagtgtgaagcttacacaagctctaagttctaagtcagtggattcatctgtaattaataaccaggtaaataatgtatctcttactgtttgagcttgcaatagaaatgttccttattctctgcattaggccggtttacatttttccattacatttttggggtacaggagcttaagtttgacgctgacagtgcaacgtacttcctggactcctttcccaagaactttgacattggaaaatatacttttgtatttaaggtattgcacttctttggttttactacacccaagacttcatataaatgtatgatgacaacatgataagcttcgttttctgcagattgtgctggatgaatcagcacatgagaaagtatacataactgaagctcaaacaaaagtgcctatagctgccacaggagctattagcattgaaaatgcagaaattgctgtacttgacagtgacattggaagcgttgaatctcagaaaaagtatgtcacctgtattgttgatgaacaacttccttttttgcttattttgattgattgctaattgcttaaccatttttcttaggaaacttgtaccattattgcttacaatatatatttcaaactttttgttgttgtgcttagtgtcttctttttgtttattggttctctctgtaacatttgtaggctagatttaactaaagatggagcggtatcattatcagcaaaccaccttcaaaagctacgcctgtcattccagttaactactccacttggcaatgcgtttaagccacaccaggtttgttcattcttgatttttcgcttcatcaatggttatattctgttctattcactttcttgacttgcttacttccatgcaggcatttttcaagctgaaacatgagtcacaggtcgagcatatctttctcgtgaaaacttctggaaagaagtctgaattagttctagttaagttccttcaacttcatttaaaattgcttttgcaaaaaaagtttaatgatcaagtttggtgaaattaatgacgtcctaaatacaatattaatggttaatgttattttcttaccttcaggattttcttggattggttgagaagctctactacctctctggtaaatatgagatacagctaagcattggagatgcttctatggtaagtactttactttcaggtccaatgcagttgatgatttatgtcttctgagatttgaacagtgttagtttcctttctctttacacaggaga

SEQ ID NO: 139899 - DNA, 1151 bp, Arabidopsis thaliana landsberg
cctgatttccccactcgacgctgatttcttctctgcttctgtaatttctccaattcattgatcagatcagccatggaagacgaggtgatttctcgttcctttatttatctcacaactacgtatacctagagtaaatcagaaaacgttaatgaatttgatcttcttgaaactgtgtgctacagtaatttcgattgcttattggtttctatgtatcatagaggaattggttgataaagttttgatttttatgatgtctgtggcggtatctttatcatctgatgaaacttgtcgagacaattctgggataaaggaataaactttaagccgtattggtggggttgattcttcggatttggatgatagtatcttcttgattccgtagaattgttgaaatgtttggaaaattgagatttctagaggcaacaagtattttggagatttctatgtttggttattggttcattgattgaggaaagaaacaaagtgatttaagtttacaaaaccttatacagtttctttcacacttgtgtttgtatttgcattagattgaattgaaaactgctcctgctgatttccggtttcctacaacaaatcaaactaggcactgcttcactcggtacatcgagtttcacaggtacctcattgctagctcatccttgagaaaatcattattttaatctcttgttgacatcaaagatgattctgcacgtgtacaactgcaaagcgacaggagtctaatgactgtgaaaggtttgccaagtattaccgtgccctctgtcctggagaatgggttggttccttttgtttggaccttagattattatatcaaagagtggtacacacaaatcacactggtatagtttgatccatctgacaatttctgccgcttatcttacatcgcaggttgacaagtggaacgagcagagggagagtggaacttttccaggtcctctttgaaccaagccttcaatcttgatgaagaggcaatcaagtccgtaataatacatggtttcaaagttaatttcttgcttgcgtgtgtatgttttggccttattatttcctctctagtgtaagtgttttattgggatgtctaagaaaggccaatcaaattataatatgaaaacattcgcttattttgtttggaacttata

SEQ ID NO: 139900 - DNA, 1723 bp, Arabidopsis thaliana landsberg; identical to SEQ ID NO: 8436

SEQ ID NO: 139901 - DNA, 1023 bp, Arabidopsis thaliana landsberg; identical to SEQ ID NO: 13519

SEQ ID NO: 139902 - DNA, 626 bp, Arabidopsis thaliana landsberg
agagagatagtaagagtaggcgccctcaagaaaacagagtaaaaatggatcaaactttgtatcgcaagtgcctggttactttatcgatgatggcaatgatcggcacatcaatggctacatatgccgggaccccatggcgtacagcctcagccactttttacggtgacgacaccggcagcgcaactatgggtaaagtccatatacttctacattctattgtatgtagaagtagaacacaaactatatatgactcgattccatattatttgaaacgagtgtttgtttgcatttctatgttttaatgtactaatcatatatcataacataaaaatgcaaacacgatgaaacaattatggcttatttataaatacatgaatctttaatttcgaagaccatgtatatcgatcaggtggggcttgtggctatggtaacatgtatgacagcggctacggggtagcacgactgcgctgagacagccctgttcaacgagggttatgcatgcggtcaatgtttccagttaaagtgtgtgtcgtcgcctaactgctactacgggtcacagccaccgtggtgactgcgaccacatatgtcaccaaactatggccagcatctacaatggtggatggtgt

SEQ ID NO: 139903 - DNA, 2629 bp, Arabidopsis thaliana landsberg; identical to SEQ ID NO: 5601

SEQ ID NO: 139904 - DNA, 1216 bp, Arabidopsis thaliana landsberg
tttctccatttcaggactaataattatgagtacgtaaagttatattccatattcgaatctttgatgtttttatatcggtataaatgatccgcctttttgacctactcatatcttaattgtgcttataaagttatacaaacttatttaatctagttactcaatcaaagggagcataagacagaaaatgttttttcttatgaatataattatggattgttttacatcttggttaaattattcgagtgttaagttttgaatatgatgtttggtcattatattatttggttgcatcaatttccaggaagaatcctactttgtacaattcacttgccaagagccagagccccaaggttttgattctgccaatttacatcattctttagtctcctcttagacctttggcttatctagtttgaagattctctaattgcccccaaatgggtatgaaacaagggaaaaagcttttgatttagtaatgaatatggtaactttataagcaagcaagaaagaaaccctaaaattagaaacgagggttaagacttgaaagatatacatttatttcaatgtgatttttttttcttcttgcagtttttggtgtttgcttgtgcggattcacgagttagtccatctcgcatcttgaatttccaacttggggaagccttcatcgttagaaacattgcaaacatggtgccaccttatgacaaggttcgtctaacaaaaatgatgtttcaaaatctctctcattaaccttacataaacataccaaaattttgttataaaacaactaactaacagaagcttttgtctctggaaacttgcagacaaagcactctaatgttggtgcggcccttgaatatccaattacagtcctcaacgtacgtactaattagttaatatacctctacgttaacatatatgatcgatcattagagatgatttgtacatgtacgtactaattgtacatggtcgacataagattcttagtaaaaagttgatgtgacctagttctaaccctaaaaaggaggtccctaaaagtgttcaccaaaaaaataattgagccttgtaaataatgtaatgctgtcattatcaggtggagaacattcttgttattggacacagctgttgtggtggaataaagggactcatggccattgaagataatacagctcccactaagacgtattaatctcaaaggctaatttaatcaaccatgagt

SEQ ID NO: 139905 - DNA, 1389 bp, Arabidopsis thaliana landsberg; identical to SEQ ID NO: 31155

SEQ ID NO: 139906 - DNA, 3055 bp, Arabidopsis thaliana landsberg
gagcgggcaccggctatttttaacactatgatgagggatggtccgtctcctactgttgaatccatcaatattttgttgcatgctttgtgtgttgatgggagactcgaggagctctacgttgttgttgaagaattgcaagatatgggctttaagattagcaaaagctccattctcttgatgcttgacgcatttgcccgagctggaaatatctttgaggtaaagaagatatacagtagcatgaaagctgctggttacttacccacaatccgcctttataggatgatgattgagcttctctgcaaagggaaacgagttagagatgctgaaattatggtctctgaaatggaagaggccaatttcaaggttgagcttgctatatggaattccatgctgaagatgtatacggctatcgaggattacaagaagacagttcaagtataccagaggataaaagaaactggactggaaccagacgagaccacttacaatactctgattataatgtattgtagagacagacgaccagaagaagggtacttgcttatgcagcaaatgagaaatcttggtttggacccaaaactggacacatacaagagcttgatctctgcttttggtaagcaaaaatgccttgaacaaagctgaacaactgtttgaaagagctttctctcaaaaggtttgaaactagaccgttcattttaccacacaatgatgaaaatatcccgagattctggaagcgactccaaggcagagaagttattgcaaatgatgaagaatgcgggaatagaaccaacacttgctacaatgcatctgcttatggtttcatatagttcttcaggaaatccccaagaagctgaaaaagttcttagtaacctgaaagacacagaagtggaactaacaactctgccttatagttcagttattgatgcttaccttcggagcaaagattataacagtggaatagaaaggcttttggaaatgaagaaagagggcctagagccagaccacaggatatggacttgctttgttagggcggcgagtttctccaaggaaaaaagtgaagtcatgttgctgcttaaagctcttgaagatattggttttgatcttcctatcaggtatagatgatctgatgcattccttaaagagtatagttctgttaagatcatgtttgtggcttttcttattatgataatataaaatctgatacaggatcatatcatatggtactgattcttatgaatttttttctctggttttttaatgatacctaccaggcttttagctggaagacctgagttgctagtttctgaggtggatggatggttcgagaaactgaaatccatagaggacaatgctgctctcaattttgttaatgctcttttgaatcttctctgggcgtttgaactcagagctactgcatcatgggttttccaattgggaatcaaaaggggtatcttcagtctcgatgtttttaggtcagtcttgtatacgttcataaatggtgttaacactcgcccatgaactagtcacttgtttctcatgcaaatgtttccaaatgcacagagtgtttagcagtaacatttgtgattcactttgatttttcagggtggcggacaaggactggggtgcggatttcagaaggctgtctggaggtgcagcacttgttgccctgacgctatggcttgaccacatgcaggcacttcatctctttcttctctcttaatatctctgcatcttcacatcatattccacaaatgcctgcataactaaagatcgtttgagaatcattctcatattcaccaataaccctctgttactattcttctcccatttcaggatgcatcactggaaggctacccagagtctccaaagtcagttgtcttaatcacagggaccgcagagtacaacggtatatcccttgataaaacgctaaaggcgtgtctttgggaaatgggttctccatttcttccctgcaagacgagaacgggactgctagtggccaaagctcactctctcagaatgtggttgaaggactcgccgttctgcttcgacttggagctaaaagactcggtgtctttaccagaatcaaactcgatggacctgattgacgggtgtttcataagacgtggacttgttcctgcgtttaaccacatcaaagagagacttggtggatttgtgtcaccaaagaagttttcgagactggcgttgctaccagacgagatgagagagcgagtgataaagacagatattgaaggacatagacagaagttagagaagatgaagaagaagaaaatgggcaatgaaacgaatggtattaacactcgaaggaagttcgtcagaagcaagtgatgtcatgatattgtactctcttattataaaatctcattagtgattatttgtatacagacagttttgattttcctctttgtggatactaattagaataagtgttcatgtaatatttatcgatagggtttagtaaattaaacagagctattgcgtctaacaaccttttaccgtgaacgaaaaaaaatgtaatgcattcaactactctttctaccaatgcctagttcaacttatttattgttgagttcaagatttttgttgtcgttgttgttagaatcagtgactattctaaagatgtttggattacacatatttatacatacaataaatttcaaaattttcaagagccaaaaaaacaactaatttggtgcatcttggttcttaataggaacatactgcagatattttccttctcctaggcgtaagtttttttaaaccagtggtgttgttagatgtttctgcaacacttttgggtcttcgttttcgtttctcctttgcattgtcttggatctcgttatcacattccaatgccaacatcctctcctctcctccattgtttggttcattttcacaaacagtttctgcaacacttttgcgtctttgttttggcttctcctttgcattgtcttggatctcgtcatgacattccaatgccaacatcctctcctctcctccattgttcggatcattttcacacacagtctcattctct

SEQ ID NO: 139907 - DNA, 802 bp, Arabidopsis thaliana landsberg; identical to SEQ ID NO: 2130

SEQ ID NO: 139908 - DNA, 2544 bp, Arabidopsis thaliana landsberg
cagcttccttccagtgatccttcactctctatactgcgatttaccgttcttctgactcttggtgagttttagatcgaatcctatcttccatccacatatttactgtttcaaaattggattgagtacaagtcaaattcatcgatctcgatctctgatatagttgccgagggaaaaaggagaaaccccctaacaaacattcccaccattttttttgttatttgcagttgcgaattcggatcggctgacgcagctccgattgcacaacaatggcttctcgtatcatcaatcattccaaaaaggtttctctttctctatttttcatttttttctgtggtttgactaccatttttgatcttgtaaaactgagtttatgcattcgttcttatgtgttttgctctgccaatcatttttttctgaactgaggttcgttttccgggtttgacttaatctaatcatgaatttggtatttttaatttgatcatgggcaattctgcattttgctattgagagctctagtaacctccttgtaatctgaattgtgattaatgtagtagctgcgctttatgattcaattgtggtattagctattcattttattagtacaagaagactctacttttacagcagagtaattgtatgttgctctttgtaaacactattttgacgattgttgtgttatctgaccagttgaaacatgtttccgctttactgcggcgtgaccatgctgtggcagtccgctgtttctccaacagtacccacccctctctcgttggaagagaaggtaatccagtcagctttcttagtgtcctcttcattgctatccttaagttcattttatgtagaaatgtgtggtggtttcttttatttgatacggtaacaagcaccacacagtactctgggatgaatagtccaagtttgactttcacatcgttttcaacatgaagaacataacaacgttccaactttaattaattgaaagttggtatgttttgagtatatattatgcttctcgcttaagcatttatttttctatttttatttggtcttcagatatcttcaaggcccgcctgaattattcctctgtagagagaatttcaaaatgtggtactggcaatgtaagtccctgctgttcagtttcctttctcgtctttgctttgtcacgtaatcgtctgtgtttttttggtcgtaatgtcattagctgcattatataggtaacaatgcttagtggtatttcaacaacgagcacaaaactaagcagcccaatggcaggaccaaaactatttaaagaatttataaggtatgtaatccatttaccgatgagaatacaacttgctaccttcctgtatgaatacttctatcctaactgtaagcttcttttcttgcttttagctcccagatgcgatcagtgagaggattttcatccagttcaggtatttagttctttattgtaacttcccgcttgttctaacatatattttcacttgaattgtacttttttttgtgagcatctgacttggtttttgtacattaagcggccatcatatttctgtcactgtgtatatgcagcatacatggtttgttttactgatagctttttaaaatatgtttcagatcttcctcctcatcaagagattggaatgccttctctttcgccagcaatgactgaggcatgtacctctgaatacctcttacgaaaattaacatggtttattgttttatcattctactaaagatatctgttgaaacttcagggtaacattgccaggtggctgaagaaagaaggtgataaagttgctcctggtgaagtgctttgtgaagttgaaactgtaatgataatcctgattgaatctcttcctgtattgattcttatgccaggaataaaacacttatctcaatcttaatattttaggacaaagcaacagtcgaaatggaatgcatggaagagggttttctcgccaagatagtaaaggaggagggggcaaaagaaattcaagttggggaggtatgagagtttctgacttttggagacttgttaattataatgggttctcatgaagtatttgattgtgagccctatgctccctttagttgaagatcaatgaatattcaataaaaatgacaaagatctttatcttcatttgtagaatcacatataaatggtcccttttttttttgtccaactaggtgattgctatcacagttgaagatgaagatgatattcaaaagtttaaagattacacaccctcatccgatactggtcccgctgcgcctgaagcaaaaccagctccttccctaccaaaggaagagaaggtagagaagccagccagtgctcctgaagccaagatctctaagccaagctcagctccttcagaagatcgtatttttgccagtcctcttgcaagaaagttggctgaagataataatgtcagtttccagacgaaaaatattagttaagctcgtgttagatctccatctctaatttgtttttcctacttttcctttgaaaaacattaggtacctctctcaagcattaaaggcacaggt

SEQ ID NO: 139909 - DNA, 1188 bp, Arabidopsis thaliana landsberg; identical to SEQ ID NO: 10839

SEQ ID NO: 139910 - DNA, 884 bp, Arabidopsis thaliana landsberg
tccgtcaccggaaaaaaggttctgcggtgaaggatgactccgcacagacatcgacgccttcatctccaccgcctcccctaccgattcatgctggcggatcggctgtgggagcgacggggaaggcgaagaagaaaaccggaggagctaggctgtggatgaggtttgatcggactggtgctatggaagtggtggagtgcgataagagtacaatcatcaaacgtgcttctgttcccgctagggatttgaggatacttggccctgtcttctctcactcctctaacattctcggtaaaaacttcgatttgctaattcctggattaggtcataagatcacaattgctgcaaattagcttggacattgtgtttctgaagttataagcttgtttttttgctctgcagccagagagaaagctattgttgtgaatttagaggtcataaaggcaatagttactgcagaagaagtgttgttgttggatcctctccgtcctgaagttcttccattcgttgaacgactaaagcaacagtttcctcagaggaatgggaatgaaaatgcactgcaagcttctgcgaatgtacaatctcctcttgatccagaagctgcagagggtctgcagagtgagcttccttttgagtttcaggtcctggagattgcacttgaggtcgtctgctcatttgttgataaaagtgtggctgctcttgagacagaagcttggcctgtccttgatgaactcactaagaatgtcagcactgagaatcttgaatatgtacgaagtttgaaaagtaatctcacccgcttgctagctcgggtacaaaaggtagaggcttaataagttaccatttcccaggatactataatgttgtgtggtggatggaaacaataagct

SEQ ID NO: 139911 - DNA, 1270 bp, Arabidopsis thaliana landsberg
atgaagcctaaacgaaggcgtctaggtgtaaaaatggagtctttttctttggcaacaccaaacatgtgtttcaggaaggtgagtagtgaattagacagttctttcaacggtgaaaatgtggtttgtggtttggaactagaggagaagactgcaggggataggaataggatacattttctagaggagcggaacgaagaaactttatcgaagaggcttcggaaacttagcaggttggataaagtcagaagcgcattggagttgtttgattctatgagattcttgggtttacaacctaatgctcatgcctgtaactcttttctctcgtgcctcttgaggaatggagatattcagaaagcttttaccgtctttgagttcatgaggaaaaaggagaatgttacagggcacacgtatagtttgatgttgaaagctgttgcagaagttaagggttgcgagtctgcattaagaatgtttagagaactagaaagggagccgaaacataggagttgttttgatgtggttctatataatactgcgatttctctatgtggacggataaataatgtgtatgagacagagagaatatggagagttatgaaaggtgatggtcatattggaacagagattacatattctctgcttgttagcatttttgttcggtgtgggagaagtgaattggcccttgatgtgtatgatgagatggttaacaacaagatatctctgagagaggatgcaatgtatgcgatgataagtgcgtgtacaaaggaggaaaaatgggatttggccttaaagatatttcagagtatgttaaagaaagggatgaagcctaatcttgtagcttgcaatactttgataaactcgctgggaaaggcgggtaaagtcggattggtgtttaaggtttacagtgttttaaaatccttggggcataaaccagacgagtacacgtggaatgcgctgctcacggctttatacaaagcaaaccgatatgaagatgttcttcagctgtttgatatgataagaagcgaaaacctgtgttgtctaaatgaatatttgtacaacacagctatggtgtcatgccaaaggcttggttattgggagaaagctgtgaagcttttgtatgaaatggaaggttcgggtttaacagtttcaacttcatcatataatctagtgataagcgcttgcgaaaaatcaagaaaatcgaaagttgcattgctagtatatgagcacatggctcaaagggattgtaagccaaacacgtttacttatctttcgc

SEQ ID NO: 139912 - DNA, 589 bp, Arabidopsis thaliana landsberg
gaccttgaaaaaatggcattagcatcacatattcttattcttctttctctttttcttctgatttccctcgtccgaccacaagttcctccaatggagcaattccggttccttaacaacggcgactttggagaatccacggtggagtacggtgcaagttacagagatttaggtgtaatacgtaaccaatttcgtctatgtttcttcaacaccacgccaaacgcattcacactcgctatcgggatggggacaggaagttctgattcaatcattcgttgggtttggcaagctaacccacaaaaaccagttcaagaagaggcttctctttcgtttggaccggagggaaaccttgtcctcccccagccagatggcagagtcgtatggcagaccatgacagaaaataaaggtgttataggcttgaccatgaacgaaaatggaaatcttgtgttgtttgatgatggaggatggcccgtgtggcagagctttgaattcccaacggatacactcttggtcggtcagtctttaacactcgatgggtcgaagaacaagctcgtaagccgcaacaatgggtcttatagtcttatcttagagc

SEQ ID NO: 139913 - DNA, 2189 bp, Arabidopsis thaliana landsberg; identical to SEQ ID NO: 30139
  unsure (1)..(2189): unsure at all n locations

SEQ ID NO: 139914 - DNA, 541 bp, Arabidopsis thaliana landsberg; identical to SEQ ID NO: 20741
  unsure (1)..(541): unsure at all n locations

SEQ ID NO: 139915 - DNA, 2151 bp, Arabidopsis thaliana landsberg
gatgatgatcatgaaggagaagaagaggaagaagaggacgaaagagaaagagaggtttggtgtgttaaaagggttttgtgagggtctagtgaggaacatgatagctcaacaagaggagatgcatatgaaactcctggaagatatggtgaagaaggaagaagagaagatagcgagagaggaagcttggaagaagcaagagattgagagagttaacaaagaggtagagattagagcacaagaacaagccatggctagtgatagaaacaccaacatcatcaagttcatatccaagtttacagaccatgatcttgatgttgtccaaaacccaacaagcccttctcaagactcatcttctttagctctacgaaaaacccaaggcagaagaaagtttcaaacttcatcatcactattacctcaaaccctaactccacataaccttttaaccattgacaaatcacttgaacctttttctactaaaaccctaaaaccaaaaaaccaaaacccaaaacctccaaaaagcgatgataaaagtgatcttggcaagagatggccaaaggatgaagtgttggctctgatcaacattagaagaagtatcagtaacatgaatgatgatgatcataaagatgagaactcattatcaacatcttcaaaagctgttccattatgggaaagaatatccaagaaaatgttggagattgggtacaagagaagtgccaaaagatgcaaagagaaatgggaaaacatcaacaagtattttaggaagacaaaagatgttaacaagaagagaccacttgactcaaggacttgtccttattttcaccaactcacagctttatacagccaacccccaacagggaccaccgccaccaccgccaccacggccacgtcagccagagatctagacacccgacccgaggaaaaccgggttggatcccaagatcctgatatttctgtacccatgcatgtagatggagatggtgctggcgataaaagcaatgttcagttttcaggtttcgatcttgagttctaataaatcccttctatatatatattatcagttatattctctttttctgctttttgctaaaacctcatttttggttattatgataaagttattatatatgaatagtgttactgttttaatgctattagtgggaaacgtatcttgacgacttggtcgaccgtacacgtgcaccgacaaacagtgaaattcagttgaacttgaataaactactggttaaattcctattagtattctagcttttattctccatgaatttcacgtatacgtgatgagatcaggtctttcaacaataatcaaaataaataaatgcaaggaaaataaatatttttgtgaattagtaaattagttacttatctggtttctatttactatttagaggtggaaaacgggatgggccatcaaattcagaaaataaataaatcatgtcttaattcaatttgaagtgcagaaccagaccgcaaaaataaaaataataataataatacaagtcgtttcattctttacaatcttaggcaaaacgtaaaaaaaaaatgttgtctgattttacatgtgaagtttttgtatgtttttaatattaactatttcttagtagacatattatattgttgttttctaggttaaagggaaagataattacttttcttgtaaaggtctgtttattaatgcaaaattagaaggtatgtctaattagaaattgattgttctaattataaaaaagagaaatttgggcttataacctacaaaaatattatatatttaaaaaactaacattccaaaaaaagtaatttgatattgtttgtattttctgtaataatgacaacgttattcctgtttgagacacacgctctttgtcttctccttttcgcatgaaacaaattcttctctctcaccaactcttaactttcaaacagagttttggctctaataagttagggcttttacgtatttggggtacatttaagtccaaaaactctaaaaagagtactttttgttgggctaatggagatggacacattctgctgtaagaaataacggttttgccctcattcttcttctttttcttcatcttcttcttttttattcttctttccttcttttttctttcttcatcgcttctttctcat

SEQ ID NO: 139916 - DNA, 1446 bp, Arabidopsis thaliana landsberg
tcttttgaatttctttattatgtacttgtatattatgcaaaccaaggtaacactcttgagtaatcatatgatatttcggataaacagtccaggttatatctgggacttggaagggatggtctattgccttcaatcttttccagaatacacccaactcttcatacacctcttcattctcaaatctggtgcggcattgtagctggcgttttagctggcatatttaatgtacatagtctttcccatattctgtctgttggtacattggtacgtcaaggtcttaattttaaatatctctttgcttttcttattgatacttatactttccagtttaacattattttcggtgttccatttcttcagactgggtattcagttgttgcggcttgtgttgtggcattgagactgaatgataaaaaagatagagagtcgtccaatagatggacatcaagttggcaggaaggcgtcatttgccttgttataattgcatgcagtggttttggtgctggcgtattttaccgtttcagtgcttcagttatatttattctcctctcagttggtgtggcagttgttgcttcagcagttcttcattatcgccaagtaagtagccttaagtataagccttaattccatagcacactcttcttaatttcatagcgccaaaaaaaataaaataaaaaaaccaagtttcacccctgttaaaatgctagatactaagtcttttactgatacagcataaaatagagaccaccactagcatgttctggcacttagaactctacagtgatactatgaaagtctgtgactattgaagtctttgcattcttggtttagaggagaagtttgttaacatcaattaggaaatataccctcatggttgtctccacaaatcaggcaaatgccttgctagctatgcttcatgttaaacccctcagcttttcgcttccaggcttatgctctgcctctaggttctgggtttagctgtcctggtgtacccattgtgccatccgtttgcattttcttcaacatcttcttatttgctcaggtacacgctaagaactaactttatactaatttcacataccatatgatctacctttgatttttccgctactgtgcagttgcattatgaagcatggataagatttgttgttgtcagtgtgcttgcaactgccgtttatgccttgtatgggcagtaccacgcagatccgagcatgttggattatcagagggcacctgaaactgaaagcgacgcttagtaatgctacattatagttgtgttacttaaagccatttgtagagttgatagcaagtttctgcgtttcgtgagagacatactgtatgtcacatacatattcaggtcgagtttaaggattggatgggataaggcagttaaacattattgttgtaaagaagttaataaaagtatgcttgtgcatttcaactaaa

SEQ ID NO: 139917 - DNA, 1354 bp, Arabidopsis thaliana landsberg
tatgtgatataacacaagcagccaaaaccacgagcatagttaagaggtaataatatattttgttgtttcttgtccagagaattcatgttactcttgtctgaatcttcctcaaatctactcatgtagacctccctatctcgatctaaatttccgccaaactttttttaatcccaaagattctttaaacagaatcatcatcaatcatgaaagaaatcaagaagacgatgaccaagcagatgacggcgagacgtgacgacacgccgttacacacggcggttagagaaggcaaaacggaccttcttttggagatgatcggagaacacgacggcgtggagctgaaagagttgttggcggaacaaaaccagtccggtgaaactgctttgtacgttgcggctgagtacggttacaccgacatggttaagattctgatgaaacactcggactctgtcttagccggaaccaaagccaagaacggcttcgatgcctttcacatcgccgccaaaaacggaaatctacgtgagttgacttgattctcaaaagtctttgtgctcaagaattaccaattttgcatatatatgctgaagatcaactccatttttatctctaattgtgagtaaattgctaattatctactactgaataatccactttcattctctaattatgtgaaaattgctatttgtgtgctcattgacaaagataggaaaatgtttatgtgaatttggattttgcttttgttgcagaggttcttgatgtgttaatagaggcaaatccagaactctcatttacatttgattcatccaaaaccacggcgcttcataccgcggcttcacagggtcatggagagattgtttgtttcttgttggataaaggtgtggacttagctgctattgcgagaagcaatggtaaaaccgctttgcactctgcagctaggaacgggcacacggtgattgtgaaggagttgattgaaaagaaggctggtatggttacaagagtcgacaagaaaggtcaaaccgctcttcatatggcggttaaaggacaaaacactgagattgtggatgtgttgatggaagcagatggttcgttgatcaattccgcggataataaaggaaacactccattgcatatagcagtccgtaaaaacagagcagaggtaatcgttgatcaatcttttaagttattcttgttgcagaagttagaatctttcttgtattctttgcagattgttcagacagttttaaagtattgtgaaggcagtagagtggcggttaataaatcaggagaaacagctcttgatatcgctgagaaaaccggactacatgagatagaaccgcctctgccaaagatcggtatg

SEQ ID NO: 139918 - DNA, 895 bp, Arabidopsis thaliana landsberg
aactccgaagtcaaaggaaaccaaaaatcaaacaatgtcaatgattcaccatcttctctttcaccttcccccattttcaaaaacccagaaacagagcttctcactttcttcacccaaccatgaattccccaagacccatctccgtcgtctccaccttcgcttcaccatcctccacctctgacccaacccgaaaacccttaagcttatgggccaggtatgtaccattcacctgtcaccaccgctctttgggaagccagatccaaaatattcgaatctcttctcgatcctcctaaagacgctccaccacagagccagcttctcaccagaactccttctcatagccgtaccaccattttctaccctttctccactgatttcattctcagagagcaatacagagatccttggaacgaggtccgtatcgggatcttgctcgaagatctcgatgctttagccggcactatctccgtcaaggtatcttcatttgccaaattgagtgataaagtttgatcctttttcaggatactgtgaatctctgtcctctgactatggttgtattataggttttagtgatcttattgtgtatttgattttctgactatgtttctagtataggttttagtgatcttattgtgtatttgaatgtgtctgtacattgtgatacagcattgttctgatgatgatagtacaacgaggccactcttgcttgttacagcttctgttcataagattgtcttaaagaagccgatttgtgtcgacattgatctcaagattgttgcttctgtcatttgggttggtcgttcatctatcgagattcaactcgaagttatgcagtccgaattgagtatgtgtatagtcgtatactaattcaacttacaagcatgtatcttggaac

SEQ ID NO: 139919 - DNA, 1628 bp, Arabidopsis thaliana landsberg
aattatcatttgtaaggttcaaagtgaaaatataaaatcaaatgcacccgcgaacgcgaagaaacaatcttggccatatttagttgcaaacaaattatgtggtttgactcttgtatttccatgtcttcttcagccgggaaaagataagaccagacaaggagcttgagagagcccggaaagagatcttaaactgcaagcttggactacgcgacgccattcgccaactggatctgcttagttctgtgggaagcatggaagagaaagtgatagcttcagatggatctattcatcatgatcatgtaagcaactctttttatttattcatgtctttatagttcatactggaaactacactggagaattgcctgatggtttttaccttctgcagatattttgtgcagaatgcaattctcgagaagcttttccagacaatgatataatactttgtgatggaacgtgtaatcgagcatttcaccagaaatgccttgaccctcctttggaaacagaaagcagtaagctctagccatctgttgcatatacttatatagtcttagagagtttatacagtgtggcttctccacctgagttttttcattcaatcatattgcttttaaaaatctgaacagtacctcccggagatcagggctggttttgcaaattttgtgattgcaaaattgaaattatcgacacaatgaatgcacaaattggaactcatttccctgtggacagcaactggcaggtaaacccttggcaagtaccattgtgtttcattttgtttgaacgcaagatagagacacttccctatctgaactctgctttactcttctagttaaacttttcttgcttttgttttgtatggataaggatatcttcaatgaagaagctagtcttcctattggatctgaagctacagttaacaatgaagcagattggccttcggatgactccaaggatgatgattatgaccctgaaatgagggaaaacggtgagggaaacagcagcaacgttagtggtgatggtggtggttataacgatgaagaaagcatttcaactagcttgagcttatcatctgatggtgttgccctttcaacgggatcatgggaaggccatagactcagcaatatggtggagcagtgcgaaacaagtaatgaagaaactgtatgtgggccaagacagcgaaggactgttgactatacacagttgtactatgtacgtaccacatccatggatttcaaaatccctgaaatgttgatctgctacaatttgttaatgatgttgttttggtggtgaaattttcggctatatttttgtctcaggaaatgtttggaaaggatgcagttttgcaagagcaaggtagtgaagatgaagactggggtccgaatgacagaaggaagagaaaaagggaatctgatgcaggaagcacacttgtaactatgtgtgaaagcagtaagaaagatcaagatgttgtagaaacgctagaacagagtgagagagattctgtctctgtggaaaataaaggaggtcgaaggcggatgttcagactcccaagaaatgcagttgaggtttgcaattgcttcgtcccggttttagtgtcttatatatgtgtagtttaccataagggaaagaaa

SEQ ID NO: 139920 - DNA, 2900 bp, Arabidopsis thaliana landsberg
aaatctgattgatacggtaagaaatcgaaactcaaattgaagaaaattcgagaagctttggatttgaatcgcgaagacatggaaaaaacagaatctgtatcaggaaatgggcggagagtggtggttatcggcggcggaatcgccggctctctcgcttcgaaatttcttcaattcgattccgatctcaccctcattgatccgtaagcttttggttcattaatttcaaatgttggagacattgtgttttattttgtcttaaatcttggttaatttcaattaggacatgactttagtttgatcagtttagatgtgtcttaatcttgattaatctcaatttaggaaggagtattttgagattatttgggcaagtttaaggtcaatggtagagccatcttttgctgaaagatcggtgataaaccacaagaagtatttacaaaatggtcgtgttgtgacttctccagcggttaatatcaccgacaccgatgttttgaccgcggatggtcttgtctttgggtatgattatcttgttattgctactggtcacaatgatgtgcttcctaaaactaggcaagagaagttatctcaataccaaacaggtatgaatatgatcttacttcgagtgcaagtatttggttaggtatatgttttgttacatctgaagtatttggttgcagaacatgagaagatcaagtcatctgagtcgattctgattgttggtggaggtccgtcgggtgtggagctcgctgcggagatagctgtcgatttccctgagaaaaaggttactatagtacacaatggaccgagattgctggaatttgttggtcagaaagctgcagacaaggcattagactggatgaagtccaagagagttgaagtgatattgaaccaaagggttgatttgagttcagcttcagatgggagtaaaacgtaccgaacatcgggtggagagacgatacacgcggattgtcacttcctctgtactggaaaacctttgtcttcagaatggttaaaaggaactgttctgaaagataacttggatggcaaaggaaggcttatggtcgatgagtacttgagagttaagggtcgcaagaatgtattcgctattggtgatattactgatgtcccggtaagtgatatcagaatgttttcttctttctttagttactataaatatcagctgaagatgtatatgattcctatgacaggagatgaaacaaggctacattgctgagaaacacgcctctgtagctacaaagaacataaagttgttgatgtctggtgggaacgagaagaagatgtcgacttacaagcctggtccggacattgccataatatctttaggaagaaaggactcggttgctcagttcccattcatgacagtctcgggttgcatacctggtttgatcaaatctaaggatctgtttgtcgggaagacgaggaaggcaagaggactaaatcctaaacttgtataagtttgattcctatttgtgttttcaggttacatcttgtgtgcagatgtaatcatgttgtttgtgtttgtgtttgtttttgtgttgatttcattgtttcagtgtggttgattttgcttatgttggtatctaatgtataaataatggaattatttgagtcgactaaaccggaaaatcaaataagatcaaaccggaaaccaaacataaaccagaaaaaaaaaacaaattgaaatcatttcgttcaaacctctgagcattccagcgactgttttaggttgaatcggagatctcttggcggagagacatacaccggctagttcaatcatccctgtaaacccctgaatctttccgttgaagaaactaaagtttaaatacctaagagaacgtttacttatgagagtgatgtgatcgagacttttgtgagtcgaggtttaaagattcagaagataagcgatatgtctcgtgaatcagagaacactgatgatgaaccatcgaaatgtatgtaattcgttcctctctatgtaataagctttaagatgcattgaatcacgataatctgtgtataatttagtctgttggattaacttgattaggattagtaattgcatactaagatcttggagcttttgaatttagtcattgttgcttctttggattgctcatcataattttaaattctgattgtatagggatgaagttccgttcactactggtgttctcgatgcttctgcgtgtgtttttgattgtttatggagaatggcaagatgctcatatggaggtccggtacactgatgttgattacattgtattttccgatgctgcttcgttgatggcatccggagaatctccttacaagcgaaccacataccgttattcgcctttgctcgcgcttcttctgacccctaattccttctttcatcggtcatggggaaagtttctcttctcagcttctggtatggcatttcttatagttatctcatctttcttatgtttattatgtcttaacagaagaaaattagtagaaagttcaaccttttttggtttagttcatcagcctcacaatgtgtcgatgatttgtttctctgtcgttttggaatctatttccatgtttcagatttactggtcggctggtttatccataagattttgaaacaacgtaaggtgcctgagaagatatgtacatattctgtaatggtttggcttttcaatccgtttacattcactattggaaccagagggaactgtgaacccatcgtttgtgccatgatattatggatcattctctgcctaatgcaaggtagacacctactttgagattagtacaagtcaagggaactttttttctgtagactattattaagtttgcagcttttatgcattgatagcctacatttagttccatgaactaatttatatcagttcaattcatat

SEQ ID NO: 139921 - DNA, 1207 bp, Arabidopsis thaliana landsberg
acaaaacccgaaactgaaacagagaatccaaaaaaaatgccacaactcgagaacaacgagccacttctaatcaacgaggaagaagaagaagaaacagcgtacgatgaaacagagaaggtacatatcgtaagaaacgaagaggaggacgatctagaacacggcgtcggatgcggcggcgcaccaccgttctcatggaagaagctatggttattcaccggacctgggtttttaatgagcattgcgtttttagatccagggaatctcgaaggagatcttcaagccggtgcggttgctgggtactctttgttatggcttctcatgtgggcaacagcaatgggtcttttggttcagcttttgtcggctaggcttggtgttgcgacaggtcgtcacttagctgagctttgtcgtgatgagtatcctacttgggcaagaatgggttttttttttagttgggttatggctgaattggctttgattggatctgatattcaagaagttattggtagtgctattgctatcaagattttgagtaatgggattttgcctctttgggctggtgttgttattactgctcttgattggtaaattctcaatttttagacatgtgtcttcttgtgttattgtttcatttgtctgtgtttggtcccagttttgtctttttggtttatggttctaatagcagtttagctaatctaatctatggattgtttgaatttggtgttagttaaccattagctgtgttaatttcatctttacacatgaatttttgtcactatgtgctcatttggtcattgattcatatgtgtgttttgctcaaagttttggtctttttgttggaatcaggaaactctagtgagtgtttatggtactaattgtaatttagctaatctattctatggattgctcaaattattatgtgttaattgattagctgtgttaatgtctcgtggaatttcatctttcggtgtgagtttttggtgttatgtatctcattgattcatatgtatgtgttttggtcacagtttcgtcttcttgtttcttgagaactacggaataaggaagctcgaggctgtgtttgcagttcttatcgctacaatgggagtctcattcgcttggatgtttggtcaagctaagccaagtggctctgagcttctcattggttaagctttctttcttctcctgatcccatttcttattggaaactctg

SEQ ID NO: 139922 - DNA, 465 bp, Arabidopsis thaliana landsberg
accaaattcatcatctttctttcttcttcttcctcatcctctcaatcatatctctctctctcacagagattgtgacttcacgcacacgtaacctaaatcgaagatggtgagaaaatatagaaaagctaaaggaattgtagaagctggagtttcgtcaacgtatatgcagctacggagccggagaattgtttatgttagatcggaaaaatcaagctctgtctccgtcgtcggtgataatggagtttcgtcgtcttgtagtgggagcaatgaatataagaagaaagaattaatacatctggaggttatttaatgttgttgattctagattcttgtaactgtatatgtatcatttaatgttaatgtttttttttttgaaattttgaaatttttgtaggaggaagataaagatggtgacactgaaacgtcgacgtatcgacggtgagtgttaaaaaaaaaactgaaaat

SEQ ID NO: 139923 - DNA, 1302 bp, Arabidopsis thaliana landsberg
  unsure (1)..(1302): unsure at all n locations
atggcgattggaaggtttttgtttggtattggagctgattttgatgcagtgaattctgttaatttccaaccgatgatcgatgccattgcctctggaggattcggggtatctgctcccacgcatgatgaccttcgagggtggatactgaagaattgtgttgnnnnnnnnnnnnnnnnnnnnnntgaatgcaaagcgatgtggaagaggactggctgttctattttggttgaggaactgaactctgataaaggctttaaagttcttaactttttggtttattgccctgaaaaggtagtgtttctgaaatctgtggacgcatctgaggttttatcttctgctgataaattgtttgagctacttagcgaactggttgaagaagttggcagtaccaatgttgttcaagtgattacaaaatgtgatgattactacgttgatgctgggaaaaggttgatgcttgtgtatccttctctatattgggttccttgcgctgcacattgcatagaccagatgctcgaggagtttgggaaacttggctggataagtgagactattgaacaggctcaagctatcacaagatttgtttataaccatagtggtgttttaaatctgatgtggaaatttacttctggtaatgatattctgctaccagcatttagctcttctgccacaaattttgctacattgggaagaatagccgagctcaaaaccaatctgcaggctatggttacttcggccgagtggaatgaatgttcatattcggaagaaccaagtggattggtgatgaatgctctcactgatgaagccttttggaaggcagtagctttggtaaaccatttaacgagtcctcttttgcgggctttgagaatagtttgttctgaaaagagacctgcaatggggtatgtctatgcagcattgtaccgagcaaaggatgcaatcaagacacatctggttaatagggaggattacataatatactggaaaattatagatcgatggtgggagcaacaacagcatattcctttgcttgctgctggtttctttcttaatccaaaactcttttataataccaacgaagaaatgcgtagtgagcttattctatcggtgctcgattgcattgagagattggttcctgacgacaagattcaagataaaatcatcaaggagttaacctcctacaaaactgctggtggagtttttggaagaaacttggcaataaaaactcgggatacaatgcttcctggtatgggtaaattttccttgtttttcttggataaaatcttttcgcttggccttttttttacc

SEQ ID NO: 139924 - DNA, 692 bp, Arabidopsis thaliana landsberg
atgaacaagaacaggattgatgttaagatcgagacgaagaaaggatcgatggatgagtggcctgagccaatcgtccgagtccagtccttagccgagagcaacctctcctctctccccgaccgttacatcaaaccagcgtctctacgccccaccacgaccgaagacgctcctaccgcgaccaacatcccaatcatagaccttgaaggactcttctcggaagaagggttgtctgatgacgtcatcatggctcggatatcggaggcttgccgtgggtgggggttcttccaggtggtgaaccacggggtcaaaccggagctgatggacgcggctagggagaattggagagagtttttccatatgccggttaatgccaaagagacttactcaaactcaccaagaacctacgaaggctatggaagtagactaggtgttgagaaaggagcaagtcttgattggagtgattattactttctccatcttcttcctcatcatttgaaagacttcaacaagtggccttcttttcctcccaccataaggttcctcttctttaatcattttctcttctttttaagaattttttagtgaattttcatgagtactgagtagaaaataataaatacggtatgtatctattctttaaaatgtacggacatgtggtacaatcttgggaaattatcccctttttatttagt

SEQ ID NO: 139925 - DNA, 1505 bp, Arabidopsis thaliana landsberg; identical to SEQ ID NO: 10234

SEQ ID NO: 139926 - DNA, 1449 bp, Arabidopsis thaliana landsberg
acccgtctttgccggcgacacttctctactgaatatttcagtaaataatctcttcttagatctctccggcaatggcaattccgttgcctcttacctcttgctccccaatctcaacttcttcgtctatttcccgaacctccttcgtccctcttacacttcgcaatcgtactttcttctccaaccagaattacagtaggcgtgtacttatcagctgctcttcttctttgtcctcagacaatggttcatctccagactccatgaacggaaacgggaacgggaacgggaggtattattaatcttcaagttttaatctttacgcccaccagatgtttgtgaaaatttgtcaatgaagatacttctgggtttagggtttaagagtttattaaaatatattgcaaatctgattttattgttttggttgaagtaaaacttaacccatttataatgtttggaactttggctgattttgttaatactctgttgcgatcatctgtaattttcagtagcttaaacgggcaatcatctttcccacgactgccttcctttgatggaacatccaaaccaccgcttaaatggagaagggttttactcaaagtcagtggagaagctcttgctggagacgaggagcaaaatatcgacccaaaggtttattgtgataccaaaagaaccctccttgttttgctttctttgttctctgtttccttacttcagaagtctcatccagtttcccgttaattaggttactatggcgattgcaagggaagttgcagcagtgactcgacttggcattgaggttattctctaaacgcttcattcaaacattcttgttctagttgtcattgtgataattggattcaaaattttttagtggatatgtattcagctttgagttcttcctatacataagtataatacccgaagtatttgataattgcctgtgtagatgtaaccaaatatgctggaaatcaattagctcaaacttacaagaaacgggagcttaagttaaggggtggagatatatggcattacacaacttaaagttagaaatttgttatgatttaaacatactatacggcaacagatcatgtgtctgggtcattaagaatcattgcaatgttgtgtgtgctctgtctgatcttcttacgcctttacaataggttgctatagttgttggaggaggaaatatctttcgtggatctacctgggctgggtgcagtggccttgatcgctcctctgctgattatatcgggtaatcatacgcctttgtgtcaaaggatcttcttcttcttactcggagaagatccagaattttcctctattggaggtttttggtctcattggtttatctgaaattggataggatgctggcaactgtgatgaatgcaatatttcttcaagcgacaatggagagtattggcatcccaacccgtgttcaaactgcctttcgca

SEQ ID NO: 139927 - DNA, 882 bp, Arabidopsis thaliana landsberg; identical to SEQ ID NO: 8283

SEQ ID NO: 139928 - DNA, 1703 bp, Arabidopsis thaliana landsberg
ctaacattatcaaccatagctaaaatttcgggatgggaatgacataatcatctatcaacctcaattattttgtttactttttgctgtccaaaagttttcatcaaatagtttataggataaaataaaggtgtaaactccatgtttttgtttaaattttgtaaaataaaaaaagaagaagaaggaattagatgtcattccaaccctatgaagcaattcttaaaccgtctaatttaaacgaaaatactaattactgagctatgatggtagaaaactcagttatacttggctgttttgaagaagaagaagaaaaaaacaataacgacgtcatctctctataatgccgtaagcatacagaccaacttccttacaccattaatttcttagatttttctgctttctcattttttttcttttctttttcggtacgggacagattttgaggatcctttaaccattcttttaagaatggttgaatctttttcttttttcctcctttagttatcttcacataactcaagtgttgacaaattttaggagacattttaaaaatccaatatcttcgtttaaaataacatttaatttttaaaagacgttattaaaagtaattgcattttcaacggccgaatgaaattaaaaaattcatcacaattaaacaattaataataaaaataatccaaaatctgtaacctcagtcgctatttatagctaagccacaagcttctctcaccacagacaaacaaaaaaaggtttggttccaaaagctaaaaagcttccatctacattagagtctctctatttagcatttacacacaatcacacacacacacacacacacaccaaaatgatagcttacatagaaccatacttcttggataacgacgccgaggctgcctctgccgccaccgccgccggaaaatctacggatggtgtttctgagtcacttaacatccaaggagaaatcttatgtggtggagctgcggcggatatcgccgggagagattttggcggcatgaactgtgtgaagcctcttgctgtggtgagaccagtgggaccggaagatatcgccggagcggtgaaagcggctctgaggtcagataaactaacggtggcggcgcgtggaaacggccattctatcaacggtcaagccatggcggaaggaggactcgttgtcgatatgagtaccacggcggagaatcatttcgaggttggttatttatccggcggtgatgccacggcgtttgttgatgtctccggaggggcattatgggaagatgtattgaaacggtgcgtttcggagtacggtttggctccgaggtcttggactgattatcttgggttaacggtgggaggtacgttgtcaaatgccggcgttagtggtcaagcgttccgttacggaccacagacgtcaaatgtaacggagttggacgtcgttacgggaaatggtgacgtcgttacttgctcggagattgagaattcagagctattcttctctgttttaggtggtcttggtcagtttggtatcatcaccagagctagggttttgctacagccagctcctgatatggtgaatacttaaaaccaacaatataaataacaatctcagttatatatatatattttctctaatccaatcaaaaataagatatttggtccataatataaatgattgttgtgttaggtgagatggataagagtagtataca

SEQ ID NO: 139929 - DNA, 1294 bp, Arabidopsis thaliana landsberg
gattttgaaccgccatggcttcttcttcgctctctaatctgatgctcgccattcatgagaagaagacgagctccgttgatctctaccgtcctctccgcaactacgttactttcacctactctgagcgcgaggctcagcttatagacgacgatctcgagaccttgaagcagctccgatccgatatagaacgcgtttccgatccttctccagctgctcggcgagaccttctcatctcctattacaaagttctttgtcttgtggagacgcgatttccaatttcccctgacaaggatcatgtcaacgccgtctctttcgtatggtacgatgctttcaagcaaaagcataaagctactcagcagaacattcatttggagaaagcagctgttctattcaatcttggtgctagctacagccagattggactcggtcatgaccgcaccaccgtcgatgggcgtcgtcaggcttcacatgcgttcatggctgcagcaggggcgttcgctcacttgagggataacgagtccattaaggcgacgatcgggccgagcactaccgtggatgtgtcggttgagtgtgttggaatgttggaacggttgatggtggcgcaggcgcaggaatgtgtctttgaaaataccattgctaaaggaagtactcctggtgtctctgctaaaattgctaggcaggttagtgtcaaatcatgattgcatctcttttagaattagatttaatagattcttccatgattgattatgagtatatttgttattaacgtgcttagtttatggtgatgcatctcgattgaatttgcgctttgtgtctgcttgcaatcaggttggcatattttatgaggaggctttatctgcgctaatcatttcgccattgaaggatcatttcgacaaaggctggatttctcatgtgcagctgaaagcagcactcttctatggtgaagcttgctttagatatggaaaagagttgcacgagaaagaggaaattgcagaagaaattgcacggctgaggagtggagccagccgtttggcagaagcaaagaagtcgacaaggggagctcctgctcagcttatagaagcgatgaacataatagagtgtagcactaatggcaattaggatagtgctgtcaaggaaaacgacagagtgtacctcatgagagttccttctccttcttctttgtctccacttcccgccttctcaatggttaagccaatgaacatgactgatattttggatgcaagcaaggaaaaaatgttttcaatccttgttccagacagcagtgcaaaggctc

SEQ ID NO: 139930 - DNA, 3008 bp, Arabidopsis thaliana landsberg
  unsure (1)..(3008): unsure at all n locations
aggtggtcagncaagtggcacagatcaggggttatggctttctgaacttgctcaggtggcgcttgagctaataggggtaatcatctgaaattgatttaattttcttgtttaatgtgtttatatggggttctttttgtatgcttcattagtgataagtgtttttttcattctttgtttttctgttgaagttttgcggatatttttaattgtgttttatatgtgtttgtagattgtgacaaattcagggcatgcaactacactaacagccagtgatgctgctactccaacactgaggcgcattgaaagagctgccattgcagcagcaacgcctataacttatgattctaaggagcttttactgcttatccatgagcatctccaggcatcaggtcttggtgatacagcttcagcactgttaaaagaggctcaattaactcctctaccttcatcggcttccccttcttctattgcatattccactacacaggagatgtctacgccgctagctcaggaacaatggccctctggccgtgctaacagtggatttttcaccagcaaacccaaggtctgtgcacatgacgaagatccaaattctagatctaatgcagctctatctgccaagaagaagcatttggcttcctcgacactggagatgcccacaccagtagcacagcaacaatggccatcaggccgtgctaactgtggtttttgtcccagcatacccaaaatcaatgcacgtgatgaagatcctagttcgagaggtaacgcagctccatctgcaaagaagaaacagttgactttctcacccagttttagttcgcagtcaagaaaacaatctttctcccatgacgctctacctcagtctacacagagaataaattgttgttcgaattcagatcctgctttggcagatacatcagaaactgctgcagaattagttttgaagaacgaccttgatgccgatgctcaatttaagaccccgatttcctttccaagaaaacggaagttgtctgagcttagagactcgtcagttccgggtaaaagaatcgatttgggtgagcgaaggaattcaacctttgcggatggctcaggtttgcaaacaccagcttcagctttagatgccaaccaatctgggagttccagactgggccaaatgacacctgcttctcagctacggcttccaagtgatccccagccttcaaatccagaacggttatcactagactcccttgtggttcagtatctaaagcaccaacacaggcagtgtctggctccaatcacaactcttccccctgtgtctctcctacatccacatgtctgtcctgaacctaaacggttacttgaagctccactaaacatgactggccgtcttgggacccgtgagcttcaaagtttctacagtggagtccatgggaatcgcagggatcgtcagtttgttttcagcagattcaaatcttggagatctttccgggatgagactgctctctttacatgcattgcacttcttggcggtactaatcatatagcagtcggtagtcatgctggagaaatcaagatatttgaagctagcagcggtagcatgcttgagagtgtctcaggtcaccaggctccggttacacttgttcagccgtatgtctctcgtgatactcagttgttactttcttcgagctccagtgatgtacagttgtgggacgcgtcttctataactggcgggcctagacactcctttgatggatgcaaggctgcaaaattcagcaactctgggctacaatttgcagcgctttcttgtgaagcatctagaaaagatgttcttctatatgacgtacagacctgcagcccttgccaaaaactcactgacacagtcacatcctctcgaagtaatccctattctcttgtgcacttcagcccttgcgatacactgattttgtggaatggtgttctctgggaccgccgtatccccgagaaggtcagacggtttgatcaatttactgattatggcggaggtgggtttcatccttctaggaacgaggtaatggataaatcatattactttttaatctaaattatgtgataataccaaagcaatgaaattgtcattcctattctagttgaccaaaccctagaacaatccactcccttaaacagtcgaagacagctttataaaagtccctcactaactgctccagaaccatttcacaacaacttcagatattctacattaactcctcggctacaatatagataaaaagttactcactgtttcttggcttttcaacatgttacttattacaggtgatcataaactcagaggtctgggacatgaggactttcaaacttcttcggagtgtaccatcactggaccagacagctattacgttcaactctaggggagatgttatatacgcaatgctgaggagaaacatcgaggacgttatgtcagcggttcacacacgccgtgtgaaacatcccttgtttgctgctttccgcactcttgatgcgatcaactactcagacattgccactatacctgtagaccggtgtcttcttgactttgccacagaaccaacagattcgttccttgggctgatcacaatggaagaccaagaagatatgttttcctcggccaggatgtatgagattggtagaaggagaccaacagatgatgactcggatcccgatgatgatgatgagacggaagatgaagatgaagatgatgaagaagaagatgacctggaccgaattctgggactagctggagacaatagcgatagtggggatgatgaccttagcagcgaggacaatgaagatagtgtgagcgattttgatgaagaagcagatattctcattgacggtgactttatggaggagcttatagaaggtgaaaatgaagacgatggtaatggtgaggatgaggatgatgatgacgacggtgagatgcaggatttcatgagcagtggggaagaggatgattatagagacaacattcgttcttcctaagtttttttttg

SEQ ID NO: 139931 - DNA, 1415 bp, Arabidopsis thaliana landsberg
ttcagggcacagctttttggcccgttgagaagtgaaaataccatttgtataatcatagaagacgtacaagcccctattttcaaggttctccctttaactctctttctggactaaaacctgtttttccttggcatgactttgtagaattttatatttgtagctttagaagttgaggctgttagttttagtcctaagtgtataaggccttataagaagagatagctttcttggttccttgccttttctcgggtgagtgattgtggtgtgatacaggattttctgtttacgagtgtacaatccgggaccttctcctggggtgctgctcccgttctcaaatattactcacccgggataaggtttaatctttctacttttcttttggattgcatgattgtctcgatttcccgcatgcagtaaatacatagagaaattatgttatagatcatcatgttcatgtcaaattttctgcttttcagctttgcttttttttgttaagattggtctttagtcgatgtgcgagttttagatcatggctcctgtaaatttaaggttgatacaaattcccttccttttggtttattgtacttttttgttgttgttgcagatgttgcttcattttatctactgggatgaaatgcctgatatgcaagacttaatcggcacagacttgaaatgggcatcaactcttgtggctcagcatctgcttgcagctgcagaccgttatgcttttgagcggcttagaacaatatgcgagtcaaaactctgtgaaggaatcagcataaatacggtagcaaccaccttggctcttgcagagcagcatcattgtttccagctgaaagccgcctgcctcaaatttatagctttgccagaaaacctgaaaggtacagaagatcactccttgcttgtttgaatcgctttgatcatgtctgaaatctgaaggccgcccttgtaacaaaaagttgtctgtaatttctttagctgtgatggaaacggatgggtttgattatctgaaggaaagctgcccgtccctactaagtgagctattggagtatgtggctaggctgagtgagcactctttaacatcatcagggcatcgaaaggagttatttgctgatggttgtgacttaaatgggagacgtgtgaagcaacggttacattagcaactaattgagagagagagagagagagaggtcacttcgagagcctgagaagatgatggtgaagtaaacagaattttagaagagtaaagatttgtgtatttgtcattgtaaaaggattagtggttgatctgtgttgttcagctagctaatagagtgaaatgttgggtttttttcttttcttttctcttttgttttcccaggattttatgaccagaaccggttctctcaaggaaaaagtttcatgtactcattgat

SEQ ID NO: 139932 - DNA, 1580 bp, Arabidopsis thaliana landsberg
aacgcgggtcttcttctccaaaacccatttcctcacaaaatccatctgagaaaaagagcaacaagtttcattttcatggtggtgatgacgaacaaattcttcgaattaatcggcggagctccgtcgtattcttcagtatccgtcgctgttaaaggatccgtcggtgacgccgtaggaggaactgctagtcgtcgtgctcttcgttggacaatcgaaaatttccttcctaaaatcgatagattagttcttgttcatgtcatgcctacagttactactattccatctccttgtaagtctcgattcgaatttttttgttaaatcaatttcgagattcatgaaaatttgacactagtttttgtttgatttaaaagctggatcgaagattccaatagaggaattggatgagagtgttgtgtctatgtataagcgagatttgagaaaagaatttgaacaagtttttgttccgtttaagaggatctgcaaatccaacaaagtgagtttctgtgaaagctaaatttatgatactgattttggaagttttggagaaggcttatggaataattttactggttaaatgtttaggttgagactttgttgttggaacatcatgatcctgcaaaggctcttttgaagtatatgtcagatactgatgttgagtgtttagtgattggctcttgctcttctaatttcctcacaaggtaatgttacataatgggatttgatatctagtatgtgtttgtatatggtatgatcttgcttagacgtttggattggttttgacaggaaaaaaggacaagaaatgccattaacggtgctaggagaagctccagagacatgtgagatatatgttgtttgtaaagatagaatcttaaccaaatcgacgaatcagtttaccgcaggtatgtttcaattgcattgatctaaaatctgaagtcaagaaggaaaaaaatacaagttttattgatttcccctgtggtttttgtttctgtgtgaaattttcaacagattcatcatctagtttccgtataccagaaggagctgaagcttatacagaatctttcagtcgcacacgctctgataagacagggttgtctgcttcatctataacatcttcaggcaggatgagaattggaaggcctggctctttaccgcatagtcatccgacctctcgagtgtattctgatgcacagtcttcttcaactgatattgttttggtcgatgacgaacacagtcgttctatccttaggcatagtactgtttccactagtaaaatacagatggatcctagacctcacttaaaaacaccaaaggtgaagcattaaatatatgaccattttgattctctgtgacacaaaatgcatatgattttgatccaagatctgtttttgcagtcaggtgtaagagctgaggtagagcagctaaggaaagaagtgcaaaccactctttccatgtacaaacaagcttgtgaagagctagttcataaacaaacacaggttggagttctagaagaaaactttttttgttctcgaaatcctttcctaatgtttttacatcttatggattcataaactcaatcccat

SEQ ID NO: 139933 - DNA, 4817 bp, Arabidopsis thaliana landsberg
atgacgtggttgtataacgtgagtcacgtgacctatatattcatgtgtggatgcgcctgcaaagagagtgaagcacgatgagtctctttctttatttatttatgattcttactcgatagagttattcatcaatattaactagtagaaactaaagagagagcgatgtgttccttttatgtttttttttggaatttgaataacattttgggacactaacaatatgtataggatttctgattccaagctactagctagagtgcaagggagtttattttcgacacctctcggtccaatgtcactcttcgatatatatcacaatcacgctcgtctctcggatcacttctagaaccatttcactcaaaatttggatgttcttttatgttccaaattgaaacctatccattttttttttactaaacttccggattagcaactatatttgttttcttcttttttcctctagttgatttccatgtgattcttatatagttttatattttcattatatttatttctgagtttgtagattaggtacctcgtgatttataaattaaaaaatttatgaatattttctttaccaaatggaaggtggtctagctagtacccttaactgacaacaaaaaaaaagaaaagaaaaagctagtacccttaactgagtatgtaaaatcatacagtaattagttcaactccatttaaaaaggatgatttatgcactaaactaatatactatcaagtatcaacatatatatgactttggccttcgagaaacacattttatttaaagaatgtatacattctttgtgatgatcatgatcatgtgattgacaaaaaaaaaagcatgatcatgtgcctgttagagaagttttatcaagagaatttgttatgactacgtgttggatgtgtataaagccccccaaattaaaatttatgtttcaattcttaataaaatgttgttagctatcgtattaatttttgattataaacttactatatacaattaaagatcttttctttatttaaacgttatgcgatgaaagatttataataataacttttcaatattttaaatttattaattattagaatttatttagaatttggaaatgtgtctttactcaaatggtgaagtacatttgaaagagacgacaaaaaaggttagcattgcacatttgaaaatgatggaaagacgaactattacagcgggcggtgtgtcgagagatgaagaaggcaattggtgtcaagggtttcctctaaacattgggatttgtttagctgccttagccgagttatgggacgtgtattatagtctttatatagcttgagagagatgagttacacggttgaatctggaagtggactccgtggtggttgtcggtttcctgaagacatggattagtgaaccttatccgctatcattccttgaaagtttgtagtatgacttcctatcacatgtatataaagagactaattgtataacagatagatgttcaagacactgcacgggttaagaatgttaggatattggtcttgtaagttttcttaataattgaggggatattcgtctccctttgtcctgccaaaaaaaaagtccatttaattttatatttttcatcgaagtttcgattctactaaaattgggaacattactgtacatagtataaaaattataacagttatggattgagacttgtcgatacgaatatgtcaaatgaaaaaaagaatctaatgtactttctaaaatcgttttgacccgaaaaaaaagaagtaattcgattaaatgttattgtttacattaaaaccctataaagtcttatctcagttcgataattcttgttcaaggggatctctcagatcgaaggttcgatactcaaagatttcgctttttcttttctttttgtttcactttcttcttcccagcccttcttcgccgacgttttcttttgcccggaggagccgactattactcaagattttgattctgactttcaggttctttctttctttctttcttctgcagttccgtttctatcagctcaagatttatcgattaagatttctcaaagtattgatttttttttagtgattagacaaattttcatcagtaactcatgaactttgttatgattagcggcttgggtttgttttgttgaattgtcaatgaagaaaaaccctaattttgcattgtcacaggaagtaaaaatatggactttgatgatgatgacaaaccaaaagaggttaccaaaacccgtagattcgctcctggccgtgccggaaagtctaaacccaaacctaaaccggaacccactgctgataaaccggtacagccgccgccgcagtcacaaactgagtccgtgagcaagactgagcatgacgttgatgctaaattcgttggcactaaggttgaaactgaggtttgtaatggctctgtgaagatggagatcgattcaaaagtcgataaagagcctgagatcatggaaactgagttgatggaggaagatcagcagcttccattgcaggaggagaaggaggaagaagaagaagaagacgacgttgttgttcgtgaaattgatgttttctttaagccgtctattgatgctaatactcaggtctattggattagattcttcaaacaatattttgattttgctaatcgttttttggagtattgactaatgtatgtttcttaaatgtgacagctttatgttttacaatatcctctaagaccatcttggcgtccatacgaaatggatgaacgttgcgaagaagtgagtgttcctctatgtgtattgcttattcatttgttttggttctaatctttttgtttgtttatgtgtctttaaggttagagtgaatccttctacatcgcaagtggaaattgatttgtctatggatgttcattcgaagaactatgactccaattttggactaaatatgactaagcaggtagtgttttagttccaagcttgatccaagtttaatctttttgatgcaacttcatttttcttgtttttggtagaccttgaaaacaacatggaagcagcctcctactttggattatgctgttggggttctttcaggtgataaggtattttttttcctcgttttcgaaagcttgataacattgttgtgtagtgtggactggatgtcttattgaattggacttgttgacttgcagttacacttgaatcctgttcatgctgttgcccagctccggccgtctatgcagtctctttcatccgacaaaaaaaagaaacaagaagaatccactgaagaatctgtgggaacatccaaaaagcaggtatagatccaacctttgctaaataattgaggtgtatagatcggcctgagcagttagtttggctatttacatgattctagttttgagtctatatttcctttgtggcagaacaagggagtgcagcaggcttcgacggatcagaaaccaattaatgaagaagtatgagatttggttttattttgtttttatgtgatcctttcttttatttggtttgttggtgggtattgcttggtaaacttatgttgctatctttgttctttctttagacttgggtttcactcaagtatcatggacttcaatccgaatattgctccagatatcttaacgggatgatggcgaatgggaactcttcgatagatttcaacatgagcccgtatgatgcctttctctaagttcgcatgagataattttggggtttcctgcttactttaaactttttttctttttcttaatatcctcttgtatttccttgaaggggcacttatatcaacgaactatgccgtgggggaagcagcataaactttgaattgaaaaaaacatttaaaaggtacaaaatatcagggtcatctagttaacatttgtcatctaatcctcgaaaaggaattcactgtcgctttaccaatgtctggtctcatgtgtcatctagtcaacatttacaccctttcttacgttccttaatatcctcttgagttcagggtcttgctctccctaccacttaaagaacgtgtgcaaaagttgctctgcgaggttggtagctattgtaatcagcattatgtttctcaatttcctgttcttttctgtttttcaagataatgtttatatggttcctgctccttagttttgaataaaatataagccatttggctaactcgtttgatcataacagggatctccgttgattcgatacagtgttcttaaacactatgctcctgagttctcagacgaggatttcttaggggccctccaagaatatggcaggttagttcaaggtttatggactcctaaaactaggctactaaaactagacgggcctgtagaagctgccagggattatgtcctgtctctgttcagccagaatacaactataaagtactctgaagttgaagcaacgggtgacaagatgaaacctttgatggaaagaatgttgactgaatttgccaaagaaaggcatgtgctaaaagattggaagttcaaagagcccactgatgtctcattcataaaatcctacccggagattgttaaggagcaagatattttttggacggataagagagagaatctaaagtcgagaataaccgcccaaggaggaaaaagtagagctgataaaaggaggaatgttgttggcacaagttcttcagttacagttaaaccggaggttccaacaaccctctctgacaaaggaggaagttcaaaaaatacgatacatcgtgttgttacacaagaaatgccagaagaacttaagaaggcgttaccaaaggctttgaaaaaggtgtttcaaactcacaaagtttgccggtga

SEQ ID NO: 139934 - DNA, 772 bp, Arabidopsis thaliana landsberg
atctcctcccaaacgtccccttcgcttccttctcacgatcagaaaaactcggacgcgttgctgattggactcgagctctctcaaatccatcagctcgtcctcacaccggatccaaatcagatccatcagcgatcttcgatttctcagcttttgcagtagatgaaggatttggtctaacaaactcaggtggaaacgccgacgaagacgccgctttccgattagtcgacggaaaaccaccgccgcgtcctaaattcggacctaaatggagattcaatcaataccataaccgaaatcagcttcctcaacgtcgtgatgaagaagttgaagctaagaaacgtgaagctgagaaagatcgagctcgtcgtgatcgtctctacaataacaatcgtaacaatattcatcagcaacgccgtgaagccgccgcgtttaaatcatcagttgatattcaaccggaatggaatatgcttgagcagattccgttttcgactttctctaagctttcgtttacagtttctgaacctgaagatcttcttctttgtggtggacttgagtcttatgatcggagttttgatcgtattactcctaaagctgatcgtagacttgagcgtttcaagaacagaagctttaaggttactacaagtgatgatcttgtgatcagacgtcttgctaaagaagataaagctactgtttttgctactgatgctattctagctgctcttatgtgtgctcctagatcggtttattcatgggatcttgtgattcaacgtgttgg

SEQ ID NO: 139935 - DNA, 1282 bp, Arabidopsis thaliana landsberg
taaaacatttcatcagttattgaacttattttgtttataatatcacaaacaaggacttggggttggaaacctttctttatatatctctcctttaactagaagatttttttatctcgcaaaagcaaaacaaagcatatgcttgatcttcttctatttgcttttaaccccaaagaaagtggctttttctctgtcttgatgacccatccatgactcatcctttaccacaaagatctcttatcaacgattcaatgttttgttttcaactgccacttgtttctttgtatttccctttaaataccttcccaccaacacggtttcatcatcaaccctcactcacaatttctctctctctctctctctctctctctctctctcgttctcacaagatcaagaatatcaagaaacaagatcacttctcaatcctcgaagatgacattgagcagagttcatcaacaagttattgcatttcctgctgtcaatactgctccggtgggttacttgcctgatccagcttccatcaacaagcttcaaatcccaacttcttcaaagttttcttttctaacaggcaaaggaaaatcgatgctacgaaagaagaaaaacgatagcttcacaaacggagttagagatcaggacaagttaggaccaaagctaaccgaaacagtcaagagaaaactatccttgggagctaggatccttcaaatgggaggcttagagaagatctatagacgactctttaaggtcagcgatgaagagaaactcttcaaggcgtaccaatgctacctatccacaaccgcaggtcccatcgctggcctactcttcatatcatcaaagaaaattgcattctgcagcgaaagatcgatcaaggtggcttctccacaaggagttctcaatagggttcactacttagtctcaatcccattgagcaagatcaatggagtgaaccagagtcagaacacaaagaagccatctcaaaagtaccttgaaatagtcacaatcgataacttcgacttctggttcatgggattcgtgagctaccagaaagctttcaactgtctcgagaaagcgctaaacaatgatgagcaataaaccgcagtggttttctctgacggagctaattagtgcaggtggaacaagaaatatttcatttctacttttccctgtttcagtcagagaatgtttgtacaaactcacaaattctttttttttgctttacccactttggtttccattgtagacacgagaaagagatgaatatatttagttgatctcatctgttaacctt

SEQ ID NO: 139936 - DNA, 670 bp, Arabidopsis thaliana landsberg; identical to SEQ ID NO: 42924

SEQ ID NO: 139937 - DNA, 796 bp, Arabidopsis thaliana landsberg
ttaccggacaaggcaactacttcttaccaatgcattagaagcccttgtagttggtcttgtcctaggaactatctacatcaacatcggaatcggcaaagcaggaatcgagaaaagattcggcatgttcgccttcacgctcacttttctcctctcttcaacaaccgaaaccctcccgatcttcatcaacgagcgtccaattcttctcagggagacttcgagtggtgtttacagactctcctctcacattctcgcaaatacactcgtattcttgccgtacttgttcgttatctcaatcatttactctgtttcggtctatttcctcattggtctctgccccacatggcaagcttttgggtacttcgttctcgtgatatggatcattctcctaatggcgaactcttttgttctcttcttgagctctcttgccccaaattacattacgggaacctctcttgtgacaattcttctagcggctttcttcttgttttccggttacttcatttccaaggaaagtcttcccaagtactggcttttcatgtacttcttctcaatgtataagtatgcattggatgcacttctgataaacgagtactcgtgcttagcctccaagtgtttggtctggttggaggaagctcaaacaaagatctgcatggttactggaggtgacgtgttgaagaagaaaggacttcatgagaaacagaggtggtttaatgtttatgttttgttagggtttttcgtactttatcgtgtgttgtgttttcttgctctccttagaagagtttctggttcaaagagg

SEQ ID NO: 139938 - DNA, 1882 bp, Arabidopsis thaliana landsberg
cataaattcaacaaggcgttatcttttgtttctcttttctttctgaaagccaaagatcctaaacttggtttgatcggatcgctaaaaaaactattgatttttcttggtttctctaggggcgatagtggaagttggggataaagctaaagatcatggttccaacgagatacgtcgatcagtctctgaggaagaattatcggaattacttcaatatctaccagctcagaatcctacttggaagtgagtttcttaacacttcataatcttttttgagctaaacatgtgttttgttagaagcgtcaatcagatcacgctatatgctaaattgttgccatcactctttcccagttttacaacttagggaatgttgtgtgactacctttttcatgtagctcttagccttatttgcatttttttcaaggaaatctagtggctcttacttgccagaatgtaaaacagtccctaatctctttcacagtttaggcatatgctacattgttgaaactggagatgtgcaaatatagaaacgtgctgggatttcgagagcatgaccataataagatacactgatgccaatattgcacttttctccttttttgattcctttgatcttttgaccttcacaagttatatgatgaaattttccttttaactactgaaccagcggacgcattatggattctgcctcgccgcctgagtttgactgcgagttttggtctaaaccggcatccaatatcaggaggaaggccctcagacgttcaaaggcaatgcctgcgttactcaaggtcgaactgcttcctacatgccacattctaaatgatgtgtctggcagaagcccaactctattgaatgtcgaaatgtaccttttcccagatgagaagaaaacagaaaggtactcaaaacccctttctatgaaggacaagcttcttattcttgttgtatctctgttatcagaaaacttatcatctcagggcatgtacactcattcttttaggtttacaggggaacatgctactctgttcaaggcaatggtaactcgcaaagtcatggccaaagctaatataaacggcactgaattgttaatattctcctcaaaactattggacaagacctcccaatgtatgtatgcattctgaatttctgcagagcttttagtttgtgcatagattttcgatggataacatccgttttgtgttcagcagttctcatcaatacgcagaagaaaacagaaaacttcctttggggtttttttctccagaccaagaactcactaggacttgttccagaaactgcttctcaaattgataatgattttgatgatgggggtgttgttgacatggacttagacaatgaatgcctgaccccgcgtgtggctctgaagcttattacagaatcacaaaaaactccctcaagatcaccggagaaggtgaagggagaagcaagtgtacctcctggtttcgagaagatatggacaccacccttggtgaaacttaatatacaaggaacatcaaaccctctgtctgatctaactggatcggctggaatagtgcgtgaccaatcagggaagtgggtgtttgggtacatcaggtgccataagagcatccctgaagtcgtagctgggcttttggctatataccaaggcctcaaatatctctgggacagcggtttccgaagaatccacttggagacaacaagctttgagatcatcaatgctctaacaacaaaatcgtccctgttttgtaaaagtaaaacgcttctaggagcgtgcaaggacatgatattgaaggagtgggagtgtgacatttaccatatccccaaagaacagaactcatgtgcagaatggttagcaaagagatcagaagaacagcctcaacccttagtt

SEQ ID NO: 139939 - DNA, 2937 bp, Arabidopsis thaliana landsberg
ctagagatgacgagatactagacaaattaatgtgtatgaagtggtagaaagaaaagtctatgcatggttggaaaggttagaaatcataaatggttagaaataaatgagtccaagcgtgacaaatcgaaagtcaagtgtttggaagcatgagttataaaatgccgtggatgggatcaatcttgataaagaaaactagaaagattacatattacaccgcttcatattttagtagacagattattatcatgcatatgatatgattcatctgtcacgactcacgtagatacataattttagatttaaagatgccatttaatttcaaaacatgatatttgaatacatgtatcaagaacacttttcggaaaaatatcaagaacacatagattgacgtagaaaagtatcctcgaatgggacaaaccctcattgtcaatgactttgaatgaggaagacatattgaaacaacggaaaaagccataccacttgcgttgttaacataaagattaacatacaaaataaatataaacttagaatgttaacaaaaggctggaagttaattaaggggaacatgatcatcattgcttatacttgggcatcatgctcctcctcctgctttggtttaaagttaaggaatccttatcttacagccaaagtgttataattactctcatttacctccactgttatcctattatcttcgctttttttttaataaactgtattttaaacaataaaaataattaatactagtgtgaatgagagtgattcaaaagctaaaaacaatacaaacgaggaaagagagagacttcttcatatacactgtatttttaaaaaataataaataattaatactagtaattatgaggagttgttctttgttgtcgatacgaaactaaaatacataataagcaatcaaaacgagaaaaaaagaaagaaggtctgtgagatcccaattacaatttcgcaaggctttttgcaatttccatctgtcgctcaccggaggaattagaacgtgctccgaatctcttctcttccccaaatagattccgatcgattacgcaaccaaattctcggcgtttgaatttttttttccggagaacaggtggtttcttcttctccaggaagatttttgattcttctgtcggatgatttctcagtgaaaatcatggaatcggtatcatcacgcggcggagaccccgtcgtaaaaccgtcgatggaggtctggcatttccagattgctgtctatttcgctttcggattcttcttcttgaggcttgtcctcgatagatacgtctttcaagtaagtcattatttcttcgaattcatgacggaagcttttattgcctctctagtattaaattcgccttgttgatgatgtataatgcgttgacagttgaatttcttcaatcaccatttaatcctttcattaacaaaggaacagttttgttggttacttgtcgatttattggtgtctcattttgtttttaatctttgtcagaggatagctctttggcttttgagtactggttctgctccgattaaattgaatgatgctgctactcgggcaaaaatcgtcaaatgcaaagagtccttgtggaaattgttgtattatgctgcttgtgactttttcgttctacaagtcatttatcacgagccgtgggctagagatatcaaactctacttccacggttggcctaatcaagagttgaagtgagtattcacttttgctagctgccttgagtttcttggtttagaattatgcccgtagagttcattttcatggcatagtacccaggacatgtgatacattagaatgttgttttctttttttttgtaggctttcaataaagctttactatatgtgccagtgcggtttttatgtgtatggtgtggctgcgttgcttgcatgggagacaagaagaaaggattttgctgtcatgatgtctcaccatgtaattacaatcatcctgcttagctactcctacttaaccaggtaattacaccttgattcatcattttgcatcagaacatcctttgttgaaaagagttaatcaattagcacctagatttaatcagttcatatcttaagtagcacctagattttgaaaggatttgctaagtttaacaaatcaattcaatctaaaagagcttttactgtaaaaaagttctttgcatttgttttcttgttaaaaagattctgttgactgatgttttgttgtttagtgagctatagagcaacctagaaagattaaaagactactgggaattgttttgttttcttctgcagttttttccggattggagcaatcatcctagcccttcatgatgcaagtgatgtctttatggaaactgctaaaattttcaagtactctgaaaaagaatttggagcaagtgtatgttttgcattatttgctgtctcctggctattgctacggttgatatacttcccattttggatcatcagggccacgaggtagacatactatatttgaactctatttagttttaatgtcttttacttgatgtcaatgtttgatctgagattcacatttttgtttgttgaagcattgaactcctggattatttggatatgacatcagctgaaggcacattgatgtactattctttcaacactatgttactaatgctgcttgttttccacatatattggtggtatctcatttgtgccatgattgtaagactacttaaaaacagaggaaaagttggagaagacataagatccggtaagacttgtttatatctttcatatgagtccgggtcatctttctctattgctaaactggctagctttaaggggaaatgactttcttacttacttgcaaagccacaagctattatagtcttcttcattaatgtatgttgtgttgggtatgtaatgtgatctattgaagtttttgtgtaaccatagtatggttcttt

SEQ ID NO: 139940 - DNA, 1128 bp, Arabidopsis thaliana landsberg
gagatagagagaagaatcatctcctatactctagctccaacaatggctaacaaaaacccacttcaaaaaccctttcttttcataatcttatcaatcaatctcatctttcttcaagcagaaacaactactcaaatctctaccaagaagacttatgttatccacatggataaatctgccatgcctttaccttacactaatcacctacaatggtactcttcaaagataaactctgtaacgcaacataaatctcaagaagaagaaggtaataacaacaggatactctacacttaccagactgctttccacggtttagcagctcagcttactcaagaagaagcagagaggcttgaggaagaagatggtgttgtagctgtgatacctgagacaagatacgagcttcacactacaagaagtccaacgtttcttgggttagaaagacaagaaagtgagagagtttgggctgagagagtcaccgaccatgatgtggtagttggtgttttagacactggtatctggcctgagagtgagagcttcaacgatacaggtatgtcccctgttcctgctacttggagaggagcttgtgaaactggaaaaagatttttgaaacgtaactgcaatagaaagatcgttggtgctagagttttctatagaggctatgaagctgcaacgggaaagatcgatgaagagcttgaatataagtcaccgagagacagagatggtcacgggacacacactgcagctactgtagctggctcacctgttaaaggagctaatctttttggatttgcttatgggacagctcgagggatggctcaaaaggctagagttgctgcttataaagtctgttgggtcggagggtgtttcagttcagacattttgtcggctgttgatcaagctgttgctgatggagttcaagtactctctatatcattaggtggtggggtctctacttattctagagacagtttgtctatagcaacatttggagcaatggagatgggagcattcgtgtcgagttctgccggtaatcgaggcctcgaccgattagtctcactaatgtatcccaaggatcacacagttggatgcagactatggatagagattttgagcatcagtgaagataggact

SEQ ID NO: 139941 - DNA, 1620 bp, Arabidopsis thaliana landsberg
ccggaaccacacaactgttcttctctccgggtctcctcctcaccaaaccggtttatcgacttaagcggttcacctttgggagtctgggactcttcttgctctcgtctctcacttctccgaccttgctctcctttaactctccccaactgttctcgttgtccttgggactgtaaactcctaaagaatccgggtcggatcctccacggttgcgaatcaacccacgggtcgttatctgaacaaggctgtcaaggagatcttcttggttttcttcaagatttcttcactagatttggttttgaagttgaatgggacgaatctcaagatccacacttcattaaatgcagagattgtcaaatcaagaatggtgtttgcgggtttaattcaacccacccgaatcatgatttcctctgtttccacaaatcaagatccgaattagtaactcaaagagataacaacaaaagagtcaatcatattgctgtgttgtctcttatcttcgctttgacttgtctcttacttgttttctccgtcgccgtagcgattttccgatcacggagagctagctttttatcctctatcaacgaagaagacccggctgctctcttcctccgtcatcaccgctccgccgctcttctcccaccagtcttcaccttcgaagaactcgaatccgccacaaacaaattcgaccccaagcgaaaaatcggcgacggtggtttcggttctgtttacttaggccaactcagcgacggacaactcctcgccgttaaattcctccaccatcaccacggcgcaaccgccgccgccaccgagcattgcaaagctttctcaatgaagtctttctgcaatgagatcttgatcctctcttcaatcaaccaccctaacctcgtcaagctccatggctattgctctgacccgagaggacttcttcttgttcacgattacgtcactaacggtactctcgctgatcatcttcatggccggagaccgaagatgacgtggcgtgtaaggttagatattgcgttgcaaacggctttagctatggagtatcttcacttcgatattgttcctccggttgttcatagagatataacttcgtcgaatatctttgtggagaaggatatgaaaatcaaagtcggagactttggtctctctaggctcttggtgttttcagagacgactgtgaattcagctacttcgtctgattacgtttgtaccggaccacaaggtacgcccggttatttagacccggattatcaccggtcttttcggttaacggagaaaagtgacgtgtatagctacggtgtcgttttgatggagttgattacgggtatgaaagcggttgatcaacgacgtgagaagagggacatggctttagcggatcttgttgtatccaagattcaaatgggtcttttggatcaggtgattgacccgttgcttgcgttagacggcgatgatgtggctgcggtgagtgacggattcggtgttgcggcggttgctgagctggcgttccggtgtgttgcgacggataaggatgatcgtccggatgctaaagagattgttcaggagttgaggaggattaggagccatacacgtgtagcggatgatgacgtggcgaaaaattga

SEQ ID NO: 139942 - DNA, 685 bp, Arabidopsis thaliana landsberg
gttcttggtggttacatctttgtttgcaacaatgatactatgcaggaggatatgaaacgtcacctctttggtaatttcccaatacccttttctagtgttttactgatattcaaactgcaagtaaataactttttgactttcatcattgttcaggtttacctccaagatacagagactctgttcgagctataacacctggattgcctctgtttctttacaactacaccactcaccagcttcatggtatctttgaggtttgttctcgtgcttttttttgtcataacaatggttttgatgctaccatttactgaaaatttgatgttcgaattattccgtgaatgattccttgtttaggcaacaacttttggaggtactaatattgatgctactgcttgggaagacaaaaagtgcaaaggagagtcaaggtttccggctcaggtgaaacttaaatcacaatgactttcattgttttaagtctttattttgatatcttgtactaatataacttctttctcttaaattgtaacaggtaaggatcagagtgaggaaaatctgcaaagccttggaagaggactccttcaggccagtacttcaccactatgatggtccaaaattccgccttgagctctctgttcctgaggtgcgtgtccatatacgttttgtgaatgacagtaatccaatcttt

SEQ ID NO: 139943 - DNA, 718 bp, Arabidopsis thaliana landsberg
tcacagaacatatatcagcaaggaggaagaacattttgggtacacaacacgggtcctttcggttgtttacccgtgaacatgttttacatgggcactcctgcaccgggctacttggacaaatctggctgcgtgaaggctcaaaatgaaatggcgatggagttcaacagaaagctcaaggaaacagtaatcaatctcagaaaagaactcactcaagcagccattacatatgttgatgtctacactgcgaaatatgaaatgatgagcaatcccaagaaactaggtaaacgacaaactggtccatcgcaattcaatttgttgttaagtacctattctgtagaaagttttagcgttctcattacttgtttttgcaggatttgcaaaccccttgaaggtatgttgcggctaccatgagaagtatgatcacatctggtgtggaaacaaagggaaagtgaacaataccgaaatctacggtggctcttgtcccaacccggcaatggctgtgagctgggatggagttcactatacggaagctgcaaacaagcatgtggctgaccgtactctaaatggtttgctcacagaccctccagttccaataacccgagcttgttatagacaatgagatttagtagaagcgctagatgaaccgaaataaagatttgatccttagactcttagggcaataatgtaagtgttttaaggaacaatcaatgatctatgc

SEQ ID NO: 139944 - DNA, 1709 bp, Arabidopsis thaliana landsberg
  unsure (1)..(1709): unsure at all n locations
cttcaaatgttcattggaagaccaataccttatcttctactatcttcaccttccttccatggcttccgctgcggcggcttctccttctctctccttaaacccaacctctcatttccaacaccaaacttctctcgtcacctgccttaaacctcctccctcctccgccctcttccgccgcaaaacccttcctttcttcgaacgccactcacttccgatttcagcttcttcttcttcttcttcctcttctacttccctctccgttcacgagaaacccatttcgaattcggttcatttccacggcaatctcatcgagagcttcgagaatcaggactcttcatacgctggaaccattaaaggagcaagcttgattgatgagcttgagaatcctgtcgaaaggaatggactttctggtcggagaagactgtttatgcaagacccaccatggatctctgctttgtttctcaagggtttgagtaaaatggttgatcagactttgaaaatcgagcggaaagatatcgataagaggaaatttgattccttgaggagacgacaagtgaaggaagagactgaagcgtgggagaggatggttgatgagtacagagatttggagaaggagatgtgtgagaagaatctagctccgaatttgccttatgtgaaacatatgttcttgggatggtttcaacctttgaaagatgtgattgagagagagcagaagttgcagaagaataagagcaagaaggttagagcagcttatgctcctcatattgagcttttgcctgctgataaaatggcggttattgtgatgcataagatgatgggtttggttatgtctggacatgaagatgggtgtatccaagttgttcaagctgctgttagtattggcatagctattgagcaggaggtatgaatgagtagtaagttaatttgtttctataaagaaatgatgtgttgagtcgtggttttggttgatctcttaggtgaggattcataacttcttgaagagaactaggaagaacaatgcaggggactcacaagaggaattgaaagaaaagcaattgcttaggaaacgtgttaatagtttgattcgaaggaaaaggattattgacgcattaaaagtggtgaaaagtgaaggtaccaaaccatggggacgagctacacaagctaaggtctggctttgataattcgtttgagtgaaattatagtatttgcctttggtattgacacatttcatctttgttgttgggcttatgctaaatttcagcttggaagccgtctgctagaactattgatcgaagcagcttatgtgcaacctcccttgacccagtctggggactctatacccgagtttcgacctgcattcagacacaggtttaaaactgtgactaaatatccagggtgagagaaatcctcaaaatgagtacccatctctttatttgtttttctagtcagttgttttatgtatagaaccgtctattgcaagaaagttgtttttttctcaactgggatatatgcttatggtgtagagtttacttatcactggaacttgcaggtctaagctggtgaagaggtatggagttattgaatgtgactcgctccttcttgcangactagataaatctgtgagttaagatgtcttttttatcattccattcatgagctgttaggtgatcttttattggttttttggctcatgcaggctaagcatatgt

SEQ ID NO: 139945 - DNA, 1798 bp, Arabidopsis thaliana landsberg
cttcgggtcagcggagattgaatccattggcccgtcagttctctcttgcagatgctaaacaaaagccatatggctatggtaaaaaccaagctgcagatgatttatcgctagtggtgaatactagcggtttatacattccagctcgttatagggaggaccataatgtagtagatgcagacttagcacaatcctcagtaaatgtggagcgttttcttcccaacatgtcacatggcggttcttcacttataactccaaaggcagacagtaactttgggtctactaagtggattgcggtggagccaaaccctacattttcagtaaagggtaatagagattttaagcatcatcttccatttcatgttgtagaaactgcagcgagttcatctacaagcgatatgaaagctttacctggcccatctccaaaaatggatgtgaagaaactacttacaacgatgcatgggctgtcagagttactaacacttgcacatggttcagaatcttcagattcaccgaatgcggaagagcttgatctcattaacagtactgtacagaatctcaatttgtacatccaaaacaacagtcaggaacatgctgggaatcaaagcgttgcacaatacaattcatatgatctaaagctgttacctaacaagagtaaggtatgttgttctaactgtttctatgcctataaattgctagcttaagccacatgagatttcattatacttggaagcccattacattcgcctagaacatattttattcaaggtcaataagaaaaatatactatcatgtcttgtagaatttaccaaaatgatattgttttaatgggtcacctcttccttttgttaatgggtcaccatgattccaaatcctgtctattagctatcgattagagaccatcagtttccaacggcaaacaatatgactgtcgaccttgatgtgaaaaggaaggataagtactctgtggtttcaagggagactgtcccaggttctcgttcgtatcaatatggtgcaaccgaagataacggctttggtcaggtatgttttttttctccatacctatgctgtgataattggcgtttagtaggaggtagaccgtcagtttgatcatgtgggcaggttgtgcctacaaatggttaccaacagcatcaaggtgtggagcagattaaccaaaatgcactgttctataaaagcttatggctgaaggctgaagcagacaggtgtttgatggtctacgagacttctctttcgaacccatatccttgaagatattagaaaggtgacatcaaatcatccatcccctctaaaaatactttgaagggcaatgacatgtcagattggtaaggcttgcccaagattttttttgattttgcaggttggcatgtaaaatatcaaagaacagcctcaagatctccaatttctggatggagactagataaggcatacaaatcattttcctaagaagtggctgacacatgactaattgtgcagaaagatgaagttggtactcctttctacaagttaccctttattttacttatggtcatgtcgattcaagagaatgaacactgatactatttctcagaatcactactgaataaattggtcttttttcttatcagaacctgggaaatgtttggacgtggagcctattgattgctgaagattgtaatgttttcttgttatggtcctgactctttgattaagagatgtataaacaaaccactgttactcttttgttaactactacgtcatcacacttttgttatatagtgcctataatgaccgcaaattaaat

SEQ ID NO: 139946 - DNA, 724 bp, Arabidopsis thaliana landsberg; identical to SEQ ID NO: 48211

SEQ ID NO: 139947 - DNA, 1642 bp, Arabidopsis thaliana landsberg
catcaatggcggaactcatggccatgggcaatgatgttgttcatgttgcagtgaagagtgatgtcagagagagcagatcaactcttctttgggctttgaggaacctcggggctaagaaagtctgcatcctccatgtttatcagccaaaaacagcttctccggctggtaagcttcatgatcttcaagccccatttgagtaaaagctcgagatttatatgattttccgtggctagatgtttgccattttctaatgtgtttttaaaggctagaaaagtgattacatgcgtcgcatttgataagttattttatgtttgattatttagctcgcaagcttgaagaattggaggctatcatgtacgagacattacatgattattttgatttttgtcaacaagaaggggtatattaatctgttgtcctcttatactgttaaattctgtcttttcttgctttcaaatggtttggtataataccctatattgaattcattatgatcgcaggtgaatgaggacgatatttacatatcatgtatagagatgaacgatgtgaagcaggggatactagaactcatccatgagagcaaaatcaagaagctcgtcatgggagctgcatcagatcatcattattcagagtacgtattggaaacctaggaaaactttaaatctcatcaagacattcactcgttgacttgctgaaaatggcaggaagatgttcgatctcaaatcaagaaaggcaaagtatgtttaccaacacgcgcccagctcgtgcgaggttatgtttatgtgtgatggacatctcatctacacaaagtgagaattttgaatactctctttacttatatgtgtcttgtctttgaagaaattacctgattgtctctgtgtattaaatacacagggaagccaatcttgaagactgtatgggtgaaacagaatccgaagctggacaatccaaaccgaagctctattcctctgcttcaccgaaatgctctgcagaattagtctctgcaattgtagcttacattgacacaaggagagacagagatatgttggagccaaatgcatcagaggatcaatctgtatgttctaaatattgttggtattgtgaattagatgcataatcgaatggtttgtgcaaaaaccaatatattcctgtgtctctgttatgttgcaggaaagcgacaggaatgatcaactgtatagacagcttaagcaagcacttatggaagttgaggaatcgaaaagggaagcttacgaagaatgtgtcaggcggtttaaagctgaaaatacagccgttgaggccattcgcagtgtaaaacacctgcacaaattcataatctcatacattgaaaatgtgtttttgcttagacttgtttccttttacttaaaaggcaagagagtacgaggccatgtacaacgaagaggcgaagctaaggaaagaaggtaaagaagcattagcgaagcagaggaaaatggtggagaagactaaacaagagagggacgacgcgctaatcatcattctaaatggaaggaagctatacaatgaggaactgagacgcagagttgaagctgaagagatgttggggaaagagaaagaagaacacgagaggaactaagaaggggatcgaagaagtgcgagccattgt

SEQ ID NO: 139948 - DNA, 2445 bp, Arabidopsis thaliana landsberg
ctctagctttgatttgagcctcttcttataaatgtgtggactcttgtgatgatactatttgcagaacttttatatgatttgttgggatggaagtggagtttatagagtactaaagattgatcgtcttgatccatctgagcttaacattagtcaagattcgactcattacacaaagaaagaatgttatgagttgctcaaacggatacacgaaggaaataaagctacgggtgggcttaaacttgtcactctttgttatggtatcattggtatgtgtttatcttgagtttgtacagatgcttcagttgttgtgtttactttgagcttgttctcacattttgcatctactatgatgtctcaggctttgttaaattcttgggaccttactatatgctgctaataactgaaagaagacacataggtgatctttttggtcacagtgtctatgctgtatcaaagagcgagatagttgccttgcataattctactgtacagtgcaattttgcaaattcaagagatgaaaacaggttttttgagattttttgtgttatattttctgtttcttcgttagtttactgtttttctctgttctcctcgaatacgaaagtgcaggtctttagacgttttgtcctttccacgttttaaatgagctgaagtcatctatctaacctttaccttttcttatggtgtttccgatttgttgatgaacagatataagagactcttgtgtatggcggaccttacgaaagacttctttttcagctattcttacaatgtaatgagaagttaccagaagaatgtatgcaattatgagactgggcataatctctatgagaaaatgtttgtctggaatgagttcttgactcggggaatccgacatcatctacggaataccctgtggactgtagcattggtttatggtttcttcaagcaggtgagagttgtatgtttttctgacagctcactgctagaagaaaagttcaaaactgcatctgttctctttctattacccttttcctacagcagtggtcttttacatatgtggatcatttttataaatcactaattatataagtcctgtgatgtcttttttttttttttatcatttctttactgcaccaaaggcctagtaagaagttttctgtttcacatacggatttctgtcatatattatcaattatgacactgttgccgtgttactattgttatatatgtagttatggtatactggcatcttaaatctccaattcctggatactcaagtaccatgcctcattttacatgtaggcatctctttctgaatctgggaaggattttaagatcacccttatcgctaggcgttcccgtcataatgctggaaccaggtaaacaatttctttcaccccctagtcaggcaatttagtaggttctgtggtaagcatgtaactgacactgcaaggtgttcctctagagactaaatgttattttttgcaaatagaaactgcatagttagtcatatctggatatctcactagagcatttcacaatacctaacaatagaagatgtaatatacatcttatttgaaatataaccatttttcatagatatccttcttcccctctcctaaatttattttcatattaggtacttgaagcgaggagtaaacagaaatggtgatgttgccaatgatgtcgagaccgaacagatagtgtctgaagatgttcctgaagaccaccctatgcaaataagttctgttgtgcagaatcgtggctcaatccctcttttctggtcacaagagacctcacgactgaatctaaagccagatatagtctgtaagttttgtggcactaaaatttctgcattgctcccccactgtctctcctttctctctttcccctgtttgactgctttgatatcaaatgcagtgtcaaaaaaggaaccaaactatgaggcgactaggcttcactttgataaccttgtagaacgatatggaaaccccatcatcattctgaacttgatcaaggtgagttgcctaatccaccctactatctattttgctgtcatcattttatcttattcatccacacaatcaatagacaaaagagaggaggcctagagagtcaatcctacgagaagagtttgttaatgcaattgactttataaacaaagatttacctgaggaaaatcgtctgcgattcctccactgggacctgcacaaacattttcggaggtatctgtcgtatacacccttatgttccaggtgctacaatcgtgtgaaagtcttttaatacatttgtagatgaaaaccagttttctgttttctatccttcttccagcaaaacaaaaaatgtcttggcactcctttgcaaagtagctacctgcgcattgatgctaaccgatttattttactatcaagttacaccagccatgaagattgaggattccatgagcttgtcttcttcttctga

SEQ ID NO: 139949 - DNA, 1154 bp, Arabidopsis thaliana landsberg; identical to SEQ ID NO: 46958

SEQ ID NO: 139950 - DNA, 2204 bp, Arabidopsis thaliana landsberg
atggccgaagtcgaaggtaacgcctccgttttccacctataaaaaagggcgcgcaggcaacatcacactctcacactcttttcgctctcagatctgaaaccttatctgaattacatttccccgattctacgttgtgcgaattgatgcagcagagaggacgatccgtcaaccgcagatcacgaagcttctctagatccagactcgccgtcgaaggccactgaattactctctcccctctcttggcagatcttcttcttcgttttttcccgacaaacgacatttccgaaatggctgcatcgtacggtgagatcaccgatcatatgcttcgattatcgttgattgcttatattaatagaaattggagatttatggaaagagaagagactgtgaaattgatttgatttgttttttgttatttttggggtgagtagaagaagagcgtgatattcagaagaattactggatagagcattccgctgatctgactgttgaagctatgatgcttgactcgagagcttctgatctcgacaaggaagaacgtcctgaggtacccctgacattttttatataagacatttgaatcagtgaatgattttagagaattagctcttgtttggatgatacacactgttttgatttgaatgttttttttatttagatggtctagtggtttcttgaatcaggactgttgaattttggtttttgatgagttgatttataattcttcaggtactctctttgctccctccatatgaaggcaaatcagtgttggaacttggagctggtattggtcgtttcactggtgaattagctcaaaaggctggtgaactcattgctcttgacttcattgataacgttatcaagaaggtttactactttattcaccttctgagtcgatgttatttcgcttcattgcacatgatttgtaatcttgaactgaatgttaaatttcttctttcttgtagaatgaaagtatcaatgggcattacaagaatgtcaagtttatgtgtgctgatgttacatcccctgacctcaagatcactgatggatctcttgacttgattttctccaactggctgctcatgtatctttctgacaaagaggtataataatatgatctcttgtccaagacaaaaataatcttttgtaatgaggaaccaattaatttttttaacggttttgtttggatgcaggtggagcttttggcagaaaggatggtcggttggatcaaggtaaaaaggatacattttcttccgtgaatcttgcttccaccaatcaggggacagtaagcggaaatccaaccccactcactaccgtgaaccccgtttctattccaaggttcctacttcttttaaatccaattaaaaatttacattttcaggactagaatttcaaccatttagtggaagaacactagttagaatgcctatgcttaagaatatgtcgagacttatgaaagtttcagtggatttcgatttactgtattggtcaacaaatatgtagttagtagtttccaaatctgccttaacaaattattgagaacttaagttgattaagatcgatggtgaaacaatgaaggtctttcaagagtgtcagactcgggatgctgctggaaattcatttgagctctctatgatcggatgcaagtgcattggagcttatgtcaagaacaagaagaatcagaatcaggcaaaccaaaactctgcctatcaagattgtcttgtttcctattgtaattagatcttaatgatgggtatcattctttgttttatgggatgcagatttgttggatatggcagaaggtcagctcagaaaatgacagaggcttccaacgtttcttggacaatgtccaatacaaatccagtggaatcctacgctatgagcgtgtctttggccaagggtttgtgagcactggtggacttggtaaaagctcaattcgatttcgcttgtgttgtgatgttctgtgtcttcatttagcagtacttatgtgtgttctgtcgtgtttcttgattcagagacaaccaaagaatttgtggagaaaatgaatctgaaaccaggacagaaagtcttagatgttgggtgtggcattggtggaggtgacttctacatggctgagaagtttgatgttcacgttgttggtatcgatctttctgtcaacatgatctctttcgcattggaacgtgctattggactcagctgctcgg

SEQ ID NO: 139951 - DNA, 3839 bp, Arabidopsis thaliana landsberg
ctgccggcaatttctcgtcggaaactattactcgataccaccacctgtttagtctttaaaggtaatggaaggggagaatacaacggatccgccgtacacaacggcggcatcttcgggacagagtatcttcgtccgtcctcctccaattgctccagtcttggctactacttcgaatttctctcagtcggagctgaaggagctacactctatgtctgtatgttgctcatgctcatttctgattgttgcatagtttgtttatcttgagcgctgtttaactcgtaaagaagctcgatcttgtctctagttcttatcttttgatgtggatttgtgtagaaccttttacaagaacttgtcgtatattgatttagcagaaatccttataattagatgaattcatgtctctaattgaatctatcgaattttcgtgtcgttctgatttagctcactaatagaatttgtcaggattcaaccttttttggtgtatgcattgaacacatgctgattcatctatcatcaggttgtttccttttagtctctaaactggttccgtggttattttggttgctgttgtgcagattgctagtacaggttttgtctctcagtcagttccatcttctgttactgcacaatggggtactaatgcagcagcctcctcaaatgttaatcccatacctcaagcttcacccatgctagcaaatgcaccttttggtcgaccaggaacactcgcccctcctggactaatgacatctccgcctgctttttctggttccaaccctttttattatacctcgacgacattgggatgtgtgcatggtccggctcaacctgattcttggtattcatcggcacatgtatgcctccatatcattctttgcttgggacgcctcaatgaatgtggtggcggcccctttccatgggtggtattcccagggcaccttttctttcacatcctactacctttcctggatcatatccatttccagttcgtggaatctcccctaacctaccatattctgggtctcatccgctcggtgccagtcctatgggaagtgatggcaatgttcatgcattaccaggtcgtcagcctgatatatctcccgggcgaaagacagaagaactctcaggaatcggtacgctcgaggtttcatgatagattactgatccatgtaagagctgtttgaccttaatggttattctattgagtttacatatttttttatcaggatcatcttgtattttgcagatgacagagctggttctcaactagtaggaaatcggttagatgcctggactgcacataaatcagaagcaggagttctttactactataattccgttacagggcaatcgacctacgaaaagcctcctggttttggaggggaggtgagtattgctgattacatggcttgttcattagttgagactacgtctattccatacgcatttggtatcacgtctacctattttgcttcacgacatgtcatttatgagttcgtgtctataatacgtatacaaatttctagaatatccgaattgaggtttacaatgtcagaatttgatccagatttttgtaaagtcctagatgtcatatattcattagctgatgaagttctcttttttccaggccttatattgggattgtgatcctttgttggtatcaataggtatgaagttgcttaagattgtcgagttactatattattgcagtgaacttgtgtaagagcatgtgaattattacacaaatcaccttatgtttattcacagactagtaaatatagattgccatttgatgctgtgcaaaaacttatgaatgatatttgttctagtataccttgataatggatgcacagtttcttcatgttgccctagtcctttagactttttaagcaatttataatctatacttttttcttaacttttgcagcctgataaagtgccagtgcagccaattcctgtttcaatgtgagttcttagatccatacttgctctgacaagattagttgtcatattttcaatgatattagcatggtgacattatattgttaaatttctcgtgtattattttttgtactaggtcgccaacaatttcattcccatgaaatcaacatatttatattttgttgaattactttgagcctgctaaaatactttgtacatgttagagatatctcatctaaatgttaccaaatgtagggagagtttacctgggacggattgggctcttgtgtccacaaacgacggcaaaaagtattactataacaataaaacaaaggtcagcagctggcagattcctgcagaagtaaaagatttcgggaagaaactagaggagagggctatggagagtgtagcatcagtgcctagtgctgatttaactgaaaagggttctgatctaacaagtttgagcgcacctgctattagcaatggtggccgggatgctgcatctctaaaaactacaaattttggttcgtccgcgctggatttggttaaaaagaaactacatgattctggaatgcctgtctcatctacgataacatctgaagcaaatagtggtaaaacaactgaggtcacacccagtggagaaagtggaaatagtacgggtaaggtgaaagatgctcctggagctggggccctttccgattcttcttcagattcggaagatgaagatagtggaccatcgaaggaagagtgttctaaacagtttaaggtgttttgaatatttcttgtggtttttgtcttttttgacatagggtttagtttagatttcttttctcatgtttttcttcttgcaagttaaattagccatttagacacatcttatttaaagcattctagagaaaagtttagatcatgcattgaaattttcctctgtagaggggtcttgttcatatatcggaatgccatgattccttgatacatgccaacttctagtggacatttttaagtttggaaaccttgaaattattcagattgaagataattttctaatatcctgttttttcacttgatccttgcaggaaatgctgaaagagagaggaatagcaccgttttctaaatgggagaaggaattgccaaaaattatctttgaccctcgctttaaggtctgtcaagcctaaagatcgtgacaatattttgatatcttattctattttgaaattccacgtccattgtttctttccttgcatgcgtttgcaacttgcacatttccagttaatgttatttgcgtctatgtcagcattgtaacatccattcgttttgggtgctcaaatagagcacaaattaaagtttcctatagatttcctagctcggtgtagaaagaagtttacatctatattacatttggaaacaagtctttcactttacttatattagagtccataactagtatcctcactgattaattgttctgatgccttgtatgctagctaaatgattttctgtagagaaagagtatgcctttggttccttccaatgttagctaagtaaagttttgaggatgttagagccattatgtgatatagtttattcactccacccataatatgttgtgtcgccagaaacttcattcttatttgctaattagaatgttagaggaactattactgtgttaattttccagcattcctgttacagtgccacagcttgatctttggactttttcgattatgtatttttatccggagagttcatttttcttgcaggcaataccaagtcattctgttagaagatcattatttgagcagtacgtaaagacacgagctgaggaagaacgtagggaaaagcgtgctgctcataaggcagctattgaaggtttcaggcagttgctggatgaagcgtctacg

SEQ ID NO: 139952 - DNA, 1062 bp, Arabidopsis thaliana landsberg; identical to SEQ ID NO: 9803

SEQ ID NO: 139953 - DNA, 1478 bp, Arabidopsis thaliana landsberg
atggcctgctccgtcggaaagacagagagctttggtgtgattttgaatgaatccgagatcgcgaaatcaggggaagtaggtagagaaggaggatagacgcgatttccaagctccagagaaccagattcgagcgttcttctttgggagaggaagatgctgacgaggcgatgaatcgcatgtagatctcagaaaatgcgtatgaggtttcgatggagcttctggtgaaatacaagttttggcgtctggagaatcataatcaccattaacattgttccgatgcttaagaacacgactgaaactctgttcagcatcttctcaacgtttctctccatcgtcgccgatcaaaactccgatcgaaatgccgttatcttctcttctcgccgtggagaaattacgaaaatggccgctttgatatatgtgggccgggccttataaagttatattctgggcccattatgtgaacttaacacattctggacgaatatgtaatttcagaaaagaagtgaggcgattttgaaaataatctaaaccataaggagggaaagaaaaaccttggggggaaaaaacattcctgcggagaggagctaattctctctccttgggaagaagacgacgagcttaatacattcgacagtggagaatatcagattctttttggcgagggttggttgattccttcttattcatcagattaaggatcgtttccggtggctgaagagtaatagaaggaggaagaagaggagaggagaggtaaaaatgtcagacctagatcggcaaatagggcagcttaagcgatgcgaaccattgagcgaatcggaggtgaaggctctttgcttcaaagccatggaaattcttgttgaagagagtaatgttcagagagttgatgcccctgtcactgtaagttcttactttaccttacttctcgatctgggtttcggaattatgagcttattaatcaataaatctgaagaaaataggcgcggagattttgtgtctttataatttggattcgtaatgttgtatcaaatggtatatcattcctaggatccagtgaaagacttgtttttgtttcttgctattgttacaagtcaaaagatttcacgggcagtgaagttacagggttaagaagtgagagtagataccattgatgtttcttatgatttgcaagaattgctaatactcgtctttctttttccattgggatagttatgtggtgacatccatgggcagttctatgatatgatggagcttttcaaagttgggggtgattgtcctaagaccaactatttgtttatgggagattttgttgatcgtggatattattcggttgagacatttctacttctactcgcactcaaggtaactctctggactgtgttttactttgttgtggtttccttgttttgcacaatctcttctgctaaattggttcttggaatcgcttaagtagattgctttgatattctaggttagatatc

SEQ ID NO: 139954 - DNA, 5107 bp, Arabidopsis thaliana landsberg
  unsure (1)..(5107): unsure at all n locations
gtgatcaaggatgaagacatggaccgaggagcaatgcatgtacgttccttgaattctggtcttggtcttggtctttcttagctcttgttatatttgcaaattagacctcttaatttccatgatgtttgcatagtggtggttccttttacgatttttgtatcaagaagaacaaagatgtaagaaatctgcatgatatgctctgaggatttgggatacagataggaaatcttttgccataaagttgcttaggctcttgatttggtatgagtgcagttcttcaaatgagtgcactggttctacagttccatctttatattttccttaacaactgattgcttactagtaaaggtttagggtcattctatgtagaagtcttgtgttgcttattaaatttgtgatataattttccatttcagaacggaggtgatgtggacggaaggcttgatgaggcaactgctagtctcatgcttgatacaagaccttcgaaagtcatgtccaatgagctcattgtaagtagactctaattatatccaaagaacagtacattgatagagattttgtctcagttaatgtcctcatttgttctccctttctagaatctctgattattgttatagactgcttatcaatgataggcacaaggagtagtcttctcacttagaaatagagagataggaattctcattgacatggcgttgtgcctgtcaaatttatcttcatctgatgatatgcatacaagaaatttattaattgatcttctaattagttatcacgggagaccttgctaatcagatctttagcacgataattcaacttacagatattttgttgtttggattaatcggtctaattttcttcttgttattgaacaacttttgtgttcttacttttacccacttgatcttatgtcatgtagaagtttcagaaggttattctcagaacgtaggccttgcctgctaaacaaaacaatatggctctttagtcttcttctgtctatacctaactgctgtctaatttccctgataaatgatttagtttgttcttatgcttttgcacaggtgactgttagttgttcacttgttaaaatggactatgaaggtcggtcagatggccgctcaatcaagtcaatgattgcgcatgtttctcctctaaaacttgtacgtttctctctcgtcttatatatatatagtgttaagcactgaactggaaacttgcggtgatctaatactatatatcatgtgaaggttttggtgcacgcgatagctgaggctacagagcatttgaagcaacactgcttgaacaacatctgtccacacgtgtatgctcctcaaatagaggaaacggtcgatgtgacttctgatttatgtgcttacaaggtagaannnnnnnnnnnnnnnnnnnnnnnnnnnnnnnnnnnnnnnnntgagttgtgtgattgaattaaccctgtatggtgatacatcaggtccaactttctgaaaagctgatgagcaatgtgatcttcaagaaggtaccttttatttccgtgactatttttttcttcttttccgatttgcaaccaatgtctctgaagaatgatgaaataatatcagctgggagattcagaagtagcttgggtggattccgaagtagggaagacagagagggacatgaggtctctactaccgatgccaggtgctgcttcgccacacaaacctgttctagtaggtgatctgaaaatcgcagacttcaagcagtttctgtcgagcaagggtgttcaggtagaatttgcaggtggaggagctttacgttgtggtgaatatgtcactctacgaaaggttggaccgacgggtcaaaaggtaattcaaagcaaatactgcatttcttacaacaaatcagagaatgacttatatatgttggggattgttcagggaggagcatcgggtccacagcaaattctgatagaaggaccgttgtgtgaagactattacaaaatcagggattatctctattctcagttctacctcctctgagcatgatatagaaaaaaaatgaagcttcttctcattttctcaacatttttcaaccactcaacatgtaatctcgtatagtttattgccttgcttataaccctcaaatcttatagattaatgtgttaaaaatggcaatagttttttgtaacttttttgtacttgtcatcttagtagaagcttaagttgtcattggatatattccactcctatttcggtaaagcggtaaactaaaacagtaaaacgtgataaactctcttctttgttccttgtatgttctctcaaaagtttaaaataaaagcgaaaacactttccattcaagagctttcaacacctggtcttggcttcgtgctgacgtggcatctagcttttttttttcacttgtgaattaaaccaaccatatgtgttaaacatggaaagataaataaaagcaatttcaaagttattaggtggttaggtgtgttagtgtgaggctgatcactgtccaacgctctccctttgtgcaatattctgtaacgaaaccaaccaaaaacacagaatacatttgatacaattactttaattccaattctaaaccctaatcctcctctaccattcttctactgacgattctcttcatattttcttatcctctcttactctctctacaatcaaaccatggcttctgcgaccgccacgtggacacctacctccctccagcttcgtctcgctttgagctccggcgtgcgtcggaaatctcccgccgtttacttacgaccatcgcgattggctaggaaatcgggttatggaattgtctgtgtttcgcagaagcctgaagttgatgcgtggaccggatcggattcgtcaaagtcgtcggctgataatttggctgggtgggatgattccgataacgatgataagaagtcttccagagttaagaagaagagtttgattgaaggtatatgcggatgaacatctgtttttggattctgatttttttttcagtgtgattcggagttttcgaggtttcgtaagaaccagctggtgaaatgtttgattacacaatgaagctaaaactatatggctgcatagtttacaagtgtaatttggtaggagccatgagtgttgttttcttatggatgtactacacataatctttagattgagttgatgaaccgtatacgccgatttgtttttgtggtcaattgttattgagaggttcgctaaacagcgcacatactcaaatggtacattgcatgttacgttggagtttggttaagtctctttagcattttgatttctctgttctgaagctgtttagtttaccggttttcttgtggactaataacaatctggaactagtttgctttcaggtgtagttggggctggagtggctggaatcattttgtttcttgggctaagctatgcagcagcatcttttagcaagcgtaatactccttctcttaaagctattcaagctcgtttcaagtgcctctttcagaattgtttgtactgatttattgtaggggaatcatcttttgagcgcaggaacaaaaaaacaggaaatgcattcgttgacttctcagcaggaaagcatgattcaatcatctgatgaaatttctagtgatgagattaaggtagctaacagtgaggaaagcaatcttaaggacgaggataagagtatagaaagcaatgatgtagctcagaaaagtgatgaagggtctggcgaagataaactacttggtaaggagacatcgtcatttgatggtgtcatgactgatgaagcggatgccactgaaagtatcccccaaaatactcctgaagcagatttgatggtcaatgcggaaactgatcctgagacagcagaaagtgagaaaataatatctgaatctaagtctctgttagactcatccactgagcctattcttctagatgcagaaagtagtaatcttgtgggcgtggaaaatacaaattctgaagatccagagagtctcctgaacactgaaccaaccaatgtgtctgatttagaaaatcatgttaacagtcagaaggaagattccttatcttctttatcaggcatcgatgcttatgcagcctcggggactgtaactgagcttcctgaggtttcttcacaattggattcgacttcaaaacctcagattgtgccactaaatgacacggaaacagcatttgccactgctgaagagctttctgaggttaacggaacaccggagtacttcgaaacctcagattggtcatcaatatcagacatagatacaacgaaagaacttgaatcttcaaaatctcctgtgccagaatcaacagatgggtcaaaagatgaactaaacatatatagtcaagatgagcttgacgacaacagaatgcttttggaaatacccagtggtggaagtgcattttcttctgctggaattcctgcaccttttatgtctgttatagttaatcctgggaagattcttgtccccgtagctgcggatcagatccagtgtcaagcatttgcagctctgcaagttctgaaggtaatattatttttttatgttgtatagaccctcactatgtatatcttgcacttgtgattgttctggcacttgtataccttgcagcttatagttcagtttgttccatctttcaggtcattgaaactgatacacaacctagtgatctatgtactcgcagagaatatgccaggtggctgatttctgccagcagcgcgttatcaaggtatactttcatgattttgttagtgtttctggtggggtcaaaatatccttcgtatgtattagaaagtgaaattcatgcatttatgtgtgttctttaactctttgcagaaacacaacctcaaaagtgtatcctgctatgtatattgagaatgttactgagcttgcttttgatgatattactcccgaagaccctgatttttcttccattcaaggtgagagtgaactttgaattttgattctacccgaaaagaagataaacaatgaagctaaattctgtttactcttttcagggttggcagaagcaggacttatcgcgagcaagctttctaaccgtgatttacttgacgatgttgagggcacattcttattttcccctgaaag

SEQ ID NO: 139955 - DNA, 588 bp, Arabidopsis thaliana landsberg
tttgacttgctaatggctcctcctccggcgaagatgcaagagatccaccaattcctctcctccgcactcacccagcgtggcccttccgctcttccatacgccgagaacaccaagtcgctaatccgtcaacacctcctcaacctaatctcttcctacacttccctcgaccccaaaacggcaacgtttacacacaacgatggccgatccgtgattctcctccaagccgacggtacaatcccgatgcctttccaaggcgtcagctacaacatccccgtcgtgatctggctcctcgaatcttaccctcagtatcctccttgcgtttacgtgaatcctacacgcgacatgatcatcaaacgacctcactctaatgtctctccttctggactcgtctctcttccttacctccaaaattggatttaccctagctccaatctcgtagatctcgcctctcatctcagcgccgccttctctcgtgatccgccgctttactctcagcgccgtcctcctccgcaaccgtctccttcgatcggatctggatactcgagacctcttcctcctcgccagacggatgatgcggcagaggtatat

SEQ ID NO: 139956 - DNA, 1628 bp, Arabidopsis thaliana landsberg; identical to SEQ ID NO: 10309

SEQ ID NO: 139957 - DNA, 2178 bp, Arabidopsis thaliana landsberg; identical to SEQ ID NO: 65391

SEQ ID NO: 139958 - DNA, 821 bp, Arabidopsis thaliana landsberg; identical to SEQ ID NO: 13835

SEQ ID NO: 139959 - DNA, 1494 bp, Arabidopsis thaliana landsberg
ggcaagaaccattggttgtataccacagaatttgcaagatgatatgtttgactttatggatgagagttctgaaattcaagagacaggtggtttgagctacaatgttcctgatgacattgacgaagatgacctcctgggcggtaagttctttctctgctctttatgctgcttgtccttggggttggtagaaacaatttccctgtgtttgttaaattctgctccttatacgttatatcggtttgtgaattcagagcttgatgctcttgaagctgacatggggaacgagactgaagcagacggagtgccttcttatctccaacccgataaggaaccggatcttaatgatgagctcaacttgccttcagcaccaatggggcatacaggagctccacccggacgagctcaggtgagtttccacttactcatttgagaattcagatgataaacctctaaaaacaaatgtcctcctattacaaacttatctttagttatgaggctggtctagtctttattcacacaaattgcttgattactaaatgagtgatgatggctttttgcatatttttcttactcaataactaccgaatattacacactctggacttggaacttattttatatgtctgatgagagatttttatgatggtgtaatgatgaacaggctgaagatgaatggggattaccagcggtaccacgtgcatcacttcggggctaaatcccatttacacacctctttgtgtgcataaatattcatctccagcgactatgcttttaaagtcttgttactgtatgtaataagttttttgcttagcagtttcattaaccttgaatcctcagatttggtctgtattatattattttataaggaaatctaatcgggagtctacagcatcgcattctaaatgatgtgtaagatatgttgctgagaagtgaagtttttgagtttcttgagaagttgaacatgaaacatgaagcccaaattatttgttatagtaatactcaaatgcatacattttagtgatattagatcccaacgttcatcaaattaatagctttttagaacaccagaaatagaaggatactctcagtcaaagccaccacaattactcaatgagctacaaaataggaacccttaaaatgtctccaatatcagagcattttagctaaaaaagactacatcccaagacagtgggatacttaatactcctaaatcatatttatacaaatcgacaaagatttgttcattttccgaacatagaactgttaactcttgaattccttaagctacttattcttatggagggttttgtctttagttgagattgagtttggtcagatctagcaaattccagtccaagtgggacgaagctgtccttggagctacatttgaaccagcagaatatgacctcaccagcctgttactgttgttagtgctccctaagtatcccaatccagatttcaatctctgagcttccttcttcagtaactgatact

SEQ ID NO: 139960 - DNA, 893 bp, Arabidopsis thaliana landsberg
aaaatctttaattcttaatccaaacccagaaacaacctctgaaaccacttcatcatccatgaaagagatcggctcaaaaccaagaaagttacttcctttatgcttcatcatcttcctctgtttttgttcctctgttatggctgcagatgaagacgacataagatgcttaagaggactcaaagcatctctcacagatcctcaaaacgcgttgaaatcatggaacttcgacaacacaactcttgggtttctctgtaacttcgttggtgtgtcttgttggaacaatcaggagaatagggttatcaatcttgagcttcgtgatatgggtttatctggtaaaatcccagattctcttcaatactgtgcgagtttacaaaaacttgatctttctagtaatcgattgtctggtaatatccctacagagttgtgtaattggttaccttttttggtatctcttgatttgtcaaacaatgaattgaatggtgagattcctcctgatttagctaagtgtagctttgtgaattctttggttttgtctgataaccggctttcgggtcaaatcccggttcagttctcggctttagggaggttagggaggttctctgttgctaataatgatctctcaggtcgcattcctgtgttctttagctcaccgagttattcctctgatgattttagtgggaataaaggtctttgtggtcgtcctttatcttcgagttgtggtggtttaagtaagaagaatcttgggataataattgcagctggtgtgtttggtgctgctgcatcaatgttgttagcttttgggatttggtggtattatcatttgaagtggacaaggagacgaagaagcggtttaaccgaagtaggagtttagcggttagcgcagagacttcgta

SEQ ID NO: 139961 - DNA, 821 bp, Arabidopsis thaliana landsberg
gccctgactaaaacttttttactattgcaggatctgttcagtgcaggcactgaattttcggcgaacactatacagtggaccatggcggagatcattaagaatcctaagatttgtgagagactgagagaagaaattgattctgttgtagggaaaacaaggttggttcaagagactgatctaccaaatctcccttacttgcaagcaatagttaaagaagggctaagattgcatcctccgggaccagtggtaaggacgttcaaagagacatgtgaaatcaaaggattctacataccggagaagacaagactttttgttaatgtttatgcgataatgagagatcctgatttctgggaagaccctgaggagtttaagccagagaggtttttagcttcttcaagattaggggaagaggatgagaaaagagaggacatgctaaaatacattcctttcggtagcggaaggagagcttgtcctggatcacatctagcttataccgttgtaggaagtgtaattggaatgatggtgcaacactttgactggataatcaaaggagaaaaaatcaacatgaaggagggtggaacaatgaccttgaccatggctcaccctcttaagtgcactcctgttcctcgaaacctaaacacttaaacttcaagtctatagattcccaataattcttgacgtggagatgtgaacttgcttttgttgtttcaaataatatcatgattacacatgtttcctgatttctttgttaccttttgtttggttcagtttgttgtatgaaactgtatacatttcttaatgttcatcatcttatgtctctc

SEQ ID NO: 139962 - DNA, 666 bp, Arabidopsis thaliana landsberg; identical to SEQ ID NO: 14992
  unsure (1)..(666): unsure at all n locations

SEQ ID NO: 139963 - DNA, 2309 bp, Arabidopsis thaliana landsberg
taggtttatcttcctaaatagtccagaatcacaattgttctacgtggatctcttgccttcgatttgtctccttaaccaagattaataccacatctgctcggtattagaggatgatcttttgatattgtcaagtttgtgatcacagtaattaaaaaatctctgtcttggatttgaacaagaagattctcccagtttcagtctgtcaaactttgtagcttgacccatgacaagtgtttataagagagtcggaataaccttaaagctgttttttctctgtgtgatgtttgcagtcaagtttttagtagattgtctggtaacaaataaaatatcagattgaaattaggtgctctggattaggtattagttgccatgttacttctttggaacttggaattttaatgcctttggtgaacattaatcaaaaacgccatttgacgaattaagagctggatattagtttgaccttcggacatggtcattcgtgatgtagtctaagtagtagggaattagctcctagttttgagatcaaaaagcctttttgcggactgaagaattaccactctaatcaagtgatgttcttggtggtttggtgaatgtttgagcaatggaggtggagggaaaatgtctgatgactagctaaaactatagaaattggggaattaagaaagtttacacgattaaatttatgtttagagtgttcatgtgtgaactctataactcatgtcttccttgattgggtgtgttttagttgtccgcttctctagcatattctattcaggattcgtttgagtgatctctcttacaatcttctactttagtcagtgagaactgctccagtttttttgtatttcatatcatgtttgaatcgatcttctatgtttggcattgttggaatggatgtttgcgctcaaatatagtagatcttttgttaaagaagtgaaacattgaatagatgctccggaacagatagagttgctatattgcttttaggaacttggattagataatacatttggatgaacattaaaaaaaaaagaagaatcagcctttggtgagttaggagctagaactgtggatatgagtttcagcttgggacatggtcgtgttatggatagagatgagttcctgggtaagtgtttgagtaatggagtttgagggaaaatgtctaatgcctgcatttacatagtatggacgtaaagtttgaatttgggtgactgagaaaaataacatgattcaatatacgtttcaattgtttgtgtgtgaactcgcaattcatctcttccttgattggatgtgctttacttgtttgattcgctagcattttcattcaagatctatctgattgatatatcttataatcttctctttttaatcagtgagaactgctccgagttttgcggatgctgcaatgggaagaattgcacagagtacaaaggtctttgcagaaggaggatatgagaagatattccgacaaacctttgagacagatcccgaagaacagttgctaaattcttttgcatgttacttgtcaacatcagctggcccagttatgggagttctatatatatccagtgccaaacttgcttactgtagtgacaaccctctctcctataaaaacggtgatcaaaccgaatggagctattacaaggtaatgtgtcctacacctttcatttcagaattatagccattttgaagacaccatattattacttttgtgatcattaactgttcgaaatctgttggctggttatctggtcaatgcttgagacaatgtttcgttataatttgttagtagcatcaactaaggagccttcgtagagtgattcatttggatagaaaaataatctggacttgttaacggaatcataaatccatggactttttttttgtgatagtaataacatgattgcatcagcttctcatctcttgtttcatcgaaaccaatccgatacgattgcatttgcttattcattgtaataagctttgctacattgatgattgatgaacactttgtgtcttcttcttaaataggtagtaattccattacatcaacttaaagcagtgaatccatcagcgagcatagtcaatcctgcagagaagtacatacaggtgatttcggtagacaatcatgagttttggttcatgggttttttaaactacgacggcgctgtcacgtctctgcaagattctttgcaagccggtgctttaaggtcggtctgatacataactggatgactgatgaccataaaagcatgttgatctccacctcttcttgcttagtcatatcagaagactcagatttttacgtt

SEQ ID NO: 139964 - DNA, 521 bp, Arabidopsis thaliana landsberg
gcaggtgctacggtgaaactagtgtgtaagagcaagaagaacataacagcggagacgacgacagacaagaacggatacttcttgttgttggctcctaagacggtgacgaacttcggtttcagaggatgtcgtgtgtatttggtgaaatcaaaggactacaaatgcagcaaagtctcaaagctcttcggtggagatgtcggcgctgaacttaagcctgagaaaaagctgggaaaatctacggtggtcgtcaacaagctcgtatacggtctctttaacgttggtccatttgcctttaacccgtcttgccccaaatgaagatgatttgatgctctggttactatcttgattgtttcatgtttaaaagattgagagagagtgttgttatgcgtctactgtacggttgaattttaatcaatgtttgttagctagtctttaagttaaatgcttgggtattatgttgtatctctttaagtgacgtcgtttgagtttcgtttgaataaaaatagcagctttcaagatga

SEQ ID NO: 139965 - DNA, 669 bp, Arabidopsis thaliana landsberg
cctaaattacttaaaaagatctctctcatttgaattcttcttattgtttagattccaggtcaaactgtgatccattatctttgctactaaactaagttcttttctctgatcgaatcaaaaagttttcaactttctaaatttttttagttctaagaaaaaacctctccgagaatggttttatcggtgaagcaaacactctctccgaaaattggacttttccgacgaaacccttcatcctcactaggaagatctcctgtttctctctcgtttccatcgacggagcttccaaaacgcaccgttttagccgtgtcaaagccgcttcatctctcttcttctctgagagctaagtctccggtagtgagatgtgaagcttatgaagctgaccgatcagagcctcatccgatcggtgatgatgctgcggcggcggaaacgaaatcagaggcggctaagaaattgaagatcgggatttactttgctacttggtgggctttgaacgttgtgttcaatatctacaacaagaaggtcttgaacgcttatccttacccatggcttacctcgacgctttctcttgccgctggttcgttgatgatgcttatctcttgggctgttgggatcgttgagactcccaagacggattttgatttctggaaaactctttttccggtaagt

SEQ ID NO: 139966 - DNA, 1127 bp, Arabidopsis thaliana landsberg
catgaatgctcctgttatggttgagctggagggtgagactgatccacttgaggtgctgccttcttccttctagtttttttttttcaccatttgtcagtaaacgtttgatatgtatatgaacatttgtgttgtttattgtatggtttggcttaagattgcgatgaaagagcttaggcaaaggaagattccatttaccattagacgttatctacctgatatgaggtgagattgcattagttatatcaatacttttagctcttctttcatatttgatatcttcttttcttgcgacttacttatgactctgaatcagttacgaggaatggggagttgatgaactgatcgtcgaagactcgtggaaacgtcaagtcggtggtaattgataaaatctggcctatgtgttttgcaaagctttctgctcttgtatggattatgaacttacgatatagtcgcatgtagaacttcttcatttgtcctattctccaacactacaagagtcagggactccaacaaaaatgcatgaacaacaaaatttttgtcccaagttgtttttggacatgggtttcgacaagcctgcatgtacatatacaaagaaagaaaatccttcgtgacaccaaaagaagaaaacatctataatattttgagcattgagtaagtgcaactaaattgctaaaccttttctctcacacttcccagcttttgtcgtctcacagagtcagatcgattgatgcataaatgagtgatgctaaaaatcaaaaagcaagattagagaagaattatgcatgttgtttaaagaagttgagaaatagtaatgttaaaaactatgtgaagcgcttgctcgaggattgtttcagcaacactatacaagtgactggactcaactactcaccatagtctcggcccaacgcaaggatagtgtagcatgtttcttgatgaaatacatccttcaaaccaccgtttacaccatctggcatgagaggaatcgaagacgtcatgatgaatctccaaaatctgcagccactctaatacaatggatcgacaagcaaatgcgtaacagaatcaccaccattcaacgaaagaaggaccgtcgatatgaggctagtttccaacgctggcttcaaagttga

SEQ ID NO: 139967 - DNA, 2499 bp, Arabidopsis thaliana landsberg
agtccgtttgtctcaaagctaaatctgctttaggtctatcttctaatggatcttcttctgcttcttcgccattgaaccctatctccagacccattaacatccaccgtcattctctctctcactcttcaccgggaaatgggttttcgaggaaccctttgtctccttcttttgctactcctggttcactcggaagtaaccctaacatgatttcgagtccgtttcaagcaagttcgtctctttttgcttctgacggtgctgctgctggtgattccactggaaacggcgatttcctcgatgagcagcaactagggaactacttgtcgtttcttaacgaatcttcttcgaagaataacgacgaatctctggatccgtttgggttctcggctgataacggcgatgcccatttgcataagaggagtttctcagccagtgatgcttgttttgggtcagaggagcccggatttggtggcgggggttacaacaggttccttcacggtggtttaggtgatgattttgattctcctggtggttttggctcgccggattatgtttctagacagcaagaggagattgtgaggatgaagatggctcagagacagcgaatggctgctgctcagtacttggcggctactggttctccaatgtcgtatgagaaaggcctcaattttctcttgcatcagcgtaatgcgcataggtaattatgaaatgaagctccttttttttgccttagaatgtgtttttggttggtaaagttttcagattttacaaaagaaatgtgttggttgcagtgaatcatggaaaagtttgtatctttgagatttgttttggtctgagatgtcaattattgcttctcgaagtcgttttcgtatggttttactacttttggtattcatttacataccaatgattgtttttttttttttttttattgcttacggctctttagtcaatcttatgtttgaagtatgattgaagatatcttcgtgtctatgatatgtgaattcatagttttctgtttccggtggtgttttgtttttgcagatcaggagcaggacaatttggggaagagggttactggtttggtagtccaggccggcatgaaagggatgagtttatggggatgggagataaatctaactctgcatctaaacagatttacttgacatttccagctgacagctccttcacagatgaagatgtctccaattattttgggtaatcttttacaattgtatcaaagctgttatgtgtttgtttgcatcattaaaagtttggtggatgtctactaatgtttgcctggctctgttattgtagactaattatgtttgttgttttcttgtagcaattttggaccagtgcaagatgttaggattccataccagcagaaacggatgtttgggtttgtcacttttctccactctgaaactgtgagaatcatattggccagaggaaatcctcatttcatctgtgactcacgtgtgcttgttaaaccgtacaaggagaagggaagaatccttgaaaagtatgttgaaaccactgctcatgccttgtctctccttcccatattcttcttctctttttgtgttccctttttcttataataatccttattgaaccatagcaggaggcagcagcaacaactgctgcagcagatggagagaggaaacttttctcctggttcaagtccatctggaatggattccagggatctctttgattctcatctcggttagttgaatttatttcctatgcttgattccccttgtggatatggtttcatcagagctcaacctcttctttcgatttttttgttatgggttctgagaccagtcttgttttgtttgctaccagcaccaaggatgttttctaacacacaggagatgatgaggagaaaagctgagcaagctgacctgcaacaagcaatagaattccaaaggagaagatttctgagtctgcagttgcccgacatggacagtgaatcgtttctccatcaccagcgtagtctttccattggatcccccgtccatttttcccctcgtgtcaatcaaagcatgctctttcgatcagaaaacaccagtgatgaagtcttcgaaggtaatggtgatcaagtctatcttgcctacatcgaactttgactttatatagcttttatttacttttgccctcttccgtgttacctcttagcaggtaatggtgattcaggacatcagtctgaagcaacccgagcttttctgagtgatactggtcataacatcagccaagaacgtggttacaatagccatattaacaaagggtatggctaatatgataagaattagtttctgatcattttcagggctttaagtattttttatatggttacacatccactcttatctgtgcttcttttattattgctcaaggcaagagacaagtctggagaatactctgcctgatagcttctttgcttccccatcaaagacaggtgaaacccaacaccccgagtttgagaaagagaat

SEQ ID NO: 139968 - DNA, 3073 bp, Arabidopsis thaliana landsberg
gcatatcccgaaacttcagaaattgccggcaggaggatgcacatgagtacatgatcaatttgcttgaatgcatgcacaagtgtagtctaccttctggtgtaccaagtgaatcctctgatgcttacaggagaagtttggtacacaagatttttggcggtagccttcgaagtcaggtaaatttgttttggtgtcgggaagtcttacatcttttgagcttgtattttacctatgtgcggaagatctctgtgacatgattaatggcctcagctctaacattttcttttccaattcaggtgaaatgcgagcaatgttcccattgctccaacaagtttgatccgtttcttgacctaagtctagatatttcaaaggcagattcattgcagagagcactttcgcgtttcactgctgttgagctcttagataatggtgcaaaggtttaccaatgtgaaagatgcaagcagaaagttaaggctaaaaaacagctaactgtttctaaagcaccttacgttctaaccgtacatctgaagcggtttgaagcacacagatccgaaaaaatcgataggaaagtagattttacctctgcaattgacatgaaacctttcgtcagtggtcctcatgtaagtgggcttctttttctgctctatattatttgaagttgacttgatcttatagttgttttgatgattgtgttcgtgtcttttttgatctttaagcttcatggttccctttttaacaaatacaatacttgtgtttaacaggaaggtaatttgaagtatactctatatggcgtgttagttcattatggtcgaagcagccattctggtcactacgcctgctttgttcgcacatcaagtggcatgtggtattcccttgatgacaacagggtaagtagaagtgttctacattttctgtattgcaaaattttggtttgatgctgtagtttttctctacatagttccgtgttgaggtggcacatttttaattgctaaatgatgcgtaagcaaacagacaagaatcaagtatagctagtagtaagttcctctttacattgttcttgtaggttgtccaagttagtgagaagactgtgttcaatcaaaaggcatatatgctattctatgtccgtgatagacaaaatgctgtccctaagaattcagtccctgtggttaagaaagagagctttgccacaaacagagcttctttgatcgtagcttctaacataaaagatcaagtgaatggctcaacagtcatcaaagaatgtgggtttggcgctcttgttgccaatggtttagcacctttgaaatcatgtggcccaagtactcctgctgtcttaactcagaaagatttaaatgccaaagagactcagaacaatgccataagtaatgtggaggcaaaagagatccttgagacggaaaatggttcggcacccgtgaaaacttgtgatttagctgcccctactgtcttggttcagaaagacctaaatacaaaagagatcttccaaaaggaagtgccacttccgcaggctaatggggaaggatctttggtaaaggaggattcaaaggctgcatgcctaatattaccagagaaggtgtctcctcacctggatggaagcgcaaatgctcagactcttgtgaagttgcctacccttggacctaaagctgaaaatagtgttgaagagaagaattctcttaacaatttgaatgagcctgctaattcactgaaggtaagtgtatataaacatatcataacgagtctgtatttttattaaaagggttgagtgtttctaacttgcttctcgctactgctacaggttataaatgtgtcagttggtaatccacctgttgaaaaagctgttcttattgatcaaactatgggacatcacttggaagaatcggccacttcaattgagtcattgaagttaacttccgagagggagactctcaccacaccgaaaaagactcgcaagcctaaaacgaaaactctgaaggtggaattcaagtttttcaagctggccctgggcttacgaaaaaagaaggtacagagaagggagagattaagtacgacggtagctggcgagattatgctctgaggagctcctatcaaagaagagagttaaatatcaagatacaaatctcattgccccaagtaaaatgatatcgagtagtgatggtgccgttacgtcagaccaacagcaacccgtgggtagttctgacttgtctgaggcaagccaaaacgccaaaagaaagagagagtcagttttgttacagaaagaagctgtgaacattctcactcggggtgtgccagagacagtgggtaagtccttgcttttctcaacttgtcacttttagacacttggccatgttaattactaatgaaaatgaactcccaatgataatgaacttccattcattggccattattcaaaactgatgataatatttttggaactggcatcaatcaggcctccataccttaatgcaagggcttattacgtgtgattggttttgatgggattgaatcttataactattgcagttgccaaatgggatgaggaaatttcagcttctcagaagaggggatcaaagagtgaaggcgcaagcagcattggttatgtagcggatgagtggtgagtgtttgggttattttccaagggttcagttacatattgtaattaggcaattagcttacatagaaatggtattggattgtggcagggatgaagaatatgaccgagggaagaaaaagaagataaggattaaagaggagagctatagagggcctaacccgttccagatgcttgcatcgaagagacaaaaagagacaaagaagaaatggacacaaagcataactgacgcaaagacagcctacaggatatgaataaggactataatcttatacatatatgtaatccacatgctgctgtatctggcgtaaagtaatgttaacaaatgaggaaaagataggctatagacagtagtagacattgttcgttatctcttttcctctcagttttgttctctttgggataaacagagaaagaccctatcccctgtttagtgagattatttacactttc

SEQ ID NO: 139969 - DNA, 868 bp, Arabidopsis thaliana landsberg
aaaaaaaaaaggtacctccccaaaaagagtaaaattgccaaaaaagtcaaaaacttttcccaacctcaaaaaaagaaagatatgaaaaatgagtaataataattttaaaataataaaatacccttttctgtaaaatagacaaggtcccaaagacccagctcaagtccagctctctgtattcattaagttacctttctaaacattcgcaccatctctttctctaacaatggagatttttcaaaaggccaaagccgttcgtctacggagccatcacgacaagtacctagtcgccgatgaagacgaagaatctgtaactcaagaacgtaacggctcagcaggtgcagccaaatggaccgttgagataatcccaggctcaacaaatctcatccgtctcaaaagcgcttatggcaaatacttaacagcgtctaacaaaccgtttcttcttggagccaccggaaaaaaagttctacagactaaacctagtcgtcttgactcgtctttagcttgggaaccgattagagattctgctttggttaagctcaagactcgttatggtaacttccttcgtggtaacggtggtttacctccctggagaaactctgttactcatgatattcctcatagatcggccactcaagaatgggtactttggcatatagatgtcgttgagatcctccctgcaaacgcaaactccgatcaccaccaccagcacctgcagctgcagcaacctccgtcgccgcttcatcattctgattctcttgatttcacacctggatctcctcccagctctgaccgtttctttagacaagaggaaattaaattttttttgttatcattttttgtgttgatgattcgtggacttggtgtt

SEQ ID NO: 139970 - DNA, 3879 bp, Arabidopsis thaliana landsberg
catgcttgaggctagcaattatttcgtttttagggtcctcacacactcatgtcatagtttttctcctgaaaagtaacttgtgacacagcgtcgcatctaatttttgtgtgtgacctctctatccaaatatagggatcatctgtcattcggtcaaatgcaaatcttggagtccatggacaaggtttcttgaatctaactggaccaggggattcaattgaagcacaacggcttgttttgtctctgttttaccggatttatgtaaggggtttccttttgttagtttggtgacaatcctgcattagttgacatcttatattttgtgaatcaaaaatagtttgtgtttatagctctgaaaatgtaatgaatataggcactaatgtgactattggtctcctttaaaggccatattggctgttgtataacaaatatagaaaggtacttgatttggccatgtaggagttaatgattttttttcctggcaattgaaggttgggcctgggtctatcttgcgtgctcctctactgaatgcgtccagagatgctgtgtgagtttgaagaaaaatgtcatatttatggttagtttgtgtgcaatattcttcggatataaaagctaacaatatttgaactcatatccgttgcagtacaccaaagctctattgtgaacgacaagattgcccttatgaactactgaatcctccagaggattgcaatgtgaatgcatctctgtcctttactctacaggtatttcaaccattctttaacttgtattgtatgctctaacttgaaaactctgataatttctttctttctagatatgccgagttgaggatattctcgtcgaaggtttcattaaaggatcagtagttcatttccaccgggcaaaaactgtaacccttgaaccctctggagagattagtgccagtggaatgggtaacaataactactttttatttggattttgttttgatcgcgcatcatacttctacatttcgtatgggcatgtccttggcttactcctccaatataagatttaaggtgctacctccatatagggagaaagaagatataatcttacggtctttttaagatgtttacgtagcaacacacatatgtttcacaggttgtagaggtggcgtaggtgaaggtaaattgcttggaaatggctttggcagtggtggtggacatggtggtaaaggggggcgtgtttgttacaataacagctgtgttgaaggtggaattacatatggaaatgcaaatctcccttgtgagcttggcagtggaagtggcgattttagccctggttattcatctgctggtggtggtattgtaggtatgaaacgtcagatattttgatgattctgttctagtaaacttgagagattaggttgtgtaattgatgcaaatgtttgatgtagactattgactagattcgtattccatgtgtcaaatatttggcaaattatattttgttatttcgtcacaagtttatttaatatcccattaacagtgtagaagcttgtcatgatttaggccatacactcgtacatgctgttcccatgagagcttactactttaaagatgataccttttaacctgttctttgttttcctttcaatctggtcagtgattggttcaatggagcagcctctatctggtttatcgcttgaaggctcaattagggttgatggagaaagtgtcaaacgtttgagtagagatgaaaacggttctattgtagctcctgggggtggttctgggggaacagtccttttgttcctgcgttatcttattttaggagagtcatctcttctctcaagtggtggtgggtctggcagtcctggtggtggtggtggtggcggaggtgggaggattcattttcattggtcaaacattcctactggggacatataccagccaattgctagtgtaaaaggaataattcatgcacggtatgtcctctatatacatgtgctgttcccatgatcgttaatgtgttttctgtcattaactgcatttccaatgtctattttgttattggatatcgtattccagcctatcacatttactattgtttttaattgtaatcgtagagggggagcagcagcggatgatggtttttatggcaaaaatggtacaataactgggacggcttgtccgaagggactccacggtatattttgcaaggttaggaaaacttagtacaacattttcctgctctatcatatcactgaggcgaaatttctatttgccttttgttcccttaccacgattgaattttattttacgtttcgaagctcactgtattcacaattctatatttttctccaggaatgcccatctggtacattcaagaatgttactggatccgacccttctctttgtcgtccttgtccggttgatgagcttccaactcgtgctgtctatgtcacagttcgaggtataaatagcattcacttatatcttgaactcttgtgtattacatatgcgctataaattttcctaactttcagtgacaagttttgttttccgttcaactactaagcctgaatttttattctatttattttgtaacgatttatgaataaaccaaaccgttcaactacaaagtctgtagattttaagtgtggttgaagatttaagtttggctatggtaatatataggacctataaactgatgctgaaaatgcttatgtctcaactataaaccttggaatacaggtggtgtttctgagacaccatgtccatatcgatgcatatcggaaaggtatcacatgccacactgttacaccgcactcgaggagttaatttacacatttggtgggccttggttgtttggtcttcttctgatgggtctcctcatcctcttagcacttgtacttagtgttgcacgaatgaaatttgttggagttgatgatttacctggcccagctcccacacagcatggctctcaaatagatcattcgttccctttcctggaatcacttaatgaggttagatgatttactttgtgttgaaacattatatagaaaaagtgcatggtcatcttactttctgcgttcatatgtataagcaaatgtagaatgcttttttgtatttgctgatatttcactacagatgcaagtaatgtttgttcaaaagacataattcagcgaaataatccgccaaacactccttatattacagtgttgtgctgctgtttataatgttattctttgtcaggtgttggaaacaaatagagctgagcaatctcagagtcatgtgcatagaatgtattttatgggtcctaatacattcagtgaaccgtggcatctctcacacattcccccggaggagattaaagagatagtgtaagttgtttgttattttatttcaagctgatttaggaatgtttctcattgttttgtctatagatacttaataagtggccttggttctgaactatttttatattggttttgggttttttagatatgaggctgcatttaacacatttgtcgacgaaatcaactctatagctgcatatcaatggtgggaaggtgccatatatagtattctttcagtagttgcgtatccgctcgcatggtcatggcagcaatggcggcggaagatgaagttgcaaaaattgcgtgagtttgtacgttcagaatatgatcactcctgtttacgctcctgtcgctcccgagctttatacgagggtctgaaggtaacaggactacacattttgagaatatctaattccgtttacaaggatttgttggtgtaaggtttagtatatatatatatatatatatttattttaatataggtcgctgcaacctccgatttgatgcttgcgtatctggatttcttccttggtggggatgaaaaaaggacagacctttca

SEQ ID NO: 139971 - DNA, 2218 bp, Arabidopsis thaliana landsberg
atggaccaaatctggtcgcctagctccgtcgaagatggtagtcgtcgtggttgtctttgcaaagtcctcatcaggtccgtctattcttgccaccaatgcaccttgcccttgctggtcgggagatcccgtcgtggacgagaccagcatagtcaggaagtttagaatcaaccactgagcagaaggggacgcgtccattattctgtataagctaattcaataccctcctgctcatgtatctacctccacacgtacgcgttacattgctatgttccagtatgtgtcgagcattgacgagccaacacatctatacatcaacggtctgccttacaacgctcccgtaaccgaaactccaaaaatcggcacaagcgaggtatttataaccaaaatttcactattcactaaccgtatagttcaattttttaattctttcaataatgaaggtgtgggaagtgataaacttaaccgaggataaccatccgttgcacattcacttgggattgtttaaagtattggagcaaacggcattggtgaagagtgaggagttcatagagtgcatgactaaaagaaacgatgccgtcaagtgtgagattagcaaatacgcacgagggaacaagaccgcggttacggtacacgagcggggatggaaaaacgtattcaagatgatgccgggacatgtaacgaagatactcgtcagattttcttacattcactcaaacgaatcttactcctttgacgcaactcaagagccaggctatgtttaccactgtcacgtaagttggtaaaatactaaaaagttgatgacgaatttagctttttcttttagaactaactatatgattgaaattacatgcagatattggaccatgaagacaatatgatgatgaggccctttgcaatggtcctataattctaaaacgaaaacaatttacaattacgagtgcagaatacaaaagagttgatatagattgagatttcagattacataaatatcttatacagaaagtgttaaaagataattcgattggattgatgttatatctctatcattgtttttcacttggcctcggagattagaagcaccttgttaatgggcttttaacagttacgggctttaacgggcccaataacaaaactcttttgcttcttatatgattttggagtagatggtaagtgagatagggaagtggtgagtgaaattagaaaattcctcgtatacaaagtcctaaccaccagtcaaattcaattgaatgctcccatgtttctcccttatctgttcctgaacctacactctttaatttcatggtttcctattttctcttaatttgtttattttcatgtcatattcggaagcttcagatattttatcaaataatgcatccaaataattttgagccactagtcaaatatcttcttcgtcttcttcttgcttaatatatattttagtgaatctattattgataccacacacacatctttgatatttcacaaaaggtatctatcggagccatacatatattttacgaaaatgtggataagagcgagatttggattggtattggtaaggcaaattaaatgcgacacacttccacattcatgattccacaaattctaatggatttgaacaaatatgggaccaatttttatttgtttcaactcctaaatgtgggaccaattaacaaggttgatgtattcttcttgttcttcctcgttcattaatagtttgattgagcatgcacgcttctctcaacccaccagtccaagtcaaacctcctcaagccatcccctaatcctatatatcagtttcttctcgcaaaccacctcacaatctatcaacagttttaaaaaaagacataactcaaccaatctcactttgaaaaagacatgaacaaaacccgccttcgtgctctctccccaccttccggtaactattttctctttaaacagtattaatcatgtgttttgctattcacatcaccaaattattcatagtttaaagaggtcgatgtagaactcatagatatacatgtgtacatacgtgactttgtgacgatatatcgttttaatttgttaaattttgatcccttctcttaggtatgcaacaccgtaagagatgtcgattgagaggtcgaaactacgtaaggccagaagttaaacaacgcaacttctcaaaagatgaagacgatctcatcctcaagcttcatgcacttcttggcaatag

SEQ ID NO: 139972 - DNA, 2502 bp, Arabidopsis thaliana landsberg
gaaaaaggacaacattttcggaaacaaagttgagagttttgagagttgaaaaagggcaaatctttcttctccttcgtcactctaattgagttgactaaacacagttcgagttcgagagacaatggatcttgctaagtttctgtgttggattgttttgcaactgggaatctcactcgtagaatcaaggtacatggtctacaatacttcacataccattgttcctggaaaacttaatgtccatgtggttcctcattctcacgatgatgttggttggctcaagaccgttgaccagtactatgttggctccaacaactctatccaggtctttgccctctttctattgttcttgtagctgtttatggattagattttgtggtacttacttcgtttttgttttatttttgctcgtaggttgcttgtgttcaaaatgtactggattcaattgttcctgcgctgttggctgataagaatcgcaaattcatttatgttgaacaggtaaattttctttctttagtcctaattgattcgtgttgttggctaggcctgtattggaaggtttacgggagagatgaattgtacaactaatagtactctcgttgttagctaggtgtgaacaatctttcgagttgaatgacggttagtttttgatgaatgcaggcgttttttcagcggtggtggaatgaacaaagtgaggagattaagcgtattgtgaaagaacttatacactcaggccaactagagctcatgtatttgttttgtcagcttgctttatctgtatcgcatttgtccttgtgtctttccgttgagttatatttgactcttctgcagaaatggtggtatgtgtatgcatgatgaagcagcaccacactatatagatatgattgatcagacaaccctcgggcatcgattcattatcagagagttcaatgtgactccaagaatcggttggcagattgatccctttggacattctgcagtgcaggcttacttgctaggcgcagaagtaagctcctctctggcccttcattttggttttattttatttctggatccagaggtgtgaagatattgatttatgcaggttggcttcgactcagtcttttttggccggatagattaccaggacagggagaagcgttataaagagaagactcttgaagttatctggcggggctctaagagtctcggttcttcttcacaggttaaatacaaagcaaaataaatgtcatgaagcttatactatgaattccactagattttcaattccttgaaagcattgatctgacttgttacagatttttgccggtgctttccctacgaactacgaacctccacctggtggcttctactatgaaatcaccgatgattcccccgttgtccaagtattttccttggcagttgattacacttatcgttttatttatcctatgcctatgataagttattggcttttaatccgtgaaggatgatcctgacctgtttgattacaatgttcaagagcgagtgaatgcctttgtagctgcagctttggatcaggtacatttgtagaatgttcctttttggtagaattttttgttacatttttgtgacatgtttcttggtatctgcaggccaacattactcgaataaatcacatcatgtttaccatgggaacagatttcaggtaccaatatgcccacacctggtatcgacaaatggacaagcttattcattatgttaacctcgtaagtaattcatctaaagatcagtcttaattatctgttcctctttatgtctccagatatttgtctttgtggatttatagtaagctagatgattagaaccactagatatctctaattcgtggaccctggattattataggatgggcgtgtcaatgctttctactctaccccttccatatatacagatgcaaaacacgcggcaaatgaggcttggcccctgaaaacagaggactatttcccgtgagttgggtcttaattttttaactccttcatccagattttgcttatatattaaaccaatctttacttcagttatgcagaccgtataaatgcttattggactggatattttacaagtaggccagcacttaagcgttatgtcagagtgatgagtgcctactacttggtatatgttcttccaagtttaaaataatgcacttgaagttgtgttattattcatgtatttaacttaagagtttaggcggcaaggcaacttgagtttttcaaagggagaagtcagaagggtccgaatacagattcgttagcagatgcactagcaattgctcaacatcacgacgctgtttctggtacgtcgaaacagcatgtggctaatgattatgcaaaacgactagcaataggctatgtggaggtagagtgccaacttcccctgtgaattgtggttctctagtggcctgttttctctatttgcacctcagtaagatcttgtaactttccaggctgagagtgtggtggtacttctcttgctcatctgactaaa

SEQ ID NO: 139973 - DNA, 1697 bp, Arabidopsis thaliana landsberg
tgttggttacactaatgacacagagaggccaccgtcacaacctccgcttgattggccaacgcggaagagaatcgcgctaggctcagctcgaggtttgtcttacctacatgatcactgcgatccgaagatcattcaccgtgacgtaaaagcagcaaacatcctcttagacgaagaattcgaagcggttgttggagatttcgggttggcaaagctaatggactataaagacactcacgtgacaacagcagtccgtggcaccatcggtcacatcgctccagaatatctctcaaccggaaaatcttcagagaaaaccgacgttttcggatacggaatcatgcttctagaactaatcacaggacaaagagctttcgatctcgctcggctagctaacgacgacgacgtcatgttacttgactgggtaataacaacataaaacttccatttgacccaacaaaaaccattgaaacgagaatctaatctcaaatacttgtttgttggtttaggtgaaaggattgttgaaggagaagaagctagagatgttagtggatccagatcttcaaacaaactacgaggagagagaactggaacaagtgatacaagtggcgttgctatgcacgcaaggatcaccaatggaaagaccaaagatgtctgaagttgtaaggatgctggaaggagatgggcttgcggagaaatgggacgaatggcaaaaagttgagattttgagggaagagattgatttgagtcctaatcctaactctgattggattcttgattctacttacaatttgcacgccgttgagttatctggtccaaggtaaaaaaaaaaaacataaaattattgaacaataacaaattttacaaggtaggtagtttttttacccgtaagttttcgttttttttaattgttaatgtaaaatgaaatctagcattcaaagatttgtgattttgtgctatggttcgattaaaagggaaaaaaattgtaatctaaagatttgtgtaagattactgtctattgtatgaagtatgaagtatgaactatgaacacaatatatgtacatccaaaaatacgttaaactaactacgctgttttgctacaaaaaccctttcaattttgttctactaaacgtcgttagaatacacaaaagcgaaacagcgtcgtttatttataatgcgctactcacatgacgccgtttcacttttgtgtatacaaacgacgtcgtttaatagaaaaatttttggaagggtttttgttgggaaaaaaagagaagaagggtttttgtactttgtgtcttcttgttccatcatcgtgacacgtcacacctccattcatctccgccgtcctcttcctgttcttagtcgcggctggaaaaaactgtggtgagagagagaagaagaagaagaagaagatgagtaataatactaataatacagagatgaataatctagcgatggaagaagaggatgaaggagagattttccttggtgaatccgatgtcctccgtgaaatcgatgtcgacgaagaaggtttttttttatctccttcaatcgtgattttttatcgtatgtatatatgtgtatgtgtatgtgactcttctattttcgattcagatcttcctgaagcagatgatgatgatatggacgatgatggtgaacaatttggtaacagattcaccacctcttgtgtttcctcaatatga

SEQ ID NO: 139974 - DNA, 901 bp, Arabidopsis thaliana landsberg; identical to SEQ ID NO: 25789
  unsure (1)..(901): unsure at all n locations

SEQ ID NO: 139975 - DNA, 1533 bp, Arabidopsis thaliana landsberg
ccaatctccctcaaaactcataaacatattgctctcctttgttcatttctgggtttacgcttctttcgactttatgggtttcggagcttagttttactacaatttcgtttggaaaagagctcttatttgatgttcatggcgtctctctccttcacccaattcttatcattccccaggtccctttgcttctctctctatcttgtttaaaaaccttaggaaattttagtatatgggtttctatggatttggcgtagaaccagtttactgcccaaaaatgtgcgaactttaagtttagctcatcatatctttctacagaagaatggagtaacaatgatttgaattgagggctatatttgtctttctgtttgaaaatttcacattttgatgtaatggttttctcatagctgtgctttgattttggcagatgcaatgcagatgttccttgtctgctccagtcgcatggttttgtgaagtttagaggtgaaagatggaatgggaaacaaagcttttctatggctgctggtaggagaaagttatcagagtcagcacctcttgaagaagaaggtaatgatggaaacggtgcggcttgtgggaaagaaaccatctaaaagtgttaagagaacaacgaagaagaaggttgtggttaaggatgaaccattagaagaaatttctgaatttttggttgataatgatgatgttttagacaaggaaagcattgtctcagctttgaaaccaaaaaagacaagaactagaaagaaaggtaatgacttttaccatttctgagctgatggttctcacttgatgattcacgagtacttaatttgaattcgacatatatacagctgcagcagcttcttctgatgtggaggaagtaaaaaccgagaagaaagtgagacgaaagaggactgttaagaaagataaagatgtggaggatgatttagctactattatggatgctgaggttagtgatgtcgaggaagcattggctgttgaaagcactgatacagagagtgaagaagaagagattgatctgagtaaacatgaaggtgaagatattagtcacacttatggatggcctcctctcgtgtgttgctttggatctgcacaacatgcttttgtgccttcgggaaggccagcaaacaggctattagattatgaactacacgaacggatgagagatgcaaagtgggctccagagaagtatatccgggctcctggaggatgtgcaggaggtgttgctattgctcttgcaagcttgggtggtaaggttgcttttatgggcaaacttggggctgatgactatggtcaagccatgttgtattatctgaatgtgtgcaaagtccaaactagatcagttaagattgatggtaaaagggttacggcgtgttctactatgaagatcagcaagagaggtcgcttgaaatcgacttgtattaagccatgtgcagaggattcacttttaaaatctgaaatcaacgttgatgtgctcaaagagggtatatattgtcctggagatttgaacattgagttttt

SEQ ID NO: 139976 - DNA, 2558 bp, Arabidopsis thaliana landsberg
aaaagccaatctacatcaccaccaccgcctgcagcggctatcgcggcggcctttggtttatactcgacatcatagtcctgctggttggtaacttcctctacctcctcatcatccatatcatactcgtccgctccacctccatcagcatcgacgtcatctactttaacgactataccacggccgcgtcgggatttcagtgttaaaggcgcgaaaagaccgtccgttctgaatgacgccaatagccgctgagagccggagggataaggtggcttcgaggtgaatgagagtagagataaggaaggagaagcggcggaagacgccattggaagcggataaagctcacagagtgttctatctatctgtggattagatatttcgaggaaaaatacaattaaaaaaaaaagaaaaactatataatataataataatcctttttagtgaataaaacaacaaaaataaattaggaaataattaagagcgtcatttttggtatcccgcgcaactttttcttctcagtttcagtttctctacatcgattcatcgattccactctcttgattgctgtttagatcaatccgtctcgaacccaggggttagtatatagtggatcaaactgatccgacccgacccgacccgaattattaatgtcggaagttaatgagatgagtggtggttctattggcggcgaattgttgagagcgtcgccgaaggttttaacggccggtgatcggaaattactcaaggtggagcttcggccaggggatacgacgtatgtttcgtggaagaagcttatgagggatgctggtaaggtcaatggtttatcggcttcggttcccgacccgcctcctaatgctaaccctaaccttgagtttcgaattgcaccggtgagtttgatgttgtaggaattggtaatcggatatatatacttgtaggcatttgtgggtttcgtttgctgttattggagtaagcatttgtcttgtttcggggagttgtaatctttgttagggtttataaaggagctttactaaattcgcagattttcagatttatttgttggggaaaatgcttgaaatcgatatggtataggaggaattctgttgttattgctctctgacgtctgtgactagagttcaataagcaaactccttaaacggagaaagtctacaacctgatatatgatctttggcttcatttctaattgctagctacattaggctaacttcatcgttatcaatgtgaatatgccatcaattatacttgatctggaaaggaatttggttcacatagttgcaatggaaactatagctgtaatagtgaagaatatagagaaagtttaattaatatctattagtgcaagagaatgaagcatataatagtggatcttcatttaagatggtataatatgcttgcagcttcctcacaatatattcttcttatgcatacaatatgggtggttaaaatcattttcaacagctgtattttcgtatataatgtaggggcatccagtagagattgaaacgaatgaacaacctcattctaaccgtttcaacgctgttattgagaagatagagaggctctataaggtatgctactctttgttaaaacacttttcttggtaggttgttatatgtttgatttttcacattcacaacatttttgcataccatgcaatagcactgttgcattcacacatctctgaaaagtgtatgcttacttcagagaataaatctcaggggaacgatagcagtgatggggaagagttagacggtgctcctgatgatgatgagtatgacactgaagattcatttatagatgatgctgaactggttggtgttgatatctttcaaatatttttgatagctgagaaatcatatctctgttttactctactccttgcaggatgagtatttcgaagttgataattcaacagttaaacatgatggattttatgtaaatagaggcaagttggagcggatgtgagttatcttcctcttttcattatctgatgtctcttaactctttggtggctttgtcacttttcaatcactcagatcatgtttagaataggcatgtcgtaagtttttgaaataaacatatgaaatcaccttgcttttcagtttttcttcctatttggatatgtgtagtctctccaaatggtaaaatatggttggcagtcttgctactactgccttaactaatgtctgtagggtgtttggtatgggtaaagtccatttttcaacttttctggttaaaaaacgttcatatagatgtaggttttgcactttcgataggatagagtttttctcattttgcctaatcatgctatatttcatttacaagttatctaatccctgattcattttcacaatagggaaccttcaacaacatctaaccagcaacccaaaaaacggcgacgaaaagattcagcaaaaccctgtcgtgatgcagttgacgtaacagataaacacaccaagttgtctataacagctaggaaaaaggtaacatctttaattgcaaatcatactaatttatgtcggagtttgagtctgataactgat

SEQ ID NO: 139977 - DNA, 1487 bp, Arabidopsis thaliana landsberg
acgaagtgcgctgatattgcaactttaagcaagcaatgataggtttgcttaaaaaccatgttcttgagtcttcataatagtaaatgtaacattactcactcaaagcttgtgtcgcctctatcagttatccccatgaacttagaatagatctgattctgttctacctccgagattgtattcagatacatattgtgttggcagtgattttcatatgtgtcgacttaaatgataaaaaccattcacatgtgatattaaatatatttgcagctgcttcgtacccggcgcccatttgttgcttccataactgatgctttgggtaatgagcttttccgggtgaggttttcttacattctgttgtttgaaagtttccggcaagagaattgttgaatttctttggagctgaaataattcctctacatcgtttaggttcgtcgacctttctggtggctcacaagttcaatatatgctgaaattgatggagaggtacacttgcgtaggatttcaagcctttaaactgtactccaatgttaactgtttaatttcggctcattgtcatgtctggtactggtgtaggaaattggtgttgttcatcgacgatggcatctatggagaagaatttatgatttatacctggggtaaactttatttctaagcatctttttttaattggctttcttgaatgcttcattgacctattagatatccttttctttgttatttgggatcaaaagaccgtgtatgtttgtctggtataactattaagaatgacatagacttacagttacagagcacgtcttttatgtacaaagaatcaacacgtgttatgctcttcgttaatctatcaacatctttggacgaacaaaatttctgacatttgatgcttgcaggaacaaccagtttgcagtggtagaaaatcctgggttttggaattggacatttacagtgaaggatgctgatggggaagtcttagcccaaatagatcgtgattggagaggttttggctttgaggtttgttttctctaactaaatgttatatacttaaagatcagccaaatgaagaatctcttacaggaaaaatgaatacatagttgattgtggcgaccaataagccttgaagattttgaaatattttcagtgcaatctatgttagactagaagacacatcgtaaatataaaaatctgaatgtctccttatatatgtgatacagatattcacagatgctgggcagtacgtgatccgatttggaaaagctgatgctgcagccaagaccggccctgcgacactggtgggtttactcctgtgccgtggactcttgtacttgtaattttggttgtttactttaacattagacatttgatcgagcttttcttatgcaactcatgacaggtagaagagttagaagtgaaacggccattgactttgtcagaaagagctgttgtccttacgcttgcgatttcactagataatgattacttttcaagacatg

SEQ ID NO: 139978 - DNA, 968 bp, Arabidopsis thaliana landsberg
atgaagaacaagacaatcctttatccaaggaacaaacaaaacaatatgccacttgacactcaggtcagcttccagttccacgtaagaccttcctttgcagccagagactttcgggcaataacaaagaaggagagttatcaacgcgctaacaggggcgcgtgggtttcagatcctctctttgtcgaccaccaaggtccaccattagcatctgcaccgtacaaaacgtataagctccgattagattcaccgaatcacacaatcttcaaaatctcttccttccatgattccgttatcgtaaagatttgtcctttatccaaattttaggattttgaattcttcttctttccgattaccggattccaatggcgccttttgttgaagtctgtaggtataagccattaccgctttcattgagctctctctgtacatgcccttgccgttcctctccaaggaaatatcttattcttcctcaattctctgaaaagtacccgaaaccattgttgtctcattctcgctttactccgatttctgttaaccggagagttatcacggccgttgctcgagctgaatcaaatcaaattggtgacgatgccaactcaaaggaggtaactttactcctctttctcttgatgtgttagcttagtagtacgaataatcgttcttgtggattgctatgtgatgctgagaaacttatcatggcattgctgtaactattgtctgtttaggaacacaacatagatcaagaattgcaaaatgttgaagaagattcgagtttagatgatcagaagcaaaaatctagaagccagtttaagaaaagagtaactttcggtctaggaattggattgtctgtaggaggtatagtattagctggaggatgggtattcacagtagcagtagcagctgcggttcttctaagtgccccggaatatctcgagctggtgagaagtaaggaattgctcagggaatga

SEQ ID NO: 139979 - DNA, 2087 bp, Arabidopsis thaliana landsberg
aaacccatgatcagttctccagttccacaacaaaaacatcatctcttataagttcttgaaacccagctaatcttctgacactcgtttctcaacaagtcaaaaggcgcacctggattaaccacatggcgattggtaaggatgatcccacgtcgcttatcaacgataaaaccagtagcatagctagcaccggcggactcggtaatcaaaggcgcgacaagccgttgtgcggagtacaacgacggcgggaacaaccttaccgagagcacgacgccaatcttcagcggtggcaacggattcagttaagggaggatcgatctctaaacacaagtcctccttcatgacagactcagtagccattgatgcctgagaacccaacctctccaacggatctcccatttgatctccgtatcagcttgggagaaaatccgcgggaaatggggtttagggtttttggatcggattctctatactctctccttcaaggatatgaagaagaagattggggaagaaatctgatgatagtaatttgttttgcctttctaagcgatttttattagtatattcttagtgctccgattagttgttaagtattagagtatagcacatagaatgaaattaaatatctgttaagacaaaatgaaattatagtataatttatgttttggaaaaaataaaacagtatattctgactaggcttgtaccgcgatttaataaaaatattatacttaaagaacttacgtttatatgatttgttaatttgatagtggagttcttatatgaaattgaaattgatttttcggttaggtttaaattaaaaatgattttggtttcggtttacactggttaagagaaaaaaacaaaaagagtcacgcgatggagaatttggagagaaatgcgtcgatacaaaaaggcatgaattggaaagggggtttacccacagaatcgctctcactcgctcaacgcgctctttctgcgagtgggtacgaaatagagccttctgattggtttagaaacgcaaaaaaaaaatgaaatagtatacatgttgctagctcctatatttgttattatttagtttttcgtatgctcatgaaagttgttgctttttttaaatacgattgattctagatgatatctgatgataattttagatacttgagatttagtatttgatctataaagatttcacatttagtggtggttggtgatttttgatgacttgaagctctctgcagaaacgcacttggacatggaaatgttacatctgaaccccatattgtgcttctgctgcaatgtcatcttcaactcttctcctaccttcaaaagctattagtaagccacaactgtcccgaggttcaagtatgttcagcattttagacccccaaagtcgtcaaaaatgtctcacccttccagttctatccatgaggttattactatatatgattgcaagttttatgtttttaaaccatgattgccattatcccattcatgtttctgttttcttgtacagatgagcttctcgtatgagttgttgtttgtgaaacgttattgtcagccatttggcttagggaacatatgtaagctccacaccaaaattatttcactgctctcattgatcttatcttgatagttggattttcaggtagaaagaagagttggtgttttgtttatgagtttgaacacttaaaactttttaaaggctacacattgacgaggatgaagaaaggcacaactttggacacaaaggaggtaaggcctgaaccttattcaagcctttttttttgcctactcatacatcacaaaatgagaaatttaattgaatataagattcagcgagccatcaattggttggtcttactttcatcaaaaacgctgcttagttattagtttcttgctgagttggttattacctggttaggacgaaaattttgaggttttagcaaaaaccataaacttggatttatacttgagcagcgttttctaactggcattctatatatgattctatttcagggtttctctgcccattcgtcccataccttccagttctttgcattttgatcaacacctacttgatcatcaacattggg

SEQ ID NO: 139980 - DNA, 1319 bp, Arabidopsis thaliana landsberg
tctctttgtcccaccattttcaccgcttctcctccaatcactcagatctacagattcctttaaaacaacaatggttggatctttggaatctgatcaaactctttcaatggccaccttaatcgaaaaactcgacatcttatctgacgacttcgatccaaccgccgtagtcaccgaaccgttacctcctccggtaactaatggaatcggagctgataaaggaggaggaggaggagaaagagagatggttctcggtaggaatatacacacaacgtcactcgctgtaacggaaccggaggttaacgatgaattcaccggagataaagaagcttatatggctagtgttcttgctcgttaccggaaaactttggttgaacgaaccaaaaaccatttaggtaaaatttgatctgatctgatctttttttttgaatcggaatcggaatctgaatcggaatctggtgtaggttatccttataacttggatttcgactatggtgcgcttggtcagttacaacatttttcgattaataatcttggagatccgtttattgaaagtaactatggtgtacactcaagaccttttgaagttggtgtgttggattggtttgctcgtctttgggagattgagagagatgattattggggttacattaccaattgtggtactgaaggcaaccttcatggcattttagtcgggtacgttgttttgtagtcatccgtggattgactagttcggtggatcttgtccatgccgtgtctaatgtcctgtccggttggttcggaccgggttgccgctccatttggaagtgttcaagacaagaaactgtggttggggtttacgttcttgggatccaatccgagccggaacttttatctgcgagtttgctggtgtgagaaagacgaaagaagaagtagaagaggatgatgattacttgttcgacacgtcaaagatttatcagaggttcagatggaactacgaacctgagcttttgcttgaagatagttgggaacaagtctctgaatttatcaatcttccaacacaagtcttgataagtgctaaggaaaaagggaatgttggtcggttcatgaatcacagttgttcaccgaatgttttctggcagcctattgagtatgaaaacagaggtgatgtatatcttcttatcggactttttgctatgaagcatattcctccaatgacagagttaacatatgactatggagtttcatgtgtggagaggagcgaagaagatgaagtacttctttataaaggcaagaagacatgtctctgtggttcagtcaaatgtcgtggctcttttacctga

SEQ ID NO: 139981 - DNA, 1315 bp, Arabidopsis thaliana landsberg; identical to SEQ ID NO: 15304

SEQ ID NO: 139982 - DNA, 524 bp, Arabidopsis thaliana landsberg
  unsure (1)..(524): unsure at all n locations
cagatgttgagaaatttctccaaagaaacccactttcgtttgaggctttattcgagaatgcattgctcatggacaggtccgnggaaggaaatgcagtgctgcagaggctagaagatgctttagctgtagctgaggctgagtatttggtgaaggaagcgagagatgtgagactgatcattgcgcagatacatttcttgcagaagaatgtggatgaagcattgaagagctacgagcagctgacgaaagaggatcctaaggatttcagaccgtatttctgtcgaggtatgatctatagcttgcttgacaagaacgttgaagctaaggaacagtttgctaagtacagagagctctctccaaagaaatttgaagtagaagggtacttgaggactccattgtctaaaatgaagctttttggtggtagtgaggagaactaagttagtacgatagctttaaatcatatcagaagaataagacactggaagataatgttgttttcctgagaaattatgctgtgattttgcttt

SEQ ID NO: 139983 - DNA, 1747 bp, Arabidopsis thaliana landsberg
gagtaatagtgttagggatgaatcaaacatgtatgggggatctgaatgggaccaaaacaggcggatgaatggccggggctgggaatctggtgcagatgaatggaaaagtcgaaatggagatgcgagcatggaagtctcatcaatgtctgttaaagatgataactcagctcaggttgctgatgatgagtctcttggcggccaaacaagccactctgataataacagggcaaaaagcgttgaagctgggtcgaatctaacatctccagcaaaagaactgcatgcaagttctcctaaaacgatggaggaagttgcagctgacgatcctgtttcagaaacaattgataacactgaacgttactgccggcattatctctcaaagcttgatgtatcggcaggacttgctgatgccgagctgcgtaaatgcattagtttattgataggcgaagagcatctagcaatggatgacgggactgctgtgtttgtaaatctcaaggtaaaattctctatcctcagacatagaaatcaatcattctatttgtgtgcaactttgagacccttttctcatatctctctatattcttttaattacaggaaggtggaaagagagtgaccaaaagcaacagtaattccttgaaggctctttcattgtttccatctcaaaacagttcagtgtttcaggtactgcactaagacaaggaaaataagattctggtagtagctcctggcaattcgagacttatgtcaatacaataacctgagcttcccacttgcagattgctatggatttctacaaggagcaaagatttgaaataaagggtcttccaaatgtcaaaaatcacgaggctcctcaagtgcctccttccaacttggttaaagttgaaaacaatgatgatctgaatgatgcaaggaatggaaatagttcaattgaggcaacagatatgaaaattgcggatgtatcagattcagacacatcccaaaaggaactgcaaaaagtgtcgtcaaatgctggtgccaaaatggagacagaaacacgagatgaaggatcttcgtctcccaatccagacaattcacctgaggctctaaatgctgtgtcgtcagatcacattgaaggttctgaggaagctgtggctttagaccacattgaaggtgatgagcaagaggcaaagctagatgatggagctggtgtagaccaaacaatggagacagctcctgagcatgatggtgttccagaaggtgatgcagttaccttgacagtagcaccaccgactctcgaggctatggatgttgatgagcggaaagatttatctgaagatgagaacatggaagaagcagaagagaagaagggagctaatgatggtgaggaagctgaagctgatgatggtgatggagatggaagtgtagttgttggggatgtatctccgaaggtaaccgaaccattagttcatgaatctgatgagtcagtaataagtcggatacatcattcaccccaaagtacacattaagacatttctataattccatttcatttctgttttgtttttttctttctatatcattttacttccaatgcatttttttctctttctcaaaatccattgcttcatattcttctcatgttccttttgtgccatcttcactcatttcgtaccgaaagaaataataaaagaaaataaacattatagaaaccaaaaatgatttgcattgtctttcttttttgcttttctgatcttttgagtaatttgcaacc

SEQ ID NO: 139984 - DNA, 1845 bp, Arabidopsis thaliana landsberg; identical to SEQ ID NO: 20240

SEQ ID NO: 139985 - DNA, 2863 bp, Arabidopsis thaliana landsberg
atgagagatcaagcaccttctccacagttggaacttgatatatcccgaatggaaaaagaactagagctgtcttcgcaggaaaagctttgccatgaggcccaaatattgagggtttgtaatcatattctctgctctgataacatcttcggcttttcctctggaccggtaacatgatagtaatagctgccttatctctatactgtattgaaggatggagattttattcagcgagctctgtctttctatcgcctaatggttgtttggttagttggactagtcggtggctttaagatgcctctaccgtcaacttgccctatggaattctcctgtatgcctgagcattttgttgaagatgcaatggagttgctgatattcgcttcaagaattcccaaagctttggacggggtgccgctggtatgcttagtttgctctcatcagtctgtagaaattctctttttgtatttgcactgatgatggttgttctcttttcttaaggacgactttatgaacttcataattatgttcatggcaagtcctgaatatgttagaaacccgtatctcatagcaaagatggttgaagttctgaactgctggatgcctcgttcaaggtgtttttcttcccatgaaagaaagctgtacatttgtcaatttgtgttgctaatgcaacaagttctgcagtaacgtggtccaccattctaattttttttttttcctgcagtagttcttcttctgctacatctactctctttgagggacatcagttatcgctcgagtatcttgtcaggaatttactgaaactatatgttgacattgagttcacgggttcacacactcaggtgattgcaagagattttgtttagtggctataatattcctggagtaatgaacttctctctattgcattgtacttgagaatatgttagctctggaagccagaatagccatttgttcttgcttttattggaactgaaatctagttatccaaatgcagttctatgacaagttcaatattcgccacaacattgccgagcttttagagtatctctggcaggtgcctagtcaccgaaatgcatggagacgggtaaattcttagtgagcttgccatgactttgaacttcaactatcatgttccaatgtttttccaaatttgatgtgttacagattgcaaaagacgaagagaagggcgtgtacttgaacttcttaaacttcttagtcaatgatagcatctatcttctggatgaaagtctaaacaaaattctcgagattaaacaaatcgaggcagacatgtcaaatactgcagagtgggagcagagaccaactcaagagagacaggagagaacaagactctttcattcgcaggagaatgttagttggattatcacttcttatatcttgtttcgtactcgaatcccgatcccataaagaactttgattttctttgcagattgttagaatcgacatgaagctggcaaatgaagatgtgactatgcttgcatttacatccgaggagatcactgcccctttcctactccctgagatggtacctgaccatattcctgaaatgataacctgccctatgattacccaactgatgagtttctttgtttgtttgcacttatttaggttgagagggttgccaacatgcttaactacttcttgctacaactcgtgggtccacagcgtaaatctttaagcctgaaagatcctgagaaatatgaattccgtccaaaacagttacttaaacaggttagtagtgattacaattactcaattctcctgatcaaagtatgtgagaaaaaactgactgatatgattgtgaactttgaagatcgttcgcatatatgttaatctcgcaagaggagacacagtaaacatattccctggtgccatctccagtgatggccgatcatataatgaacaggtcagatccttctttctaaaccaaatcctctttcataataatagatgcgtctctactgaactaaacaagtgcccgtttttgcagctattcaatgcaggagcagatgtgcttaggagaataggtgaagagggaagaatcattcaagagtttatggagttaggcacaaaagccaaagctgctgcttctgaagctctggatgctgaagctgcacttggggaaataccagacgagttccttgacccaattcaggtctttatctgttgaaagaaacactaatttaaacctaaatcttgtcttattaccatgcactaatgtctgttcttgtttttttcttttccttttcttttttggcagtacacgctaatgagagatccagtaatacttccaagctcaagaatcacagttgatcgtcccatcactcaacgtcatcttctcagcgacaatgtaagcttatctaacacaatgatgatcactgatcagtcacatctctctttctctgaagattttggctttgtatatgatcctctacttttgctgcagcatgatccatttaaccgagcacatttgacatcggatatgttgataccggacatcgagttgaaggcgaaaatcgatgagtttgtgaagtcgcatcagtctaagaaacggacaagtggagaagatagcagcaacaaggaaaggatacagactacaaacagtgatatgttaattgattaattatgtgttccaaaagtaacaaaataataacaattattcaggactttttttttttacttttgctaggctttcttttctattaggatttatctatctattttagggcttgctttccacttatttgatgccacgggaaaaaaacttataaatatcatgtctagaactgtttctatcataagttcgatgtgttcacgagtttctatgcatttcgacgtttgttcatgg

SEQ ID NO: 139986 - DNA, 786 bp, Arabidopsis thaliana landsberg
  unsure (1)..(786): unsure at all n locations
gcccctcaaggtatcttccagaagcaacgagaagacctgcaagagaaaattttcagattcaactatggcggacgaagcaaaagctaaaggaaacgcagctttctcctccggtgacttcaattccgccgttaatcacttcaccgacgcaatcaacctaacaccaaccaatcacgttctcttctcaaaccgttccgctgctcacgcatcgcttaatcactacgacgaagctctctcagacgcgaagaagactgttgaacttaaaccagattggggaaaaggttatagccgtctcggtgctgctcacttaggtctaaatcagttcgatgaagccgtggaggcgtattcgaaagggcttgagattgatccaagtaacgaaggtttgaaatcaggtgtagctgatgcgaaagcatctgcgtctaggtcacgcgcttccgcgcccaatccgtttggtgatgcttttcagggaccggagatgtggtcgaaattgacggcggatccttctactagagggttattgaaacagcctgattttgttaatatgatgaaggagattcagaggaaccctagtaatcttaatctttatttgcaagatcagagagttatgcaagctcttggagttttgttgaatattcaaatcaggactcaacaggctggtgatgatatggagattggtgannnnnnnnnnnnnnnnnnnnnnnnnnnggagcctgaggtagagaagaaacgaaaacctaagcctgagcctgagccggagttggagaagagaagcagaaggagcttgacgct

SEQ ID NO: 139987 - DNA, 779 bp, Arabidopsis thaliana landsberg
aattactcaatcctctaaagatgaacatgagcagagttgaacaacaagtcattagatatccggccgcaaaggctactcccgtgggttacttacctgatccggcttcatttaacaagttccgagttccggcttcttccaagaaatctgaacaaagttagtacctatttagttaccctctaattcatattgttttgtccctggaaaacttgaaagataacaggattgattttttttttttgacaggcaacgtaaaatcgattcttaaaaggaagaaaactgatgggttcaccaacggagttagagaccagagcaagataagaccaaagctaaccgaaactgtgaagagaaagctatctttgggcgctaggattcttcaggttggaggtttagagaagatcttcaagcgtctctttagagttagtgaaggtgagaaactgttcaaaatgtaccagtgttacttgtcgacaaccgcgggtcccatagccggccttctcttcatctcttccaagaaaatggcgttctgcagcgagagatcaataaaggtggattcccctcaaggagacataatccgggttcactacaaagtatcaatccccttgtgcaagatcgacagagtgaaccagagtcagaacacaaagaaaccatcacagaagtacctagaagtagtcacagtcgatggttttgacttctggttcatggggttcttgagctaccagaaagctttcaattgccttgagaaggctctttcactgagctttgaagataacaaagagcaataa

SEQ ID NO: 139988 - DNA, 1401 bp, Arabidopsis thaliana landsberg
aaaatttctctctcttttgcttacttcactcacagtttcgccgccgggataaatccgttcaatcggcgtttgccacctgccattgttacaagcaatgcattatatcgttaatggcgtagcgcattgagaagagagagagagagcagggaaacaatgatttcccaggtggagagagatctgtcgattcaaaatcggcttccgggaagcgatcacactactccttctccgccaacatctcctcatctctgccggagccggtcgaaatcctcctctgtctccgggcaacagcaaagtcggaacgtcgctcaccgtctctcatggatcattttatctgttcttctccggcgtcagggaattctccttttcgctcctatcatctacatctcctgtatgctttttcacctacacgcggcgtcgtttgatgcctctcccattatccaccgccgtcctgctccgggatccgtctaccggagccctcaggtttacgctaggcttcgcggcgagattgaagccgataataccacggctgatgcggtgaggtttgcctccgttttatcccgcttgtgatatcgttttgagaatgtggccattgtcgaacatagattgatccaattagagtataatatctaggagaacgtataacaatgttgaacatagattgatctctgttcttttcttgttcccatttgtcatgtatcgtcaatgcaattgtattcatttaagatatcaacaatttggaagcgttcttataaaggtgtagaatggaagccatgtgtgaacatgtctactggaggtattttacattgttctcctagtttcttcgttagtgttctttgtcctaagtaataagttgaatcaattaggctttcttgttgttgtttgtgttaacaattgtagttttacctgagtcaaatggtttcatatttattgaggcaaatggaggcttgaatcagcagcggacttcggtaggttaatcatcttacatcaaattgatttttttcacacaagcctttcttgctattgtctggcaaacttgtcaaaggtgaagctgttgacttgtctattccatgttttacttagatatgcaatgcggttgctgtggcaggctaccttaatgcgacccttgtaattcccaactttcactatcacagcatatggaaagatccgaggtttcggatatttgttttcttatcttctcctggtgttataaatttaagcaaagccatccctgtttcaactactttctgaaaaaaggttttccttgcagtaaatttggggacatctatgatgaagagtactttatcgataccttagcaaatgatgtgcgggtggtcgatacagttcctgaatacttgatggagcgttttgaccataactccacaaatgtctacaacttcagag

SEQ ID NO: 139989 - DNA, 642 bp, Arabidopsis thaliana landsberg
ctcccctccgcattcaaagtagtccaactcctaaaatcccaaggaatcacgcgagtcaaaatcttcgacgcagacccatcagttctcaaagcattatccggatctggaatcaaagtcaccgtagatctccccaacgagttactcttctccgccgccaaaagaacttccttcgccgtctcatgggtcaaacgcaacgtagcagcttatcatccttcaacacagatcgaatcaatagctgttggtaacgaagtcttcgttgatacacacaacactacaagcttcttgatccctgcaatgagaaacattcacaaagctcttatgagtttcaatctccactccgacattaaaatctcttctcctcttgctttaagcgctcttcaaaactcttacccttcttctccggttctttccgaccagaacttgtcgactctgttatcaaaccaatgcttgacttcttacgtgaaactggttcaagacttatgatcaatgtctatcctttctttgcttatgaaggaaactctgacgtcattcctttagattatgctttgcttagagagaatccaggaatggttgattctggtaatggtttgagatactttaatctcttcgacgctcaggggatcctctagagtcgacctgccg

SEQ ID NO: 139990 - DNA, 1059 bp, Arabidopsis thaliana landsberg
tagtaatggaaaccttacaacgggaggaggatgcaaagttgcctttttaacagatgaagtctacactttatggaatgcaaccaaacctgaaaatttattttctaatggctacgctaatgtgagcctaggatggttcatccaaacgaagaatcattcgtttatagaatcattgggctgccaaaacagagaagagttcgatgaaagtaaaaaactccgtattaaaagtacagcaaaatgcacatgcgataatcatacagcttccgagatcatttatgcaagttgtgcatgtgctggcgggtacaagggtaatccataccgtgtagactgccaaggtagagaattgctccttcaagtatcttctttccttgtgtgtctcacatcacccatcatttcagtacaaattcatgacttccttttttatatatgtttcatgcctttttcgtttgcagatgttaatgagtgtgccgcacctaagaatccctgttgggatacaagtattttatatcgcaggaaatgtaagaatacaccgggatttttttattgcgtggactaccacattccagaaacaatgctaggtaagtcattgaatttgttatatatcaaaattcaagcagcaaaacttttagatatatgatgatgaacgtctagtttttcttgtgtggtgtttgcaggattaggtgcaggtttttttgtcttaatagtaggcggcgctatatggtggttgagaaagcttcttaggaagaaaaggatgacaaagcgcaagaggaaattcttcaaacgtaatggaggactattgttgcagcaacagttaaatacaactcaaggcagagttgaaaaaacaaaaatatttagctcaagagagctggagaaagccactgataacttcaacgataataggattattggacaaggcggtcaaggaactgtgtacaaaggtatgcttggagatggtagatccgtagcagtcaagaaatccaatgttgtagataaagacaaactacaagagttcatcaacgaagtcattattctctcgcagatcaaccataggcacgtcgtgaa

SEQ ID NO: 139991 - DNA, 954 bp, Arabidopsis thaliana landsberg
gatttctctctaattgttttgatgcatttctggtgaaggctttgctccactacatatacaaggatgctcttattgatgatgcagagtcatgatcatcttacggactcatctgttggtccatctgcctcagacacattagctgcaaagctactaggagccgctgataaatacaagttgcctagattaagtctaatgtgcgagtcagtgctctgcaaggatatatcagtagattccgttgcaaatattttggcgcttgctgaccgttacaatgcttccgccttgaaatccgtttgtctgaaattcgcagcagaaaatctcatcggtaatgatcttttctgacaggctcatcactgaaattgatttcacaccaaacttacattgcataaacatttttcttgatgcagctgttatgaggtcagatgggtttgattatctaagggaacactgcccgtcacttcagtctgagcttctgaaaacagttgcgggttgcgaagaggagttaagcggaggaggagggaagacgagaagcgtatggggccaattctcagacggtggagctgagacaaacggaagacaagcacagacttggggagatatcaatggaggagcagagagaagccagagtgtttgggtcgaagttgtgaacgctaatggaagcggtagaaacaataatgacaacaataacagtgatgacccaatggcagaactagaagattgagcaaataaaaggtaataaaaaagccaaaggacaatccgagtaagctgaagttaggatcagacatcatgaagcggagatcttgtaacttagtgtttccactgtcgaatactatgtggatcataggagacgatttagtattgttgttgtaatacgctttccgtgtaataattggagttactagtatgataaactaaaacactcatcatcaatataaattcagtaagcttgttcagttt

SEQ ID NO: 139992 - DNA, 3661 bp, Arabidopsis thaliana landsberg; identical to SEQ ID NO: 70400
  unsure (1)..(3661): unsure at all n locations

SEQ ID NO: 139993 - DNA, 488 bp, Arabidopsis thaliana landsberg; identical to SEQ ID NO: 73798

SEQ ID NO: 139994 - DNA, 340 bp, Arabidopsis thaliana landsberg; identical to SEQ ID NO: 67784

SEQ ID NO: 139995 - DNA, 428 bp, Arabidopsis thaliana landsberg
gcctagctgtcttgatttccccaagcttgcacttaacagtcccgtgacgccgttaaagcagggaaccaacggaaacgaaggcgatcctttgacaagatgtcgccattatcggaggaagagagaggtatcgcagacaagggttattacctgcaccggtctccgatttcaactccgagagattttgagccgcagcttctgcctctgttcccggtgacttctccgagattatcgccggagatgtagactgagagacctgtttataaatttttactgcgactggaactttcatttcttttttaactttgctctgcttttaatatatcgttatccctgtttcggcttattatactatttactttaaaatagtaaaatatgctaattaagtttttaaataaataaataaagaaaaggagaggtgaaagataaaa

SEQ ID NO: 139996 - DNA, 2550 bp, Arabidopsis thaliana landsberg
ccaatcttctatcaaattgaaaccaaacaacaacaacaccacccgattcatcgacaaagaactccagctatataataaacccaggaagaaaagaaagaaaagagagagttgcaacttgtaccttttcaaattccagaagcgagaagcttcatcaaatggtctctctgagagcgttattgagaaattaagcgaggaaaaatctaaaggtgaagaagaaatagaagaattgggttgcttgctggcttggttaacttcaatcgttcggtgcaaaccgacaggaacgtttttatcgagtttttatttgttcttaaaggatccaaaattcatactgtattattaagtgtagggttatttttttcacaatatgacattttgttttggatctgacattgctaatttgacaccgatgtaacattgcaaaaacacatgtttgttgcaaaaatatgacagaataatattttttttaaaaacaattgatttttgatcttcttttccattgtgtaacaatcggaaaacaaaaaaaacaatcgaaaaacctgcagttttcatatcaaacaatataaaacccgtttaatttttgaatggtttaatcactattttaacggtgttatttgagttttctagttgattttaaatgttagagaattgatcttgtgtgaactaaaaatcctaatggtcgaagactagaaagcgaaatacactactcttcaattagaatacagacaactatctctaaaccgagcgtagaatcaatagcaataaaccgaccgtagaaactggtttcgctgtaaccataacctttcttaataagacaaccgcgttttaccagtaaacgacttttcctcgcaatttaatcccacttttgttattttttcaaattcgtttttcctcgaaggagcatcgagtaaatatatcattaaagagcctttaataacttagacataataattatatctttaaaaaaaaaacagaaaaattctttgctttgcaacaaaggcagacagacaaaaggctaattcggagctctcctccacatcttcttccaaaacacaaacaaacccccaaatttccagaaaaatcagatcattctttcatcaatctcgtcttctttaatcttaggtgagaattcatcagctcaaaaacgcagcacccgatcgttttacgactcaaatcagagaagctgattcttttccaatcattccaatttccatttcttccttgggaggtgatcgacgattattcaatttatgtttttcaatttctctttctgtattcgtcaatttgcttgaatttgatcctagggttttgattttgttgactattttaggttttacaccaaattagccgtcgaaaggggtgcttctttgatctaatttcgatggcgggattagagaaaaacgctgatttctcagggaagacgacgaaatcggctacaacgacgtcgttcttcaacaggtcgcttacaattcacggaagaacagtggtggattcgggccccaaatcccacaatctcaatccttctctcaatcgtaccacctccattaccaaattctacacccccgtagaatcgatgggaacttctcttaaaggcaaagtcaaaaacctttgtagattattcgagacttccaaacccgttaaacctgccttagctgagattcctcagaagcagaaatccggtaaatcccttttacccgaatcgcggatatcgcctttttcgagcttaaacaactcggtcatccgtcttcccgggacagaggacaggattgtggtgtattttactagcttgagagggattagacggacgtatgaggattgctatgctgtcagaatgatatttagagggtttcgggtttggatcgatgagcgcgacgtctccatggatatcgcttataggaaagagttgcagattgcaatgggagagaagtctgtgtctttgcctcaagttttcattatgggcaagtatgttggtggtgctgatgtgatcaagagtttgtttgagattggtgagcttgctaagattcttaaagagtttccaatgagacaaccagggtttgtttgccattgctgtggggacattcgatttgttccgtgttccaattgtagtggcagcaagaaactgtttgatgaggatgaagatagggtcaagagatgtcctgaatgcaatgagaatggattgatacgttgtcctgattgctcttcttgagatatatcatcaatgaacctgaaaaaaccattaaaaaaaagaagaaaaaagagggatttatttctcctaaaatgtccccattgttgtgtagaacagtgaaaaatgctgccaaaagtatccgaaaatctcttttggctcagcagcatttcactttgggttttttaaggtttgcgatcaacggtaatgggaatgccggtgatcgtggatttagtttatgtatgtgtttgctactaagggctaaatgtaattgtgtaatcaaaatgtctgaaacgggtagtaagcattttgactcttgtgtgtcaatgttgtgaaagacaactgtgttcttatgctatatatttgattgt

SEQ ID NO: 139997 - DNA, 2514 bp, Arabidopsis thaliana landsberg
atcctagcctcggaactgttggggacttcgatggtttttcgatatcagatctggagaatgcagatttggggactccccctgatttcctcactgtaagatcctgcttgaaaaaaaccttgtttactttcggaaaattcaatggaacttaagattctaaattagttgtcatggaggttttgcagttggcttctcaggagagcttgctgaattggattggatggttgtgattggattcttgctgctacacaaagaagctcttctagtacggcgttttcgctgaagaaggaaaaagctggaatatgtcataaataagaaaactttaaagtctccgcaactgaagtcatatctctgtgataattttacttcaggagaccagttttctctcggattcccggaaagctgcttaaatattccgggaataatcattttcaatctctgaatctgcacttcatcattgtaattcaaatagatattttgacctttgtactctttgctgtcttatgatggttactctgtttttgtttggctcagggtccaacggttataactatttatttttgggtattttactattttcaccttatattctcaaaagttctcattatcaccccaaagaaattaattaatccaatttaacctctttaacattactagacagttcacacaccctctgtctagacggaattagggttttcttaagctattccgcagcagtctacggttgttgtgtcggtggtgggcgcctccaaaatttaccctttagtataaataagttttggaaaattcagactttggttattgaaacgccatctcagctctaattcagtacgatggggaggagaggtcgcggcggcggcggtggtatgggcggaggaatcaatcgtagatatctgagtcaagttatggatacgtgcggcaaggatttatctacggcggaggacatcgttgatgatcttcgttccaggtacggcaattttgcgaggttgactcggcaagtgcttctactcaatgtcaggcaagtccttaatgttagaaacaacaagagggttaaagacgaagatgaagatgacaacattggagatgaggaaggttctgcttctcagaggaagaaacagagacgggttgatgagaaagaggagaaattgcagcgagcggagcagtcgcatttaaggaagaggaatatggaacgttcagtgtcttcttctccgtcttcttcttcttcttcggaagacagtggtgatgtgtcgacttctgaggacgcggtttatggcgagaagctgagtccgccgcggtttgatctgatcaatgacagtctaagagataactacgctaagttgaacagctcctcgaagaaaccaattgggtcgcctgcggaaaagaatgtggaagttgagactgtgagcaacaaaggtagaagcaagttggctacaatgggggccagaaaggaggctaaagtttctctttccctcagtggagctactggtaatggtgatttggaagttgagggtactaaaggacctacttttaaagactttggtgggattaagaaaaccttgcatgaattggagatgaatgttctattccacatatatcaatcctgagccgtttaagaagattggagttaagccaccgagtgggattctatttcatggaccacctggctgtgggaagaccaagttggctaatgctatagccaatgaagttggtgttccgttttataagatttcagctacagatgttgtttctggtgtctctggtgcttctgaagagaatattagagagcttttctctaaagcatataggactgcgccttccattgtgtttatcgatgagattgatgcgattggatcaaagagggaaaatcagcaaagggagatggaaaagcggattgtaacgcaattattgacttgtatggatggacctggtaacaatggtcctgagtctagtgttggatttgttctcgtcattggagctacaaataggcctgatgttcttgatcctgctttgaggagaagcggacgatttgagtgtgagatcgctctgagtgttccagatgaagatgcaagggctgagatactctctgttgtagcacaaaaacttagactagaaggcccctttgacaagaaaagaatagctcgtttaacaccgggttttgttggagcagatttggagggtgttgctaacatggctggcagaatagccacaaagagaatcttggattcaagaaaatctcaactggctggggactctgaaaatgatagttcttggctgaggcatctctggccagaagaagagttggaaaaactctttgtcaagatgtctgatttcgaggtatgttaattgtaggcatggcatgtatctacttttctgtacttcaataactacgagattttaatccttggttcctaactctgttggccgctctgtaatctactaggaagcagtgaatctagtaacaggcatctttaacaagagaaggattctctatcgtgcctgatgtcaagtgggaatatg

SEQ ID NO: 139998 - DNA, 1142 bp, Arabidopsis thaliana landsberg
  unsure (1)..(1142): unsure at all n locations
aaaaacacgaagccctaaatttcgtcgtaattggcaacagttaagctctttgctaaaagctctagctgagaagcgaaattcgaagtgaagaatgtctaatcgcaaattcggaatggaaggattcggcattaatcggcaaactagctacagtttcgagcgatctcaagcaccgcaacgtctctacgtccctccctcgtctcgcggcggagacaactccgaagatgccgatcttgataacattgattacatggaaaacgaagaagctgaggaagatattgaggaaggcggttctgctgcggctagcggtggcgaggttgatgagatcgatccattagatgcttttatggagggaattcaccaggagatgaaatctgctccacctcctaagccaaaggagaaactagagaggtacaaggacgacgatgacgatcctgttgagagttacctcaaggccaagaaggatttgggcctgacactagccgccgatgcacttaacgccggttataactccgacgaggaggtgtatgctgcagctaaggcggtcgatgcagggatgctagattatgattccgatgataatccgattgttgtggataaaaggaagattgagcctattacagctctggatcatagctccatcgattatgaacctattaataaggacttttacgaggagctagaatcaatatcaggcaagtttctctattcgttaaattaacttgctttaatatatagttgttaggtgttgcatctaaagtgtttaaatttcttaatccaggaatgactgagcaagaaaccacggattaccgtcagagattagggattcgggtctcgggttttgatgttcataggccagttaagacctttgaggattgtggattttcctcacagattatgagtgctatcaaagagcaagcttatgaagaacgtacagcaatccaatgtcaggctttacctattgtgttgtctggtcgagatgttattnnnnnnnnnnnnnnnnnnncaggtaagactgcagcgtttgttcttccaatgattgttcatattatggatcagcctgaatttcagaaacacgaacgtccaattggtgtcatatgtgctccaaaaagaaaattggctcatcaaatcttcttggaagccaa

SEQ ID NO: 139999 - DNA, 481 bp, Arabidopsis thaliana landsberg
aagatgggagaaagaattgtggtcgacagagcttatctttaccaagaagacaatccactcaccgtctgcaagacttctctcttctacaccggcgatggcttcgccgcctatgactgccgtggtgatatcatcttcagggttgattcttatggacctgacacaagagataacgatgagattgtcctcatggacgcgaccgggaagtgtctccttaccgttaaacgaaaggtaaacttaattcatcctttttttcttcttaaaattatgttgggatgagtaagagtctagtcgtgagggtgactagctaggtgattataataaattttgatgctcaacttcttgtgctgaatttgattagatgggtttggtttaaaaaatgaatttcattggtgagcctccatctgaattcaagaatcttttgctaacatcttttttttgtcaagaaaatcttgataagttttttgtattggtgaacgaataa

SEQ ID NO: 140000 - DNA, 727 bp, Arabidopsis thaliana landsberg
tcctactcctccaaagaaagtagagaaagtgtcaaagaagaacgaggaaggtgtgattgttaacaggtacagaccaaaagagccttacactggaaaatgccttctcaacaccaaaatcacagctgatgatgctcctggagagacctggcacatggttttcagccatcaaggtagtgattccgttacttgattctcacaacatgtttcttactttataatgattcttttcttgatggtaattgaagtagcatttatgtgtcttcgataggagaaatcccgtacagagaaggacaatctgttggtgtgattgcagatggaattgacaagaatggaaagcctcacaaggtcagactttactccattgcaagcagcgctcttggagatctcggcaattctgaaaccgtaataaaccatttcctttacaaattttacgaggctttgttttgtctggttaagtgaatgaaggagttgtttcaggtttctttgtgtgttaaaagacttgtttatactaatgaccaaggagagactgttaaaggagtttgctcaaatttcttgtgtaagtactaatgaataagtcttgtgtaagtttataacttattcacttattcaactattgtgttttcttttactttatttttcaggtgatttggcacccggaagtgatgttaagctgactggtcctgtaggcaaagaaatgcttatgccaaaggatccaaaaaccaccgtt

SEQ ID NO: 140001 - DNA, 812 bp, Arabidopsis thaliana landsberg
gagggcgcttagcttatgcttgagatattttgtttttacctccgagaaacggatttagattcgtaatcgtgagttttttggtgtaatggagatcgctactgtcgtaaaggctaatggcggttgtgaagcggatcgacgacggcttcgccgattgagatgctctgttaaggattacgattggggcaaaattggatcggattcactcgtttacagggtttatgcggcgaattcagattacgagattgatcctacacgaccttacgccgagctatggatggggactcacgagtctggtccgagttacttggaggatgctgatggatccaatggcgtgacccttagatcctggatcaccgaaaaccctaaatctcttggaaatagggttttggagaaatggggttgcgatctcccctttctgttcaaggtacaaacatctatacatagttcaatgaattgattttgatcatttcgtctgatttggagttgaatatgtacttttatgttgtgtgttgcagaaatgtgattaaattttgtaaaatatttggtaggtgttgtcggtggcaaggccgttgtcgattcaagcacatccagataagaaattagcaaagaaaatgcacaaagctcatcctaatctttataaagacgacaatcacaaaccagagatggctttggcctatactcaattcgaggctctctgtggctttatacctcttcaggtatcacattgctatcttatcactatactttatcatatcttacttttttttgtttttttaaccataagagatgaacctatgcaatggcccacccag

SEQ ID NO: 140002 - DNA, 1630 bp, Arabidopsis thaliana landsberg
  unsure (1)..(1630): unsure at all n locations
caagactcttcgggttttaagtctattcctcttcccctacgagttgttactcactgcctaattcttntgcaaagtttgctaatgggattaagcagcaacagactgtgaagccaaagttattggagaagggttctcctagaatggggttgtcagagaagggccggtctcttcttaaagcggagagtccgaaagttgggaaaaagcttcccatgattaagaattttgtgcaggggattgagtttggagctaaggcgttgaggaaaagctgggaagggaatttagatatcaggggttagatagaacagaaatccagccnnnnnnnnnnnnnnnnnnnnnnnnnttccggagttacagtaagctttttcaattgtatctttcttggctttatattgcaaaagaaacatgtaaggtcatttcctattcatcagcacttgacttgaagctgagaccacttgtttgagagcattgttaaacttgttctattcattactatctgctgaatctaagtttgtattatactttcgtctgttttcctatcagtctcatgtttttccatctgaattcgtctgttacttcatacaatgttattagtgtttactgttttcgattttctgaatatagcttgtatatttttggttactaggctccgcggagaagcacatcgagtgagaagttgccaagcaaacaggagagggctaatgtatttgcaagatcatcgaaggagcacaataagatacagtcaaccaagaaagtcgagccaactgcagtgttggacaccaaagataaaacgagtaggcctaaatctacatctgtcgagaagaaatctgttgcagagaatggattgcctgggaatttggtcaaagtctctgttaatggtaaaagattagcggcggccaatatccaatggagttcactccctccatctctttcgaggatgggacaggtatggccttgactgctcttggatccttatatgtgcttgcttcattaataggctttgaagcatttctagtgattaagaaaattcatcttcaaaacaagcagtttagaaattcgatcatccaaactaacatatttactctggtgattgaagagaacctcttagtatagcatatgcatcttatgttttggtctttgacatcgtgattaaatattaagacagcttattgagtcattgctgctatcaatatttgcaggaagtattgaggcatagagaagctgctcaagtagtcgcaatagaggccctgcaagaagcctctgcttccgagagcttacttcagtgcctcatgtgcgtaatatcttaaccaagttttattcaggccggctttggatgtttgagggacaaaacataaatgttttttgtatctgaatgttattgttactgccttggtggtttctgaactttgttctgcttttcctttttgtagtatgtactccgatcttttgtcaacggcgaaggaagatgatccattgccagtcgttgagcagttcttgaagctccattccggtttgaaaaacgtccaagtaataacagagtcattgtccaaattactctctttgatgcctccccagataatgaagaaaacagatccgaggaagctataaaagcggcatcggaaaagcagaaatt

SEQ ID NO: 140003 - DNA, 784 bp, Arabidopsis thaliana landsberg
cctcaaccatcttcagtcaaacaaatggacctttctgttcagacatttgattcttactgcacacttgaatcctcttcgggcaccaagtctcatccttgtcttaacaacaaaaacaactcttcttcaaccacaagcttttcctctaatgaaagtcccatttctcaagccaacaacaacaacttatcaaggtttaacaatcattcccctgaagaaaacaataactctcccttgagcggttcttccgcgacaaacaccaacgagacagagcttagtctcatgcttaaagatttggagactgcaatgatggagcctgatgtagacaacagctttaacaatcaaggcgggtttggacagcagcatggagttgtttcttcagctatgtacagatctatggagatgatctctaggggagatttaaaaggagtgctctatgaatgcgcaaaagctgttgaaaactatgatttggaaatgactgattggttgatctctcagttacagcaaatggtttctgtttctggtgagcctgttcagcgcttaggagcttatatgcttgaaggtctcgttgctaggttagcttcttcgggtagctccatctataaagcattgagatgcaaagacccaacgggtcctgagcttcttacttatatgcatatcttgtatgaagcctgcccttatttcaaatttggttatgaatctgctaatggagctatagctgaagctgtgaagaacgaaagttttgtgcacattatcgatttccagatttctcaaggtggtcaatgggtga

SEQ ID NO: 140004 - DNA, 881 bp, Arabidopsis thaliana landsberg
ccgtccccaaatctctcagctaccttaaatcagaattctagggttcttccgattagggtaaaatcgaatccagatttcccaaaattctgatctttgattttataaaagatgtctcaaaacgggaagataatcccaaatctggaccaaaacagtacgaggctcctcaatctcacagttctccagcggatcgatccatacatcgaggaaatcctcatcacagccgctcatgtcactttctatgaattcaacattgagctcagccaatgggttagtctcaatcaatcttcgattacataatttgatgtttgcttccctacctaatgattgatctgtcttttgtcattcagagtcgtaaggacgttgaaggatctttgtttgttgtcaaaaggttactactttcgatctttaactatgtgtatcttatctttaatcgtcttctcaaatctgattggatccttttttttgtttctttcagaagtacacaacctcgatttcagtttattgtgatgaatcgtcgtaatacaggtcaggatttattcaaataaagttggtgtgtgtcatgtgtctagaaaaggtttagatttagtaatatattgcaagttcttatttaaggattcagtattagtaatcatcagtgtgttgctgtatttgtctggatagataatctggtggagaatctcctgggagattttgagtatgaagtacaaggtccatatttactttaccgtaatgcatctcaagaagtaaatggcatttggttctacaataaacgtgaatgcgaggaggtagcaactcttttaacaggtatgtattataagtcactgcatatcaggtagaaactgttggtttcaattgttggatcatgaataatatcaatatcg

SEQ ID NO: 140005 - DNA, 2552 bp, Arabidopsis thaliana landsberg
agaccaataacgagtcttttgagagattcgagatttcaattttgagatcaaatcttgaaatcaatacataggataaaggttatttggtgggtctgaagaacaacaaagctaccgagaaggtgtggtgttattactgcgatagatagtttgatgatgagaagattcttgtgcagcatcagaaagctaaacactttaagtgtcatgtctgtcataagaagctttctacagctagtggcatggtgattcatgttcttcaggttcataaagagaatgttacaaagtatgtgccttttcttttaccattttcccttatggctctttttgttgtgttaggttgatttggaatattagggttgttgcctctatgatctttgttcaagttctgattttttttttgctctagttgtgtgattgtcttttgatttctgttagattgccctaattgtgactgttgtgttgtgatttgaatcggttgattgtgcatgtttgctggaaaattagggaatttgaatcgttttttttttttatagctcttgaatgggtttggttaattttgtatatgtctggtcataaaccctaatttccgtttgaaatttttgtaaagaaacagtcttttgcttttgcctgttgaatttgtaatttgattccatgacactactaactttgaaattatctacaattttcacaccagggttcctaatgctaaagacggtcgagattcaactgatattgaaatatatggaatgcaaggaattccaccccatgtcttgactgctcattatggagaagaaggtatgcatttgagatagtgagagtactgtttagattatgagcaattgatttagagaagtaaggcgataaatttgtatgtctcttcatcaagtgttgtagatctattgcatctagtggtcatgaattcgttttgattttgcatgcggctttttaccttatcaaagttattatatattattgttatgtttgcttgtttcatatggtaccttttgaactgaagtcatgttttctgcagaggatgagcctccagccaaagttgcaaaagttgagattccttctgcccctcttggtggtgtagttcctagaccatatggaatggtatatccgcctcaacaagtacctggtgctgtacctgcacgaccaatgtatgtactaattatactatactctctctatggccgttacttgttgaattcttagatgttgtctctgtttttaaaaatccgatccatgctaaatgatggggaactttttttcttttagttctcttgatgcaaaaggttcttggtttctttagtttgtctctgtcctagaacttttctacttttatgctgctataagaccactataacacccgtagtaaacattttttgacatagatcgttatctaagatattgttgcacttaaccaactgtgacccataaggttcttagtttccctagcttgttctcgtgatttttcaggatagaactttgtcctagaaccattcttttgctcctcttcaagaccacaataacacctgtagtaaacagttttttgaaatagttcatgatcttagatattgcaatatgtatggctattgaccatgataaaatatttcgtgttagcaggtattatccgggtcctcctatgcgtcatcctgctcctgtatggcaaatgccacctcctcgtccgcaacaatggtatcctcaaaatccagctctttctgtacctccagctgcccatttagggtatcgaccacaaccactttttcctgttcaaaatatggggatgactccaactccaacctcagctcctgccatacaaccatcaccagtcactggagtaactcctcctggaattcctacatcatcacctgcaatgccagttcctcaacctctgttccctgttgtgaataacagcattccttctcaagctccaccattttctgctcctctgcctgttggtggggctcagcaaccatctcatgcagatgctttaggatcagcaaatgcttatccgcctaacaattctattccaggttcaatcccaagttcgtagaatcattgacttacatttggtttagctgtttcgtatcaaattgtaatatctttttcatgttttgttgccgtaggtgggactaatgctcattcttatgcctctggcccaaacactagcggtccttcaattggtccacctcctgtaattgcaaacaaagctcctagcaatcagcctaatgaggtctatcttgtatgggatgatgaagcgatgtctatggttagtttattcctaatttcttatgcatcatgttggaatggtaacaattggaaaagtttcgagtaatgaaccatttggttttccaatctgacgcaatgtgtctgtatctgcaggaggaaagaagaatgtccttaccaaaatacaaagtgcacgatgaaaccagccaggtaagttctgatttaccctttttaaagttaagaagagtttgcttttgcaagtctaacccattcggtaggctttatttatacatttctgttccagatcctattgtttctgtgctaag

SEQ ID NO: 140006 - DNA, 1601 bp, Arabidopsis thaliana landsberg
gaacagaagaatgtggaatctgagaggaagcatgatgaggttacagaaacatatgtatgcagatggaacaaaatggggatattatcctggtatagaaccgagtttgtcgttttcggattttatggattcgttttttagaaaggagaaatgttctatgagagtgtttatggtgtggaattcacctggttggatgtttagtgttagacatcaaagagggcttgagagcttactgtctcagcatcgagatgcttgtgttgtggttttctcagagactgttgagcttgatttcttcaggaacagctttgtgaaagataggttagtgagtaacacataatgctgtctcttaactcctccatttagtaatggtttggttgattcttttctctatgttgcagttataaagttgctgtggcaatgcccaaccttgatgagttgctgcaggatactcctactcatgtatttgcttctgtatggtttgattggagaaaaactaagttctatcctactcactacagtgaactcgttcggcttgccgccctttataagtaaatcttgatcactctctaatcaactaattgatcacttttgttacttgtgaaatgaagcatgattgcgtattgatgcagatatggcggggtttacctcgattctgatgtgatagttttgggttcattatcgtctttgagaaatactattggcatggaggatcaggtagccggtgaatcactgaacggtgctgttatgtcattcgaaaagaaaaggttcataaacacaaaccaatgctttgctacattcaaaacatcgattcccatcttagtaaccgacaatgtttctgtctgatgtttcaacttttaacctctctctgcagcccattcttacttgaatgcttgaacgagtactacttaacttacgatgataagtgtttgcgatgcaacggagcagatctcttgacccgagtagctaaacggtttttaaacgggaagaatcggcgtatgaatcaacaggagctgaacattcgaccgtcctctgttttcttcccaatcaactcacaacagatcacaaagtaaagctctctttatgactttgctcaaagacttcatctttttgcaaagcttttaactttgatcctgttttgattttggtgaagcagctattttgcataccctgcaatagaagatgagagatcgcagcaagacgaatcgttcaagaagatactcaatgagtccttaacgttccatttctggaacagcgtaacttcctcactgatccctgaacctgagagccttgtggctaagttccttgatcatagttgtatcagatgctccgatgtattataaaactatttttttgataaaatcatttatatataaagattacatttttgcaactctgtctcacactcaagaggacgagccattaaagctccaatgttatctcttcttcttcctaagtcgaatcgattccttcttagaacttttgagatgcccaattctctctgttctcttttcttcttcagattgatctcttccgatcatgaatccagtgatttgtctcttccttcttctccatcatcgtcaccttctcaatgtctcgttaaatcg

SEQ ID NO: 140007 - DNA, 715 bp, Arabidopsis thaliana landsberg
atggatggagaggttacttcttggattaggagagcaaatttctctcatactgtttgttatcgtatgattacgccgagtttagaatctatgccttttactgtaaaccaagagaagagttctggattgaaaagaatgactttgagttcaccatctgatttgaaatcacttgtaggaatttctcagagtacgcagcagctgactggtttgagttgtggtagtgttgttggtactgaagtgcagaggaatccagttactaataagaagaggtctgtttctccgttgcctcatatggctctttctgatgcttttatcgaagcaaagtctgatattaagaggttttctactccacatcctagaagagtggaaccagagaagggaatgaaggccaagtcgtcgtcccgcaaagattcttctgagaaaaaatcagttaatctacggtccctgtctcactcgggtcctattagggatcttagtacgcagaaagttaaagagaggggaaagagcaagatagataagaagtcttcaaagtctgttgactatagaggttctaaagtaagttctgcaggagtgcttgaagaatgcctcattgatgtgtctaagttgtcttatggggataggcctgctcacgggaaatatagccagatttatcatggtgaatatgaaggcaaagctgttgctctgaagattatcacagcgcctgaggataatgacgacc

SEQ ID NO: 140008 - DNA, 1167 bp, Arabidopsis thaliana landsberg
tgcgattcgtttttgtcttaatcttcgacgcagtttttcatcagggaacattttggattataaataaatgaacgttgctttggcttgtgaagtctgagccttctagactgttgtctcatcatgtgttcaattacgaatttagagatatttgactcttgttcccattcctatttatagaatcttgctgttatttacaggctttactacacaaaggttaaacttgggacaccaccaagagaatttaatgttcaaattgacactggaagtgatgttttgtgggttagctgcacttcctgcaatggctgccccaagactagcgaactccaagtatgtttcttgctaactttcctctatagcatattagcttttaaaacattttcctcatggtcttggttttagctttatgatttgtctaaatgatcacttgttttccctgtattttgtgttttttttttttggattttcagattcaactaagtttctttgatcctggagtgtcatcctcagcttcattagtttcatgttcagacaggagatgttactcaaatttccagacagaatcaggctgttctcccaacaatctctgttcctattcgtttaagtacggtgatggaagtggcacttctggttactacatctcagatttcatgtcctttgatactgttattaccagtaccttggctataaattcctctgctccctttgtttttgggtaagctaacagcaaagaattgtgtatttacgtggggtttatatatatgtacatatcccataggttttatcttgcatttggaatcccctttcgataatgatgatttctttagtatggtgcattgccttctctaaatttaactaatgactgcatcttcgggggggagaaaatgttggccaaatgagaaacaatatttctgcctatcaaatacactcattagttttatgtttaagtaattaacatctaccaggaagtacaatatgatctaacttccaaatcatcttttctgtactgtttcaactttcaaaatatgtgatgcttgtcttcaatattgctaacaggtgtagcaatttacaatctggagatttacagaggcctagaagagcagtagatggcatctttgggttaggacaagggagtttatcaataatttctcagcttgctgtgcaaggact

SEQ ID NO: 140009 - DNA, 1919 bp, Arabidopsis thaliana landsberg
tctgctgaggtattgattactcaattagtaatactaatttcaatataggttagcttcaaaatcttgatttgtgttttgatattttcagctcaaaatgtatgggaaaagaggagtctacatggacacaaaacttcaggagagaggagggaagatcttcgagaaagatggactcttgtataactgtgccttctcgatatgcgatttgggaaaaggacgtaatgagtatgatactgataaacccttaagatagtctcttttttttttgaggcaggaagggttttctgatctgttggtttttgtaggtattgtattatgcagctagtcacggtacccgatagtaacctgaacatgtacttcaagagagggaaagtaggagatgaccctaatgccgaagagaggctaaaggaatgggaggacgaagaagctgcgataaaagagtttgcaaagctttttgaggagataacagggaatgagttcgagccttgggaacgtgagaagaagattcaaaagaagcctcataagtttttcccaattgatatggtctaatcatcgtaccttgatcctcaagtcacttcttttgttgcttgctttgctatgtgattgttgagtattttaatgttttttttattctgcaggatgatggaatcgaagtaaggagtggggggcttggtctaaggcagcttggcgttgcttctgctcattgcaagcttgattcgtttgttgcaaacttcattaaagttctgtgtggtcaagagatttacaagtactattcttgtaaccttcttcatttctatcaagaatccttctctatgtgtgggtgttctgatcttgggcgtttctttgcaggtacgcgttgatggagcttggattggatccgcccgatctacctatgggaatgctaactgatatccacttgaaacgatgtaaggcttggtggagcaaactatttggttatcactttgctattatgattttgacctgtgagtggtggtctctgtatttttttttcaggcgaagaggtattactcgagtttgttgagaaggtcaaaacaacaaaagagacaggtcagaaagctgaagcaatgtgggcagacttcagctcacgatggttctctttgatgcacagcactaggccgatgcgattacacgatgtcaatgaacttgcagaccatgtaagtaaagttactatcatctatttgtttttatgtgttgtatgtcaatacactgaagttatatagtatttgattcatgtgacaggcggcctctgcttttgagacggtgagggacataaacacagcatctcgtttgataggggacatgcgaggagacacactcgatgatccgttgtctgataggtacaaaaaacttggctgcaagatatctgtggtagacaaagagtctgaagattacaagatggttgtgaagtatctcgagactacttatgagcctgtgaaagtctctgatgttgtaagtctccgtctcctggtatgcaatttataaacgttttagataatttgctattaatgatgtgttatcgtactgtttcaggagtacggtgtgtcagtgcagaatgtttttgcggttgagtcagatgcaattccttcattagatgatatcaagaagttaccaaataaggtccttttatggtgtggtaaggagtcaaaactctaaattactgttctttcccttgtcgagtgtggtcagattagttattggtgttttctttcttatagggtctcggagctcaaatctgttgagacatatctacaaagggttcttacctgctgtatgctctcttccggttcctggttatatggtaattaaaaaagccccctacttctttctttacactaggtgtttaaaacataataagtgtccttgtggtgtttctttgctttagtttgggagagcggtagtgt

SEQ ID NO: 140010 - DNA, 976 bp, Arabidopsis thaliana landsberg
gaaatggatcgttgtgtcggtgacaaagcacccaacagaggagctcaaaggtttggtcaagattaaaggatggcaagttctagcgatcggaaactctttaacacctaaagattggaatctcaaaggtgcgatttttctatctctagatgctcaagctgagcttaattaccggattttggatcatttgccttatgattccttcgtacgcaaaagtgtcggttacttgtttgcgatccagcatggtgcaaagaagatctttgatgcagatgatcgtggtgaagtgattgatggagatcttgggaaacattttgatgtagagttagttggagaagacgctaggcaagaaccaatcttacagtatagtcacgaaaacccgaatcgaactgtggtgaatccgtatatccatttcgggcaacgatcggtttggcctagaggtttgccattagagaatgtaggtgagatcaatcatgaagagtattacactgaggtttttggtggtaaacagtttattcagcaagggatttccaacggtttgccggatgttgattccgtgtattattccactaggaagacgactttcgaaccgtttgatatcagattcgatgagcattctcctaaagtggcgttgcctcaaggtatgatggtgcctgtgaattcgtttaacacattgtaccattcctctgcgttttgggggttaatgcttcctgtttcggttagttccatggcttcagatgtgattagaggttactggggacaaaggcttttatgggagcttggtggttatgtcgctgtatatccaccaactgttcaccggtatgattgagtcgaatcttaccctccctttgatgagaaagatctccatatcaatgtcggatcgttgatcaaatccttgcttgcttggagatcaaatcagcatctgctgttggagacgaatcttgatttgagcttcgtaacggcagaccaagggttttggact

SEQ ID NO: 140011 - DNA, 1013 bp, Arabidopsis thaliana landsberg
caggatggtaacacagctttggccaatggcaatgtgattcgcgagaagccgtaagatctatgctttccttttgctttttcttattagttctttgtccatagagatgttatgtttatagtcttggatctgacgaatgtttcttctgcaggaaaaagtccatgtttcccccgtttgagtctgcggaaactcgtactctcgctgagagtttgagtaggtaagtcattgtggctactgatatatttttgctcttggacatcatgttcttgttttttttgatgaactggtgtgtttcagggatatcatccgtgggaatccaaatatcaagtgggaaagcatcaaaggtttggagaacgctaaaaagttgctcaaagaagctgtggtgatgcctataaaataccccacgtatgttatctacgccattcttgccaatgttgatacctttcagtttattttagtacttgaatctcaacttctgatgtcaggtactttaatggtctactaactccatggaaaggaattcttctttttggtcctcctggtaccggaaaggtgcgatgattctatctcgaatgtgttttcacttttgaactcttactgtcttttgcatttcaattcatatgcacaccaaaccattaactgatttcttgagcctagctcaattagatcttgtatagtttatgttcttgatgcataacagtcttattcgtcttgtgcagactatgcttgcaaaggctgttgatacagagtgcaatgcaacatttttcaacatctcagcctcatctgttgttagcaaatggagaggtgtaagattttgtgccgttatttactcttaaccatgaaataagatgcagtctttaggagaaataggatgtgggcttttcaatgtttttcaggtgattctgagaagttgataagagttctgttcgatctagctaggcatcatgcaccatagatcaatatttctttgatgagacctacgcgatcataagccaacgtggtgtgtgaaggcccca

SEQ ID NO: 140012 - DNA, 1587 bp, Arabidopsis thaliana landsberg
aaaaagcgtttcctctccttctctttccatttctctctctctcctctctcgctcgctggcttcgaggagaaaaaagaaaaattggagaaataatttaactggttctcggagaatctagggttctttttagccacgccttgctgatctccgtcgtgaattcgattccgattctcacctggtacggttttttatatttactcttggttagaattcgcgtcagatctggaatttttgtcatactttttttttctttcgatatcgattcctatgatgacctcttctgtgtcatatttttgtgcattaggcttgatttgtgtgttgttgtttcgccgaattgcttgatctcgtttagttttggtggtcttagacgatttgtggcttagactgtccaatgtggaattgaacagagtttgatgtctagctttagaaatacagtaatctcctaattgttcaggatttggtttaggaattatgagattgtgctatctctggcacgatagaaagggaaaaaactaggtcactagctttgttgaagcggaattgttgagccattattgaatctgtgattattgaggttatctcttcttacggagacttatctggcaggtcttttgtggcctaaagctcataagtttatgctagtgcaagaagttatataggaatgacatattagatttacaatgatggaagtggggttctctcttattcagtggttgatcagttctggtgctgacagtccgtttatatttggatggcttgtaactggatctgttggccttctggctgttatctacacatttcttaaatggcagaaaaaaacttctttaaattgggttaaagctgctgctagagagaagaagaaggtatggaaaagactgagagttccactttctcatcatcaatggactgatgattatggttatgggcaacagccatccacttgctgtgtttgtctctactcccttgttccaggtcaaaatgtttctaataaagcatctctgagtattcccgtccaccgatgtgctgtatgcggtgtagcagctcacttttattgctcaagctctgcagcaaaagactgcaaatgtgttgcacaggctgggtctgaccatgtccgacatcactggtctgagcgatgggttaacatggatgataatgctgacatgactgccttttgcttctactgtgatgaaccttgtggtattcctttcattgaagcttctcctatgtggcactgtctttggtgccagcgcctcatacatgttaagtgtcacatgattatgtccaaggaatctggtgatgcttgtgatcttggctctctcagaagagtaatcctctctccagtacatgtaaaactcaatgaagcaaatggtgtcgatggagtactgactactattaaaaacgagttagcatctatacgagggcatgtgagaagaaagcgccacaggggaaaaaatgggaatggccaatctttaaatggtaagctactggaggattcagtcagcgatccagtaaaaaccgtagttaatgggcttgtagtgaagaaactacgcagagataggagcatagattgcttaaagcaagtctcgg

SEQ ID NO: 140013 - DNA, 987 bp, Arabidopsis thaliana landsberg
tctaataatgagaaggaggtaaagggtcaaggagaaagtattggagattcggccatatagaagaatttggaatctaaagaagatgtcaattctgaggtcgaggcggctaaaaatgatggaacttccatgacagagaatttgggagaagctcaaggaaacaatggagtttcaacaattgataatgataaggaagtttagggtcaaggagaaagtatcgaagattcggatatagagaagaatttggaatccaaagaagatgttaagtcggaggtagaggcggctaaaaatgctggaagttccatgacagggaagttggaagaagctcaaagaaacaatggagtttcaacaaatgaaacaatgaattcacagaacaaaggaagtggagagtctacgaatgataaaatggtaaatgctacacaaaatgatgaagatcacaagaaggaaaataaggaagagactcacgaaaacaatggagaatcagtgaagggtgaaaacttggagaacaaggcaggtaatgaagaatcaatgaagggtgaaaacttggagaacaaggtaggtaatgaagaattaaagggcaatgcatcagtagaggccaagccaaataatgaaagttctaaggaagaaaagcgagaagagagtcaaagaagtaatgaagtttatatgaacaaagaaacaacaaaaggtgaaaatgtaaatattcaaggagagagcatcggagactcgactaaagataatagtttggagaataaagaagatgttaagccaaaggtagatgctaatgaaagtgatggaaattccacgaaggagaggcatcaagaggctcaagtaaataatggagtttcaacagaagataagaacttggataacataggagctgatgaacagaaaaaaaatgataaatcggtagaggttacaacaaacgatggagaccatacgaaagaaaagagggaagaaactcaaggaaacaatggagaatcagtaagagta

SEQ ID NO: 140014 - DNA, 734 bp, Arabidopsis thaliana landsberg
aagctctcttctgtacactttttaggacattttcttctttttgtctatggaaggtttcagctatggtgacaggagaattttacacaaagaaagacctctttccaggatttggacgaccttttgtatattatgcaaacatactacagaagtttgtaaactttacatacctaaaacatatctccattttattttcgtagagaaagatgtagccacttatcttcagattcttattcgcagggtagggcggaatgtagaagcaaaagatgcggctagggtagcattgagatcaccgtggtggacattaggatgtccgtatgaggtatgacaaaaggttttttgttcttctttttcggttgtactgagttttaaagcatagagacatattcatggtcatggtatcttgaaaacatgcaggaggttgctagtatagcacaatgggaagacgagcagatcgaattcataagggaaaaagtgagtgatgaaggtcgttttgaagatttgcataaaggcaaagctccaatccaagttgcgttggatgttgcggcttttctcttggatttggcttctatcgaaggaacttggtccgaatctttaaaccatattgctaaatgttatgaggaagctggattacaccatatctctaatttcgttttgtacacagattgaatccatattaatgtatgttcttcacaacactttccatgtatgaatcagagaactcactaccctttttc

SEQ ID NO: 140015 - DNA, 1099 bp, Arabidopsis thaliana landsberg
tcgaaattccctttagggaagcaggtttaaagagggcccacaaaataggcttttaataaagactcgaagcaattggagttggggggtttttggtaaagtgtacaaggaagagcttcacgatggtacaaaagtagctgttaaaagagcgaatcctaagtctcagcaaggtcttgcagagttcaggacagaaatcgaaatgttgtcacaattccgtcatcgccatttggtttctttgatcggatactgcgacgagaataacgagatgattctggtttacgaatatatggagaatggaacattgaagagtcacctttacggttcaggtcttcttagcttgagttggaagcaacgtcttgagatatgcattggatcagcaagaggattgcattatctccacaccggtgacgcgaaacccgtgattcacagagacgtgaaatccgccaacatattgcttgacgagaatctcatggctaaagttgcagactttggactgtctaagaccggaccggagatcgatcagactcatgtgagtaccgcggtcaaaggaagtttcggatatcttgatccagaatacttcagaagacaacagctcacagagaaatcagatgtttactcttttggagtggttatgttcgaggttctctgcgcgagacctgttatagacccgacacttactagagaaatggtgaatctagcggaatgggcaatgaaatggcagaagaaaggacagcttgaacacatcatcgacccgtcactgcggggtaagatcagacctgactcgcttagaaagttcggtgaaacaggggagaaatgtttagctgactatggagtcgatagaccatcaatgggagatgtgttgtggaatcttgaatacgctttgcagctacaagaagctgtcgttgatggtgatccagaagacagcacaaacatgatcggtgagttacctctacggttcaatgattataaccatggagacacgagtgttaacttttctgtagctaaagagggacggtttgatgaagaagaatcgagtgttgatgatagttcaggtgtttccatgagtaaagttttctcgcagctgatcaaatctgagggacgt

SEQ ID NO: 140016 - DNA, 417 bp, Arabidopsis thaliana landsberg
cccatgttaaccgcagccggagacgatgaactggacccggtcgtgggaccagaatcggcaacggaagcagccactccaagagtgctgactataatctcccatgtgatggagaagctcgtggcacgaaacgagtggttagctaagcaaactaagggatttgggaagagcttggaggcgtttcacggcgtgagagcgccgagcataagtatagctaaataccttgagaggatatataagtacacaaaatgtagcccggcatgtttcgttgttgggtatgtgtacatagaccggttggctcataagcatcctggttctttggttgtctccttgaatgttcatagactcctcgtcacttgtgtcatgattgctgccaagatactagatgacgtgtaagtaagcctttcttgaatttctata

SEQ ID NO: 140017 - DNA, 719 bp, Arabidopsis thaliana landsberg; identical to SEQ ID NO: 12076

SEQ ID NO: 140018 - DNA, 1526 bp, Arabidopsis thaliana landsberg
  unsure (1)..(1526): unsure at all n locations
atgaaattatatcatgtgaaaacgtttgacccgcaacagtatgatgagaaaaacatatgacgaagagtattttatgctttaaacgtcctcatggctatggatgtaatatccaaggataaaaaagaaattcaatggagaggtcttcctcggacaagcttaagcgacattgaagaattaaaggtttcaaccacatattctatgtgcagatgttccatagcttatttagagaattttcctgaatttgaattattttgttttgcagaacgaacgactctcacttaggaacagaattgagaagaaaactgcatattcccaagaactggaagaacaagtaatgaacatcatcgatactctcggcttatctgcttcctgttacttttatcatagattcttacatggtccttctatcatctctgtgtatgtctgaaagtatgtaggccttcagaatctgatacagagaaatgagcacttatatagctcaggaaatgctcccagtggcggtgttgctcttccttttatccttgtccaggtaaacttcaccaacagnnnnnnnnnnnnnnnnnnnnnnnnnnnnnnnnncctcagaaaatgaaaaaatcacctgattgttgttgtttctctgcaccagactggtcctcacgcaacagtagaagtggagatatcagaagatatgcagctcgtgcattttgatttcaacaggtaaaatccaaacaccagatttgatctcttttcagctaatatatctacggaaccgattactgacactgtgacaactgttttcactatttgcagcactccatttgagctccacgacgacaattttgtcctcaagactatgaagttttgtgatcaaccgccgcaacaaccaaacggtcagaacaacagccagctggtttgtcacaatttcacgccagaaaaccctaacaaaggccccagcacaggtccaacaccgcagctggatatgtacgagactcatcttcaatcgcaacaacatcagcagcattctcagctacaaatcattcctatgcctgagactaacaacgttacttccagcgctgatactgctccagtgaaatccccgtctcttccagggataatgaactccagcatgaagccggagaattgaaacacgtatgaaggccccttgtacaatttctgtaaaactgtaaagtagctcttgaaaaactttacctggttttttgacgaatagtctgtttagcggtaaatgtaccggtggtttatcgaatctaggatccttgtcgggtttagcgattttaagaatctttgccataggaaaaaaaaaacactttgctctgtggtgtagaaatgaattttattaaccatttggattagtcgatgttcggttctgttattcggaaacccggttatggacttcaattttggaaattacgaaactgaactaatcgatttccggttttgttgaaccgaaatccggttaaaatattaccatatcaatcatatcattagaaatgtagttctgtttcatgtaattcggtcgaatgtta

SEQ ID NO: 140019 - DNA, 495 bp, Arabidopsis thaliana landsberg
atggttccgccattgctgaagctcgacttcacccagggtccaagagctggcgattctctagggtttaaacccggatccactatccgaattggtcgaatcgtccgtggtaatgaaatcgccatcaaagacgccggaatctccaccaagcacctccggatcgtttccgattccgagaactggataatccacgatcttggttcttccaacggcaccatattgaactctgacactatcgactcagatacgcccgtcaatcttagccatggagacgaaattaagcttggtgagtacacttccattttggtgaactttgggagtgatgttgttcaggcgccgcaggagcataagcttccgcccaggccaaggaggaacaacaagcggcttgctgcttcggatccggatccggatcctattgagtcggttcaggagaaaccaaagcgcacgcgtggatcgtcgaagcaagaggaaaatgaactgcccaagagtactagggct

SEQ ID NO: 140020 - DNA, 1141 bp, Arabidopsis thaliana landsberg; identical to SEQ ID NO: 62258

SEQ ID NO: 140021 - DNA, 804 bp, Arabidopsis thaliana landsberg
atgttgaagttgtttttgctgatatttaatctgacgtttctatgttacatatatatgtagagatgggaaacttcttcagctgggcacagtggcaagaacttgagctacaagcactgatctatagatacatgttggctggtgcttctgttcctcaagagcttctcttacctattaagaaaagtctcatccatcaatctcctatgcatttccttcaccatcctcttcaacatagttttcctcatcaccaaccttcttgtcagtctctctctcctctctattgtttatgcttctcttatccttgaaatagtctttctttgtaaaaaagattccctttgttttggtgttggagttatatttccaagatctaaaataagtataaggctgctctgcaaccttgcaaggagttaaaaccctatgtgtatgataagcctatttctagaagatctattagcaacatagatagaatcagacaagtacatttcgtaaccaatgtcttgagtgagatttatgtttgttgttactaatgaacaacacacacttaataaaaaacagggtattggggaagaggagcaatggatcctgagccagggaggtgtaagagaactgacggcaagaaatggagatgttcaagggatgttgtagcgggccacaagtattgtgaccgccacattcaccgtggaagaaaccgttcaagaaagcctgtggaaaccgccacaaccaccatcacaacgacagccacaacaaccgcatcttcttttgtcttaggtgaggagcttggtcatggaccatacaacaaccacttct

SEQ ID NO: 140022 - DNA, 844 bp, Arabidopsis thaliana landsberg
actcagtgggatcactcgatttaaccgggcccacccccggagtccctgtctccggaggtggtggtgccggtaattctagaatccacaagagaaatgtaagtatgatttttatatttgttattgtttatgaaagtcatgaagaatcaaccatttgaatgtgtaaattggcagatccatggaatattgaacgcagtgagttggggacttctatttcccattggagcaatgatagctaggtatatgagaatctttgaatcagcagatcctgcttggttttacctccacgtgtcatgccaattctctgcttatgtcatcggtgttgccggatgggccaccggactcaagcttggttcagaatctaaaggtattcagtacaacactcaccggaacatcggcatcagtctcttctctatagccactcttcaggtaaattaaaccattgctaatactcattaggaccaaagagtgtttatttgttatattagtggatattgcaagttggccatttaaaaagatatgttttgttctgttattgaaacgatgctttgtgtctttttgcgcgtgtttaaagatgtttgcgatgctgttgcggccaaggaaggaccacaagtttagattcgtttggaatatttaccaccacggagttggatactctatcctcatccttggaatcatcaatgttttcaaaggtcttagcatcttgaatccaaagcatacttacaagacggcttatatcgctgtgattgggaccttaggaggcatcacgttactcttggaagttgttacttgggtcattgtcctcaagagaaaatctgccaagtctacaaagcctctcaaggcctaa

SEQ ID NO: 140023 - DNA, 2665 bp, Arabidopsis thaliana landsberg
agttggactgtgctcacttctttgttcttgcctttatcaaacatttcaagatagcaataatcaagagagttgaggaatccaagtcttgtccatttgttcttgaaggcaaacaaagtctcggctcttgcttaagaatccgtgtcaatgctcaagacaatgctccagatctttccaactgttctattcagtggtatcgtgcagcatgtgaaactagtcgcagggaagctatatctggtaaatggacctatctgtttgtttgcttcatcatttggtttttagtaaatgaattttagcttgagcagttcatattcttgctcttaggtgccatccaatcgatgtatgctccagaaccatttgatgttgggaggatcttacaggcagacattctttcaaatggtcaaaagttcacagttacaaccgatgatccagttgatcctggttggtattacggaaactttagacgatacaaagatttttaagtggactataagtgaatgtttggcttactgaaatgcagattctggcttgccatcccgcgtagagtcgctgatgcgaaagtctaacagtgaattcagtgtatgttacaacgttcttcaagattttcagaacttattcttgttttcttggaaatgtttgcattgagttcatgttctcaaactcttcttcaggtggttatatcgcagatgaatggacaagactatgcatctcgatcgcacgtttttaccgttggaaagacgaggataaagctgtctcgaggatggatcacaaaggcgagagaattatattcgacatccatgcaggtatctagagactctttcttcattctatttaacagaaacatctctttgacattcaatgaaaaacatttattacaagttttttggtatgataattattcagctctgtggagttagaggcaatattaaggctcccaccaaggcagtgttctggcaaccaagaaagagtctaactttcatactaacctttgagtcagaacacgaacgtaacgcagccatagcccttgctcgaaaatacgctttcgattgcagtgtaagcaaaagtagtcaaaatgtcgcctttctcagactctgcaaatcactatggttttgcactttatacagttttaagactgcaggtttacataacaggcttgcttaaatctgcaggttacactgcttggtccagatgattaagtgaagaagacaatgtcattaacgaaccacctgatattttttcccctgacgccggattttcttgttctgtgtgtttgtgtgcggctactttttgtttatttttcgcactggttcaaagaaggaaggtgcaagtttgggttctctactgatgatcatacaatgttgctgcgtagagttttattataggcagcagacttcttttttttcttttcttttgcttgatcatttgtttggtttggtttgtttgattgttttattttttgattcaacattgttaatcagcttatgagtgtgagatcaaaacccaaagcggtttctggtttgtatctgttaccattgtttcatcattttacctgcttctgagaatttccttcttttattatcagtaaatgagtaatctgtatataaaatagattgtacatgtgtttgaataattatgaacaagaattctctaactattactagatacgatgatcaaacaaagggagatcaatgaggttgagtggtggcatgatccagatattctcatacggattctgtcttttccacttgaagcaaacctcactctcttcatcaaccttataatatatgcaagtcctcttgaatccatggaacacagagagacacaaacagttccatattccactctgcttctgctgctcggctctggattcagaagacaaagcgcttgcgtagatcgtcaagcctcccagtgttttcctctcagcccattcaaagctagtaaggtcaagtttaagcactgttgggttcatgtgtctgtacatataaatgagaaagatctctccttggtgttctgtcataaagcatccgttgcttccaggacgtttaggaggtctcccaggaagaacattccaataattcaaagatgggtcaaagagagctaagcatccggtgtttgtgaggcagtagaagacaccattggagaagacaatctgctcgaaagtgttgaagtttcgctgtaaccgattcttgaacacagatgttttccactctttagcattagcaaaatatgtcttgatggtgatgtaattccaagtgacagaagtgacagtgaacaagagacaactagttgatgtaggagcacaagagaaagccattctttgatcatatgccatccaaagcgtaggcatgggtacgcaatcacgagtaaagggattgaagaaaaggagttgataagaattgggattgtacatgagtaaccaaccatctttggagtaacaaactcgaaaaccggataactcagggaagtgaagattgtagtttttctgcattgatgggtcataaagttcataggaatcgtctgttttggagaagtaaataagccaaggagatgtatgtatcactcgaagagaaacacaagcttcgtgccatgttttgcagacagcagaagcacggatgttatctttcaacgggagacgagaaattaccagttgtaagagatcacaaggaag

SEQ ID NO: 140024 - DNA, 1713 bp, Arabidopsis thaliana landsberg
  unsure (1)..(1713): unsure at all n locations
agatgtctgagcttataagcctaagaggcaactgctgnanttatccagcagaaagatgccgagatttttcgagaagaattccactatcaagagctacttagataaaattgtgagtgtttcactatttttgttactaataatgtgttacaggcatttttcaaatgtgtaaccctaactcttgttccatttctcaggttaagctgacggatactagttcggagaaggaagcccgactagctgaagccaccgcagaattggcccgttctcaagctatgtgtagtcggttatctcaggtcagattattgattgcattttaagatttatgtttgattgctcatgattttgattgattttattgatacctgaatttgtatgatgtcatgtaataaaatatgttgatccttttacattgtttatgacatatggtttttgatggaaacaggagaaagaactcactgaaaggcatgccaaatggctagatgaggagttgacagccaaagtcgacannnnnnnnnnnnnnnnnnnnnnnnnnnnnnnnnttgaatctgaaatgtcagcaaagcttgtagatgtaaggccaatatcatatttctattctaatacttgtctctctgttttcttttctccttattccttcttctatcaggttgagaaaaattatattgagtgctctagttcgttaaattggcataaggaaagattgagggagctcgaaacgaaaatcggttcattacaagaggtatgtatggcttgtaacacttatctcctcatatcttatcgtgttatgctctatgactctgagatttacttgtactcttcatatccaaaggacctcagctcttgcaaagatgcagcaacgaccactgaagagcaatacactgctgaacttttcactgtgagtttctcaaatcgtaatggtttcaaacattgaacttctttacatctttttagctgactggagagctaagtatgtcatttgaggcatttcacagtttcgaaatagatcttcataggtgttgtttttcgaatctaacccacaagctgtcatataggcgaacaagcttgttgatctgtacaaggaaagttccgaggaatggtctagaaaggctggtgaacttgagggtgttattaaggccttagaggtaagtttgccatcacaaatcagaagatagtgttctaacttttgtgttaccatgttaacctcttgagtttcaaatcatgactgcaggcacgcttgagccaagtcgagagtagttacaaggagagacttgataaagaagtgtctacaaaacagctgttagagaaggtactgagacccttaagtttatcgctttatcgattattattgcttagctctggtaacttgttttcagcatccttttcaacatatactgaaggtgttgcgtgtcgacccaattgctagtatgataccttgatattctttgattgttttctttaagttatgattttatcggctttcagatattttcagatactagttttttttttatattttttttcaggtgagaattctttctttgatttttgtggaaagtggtttcagtgcattttaccttctgggatacgcattttgaaatttattttctattgagatagttagtttttgcaacatcaggagaacggagaccttaaacaaaaacttgagaagtgtgaagcagaaattgagaaaactaggaaaacagatgagctaaa

SEQ ID NO: 140025 - DNA, 1821 bp, Arabidopsis thaliana landsberg
  unsure (1)..(1821): unsure at all n locations
agaaagtatccaacttacaacagatgccaaaatcaaagcaatggcaaaatgtgatccaccaaagccttcttgtaaaccaatagctacagcgagagctgtaacggtcgctgaatgcgaagaaggcattcctccagacccaataagctgtttgagatcccatctccgttccctatacctacagaatctaggaaaccatgtaaagatcctttctcatctaacgtatactataatttcctatgtaccgtttcgaaccaaagattgaggaaccaggcacatatagatttaatcggagtctgatccaaacagagatataaagagagaacgtaccaggaggtgaagagtttgatgaattgagcgatagtgaaagaggtgacggcggaaatgagaggataattcgtgaaaatggagaaataatgagtggaagacgaagacgtagccgtggctgtagaatcctccatggccgatgatggatctagtcaggctttaaatcgtgctagcgaaagaagaagaagaaaatgacaccgaaacgacaatgatccataaaacgtcgactaattccctttcaaattccaatggcgtctacgtctaccgttcaatcctctttgtctttctttttttttctttgaccaatttttttttgggcgaacgacctgtgtccccatgggaagtttcatatacgctcacaactccacagattttggacctcgactctagtccacataaaactaaagttaaaaaccgcgttacccctaaaagtaaagtcaaagacctcgatccccatatttttgaatttcgtggtttattgttggtttactgtacccgaaacaacattaaccatataagaacgaaactaaaccggatttacacataaaccaacccgttttattacccaaacaacccgactatttcagaaaacccccaattcgaaaaatcccccaattcgatagaaccctaaaattaaaaaatccccagtttttgagaattcgatagatgcgaatgaatttgagacgaatgctttaatcgttcatcaggaggctaccggaactggtccgcaagagtttcgagaagaagatattccaatggaggacgacgttcctgacgacgaagatccgagggagcgagnnnnnnnnnnnnnnnnnnnnnnnnnnnatgagttcagagatgagccttcgattcttcacgacgagtatccggacagtgacagtgatgaagatgaggatgttgttcgggagagaaagcgtgagaacagtagacgtggaggagggaatctctactatcaccagacattcttcaacgagatagcctttaaggaagctgtactcgaccatgccttgaagacaggatgcaacattgcacaatacaggtatgacaaagataaggttgcttttaagtgtgatggtgatggttgtgtatggcggatctattgtgcagtgactaaaaaatgttctaagtggagagtgaatgtgttcaaggatgtgcatacatgtattccgaatggtgattgtgaaatgttgaaggttcctgtgatttctaggttatttttagataacattagagaagagcctcaatatttcatgcctatgaagattgaggaaaccattaaaaaaagatggaagatcactgtatctaggcctcaatgtcaagctgcaaggagaaaagcattgagatggatagagagagaatatgatgagcagtttgctaggcttcaagactatgctgcagagataagagaatcaaacaaagattccctgttccattcagactttgagaaatatgcaggagaaaaggtattcaccgttctatgttgttttgatcgattag

SEQ ID NO: 140026 - DNA, 1185 bp, Arabidopsis thaliana landsberg
ttagatgcagaggaactgcgtcaggtctttagtaggtctgcttcggcgccaggcattgtctctgaagtggtttgcagaaccaaaagaaacaacaatgctgctgcagatagatcactgacacggagtaataccccttggaaatttccagaagagaggcattggcgtcaccccgggatcatcccagcgaccgtaagagaaacaggaagcagttcaagtatcgaaaccgaggtgaagaaactcattgatgatctcaagagttcttcattggatacacagagagaggccacagctagaatcaggatactagcaagaaacagtacagacaatcgcattgtcattgcgcggtgcgaagcaatcccttcgttagtcagtcttctttactcaacggatgagagaatccaagcagacgcagtgacttgcttactaaacttatccatcaacgacaacaacaagtccctcatcgcggaaagtggagccatcgtaccgcttattcacgttctcaaaacaggatacttagaagaagctaaagcaaactcagcagcaactctattcagcttgtcggtgatcgaagagtacaagacagagataggagaagcaggagctatagagccacttgttgacctcttaggaagtggaagtctcagtgggaagaaagatgcagccacggctttattcaacctctcaatacaccatgagaacaaaacgaaagtaatcgaagctggagcagtgagatacttagttgaactgatggatcctgcttttgggatggtggagaaagctgtggtggtgctagcgaatcttgcaacggttagagaaggaaagattgcgataggcgaagaaggaggaataccggtattggtggaagttgtggagttaggttcagcaagaggcaaagagaatgcaactgcagcactattgcagctttgtacgcatagcccgaaattctgcaacaatgtcataagagaaggagtgattccacctcttgtggcacttactaaatcaggaacagctagaggcaaagagaaggttctttttttgtttcctcttctttgtttgctaaatgtctcatgactcttatagtaatataactgttgtatgattttgtttcaggcacagaatcttctgaagtacttttttctcacagacaaagcaatcagaggagagggggggcttgctttaccttaa

SEQ ID NO: 140027 - DNA, 1255 bp, Arabidopsis thaliana landsberg
tacaagactcgtagcttgtgtggaaaggtacatcacctaacttttaacctctactatttttgaactcgtttcttgatgcttggtgaattatcattttgctgtatcagtattttatccacataaatatgtacacaaattcattttttgaaaaacagttttgtgggattttcttgacaaacaaataaatgatttgttaaaatgaaatatatgtagatggagtcctgatggcattgacacacttgaagatatatcgcgaagtgtctttaaacttatgttggatgttttcgacgatatcggaaaaggagtgaggtctgaaggaagctcctaccacttgaaggagatgttagaagaggtgattaacataaaccagttttcttacaattcatataaaatacttctgtattgatataacaaattaagtagatatagcttgtaaggttatatatcttttatcatggaaagctacttatattttcttataatatacttatatgtttttgagtaaacagctcaagatacttgtgagagcaaaccttgatcttgtcaaatgggcacgaggaaatcagctgcctagcttcgaagaacatgtagaggttggtgggatagcacttaccacatatgcaacgttaatgtactcttttgttggaatgggagaggctgtcgggaaggaagcttatgagtgggtaagatccagaccaagactaatcaaatctctagctgcaaagggtcgtctgatggacgatataactgatttcgaggtaaaaataattaatcttttctttgatttgcttttatttgttttctaacttaggcgtttggtatatgttagagcgacatgagtaatgggtttgctgcaaatgcgatcaactattatatgaagcaattcgtagttaccaaagaagaagctattctagagtgtcaaaaaatggtcgtagacatcaataagatagtaaatgaggagctactaaaaacaaccaccgtgccacgtcgagttctcaagcaagccctcaattttggacgcttattggaagtcctctacaccaagtccgatgatatatacaattgtagtgaaggaaaattgaaggagtatatagtcaccttactcatagatcccatacatctttgaagagtttggatttgcatggttaatgaatcaataagaagatatgtttgtgttgcttacagtaaatgcaacgatattttaacatttcagtaacagagaatgtcaaatacatatgtaagacaagacatcaat

SEQ ID NO: 140028 - DNA, 586 bp, Arabidopsis thaliana landsberg
  unsure (1)..(586): unsure at all n locations
cttaatttatnaagttctggtcctatatgatcttcaagtgtgtcaagattgtaatggtttatatacacatttgtgcagctcgtttctgtcaaggtaatacgtaacaagatcacgggacagccagaggggtatggttttatagagtttatatctcatgcagcagcagagagaactctgcagacgtacaatgggacacagatgcctggaactgagttaacttttcggttaaattgggcttcttttggttcaggacagaaagttgatgctggacctgatcattctatctttgttggagatttagcacctgatgttacagattatcttcttcaagagacattccgtgttcattattcttctgttagaggtgccaaggttgttactgatccaagtactggacgatcaaagggttatggatttgttaaatttgcagaggaaagtgaaaggaatcgggctatggctgaaatgaatggtttgtattgctcaacaaggcctatgcgtattagcgcagcaacacctaaaaaaaacgtcggtgtgcagcaacaatatgtcaccaaaggtatgagaacaaaacacgatacgtgatttt

SEQ ID NO: 140029 - DNA, 2428 bp, Arabidopsis thaliana landsberg; identical to SEQ ID NO: 66479
  unsure (1)..(2428): unsure at all n locations

SEQ ID NO: 140030 - DNA, 500 bp, Arabidopsis thaliana landsberg
gttcggccgtgtgagcatgaaaatcaaactgatccccggtgattctgccgggactgtcactgccttctacgtaactatatatacatatatttcaagtttatgtcactgcatttcaaaagttttggttataatatgaaactaatttgcgcagatgaattcagataccgattcggtacgagacgagcttgattttgagttcttaggaaatcgaagtggacaaccttacacagtgcaaaccaatgtgtttgctcatggtaaaggcgatagagagcaaagagttaacctttggttcgacccttctcgagatttccacgaatatgccatctcatggaaccatctccgtattgtgtaagtcacattattatgtctaaaccccaattaaggtttgcatatattgtaaaacagcgttttttttaatctgtttgaataaatcttaactattcatttccagaacaaatacaacaaaagctcaccacttatatgaatgtcggtacatataa

SEQ ID NO: 140031 - DNA, 2221 bp, Arabidopsis thaliana landsberg
aacggcttatcggggatttctggtatcaatttgccttattaagttgctttacttatggtttagtgatgctagttcattggttttaaaaaaaagagtggattgataaggaagatgatatatttattaggctaggagggctttacgagcgttgaagggattggttagacttcaagcccttgttagaggacatgctgtgagaaaacaagctgctgtaacgcttcgatgcatgcaagcgttggtaagagttcaggctcgtgtacgcgcaagacgtgttcgtctcgccttggaattggaaagtgagacgagtcagcagacacttcaacaacagttagcagatgaagcccgagttcgagaaatagaggtgcctgtcacttgtctaagttgtttacaaactttgtatttgtttatcttctggttggcctttaataacagtcatgttgactatgtgttatcatctttcaggaaggttggtgcgatagcattggatctgttgaacaaattcaagccaagctgctaaagaggcaggaagctgcagctaagcgtgagagagcgatggcatatgctttgactcaccaggttactactctgcctaagaagtaattgcttgtatttgttcaatttgttcgaaaaataacatccctgaatagtgaatctgataaatcatgagttctctttattaggaccaatttttaactaacgcactatgacttgcaaaactgaagctctctacttaaagtgttgtttttgtctggttccttttcttaactctcttctgcagcagtctattttatttctctttaagtgtatctttttacgatggccacctagcctaatcctagccccattaatagtgactggttctgttgttttatatgcaggatataatgatacttgctctcacatagagaattgctctcttgtagtggcaggcaggaactcggctgttattatgctcacagtggctttcaacctgacaaaaacaattggggatggaactggttggaaagatggatggctttgcgtttcatgggagaaccggtttcttgacagtaacctcagggatgatgcaaaattaggtgaaaacggcatggagcagtctgagaatgtgcctaaaacgcagatcaaaagtgtgagtaagatgccaaacacttcaaatcttgtatccggtgtttcaagtcagatgactggcccgtgtcagtcggatggtgattcgtcttctcctggaatatcttcaagcattccagtggtatccaaggctaagtcaaagccagctaaagacgatcttgctgtagaagttaactcaagacctggtgctggtccaagatcacacagcaatccgaaagaaagatcaagagaaccaaatcgatcttcaaaagaacgattatctctgccaaacagcggtacaatttctttctctctttctttctctctttctctatgcctaggaaatatgtttccatttccagttttataattgagacgatagtcttatcaacatgctggtagcgataagagaatcagtttgcagtagtcatatagatacaaaccacaatgtagatacttggatggctaagttttagtataagtatgtataacccacaagacccaaatcttatctaatcttccaagttccagtgtagagattgaccaagccttaaatcaatctgttcttccctattgtcctttaagtctatttcgtgaatattcttgagcaggaaaatccttaggatctcaggcaactaaagccaaccgagcaggaaaactcacgccagcatctcaaaaagtagtggaggaaaaatctgcccaaaaccagagaaggcgcaactccgacccaataaaacagaggcttgcatagccctgtttaagtgtgtaacttgagaattgtcagcccaagtcactctcccatcgttctgtacatacacagcttttgatgagaggaaagagataagatcatgggagaaacagaacacaaagtggttttcagataaaagagttgcttggttcatcgatcaatcaagaagagaatgaagccatattggcgtctctctctgccttcattgttgttgttatttatgttagccatcctttttttgtccatgactctctggagttggattcttatatgtatcggtaagtagtgttattatttaagttatatgaactctctcgaggtgtacatttgtcaaaccttttcagtttttgctgggaaaatggaccatgt

SEQ ID NO: 140032 - DNA, 1181 bp, Arabidopsis thaliana landsberg
atgggaagaaaaaccaaaaagatagagagtaagatgcacgcgctaaagatcgaacggttaatagaatcaggttagtgaagagagatattaaaagtttgttgtcgtgtggcaaaaactataatttccttctcacaaacaaaaaaaataaaatcaaacacaaaatcccgtagcatcgtaacagtaattcgctattatctcctcaccctccgctttcgcttcccttctctgcccgtttcaattccttctaagacatcacggtctctctctataaaaacagtacctacctcttcttcttcttcttcattcgctgacttcgtttacactgaaaacaaatacctatgtcaccgccgtcggcaaccgccggtgacatcaaccaccgtgaagtagacccgacgatctggcgcgcttgtgctggagcctccgtccagatccctgtccttcactctagggtttactactttccacaaggtcacgttgagcactgttgccctctcctctctactcttccttcctccacctcgccggttccatgtatcatcacttcaatccagttgctcgccgatccggtcaccgacgaggtctttgctcaccttattcttcaaccgatgacgcagcagcagtttactccgactaattattcacgattcggcagattcgatggcgatgttgatgataacaacaaggtgactaccttcgccaaaattctcacgccttctgatgctaacaatggaggtggcttctccgttcctcgtttctgtgctgattccgtcttccctctgcttaattttcaaatcgatccaccggttcagaagctctacgtcactgatatccatggagctgtttgggatttcaggcatatctatcgcggtacaccgaggcgtcacttgctaacaacgggatggagtaagttcgtcaatagcaagaagctcatcgctggagattcggtggtgtttatgagaaaatctgcagatgagatgttcatcggcgttaggagaactccgatctcaagcagcgacggaggaagtagctattacggaggagatgagtataacggttactacagtcagagtagcgttgccaaggaagatgatgggagtccgaagaagacgtttaggagatctgggaataataagttgactgctgaggctgtgacggatgcgatcaatagagcgtctcaggga

SEQ ID NO: 140033 - DNA, 598 bp, Arabidopsis thaliana landsberg
aattgtcaaccaacagagagaaagagagctttgactttagatccaatcatggagacaactacaactcctctgctccccggtgatcgcagcagatgcgggtggctccgtcgccgtctccgcctcaaaaaccctctttcttctgaactctccggcgctgtcggtgatctcggcaccttcatccccatcgtccttacactaactctagtctccaatcttgatctctccaccactctcatcttcactggtttctacaacatcgccaccggtctcctctttgacatccctatgcccgtccagcccatgaaatccatcgccgctgtcgctgtctccgaatccccgcatctaactccttctcagattgccgccgctggtgcatccactgccgccacgctcctcctccttggcgccaccggagctatgtctttcctctacaacatcatccctctcccagttgtacgcggcgtccagctttctcaaggtcttcagttcgccttcaccgccatcaaatacgtcaggtttaattacgatactgccactctcaaaccctcttcttctcctcgtatttggcttagctcgacggccttatcttggctctagc

SEQ ID NO: 140034 - DNA, 1072 bp, Arabidopsis thaliana landsberg
accaacaacaagaaaaacaaaacagtcaggtgaagaatgcaaggaataagagacaaacaaagcatctgcgaggttatcgagattaccattgccactctccgttcgcccacgaacacgattagactttgaactcttgtaattcttcacataaactaaactttcatactcagtcaccacctcaggtagaatcctagaatacatctcactccacaggttcttctgattcacaatgtgggcaaacctcattgactccaattgtttcctagtgtacaatctcctaaactgcttcccattgttttctactccactcccctcaataacatttctcttatctccaattttcttaagctttctaggtgtatccttctcattttgagcagtccctggtctcttaggatgatgaacaacatcaaccaacgcagtatgatcaaccaattcaatcttatcaacatcattatccatcgtctcttcgatcttaggcaacgtatccacatcaacactcttcctaaagattgacccaagttcgatttcagccagcaatcttctcttctctgcttccaatagtctctgagcttcagattcttgttccttctcctcaaaattcaaactttcttcaagggctccatcaactcgatattgctcacttcctttagagaaggatgattcctttatctcttgcagatccctattgtttacagagacggctccatcttccatagttattgcatcgttttgcgaggaagaagcttgtggatctatctcagagttcagttgcttcttaaagtcgctctctttttctaatccatccccagaaattgaggttttcgccggagtacagtggtcggaatcggagtttgtcatcatgaggcggatgtgcgcaaaacccttaacgagtgaataaattgttccttttctcgaagctaataaattgctcgaaccggtttgattaaaccggaaaaaattatcaaccctgaaccggttctatgtataaatatagccaatgtgttctcatccccgattataccggatccgcatatctgctaattccacacaccattctcttttgaagcct

SEQ ID NO: 140035 - DNA, 498 bp, Arabidopsis thaliana landsberg
  unsure (1)..(498): unsure at all n locations
gccatannnnnnnnnnnnnnnnnnnnnnnnnnnnnnnnnnnnnnnnnnnnnnnnnnnnnnnnnnnnnnnnnnnnnnnnnnntcagtctcaacctcaacctcaacctcaacctcagcaacatatgatgcctggaccgcaacctcgaatgaacatgcagggccctcttcaacctaaccagtatctaccaccacccgaattagttcctagcccagtgcctcataatcttccttctcctcggttcaatgctcctgtacctgtgacgcctactcagccctctcccatgttcagtcagatgtatggtggatttccttctcctcgatataacggttttggaccactgcagtcacctacatcccaatttcttcaaccatctcctaccggttacccgaatatgttctctccgagatcgccttacccattgctgtcaccaggagttcagtatcctcaaccacttaccccaaacttctcattttcacaaattgctcaacaaggaagtct

SEQ ID NO: 140036 - DNA, 2444 bp, Arabidopsis thaliana landsberg
cgtcgtcgatgttatgcttgtcctttcccaatctggcttctgcgtcagttaccttattttcgtcgccaccacaatggctaatctcctcagccgcggcaccgaacatattctaggcctcgatgctgcttccatttacctctggggatgtttcccctttcagctgggtctcaactccatcccatcgctcacccatctcgcccctttgagtatattcgccgatatcgtggacgtagccgccaccttagtggttatggtgcaggatgttttcatcttcctgaaacgaagacctcctttgagagtctttggaggtgtctctgttttcttctacggattgggagttgctgtgtacgcatttgaagggatcggaatggtaagcagaccaactaattcctctactgtctctgtatctggtgttaaaactaatagtcctgatttgtggttggatgtgaacaggttctgccactggaactagaggccaaatacaaagacaagttcggtagagcgctggggctagccatgggcttaatctcgatcatgtacggtgcattcgggctgctagggtacatggcttacggagaggagacgaaagacatcatcaccaccaacctggggacaggagtggtgagcactctggtgcagctgggcttagcaatcaacctcttcttcacattcccccttatgatgcaacctgtctacgaggtcgtggaacgccgcctttgcagctcccgttactctgtatgggtgcgctgggccactgtgctggtggtcacgctcgtggccctgctcgtcccaaattttgcagacttcttatctctggtggggagcagcgtctgcgtggtgctgggctttgtcttgccatcactatttcacttgcaggctttcaaaaacgagttgagcatcacaagaatagtggtagacgttctcgttttcctcattggtgttatgatagccattaccgggacctggactgcagtacatgagatcctgacatccaaggcctgagcttcttccattgtttatttttgtcagtatgaaaagagaagcattgttacctccagcgaacacggcattattattgttattctgttactctcctcacttgtttatttgagtcttattactctatttgtaagaaagacgcaccatggaaaaccaataagaaaaatactcttagaatcaagtttgataaacaccatttgcggctattcgcaacaaagagactaaatcaaaactgcagaagccaaatcatttggactttggcctccctctttttctagtcacctgaatctcttcttttgctccttctccattaacagattcgttcagtctatcggtatctaactccatgccaaggccatcaaaatccaccctcttggaaacggcatgctctgtattcagcctctcccttgagcatgtgggaaccgcacactggtcgtcgttcttatgttgacaactcgaagaagagtttgaaactatgccctgactgacgacgcctccaagttgcaacttggagggtaatgcatcatccttggaaaacaacaagtcagcagcaacatgcttcttcttcatcttcttgtccttgtggagacatgcgtcttgtacgagtccctggttaggaggaaaggaggcaatcaaatctaaagcggtcttagcagcagcaacagcttttgctgcagcagcagctttctcatctgcagtagctctggcggccttagcagcaatagcagcagcggcagcagtacatctcgaagcatctgcaatctcctgaggggtgagatctggattactcaaatgagaagctaaaagaatgctaagatggtaatcaacattggtggaaggatgtggaactccattagcatcaacctcttttgtcagcacattgacgccttccataattacacatacaacaaatctctctaacctacaaaacaaaccctatcagatcttacgcggatataagagagaagccaacatcggagtttgacgctaagatgcatttctagaaaaccgatgaagtaagcttaagagtttaccttgaatgcgcctgcgaaaagagataagagaagtccgccaaaattagggttttggaggtcgaaattctgaaactcacagatgaacgtttaggcttgttgtgtatttatacacacactcacacattaaaattaaatttgagacgaagatgataaaacccaagcagcgaacgactttcttcttctccgacaccaatttcttcgcacgttctgttcggatattcgctttattaccagtgcgtgcgcgtcgttccgtttcacttcctcccacaaattacttacagattatcccttttgtcaaattgtttttattcttttaattagttgaattcctttttatttagataataagatgttttaatgtagaaaagacaacaaaacatgcataatttatgtaagtttttttttccaaaa

SEQ ID NO: 140037 - DNA, 2330 bp, Arabidopsis thaliana landsberg; identical to SEQ ID NO: 66881
  unsure (1)..(2330): unsure at all n locations

SEQ ID NO: 140038 - DNA, 1992 bp, Arabidopsis thaliana landsberg
tcaaacaccttttgagagcggttattttttctctatcaactaatacagtaaccttacgggtgtttatttgtatagatctctgtggttttcttggccaactctagtgagatctttttcgtttctcgaattcgatgaaaatgagacgaggcaattcaagtaacgaccatgaacttgggattctacgaggagctaactcggacaccaactcggacacggagagcatcgctagcgaccgtggtgcctttagcggtccgcttggccggcctaaacgtgcgtccaagaaaaacgcaagattcgccgacgatcttcccaagagaagcaatagtgttgctggcggccgtggtgatgacgatgagtacgtggagatcacgctagacatcagggacgactcggtggccgtccatagtgtccaacaagcagctggaggtggaggccacctggaggacccggagctagcccttcttacgaagaagactctcgagagcagcctcaacaacaccacctccttatctttcttccgaagcacctcctcacgcatcaagaacgcctcccgcgagctccgccgcgtgttctctagacgtccctccccggccgtgcggcggtttgaccgcacgagctccgcggccatccacgcactcaaaggtctcaagttcattgccaccaagacggccgcatggccggccgtcgaccaacgtttcgataaactctccgctgattccaacggcctcttactctctgccaagttttgggaatgcttaggtaaataaattacttcttactaagcaattctattagtactatatgtttccatttttgtgttagtctcatttttgttttgttttttactctaggaatgaataaggaatctaaagacttcgctgaccagctctttagagcattagctcgccggaataacgtctccggcgatgcaatcacaaaggaacagcttaggatattctgggaacagatctcagacgaaagctttgatgccaaactccaagtcttttttgacatgtaagcttttttttacttatcttcacctaacccacaataaatatctaacgcgtaatcactatttgtcgtttaatattgactcttaatgaaaatcaaacggtcatcagaatttaaggaccaaaagtaataatattaatcatttgtggagttttggtggatttgtaactaatatatgacatcactgtttggtcagggtggacaaagatgaagatgggcgagtaacagaagaagaggtggctgaggtgagaaaaaacacacaccactcaataattatctttttcaaatattttattatatttatacatttttgtatcttatatttattcatattcctggttgaatatttttttctcttattttatacattattcttggttgattattttgacaattttgtccacgcgcaaatccccactgactttatctgctgacgtttactattaacatcatcaatatattaacttcatgtgaacacgacaaaatggtaatagatagatagagtagtagtctttgttactttagcttaggttattaatgtttcaaatactttagcttttgttttctaatttgttggtaatttattgcagattattagtcttagtgcttctgcaaacaagctctcaaatattcaaaagcaagccaaagaatatgcggcactgataatggaagagttggacccagacaatgctgggtttattatggtacgtgtggtccactttcacccactcaatcacactaatggtattatgtacgtcgtaaatttaaccactcttaaaatactagaaaaaacgtggaaaaacataacgttctagaagtctttagtggtcaaaattattgggtcaccatgatgttttttagtttccaacttattgggccatcttgaactttttaccaaaccaaccaacaaaatctcgacaatgggtggttagaagttacgatatgaagaaatgaccaataaaattgtaaaatatatgaact

SEQ ID NO: 140039 - DNA, 922 bp, Arabidopsis thaliana landsberg
gccaaggaaggacatgccagaaggcacgggagaagacaagcacagaattcacttgagcttaaacacacgtgtttggattatgctggtgcaattatgttcacggcttattcaatcaaactgatggcaagctagggagttgaattctcatgaagtctgagcaaggatggttgtgaggctggaatactctgcagtggaatgatgatgctctcgtgaacatcaaagtggacatggtagtgcttcagtttcatattttcataatcctcgtgttcaatttttgtgtcgacctgatcacttttgtcaatttcagcaacattcttaagtaatttagtgcctcatcgtttttcttttccaaaacacagatcattagtgagtacaacgaacttctccaggcacaactagagaatcaaaaacaagtaagcacctaccctgtcctgttagccttttgttgtctcgataactaccagtctcttgaggttttcattgtctgcttcactttatttaagtgttaattttttttcttggttttctttttatcttttcctcgcccattagtattttgaaaagttgctacaaaatgtcaaagaggaaacggaacagaaaatctcagaagctgcgagcaaggcaataagccagagactgcagaagctgcaaaccaggtttgacagatgtgtcaaagagaagcaatttcttgaagatgtgagtatctatctagctttcgttttaaaagtttttcttgatggcatatttacatctacttacatttctgtagagtattattgacttgttgttttctcatgtgtagttgaacgaaaatcttgtgaaaaataaggacgtatggagcaccaagattacagaaatgaaagaaaggtattatctatctagcaaatctcgtcatgggaaattgtgcatattcgctagcttg

SEQ ID NO: 140040 - DNA, 854 bp, Arabidopsis thaliana landsberg
cttcttcccgccggcaaattcttacgtttctccggcggttagaaaaatgacaccacagatcaaaactcatctcttgccgaagcaagaaccttcttcgtctgagaaccatggatcatcaacctccggcatcgttttcaacgtgtcgacgagtataatcggagccggaataatgtcgatgccggcggcgtttaaagttcttggaatagttccagcgtttttgattatcacgatcatagcttggctttccacaatttccgttggatttctgatgaaatcaactctcgccggagaatcaactacttacgccggagttatgaaagagtcgtttggtaaaacaggatccatcgctgtacagattgctacgatggttgctacttttggttgtatgattatattttcgattattataggtaaagtaatttgatctaatcatctaagtgtagaggtctcagctactatttgagcttaagaacagattggctgagtttggatttgtatgtgtttactctctcaggagatgtgctttctggtaatgaaaatggtggtcctgaacatattggagttttgcaagaatggtttggttcttactggtggaacacgagaatcttcgctttgttatttgtctacggctttgtcttgcttccattggtcctgcgtagacgagtcggtaagtttctctctataatcttgtgttctcaaaattatggatatctatgagattgttgatgattttctttttgttaatggttatgtagaaagactggcaattagttccgctgtatcgattcttcttgcggttctatttggtgtcataagctcggtgctggcgattttcgcgctggtgaatgggcaaa

SEQ ID NO: 140041 - DNA, 3315 bp, Arabidopsis thaliana landsberg
actatatgaaaaattgcttctctgtgtctttgacatattgaatgatgggaagctcacagaggtctgtgaattctgtcaaaattttattgaatacattttccagaagcaatattcttggtcatttaaaaatcatattgatttgaaaggtttttgttctttttatcagctgacactctttgagctgcttagattcctctgttttgtttttccatcatattataattcccatatacattaccagaaagaaattcttgacaagttgccttacagtttattgtttctgttactatgaaatgttcataaagtaacctttgttattttattttaggaagttgaagaaattcttgagcttttgaagtcaacatggcgtgttctcggaattacagagaccatccattacacatgctatgcttgggttttgtttcgacaggtaatgatggattagatattttctttattgtaacgatattgatgcttcagctgggaagttttacggtagcttatgagtgtgttgtgtggttgcagtatgtcattactagtgaacgaggacttctgcgacatgctattcagcagctgaagaagatcccactaaaagaacaacgagggcctcaagagcgtttacacttgaaaaccttgcagtgtagggttgataatgaagagatatccttcctggagtccttcttgtcacctatacggagttgggccgataagcagctgggcgactaccatctgcattttgccgaggttttatctaaaacaaatgcgttcagacacattagttgctttcaattcaattacagtaattcgtatataggattagccatcttcttttactttgtctagtgagctgtactcttgctttatgtgatattgtgttttttacatcaaatggacacattagtctcagtagtgtccagaaaattgacgcattgtttaatatgtccaactattccatatgtatgtcacacatgaatatatcacacttaaatttatatatcatacataaatccaaataagagtatgtccacctcaggctccctatatctatcttacttctaaatacatttctattgcaagcaatttctttttctctatttataccattgaagttagatattttgttatttttatctacatttcagggttcacttgtcatggaggatacagtcacagttgcaatgataacttggaggctcttgttggaggaatctgatcgagtatgttacctgctttttaatggagcgatggtgacatagtttccccaacatgacttttgtacttgtaactgagaatgattgtcatttttctctacaggcgatgcattctaactcttcagatcgagagcaaattgaatcctacgttttatcttccatcaagaatacgttcacaagggtaagtgttataccaatcttctagatgttcgaccaacgataacatatcagttcttatttatgcccattctaagaattgagcaaattctgattccattgtgaacaatttgacgcataattttctggagtggttaatggggctgatttttgcaaatttacagatgtcacttgccattgatagatcagacagaaataatgagcaccatttggcattgcttgctgaggagactaagaaacttatgaaaaaggactctaccatctttatgccaattttatctcagaggcacccacaggcaattgcgttttctgcatcccttattcacaagctttatgggaacaagttggtaagcttgatgctagcgtcccatcttattactttttggttactacatctcagtcattaatgacatcttgaatttgtattttatttcagaaaccttttcttgatggtgctgaacacttgactgaggacgctgtctctgtttttcctgcggctgatagccttgagcaatatttactggagttaatgacttctgtctgcggagaggatacaagtggaccttacttcaaaaaattaattccatatgaggtcagatgttttactttgaaatctaagacgcatgggttaagccaccttataaacaggttcaaattcagcgacaatcacgttggctataatatttctcaataatttaggtcgaatccctctctggcacattggttttgagatggatcaattcacaactggggagaattttaagctgggtggagcgagcttataaacaagaggtgagatttggtgttcctttactgatctttcgaagaattgctttatctgtcttttgatacaactttttttttttcaaaccataacgcttcttaacttttctgtatagcattgggacccaatatcacctcaacagcggtatgggagctcaattgtcgaagttttcaggattgtagaagaggtaggggtcctatgatccactttttctgtatctttttcgtagtagcatatgtatattttattggtttggagcacatgttttactagatcctctgagtctcatcagttgcttaaggcataggtttatctttgttgagcttccttagataggttgttcaatttgctgtgacccttgttgaaaataaagtttacttagttcccagttattctacatgagaaagattattagacttgaatgaagctgtgtctgtgtcaaaactgtattgaacggagctgtgatatctttgtttcttgtagaagcatattttgatctcagtaagcaatatgactccacagtctccacttataagagcttgtctaattaagtccacagtctccacttataagagcttgtctaattagtgttttgaatacactttgatgcagactgttgatcaattttttgcgctgaaagttccaatgagatccattgaactaagtgctttatttcgtggcattgacaatgcatttcaagtatatactaaccatgtcatggagaagctaggtatgtacaatctgactgaactctgcttccgagctttgaagttctaaactccaacttatatttttatgagcttttatcttccgtaacctgggcattgttttttgtctactggaaaattctggtatcggattttatccatttcagctagcaaggatgatttggttccacctgtacctgttcttactcgttacaagaaggaaacagcaatcaaggtttttgttaagaaggaactattcgactcaaaacaccttgatgagagaaggtcgattaacattgatgttccggcaaccgctatgctttgcgttcagctcaatactttacatgtaattcaagaaaagcttcaacagttcaagcatcatttttaagtgttgctgctattgataacgtgttcttacgcgtttcacagtatgctg

SEQ ID NO: 140042 - DNA, 1260 bp, Arabidopsis thaliana landsberg
  unsure (1)..(1260): unsure at all n locations
atttatctctcccactcacaaatattttgatttgttttgtaactgtttctctttctctggagctttcttcttcttcttcaataaatcgatttaggtttttcaaagctaagtgtttgtgttgtgataatgagtagtagcgaggaagtagttgaagtgacggtggtgaaagcacctgaagctggcggaggaaagttatcacgtcggaagattcggaagaaagacgccggtgttgatggtttggtgaagtgggagagatttctcccgaaaatcgcgcttagagttttgctcgttgaagctgatgattctactagacagattatcgctgctcttctcaggaaatgtagttacagaggttagtttctggtttcaatgcttgagatttaggttttgtttgtatagaatctgagaaatatgaattcgattgagatgctaatgttgtgaatctgatccgcgtgcggctaaatgttacaattcaaagtcaaatttagaaaagtcaacgattttttgtcggttttgtgttcatatagaaatctttatcaacacttagtttctacaacaagcttaaaggatttgtattaatgtggtttggttttgtgtattgatcagttgctgcagtacctgatggcttgaaagcttgggagatgctaaaaggaaagcctgaaagtgttgatttgatattaacagaggttgatctaccttcaatatctggatatgctctgctaacacttatcatggagcatgatatttgcaagaacattcctgttataagtacgttgatattttacatctttttcttccatcgttttgaaatgatcttttggctcattatgtattggtttnnnnnnnnnnnnnnnnnnncagggactcggntaatactgtgtacaagtgtatgttgaaaggtgcggctgattatcttgttaagccgttgaggaggaatgagcttagaaatctctggcaacatgtctggagaagacaaactgtatgtttcatatccatcttttgttttaagctttatgtgtgatgagttatctctacaacttaaacccgttcttatataagttctgggaaatttcgttgtcttgaaaagatgattgagttctcagatttgtttttggttttgattatcttttacagtcactcgctcctgatagctttccatggaatgagagtgttggacagcacaaagctgagggtgcgtctgcaaacaattcaaacggaaagagagacgatcatgttgtcattgggaatggtggtgatgcc

SEQ ID NO: 140043 - DNA, 2690 bp, Arabidopsis thaliana landsberg
atgtcgaaaaggtgcgtgctttacccatttctcttcttcataggctgacttctttgtctgaaagcttgcaaccttttttagttttaattacaaattgatacgagtaatgttcttatattgatacgtctctgcacatgaaccatcttgtaccaatgaatataatctcagggtgtgggctcttataatttcttcatcaacggggacaacgtttagacttgagagtaatttatcatgaattcgccatctggaaagatctttataactgttttttcgtaaatctaagcgtgtgataattttcagtcaagaatccgtgaatagtttcatcttctgtatgcttagttgcataccttgttcattgatgctctttttgtattttgtttcttctcaactttttcttcgttttcttttgttttctcttagaatcctttgtaaattctttgctcacggtgcatgcttgaaaggggagcactgtgaattttctcatgactggaaggatcctacaaataatgtaagctttaactctctcccctatgtatgggggaacaagctttcatcaactttaaattcctttgtattgttaatgttctctaagaaacgaccatcctatcacagatttgcacctactaccagaaaggaatctgctcttacggaagtcgatgcaggtacgaacatgtcaaagcttccaggcctcatccatctgcttcatcttcgtccgctgtgcctcggccatctcctgcttcagcttccaacactcttgcctgtgcttttcttcctggtgtcgcggaaagagatttgagcccagttccttcttcatctttaaaaccaacgtggaatttggattctcttctccaggattccgtagacgaggtcaaaacttctaaccctggtacagtcaaacctgaagaactacccatttgctcatttgctgctgctggtgattgcccacgtgggaatgaatgccctcacatccatggaactatttgcccaacttgtgggaaatgttgcttgcatcctttcagacccgacgaaagagaggagcacaagaaagtttgtgaaaaaaagcacaagcaacttgaagcattaaaacttagccaagagatcgagtgttgtgtctgtttggaacgtgtattgtctaaggcaactccagctgaacgcaagttcgggttactcactgaatgtgatcatgctttctgcattgcatgtatcaggaattggcggagcagttctccttccactgggatggatgtcaatagcacactaagggcttgccccatatgccgcaagttatcgtattttgttgttcctagtgtaatctggttttcagctccagaagagaaaaaagaaattatggataactacagggaaaagctcaggtacatgctttatgaacattgcctaagttaactaaccatgggcaaggtttttcattctggtggttttattgctgtctttgtgttcatcatacttgattggcaaacaaagcaagaaaaatctgtatacttataatcaattttatgctctgtctaccaggtcaatcgattgtaaacactttagttttggagatgggaattgtccattcgggacaagttgcttctacaaggtatttttatgcattcagggttgaaactctaactaaatcaagcatgctcggatgatgttaaataatatgtgttgatgttttttactgatagtgacaggcaatccctttttagtcgggggtgtatttaaaaccatgctggttggattaattttggttcttagtttctttgaggagcctttggttgaaatgatttcaaaaacttaattgtttaagtagacatttggcactgctgttgaagattacattgaaatcaggtttcattgtatgtatttactgccttgatttcatacatgagtattttctggtatctgtttgaaaccaatattgaatcaccatatctgaagttctcttgaaagttgaaaatctagttatatatctcatacttgagatgacgtcaactattaaaccttgatgtctcttactgataggcaattcctgcttttttacatttcttttgtgtttctatatctgagcttacctatctatactacttattgccagatgttccgaatctagaaaatttaaaatgtttgctgataaccgcattgaagctttataattatccaagagtcttggcaattagtttacataaatttttcagctaatattttatgtcactatagaaggaagtgtagaaaattgatataatgtgatatagcatcaatggttagtgatattcagtagggagggtggatttgcagaattttcttctaagtccttagaaagcttgattagtccttaatggatgttgttgtgttccagcacactgtgaagccaggttcatatgcatggaaatatcacaggccacctccaaggcgtccacgtccctatggaactaacttctcagacgtggatacacttgtaaatatgatcgggaatataatttcagaaggtgaatatggtcctattgggtttagagatactgacgatgacgaactgactacaacggatatgatgatgttactgatgcacatggatatcgaatctgaggactcgtccaatgaggatagctattagctacccatatcgaagttagttaactaaagtgagagtcttaggttatatggctatattatggtgttgggagttc

SEQ ID NO: 140044 - DNA, 527 bp, Arabidopsis thaliana landsberg; identical to SEQ ID NO: 74131

SEQ ID NO: 140045 - DNA, 1816 bp, Arabidopsis thaliana landsberg
actcactgtgtaaaaaggcttttattttatcatcttcaggcttattcgattttcttcagatttgaaatggtgtcgttcaaggtctctctcgtctctacttcgcctattgatggccagaaaccaggaacttctggactccgtaagaaggttcgttcgctttcgcttcttctccttgttatatcaatccccgcgttcttctttcgaaattggattagagatgtgaattctaaattcagatcttcgcaacgaaactgatttctccatttagttccgatcttatggattgaatgaattttgtgtgttggttttaacaatttgatccgatccgatgagatttgaatttacgcattgtttcgtaattttacaggtgaaagtgtttaagcaaccaaattaccttgaaaattttgtccaggcaacgttcaatgctcttactacagagaaagttaaaggtaaagatctctcttacctctctttgattgttgttcaggtaaaggtcgatgattgcaaattccatctaagaaagagtatttgttaactttttcaggtgcgacacttgtggtttctggtgatggtcgttattattcagagcaagctattcaggtaaaagctttatatgtcctttgaatgatggcaaactgcgttttgcattaacttataattcttagttgttttgaatcttttatttcataaaaaagatagttcgtcaataccactttatttcctatctggacagattatagtaaagatggcagcagctaatggtgttagacgtgtgtgggttggtcaaaacagtctgctatcaactcctgcagtatcagctattattcgtgaaagagtaggggctgatgtgagatatcttcctctaaactcatactacttacttttctcttgggttgttatctaaggctatgcatgtttgcaacatgtaatgacgtgatgagaaactaacccgagatccaatttcagggatctaaagccacaggagcatttatcttaacagcaagtcataatcctggtggcccaactgaggtcagttctctttttgttctcactcttttgtgcttgttcattcgataccctcacttagtattatttgaatcctagcatcagttttgttaaactatatgttcatctctctgcttccatatgctgatttcctgctattctattcacaggatttcggaattaagtacaatatggaaactggtggaccagctcctgaatcaatcactgataagatttacgagaacacaaagacaatcaaggagtacccaatagcggaagatctacccagggtacctaacatttctgatcttattacctgtcatcatctttttttcatcttgtatttgtactaatcatgtttttttgctggtctttttgattgaatgcaacaggttgatatttctactattggtataaccagctttgaaggacctgaaggaaagtttgacgtcgaagtttttgattctgcagatgactatgttaaactaatgaagtaagtctttccatctttgtatctgagagaacagttcttgaatctactccctctatggtctatgcatttaagagaatggttccagaatctgcggtatcgatgatctaaaagatttgttcgtctcttcaggtcaatattcgactttgaatccatcaagaaattgctatcttatccaaaatttactttctggtatatagttcatcaacatccataaatcttttcttttgagtttagttgcttgtataggctccatcatgtctttgatattttatttcccatcgttctatgaaactatgatgcattgcatggagtggctgg

SEQ ID NO: 140046 - DNA, 1041 bp, Arabidopsis thaliana landsberg
aaaaaaactcaaattctctgatctgatctaaaagcttccaacaaatggcggagactgcgaatacagatctagaaggaatcgatggagttcgtatgacatggaacgtctggcctcattccaaagctgaagctagcaaatgcgtgatcccactcgccgcttgcatttctccgatccggcgacatgccgatatccctactcttccttacgcaccgctccgatgccggacttgttccgctgcgttaaacgcttacgcacaagtcgatttcaccgcaaagctttggatctgtccgttttgttatcagcgtaatcatttcccgcctcattatcatgtgatctctgagactaatcttcctggtgagctttatcctcagtacactactgttgaatacactcttcctccgcctgtagccaacggggaaggtctggtggatccgccggtgtttgtgtttgttcttgatacttgtatgattgaagaagaattggattttgctaaatcggcgcttaaacaagcgattgggttgcttccggagaatgctttggttggatttgtgtcgtttggtactcaggctcatgtacatgaattgggattctctgagatgtctaaagtttttgtttttaaaggagataaagagatttcgaaagatcagattttggatcagttggggcttggtggttcttctaggagaggaggttctaaaggacctcaaaatggcttcccgagttctggtttgaatagattcttgttgcctgcttccgagtgcgaattcacactcaactcggtgagtgactttgcttttgattgtcaagttggaaaattttcatctgattcttctatctttgtgtgaatgatgtttggtatgtagcttttggatgagctacaaagtgatcagtggcctgttaagccaggtcatcggtcccaacgatgtacaggcgtggcattgagtgtagctgcaggattgcttggagcttgcttgcctggaactggggctagaattgtagctttgatcggaggtccatgtacggaaggccctggaacggtaa

SEQ ID NO: 140047 - DNA, 593 bp, Arabidopsis thaliana landsberg
tggtgtcatacttttcttattaacatgcttttctgatccaggtactgtgaacactgagaatgtttcacggtacatttctgcttacccctatgatgatatcatttactccaagaaagaatgttctacgtgtaaaatcccaaagtgagtgcattgaaaatcctgtggtgaacttattttaagaacctatgtgctttatgttaaaactatacatgtatcttcctcattcaggcctgctagatccaagcattgcagcatctgcaaccgctgtgtggctcggtttgatcatcattgtgggtggatggtatgtactttgcccctgatctctgtctcgtttttcttatcttctcaacatttcataacaacatattgtttgacgtgaatatttctctaccggtttcagaataactgtataggagaaaggaacaccaaatatttcatggctttcctcttgtggtaagctttcattttaaaactcttggcatttacttggaagattccattaccgtgttgtgtcctcatcattttatttggttttatgttaaatggttctttagtgctttgtaggcatttccttctttgcttgtacggaacag

SEQ ID NO: 140048 - DNA, 4031 bp, Arabidopsis thaliana landsberg
aaaaatggttcaatctctccaccactgtctccgcttaacagattcgctaactctccaaagttttacgaaaatcaaattctcaaatctgaatctctttctctctttctcatggtgaagttttgtggcacctgaaactgagagagaagcttcttcttcgtattgaaacaaaccagtgaagcagagcagtttttcttctttctccatggtgagaaactctctctcgctcgagatcgatgacaatggcggcgccggaagagacggtaatcacaacgctaacaacgtcgccggaaacggagatacttctttccattctattagagatcgactccgtctcaagcgtaattcgagcgataggcgagatcgatctcactcaggtttggatcggccttcattgcgtacccgacctcatcacattggccgatcgttgaatcgcaagggcttgctttctttgcttaagcctcgtggtacctgtttgctctactttctcgtcgcgtttacggtttgtgcgttcgttatgtcatcgctgctgcttcagaattcgattacttggcaagggaatgtgaaaggagggcaggttagaagtcaaattggattggggagtacgttgaagtatgttcctggaggaattgcgagaacattcattgaaggaaaagggcttgatcccttgcgttcagcggtcaggatcggtgttcgtccgcccaggctagctctcgtgagttccttcattgcctttttcaatatatgcatgaaagagaccttttttaagtgctaggattgttagatccacttgagtttgtaaactagtccgatttaggttatgactgatggtggtttgagcgctagtgttgtccactgtgagacagaaaatattgacgcctttcttctagtacagctagtgatatatatattagatgtttctatctttagcacttgggttcggaggatttgattgaggaaacggaacattattcattaggtttggaagaggagtttccgagtagtcgtgggtcattggcaatggactttataaaaggtttttacttttggaagacatcttggccaagattccatgagaaagagatctctttttaaaaagatttgatgtggaccctggtttatgttcttttcttatcatagctaaagtagataacctccagcaaggttgaacaagtcagtaggatttgatgggatcaaagatctaaaactttgtgttgggtctgagccaatggagaaacaaatagtagttagatcaactaaacgccctgactagacatagacaggcttatgggcaaatgccatgtgtttcagttaaatgctgcaccttagggtatgcctgtagtgtggaataagctaaattaactttgtaaaaggcgtcaaagagtctgctggcacatcatgctggaacttgccagtggagttttcacggttacttagcagttacttgcattttcaatcagtcgtttcagtctacatgtccacattagctttggaaaattaccgttgttatgtacatcaacactgttttattttctctgatcgatctcatataatcctttttgtctccgtctccatgcacttcctattcactcatctgttttatattatgaatgacaggtactagggaatatgaagaaagatccccgaacactaatgttggtcactgttatgaagaatcttcaaaaacttggttatgtgtttaaggtgaaactttatggcattttatgcttgcagctctagcgttgatgttgagaatttactcatatatacagtataagcagaatggatgctctaatttgttaatccaccataaatatgcagtaaagtgtggacacaagcgtatatgtgtcttatttcccgcatctcttagaaaagcttgtgaccttaaaagttgtcaggtttttgccgtagagaatggtgaagcacgctcattgtgggaacagctagctggccatgtcaaagttttggtttcagagcagttggggcacgctgattggacaatgtatgtgtccgatcaattctttgaaaacgttttcctggccattttctcaaattagatttctaggcagatgattctcggattgcttttttaaatacttttttatttctggataaatttacagtgattcattttgtgcagttttgaaggtgttattgctgattcgcttgaagcaaaagaagccatttcaaggtgggtaaattaagtttgtttagttgcctgctatcagagtgaccttttgtattgcacactacattggctgttgttgcctaagatgtgaagagtaacaagctcttgggcttctcaaaattttgacaattacttccgtggccaagattctatgataataaaattttatatttatgcagccttatgcaggagccatttcgttcagtaccacttatatggatagttcatgaagatattcttgcaaatcggttacctgtttaccaaaggatgggccagaattctcttatctcccactggagaagtgcttttgcgagagcagatgtggttgtctttccacagtttaccctgccggtagattcctgtccgcaataagattacattaccactacaagtataccaaattgtgggttttgtatctgactaagatcttattatttgttcagatgttgcatagcgttcttgatgatgggaacttcgttgtgattccagaatctgtagttgatgtttgggctgcggaaagctacagtgaaacccatacaaaacaaaatctaagggaaattaacgaatttggtgaggatgacgtgatcatcttggtgcttgggagctccttcttttatgatgagttttcttgggataatgccgtggcaatgcacatgttgggaccacttttaacacgatatgggaggagaaaagatacaagcggttcctttaagtttgtttttctatatggtaattctaccaaaggccagagtgatgctgtacaggtaagaaatatttttggtagccttcaatcatatcttcctagatgattaggataaatagtttctttaatcaatgctatccacagaagctcattggtcttgagctaaaaactttaagttgtgcataacaacttcttctaaatttctcttaattcaagttcatcttgcttgctcatttgatagtaattttgttatcataaggattatatccatgtgaatactatatgatttaggccgtgctactaaaaaaacacattaaatttggtcagggaaagagtatcctcagacaatttaatgctactgtgtgtgattagtattggttgagattgtatactcaagacataattgtgtgtaataatacatgaatgcaggaggttgcatcgaggctcgggttgacagaaggcactgttcggcattttggtttgaacgaggatgtgaatagagttctacggatggcagatattcttgtttatgcttcgtcccaagaggaacaaaactttcctccattaattgtgcgagctatgagctttggcatccctatcataacacctgactttcctatcatgaaaaaatatgtgagtaccctgaaattaataatttcctgattattaccaaatatgttgtttgcttaatcgtggacctttaactgcagatggctgatgaagttcatggaatattttttcgaagaaacgatcctgatgcattgttgaaggctttctcacccttgatatcagatggaaggctctctaaatttgctcaaacaattgcttcttcaggaagactcttaactaagaacttgatggcaacagaatgcattactggttatgctcggcttttggagaacatactccatttcccatctgatactttcttgccaggttctatttctcaacttcaagtggcagcatgggagtggaatttcttccggagcgaattagagcagccaaaaagtttcatcttggactccgcttatgctttcattggaaaatctggaattgttgtccaagtcgaagagaagttcatgggtgttattgagtcaacaaaccctgttgacaacaataccctgtttgtttccgatgagcttc

SEQ ID NO: 140049 - DNA, 1017 bp, Arabidopsis thaliana landsberg; identical to SEQ ID NO: 13905

SEQ ID NO: 140050 - DNA, 1015 bp, Arabidopsis thaliana landsberg
cagttttcaacaatctctctctatccattctctatcaaattctaaaatcaaaaatggctctgcatttgagatcttctttttcatcaaaatcgactttactcaatattctcagacacaacctcggtttcggttctaggagccacgtgactcggcatatccgccaaatcctaccacatgaccccccgcttcgaggttcacagaatccaattagccgtctctgtaataccatggcggagccagagacactctctagttttgttcagcacgaatacgccaacaatcatcaggtgcatgcattgttcctccgcattttgacttttataggaagtccatagctcactgttcaatccactcttgtcgtatcattggaatctgtcattaaatcgcttttattgacatttatacatatttctgttgttgatgttatgaattacttactaaaacatgattgttatatctcaagaaattttctagtttgtgtgggttgtttttagattctcatgaacctttagatttcttattgtgttgatattctccattcattctgaagaatatatgtatgtggaccttgaatgttcaggtaatggactttccaggaggaaaggtagctttcacacctgagattcaattcatatcagaatctgataaagagcgtgttccttgctaccgtgttcttgatgacaatggccaacttatcaccaacagccagtttgttcaggtttcacaaaaaaaacaagagaaagaattaatcttttcctctttttgcgaattctaaataggccaaagaactcatctttattcttcctcttcaggttagcgaggaggttgcggtgaagatatatagcgatatggttactcttcaaattatggataacatattctacgaagctcaaagacaaggcagactttccttttacgctactgcaatcggtgaagaggccattaatattgcatcagctgctgctctcactcctcaagatgttatctttcctcaggttttttattcattcatata

SEQ ID NO: 140051 - DNA, 565 bp, Arabidopsis thaliana landsberg
  unsure (1)..(565): unsure at all n locations
gtatggacttgtctggatctgcactacgcttgtgtttgtgcttgcttctctcggaaattgtgctacatatctcgtgaagaaacgaaccgacagtaatgctccttggatctttgatgtgaactatatgaatttggcagcatctataatatatggatatgcaataattgtgcctctgggattttattttgcactccgttatatggggtccaaagctgatcttctaagattctggtgcctttggggatactctctcttcattttcgttccaacctctgtaagtatcttcagtaacttcggtctcttttgctgttaaaattaatcaattgatgatcagtaacactaaagacaaatgcatatacttgatacacaatggtttggtaacttcactttcaatgaccatgtacaatgacataaatcaacctaacttgatatcacaactttatacttcatactgtttaagcataataacactcangatgttctattttgcagcttccattgcttattccagtagagtttctgagatgggtgattatactcttagctggtagtgcatcatcgtgtt

SEQ ID NO: 140052 - DNA, 3618 bp, Arabidopsis thaliana landsberg
atccattgtgatggtcactggaaaacccagctatgctgatatgatatgtatcattgagaagtttttacaagctaaggtttttaagcttctaccctttatttgattccttatgttggagataaatgaagctatttttcttctcgagggcgtgcttatttcttcccagtatgttgttccttcaaatattcattgagcatgtagaaaatatttactttcgaggcattctctcgttgctcggtcataggcaatgttcaggaaagctcattcaaactttttttttttttgtcattccacagtatgcggagaagttatttgttcggagatcaagagacagcgatttcccacaatcagttgcacaacaaatgtgggacgcagtgagtggcaatgataaaaaagctgtttaccggctcattgtcaatggtgatgcggatgtgaattatgtgtatgaccaaacttccagtttttcgttaacactttccagagtaatattagtaccagaaaggccaaagcgtgaggatgttctactcagattaagaaatgagttacttgatagaacaggtagttcttcaaatatatctcctgagggaagcggaggttcctctctgcttcactgtgcttgtgagaaggcagaccttgggatggtagagcttttgctgcagtatggtgcaaatgtaaacgcctcagattcaagtggtcaatcgccgctgcactgttgtcttctcagaggaaaagtgacaatagcaagattgcttctcactaggtgagttggtcttcttagatccgcttatccaaaatgtccctaacattttctctggctaaatcctttggaaatgttaaaagttttcacacaagttgtgtgtatgttgcaggggagcagacccggaagctatgaacagagaaggcaaaaccgctcttgatattgctgcagagtcaaattttactgatccagaagttcttgctctcctttcagacacaaatggatacaatcacagacagtgctgataaagatgcataggcttgcggacataaaaattccggagctatgtttcatcgttgctttcacggtctgaagagccaatcaacactaaagaaggacctctaatggtctctagcaagtttagcccccaattaagtattgtattgatgtttttgtgatggatggatataggctgcatattgggaaattatagtgtattgtgttgtgtcgtgttgtgtgtatgtgggactatagcatcctgagtttgtcatgtccagacgttgtaacttgtaagcaattacttatggttttgttcacttcgtattaacgtatttaatttgtggcttgattttggttttgaatctgtgtcaaaactaagataatttacgtgttaaaccaggcccaagtttgaaagttaattgtcaattttcagaccagagtacatattggtccacttattcccattacattcatagttttgagtcttttgataatagtgttaccatttcaattaggctaatcttttttcaacccaagatatttttataaaaaggaatgtggttcaaatcggaaaacaagacctaactttgaataaaagcactacagcataaagcttttacctttaacaaaaaaaatataataattttttacaaggaaaaagaagagaaagcaattattctcagacaaacaaaggaaccacttttgtaggtgtagtagtaatctcacacgctaagacaaaagtgcacaaattctcgagactctcttctatccaacggtccatatctcactaacctcatctaaataacggacaagatcttcttttggcttcagctctctttagtctttaccttccctcaagctcggtactcgatgtcttgctttcggccactcatgaaagcaacgagagcttcccctttcatccgcctacgtggctgtgggacccagtctaaccacgaccacctgacatcgtgggccccactgtaaggcgggaaccccatttttttttggctgtaagtaacggattctcggtcatgcttttttgtgaggatagagagagagactgagagagagagagagtgtgtcacggtctcgcagatactgtgtattgaaaagagagttctagagagagagtgtgttatgtgtgtgtgtgtgtgtgtgtttggttactgggattaattgagctgaaacagtttggatagttttgtttgttctgtttcatctttcaaccacagatatagtaatattgtgaaaacccctcattgaagtttgttctctgctctctctttttgggtttagcactgagttttggggtttatttcgagacatacccatacaaagtttgatacttttgtgtccccccttatcaagaaaattgtggtttttttttttttttaataagcttcctttaaattttcaatttttattttggaggaaaagagtgagaatttcagataagaatctatgagccaatgatattctaattcatcttctttgtgaagattttgagttgaattccattttcctttttgtcttggtggtttctcattggttttctcgagaatatttgtggttttgggagaagaggcttcactgtagcattgaaaaagtcttaaacttttctgtgtctttttatgtaagctttgaacagcttcacctttctgggttttctcagattgtgtctaatcttgaaaaaccttttattcgtagaagcagcaatgaagcaaagaagaagaagaaatggatgtagtagtagcaacactatctctctactcttattattcttcttagtcttcttttcaagaacaagcacaagtacaagttgtcgtagaagaactgttaaacacttatccacaacttcaaaatcatctacaccacttgaatcaagaatcacttccaaggttattgtgattagtatcgtctcagggattttaacagggttggtttcagctttggtgttagctttcttggttcgtagcattgtcaaattcatgaaacagacgccaattctcaaaggtccagtggtgttttctcctaagattactcctaaatctctccacgcagctctcagtaatggtattcagttgcttggctctgaccttaatggtaaatactataagatggttcttgataatggtctagtggttgcagtcaagagactaggctcacttgaaggatttggttcaccagaaagtagtagtagcaagtcggttaagagaaggttgcagaaggaacttgagcttcttgctgggttaaggcataggaaccttatgagtttacgagcttatgttcgcgaatctgatgagttctctctggtctatgattacatgcctaatggtagccttgaggatgtgatgaataaagttagaacgaaagaggtagagcttggatgggagattaggcttagagttgcagttggaattgtgaaagggcttcagtatcttcatttcagttgtgagacccagattcttcattataacctgaaacctacaaatgtgatgttggattctgagtttgagcctcggcttgctgattgtggattggccaagatcatgcctagttcacacacagcggtatcttgctactctgcccctgagtcctctcaaaagtacaggtgcttcaaatatcaacaccatagcctttga

SEQ ID NO: 140053 - DNA, 2493 bp, Arabidopsis thaliana landsberg
  unsure (1)..(2493): unsure at all n locations
atgtttggatttttgaatctgagtttcttttcttggacttttgcagatcgcgttcaagatcaagatctcctctaccttctgtgagtaacaagatccaacttgtgacccctcttttattttgacataatcttctgttttacattgttcgttatcttaatagcttttctgtatcacaggttcagaaggaaggaagcaagagccctagcaagccaagtccagccaagagtcctatccacactaggagtccatcgaggtacataatctttcttagaaatgaaacattgcaatctgattttgtttgataatgcgtaaatctgaatctgagctcttgtttgcaggtaaaatgggagatatccaggtgaaaagagaagagagaagcatcttcttgctactcaaaacaaattctactttcttgaagtggattatatctgaacgcttattgactgtagaagatgcgacaagtttgatttgcactatcattttgtaatattcttgccattcttcgtcttctggatccctttacttttgagaatgatgtttttttttgaagatatcgtttcttttccctccttctgattcatcctttcttaattaactaaagctctcacttaaacaacgtcgtgtttagacctgatccggaatctgactgtatagcctgaactgtacgattccagtaaccggtgaatcttgtctggagacgtctgctttgaacttggtttttgtggtgaactcagtcctttgttcgtttccctaatttctcatgctcttttgcaatcatatcatgttcgattccatctttatagttctatatccttggtatagtagtgcctgatttggattctctgtcctctttagcttagagagctatataagcctgaagacaaaacttgattttattggatgatatagaacatgcaacaaaaggcaatcaacaatctctttgaaaagtattcgctgctcattgagagataatgaaagtgtctttacttagagagtgtggtactatggtgattgatcactcaatatgttaacatgtgggtccaaacaaaaaaatactaaagctaaggaaacaaacaaaaagccttttgaaagctaatgctgctccctattttctatatcgttggacgatttgctctttacttcttcatcaaacttgtcaaaacaagtggacccactcctagaagcagacgaatgcagttccgtgtttcaaccaaatttgtacttgcttgttaaagtacttaaataatctatcacaaggggttcaccgttcgtatttgttcttgcttgctaaagtttttttgctctgtacggtgacaagaccagagagatgaagttattgagcaatagtctaatgttccttcctctgctggctttggctttaaccgcagtttcgtcgcttaaatacagcagaaatgacttccctccaggctttgtctttggctctggcacatcagcttatcaggttcttcaacccttttttgagtatttttcctgagatgtaacattacatatatattcaccttcatgttagaatgataaaagatcagaaactatcagataaaccagtgttttgtctataaattccaacaggtggaaggagctgctgacgaagatgggagaactcctagcatttgggatgtttttgctcatgccggtttggtttcttcttctcttgatgtttctctgaatagctcgagaattttggcaagaggtttacatatatagtttcatttcaggacactccggagtagcagctggaaatgttgcatgtgaccagtatcacaaatacaaggtcccttttcttcccatctagtatataatatatgtctctgtctccatgtgacagatggaaacgtttgcaggaagatgtgaagctcatggcagacatgggattggaggcttacagattctctatatcctggtcaaggcttttaccaagtatgatttttccacgactcgattgataaaccaatcgaagcgaaacattatcaatggattgatgaagaatatgattttatttcaggtggaagaggaccaatcaatcccaaggggctacaatactacaacaatcttattgatgaattgatcactcatggttaaacttgtaccctgaccctgttagttaattagctacaagaccaaacaaacctaatattctcatggtgtttcctacttcttcgactcaccaggaatccagccacatgttacattgcaccactttgatctcccacaggccttagaagatgagtatggaggttggctcagccaagaaatcgngtatgattcttctcctttcaccttctttttgattggtgatatcaaacttattcatcaatctttttgtaatgattattgttataggagagactttacagcttatgcagatacttgcttcaaggagtttggagatagagtgtcacattggactactataaacgaggtcaatgtgtttgcccttggagggtatgaccagggaataacaccgcctgctcg

SEQ ID NO: 140054 - DNA, 1644 bp, Arabidopsis thaliana landsberg
caaacctaatccttacgcacccaaagacgcggttctccaaaatgacgattctacccctgctcatcccgggaaatcaccggttcgttcatctcccgccgtaaaggctctccttttttccctttttacacgcctagtcccgcccggcaccgccgtaacaagagccgcgacggcgaggaggagagagtaagagcgttaccagcactcctctccgtcagctcgcgcgtgctttccaccctccgtcaccggcgagacatatacgggatgttctgcggcggaggaaggagaagaaggaggctgctctgccggcggcgaggcagcagaaggaggaggaggagagggaagaggtagggctggataaaagatttgggttttccaaggagttacagagtaggattgagctaggggaagagattgggagagggcattttgggtatacttgctctgctaagttcaagaaaggagagctcaaagatcaggaggttgctgttaaagtcatcccaaaatctaaggtcatttttacagctttactttttccaaattctcaagtttccatcttaagttttctgcttcaattggctcaagtgcttcatcattgtagtgatagctatatctgacaaattgaagattctttgtgtgtcttgtctgatttgtttagtagatgttaaactgtttcaaggtagaagaacaaaccatcatagtctccttttgcttcatgatgaacctgtaatttgatcattacggtctcttgagatgtttctgttcttctctacgagcttactgtcctcttgtttgagccatctttttgaaaaaattgatagcgtatgtagactttcacgcatagaaattaatacaaaaacaagtaatagcgaacacagatgaggttgaagtttgtcaatgacacttatgtttcatccatgtttttcaatagccaagttttcaatggttgtagattagcattgctgacttttctgtgaacatttctaaacgttttaaattggtcaataaattggaacatggacatttgtgcttttgtcaattgtcattaagcaattgaaattttgatggtccttatttgatgactaagaaagttaatcatgtaatcgagttagttggtgtaatatacagataggtttagtgttagcttaatccacaatagactgtttctcatcagctttggtttggcagatgacatctgcaatatctatagaggatgtgagaagagaagtgaaaatactgcgggcgttatctggacatcaaaatttggtacaattctatgatgcgttcgaggacaatgccaacgtttacatcgttatggagtaagacaatcatgtgcttatatattcctgtgtcatgttgaatctactaggagagctatcagattcttattttcccgacttggcttacttcaaaatgtttagctgtgaataaacatttactttctttcaactttcaggttatgtggaggtggtgaacttcttgacaggatactagcaaggtctgcttttaaagattgttatgacatttgttaacttatggtcagagatccttcttagagatgttctattggctgtctaactatttcaaatttacttctcttacaggggaggaaaatactctgaagatgatgcaaaagcagtgcttata

SEQ ID NO: 140055 - DNA, 848 bp, Arabidopsis thaliana landsberg
ttgttctctttctcatcgcctattgattcacgcgaacgagaaagcgacgatcgtaaccaccggcgctgaccaaaaagtaatcgattctcttcccgagctgatctctcaggtgcgtgaattcacttttttttttttcgaattttcccgagaaaaaaatccagcaaagagtagtagcgatgaagaagacgaggtttgaattgagattcgtattctttcggtggcttgaagtagcttatgcatgtttaaactcttgttcagttgtttgctcatgattcgaaaatggctttgtagatcttctaatataatctcttctctttatcaattcactagtgttctatatctgaagaaatttacggctacagatccaatctcatttcgtttcgttacactatctctactaagattttgtttttttgttttttctccctctttttttgcgttttagatctcctccatgattgaagttgatccatgcttttgagtttaagtgatttatttaagatcctctaaacttttttttcttcacttagtggtggttccagtcaatttagcaagtaagatgttgtatgtgtcaatgctataactgtgaattttcagctattgtagtttgatttttgtctttgttagcttcaggtgtcttgaatctgaatctgtggctatatttggtgctcggtggtgagcaggaagggaggggatattgtcagggttttaatgtacgtcagatgaatagagcaactaatgttactggcagtagaaggagggggtttattctcagcgtccgcgtctgggtatagtaagggattgacccttcttttctctggtgataaagcgtagataggcccatgaga

SEQ ID NO: 140056 - DNA, 636 bp, Arabidopsis thaliana landsberg
ttgagagagatagaacaaaaaatgggagagagcaaacgcaccgagaaaacgcgcgttttggtggttggagcgactggatacatagggaagaggatagtaagggcgtgtttggctgaaggtcacgagacttacgttttgcagaggccagagattggtctcgaaatcgagaaagtccaactctttctttctttcaagaaactcggcgcacgtatcgttgaaggttctttctccgaccatcaaagcctcgtatccgccgtgaaacttgttgacgtcgttgtctccgccatgtccggtgttcacttccgtagccataacattctagtccagctcaagctcgtcgaagctatcaaagaggctggtaacgtaaaggtataataaactataaattaaagtttaattatgattgatcggtttagaaaattgtgcggttaatctgaaaaaatcttataagtaaagaaaccacacgaaaataaaataaaaaaaagccggagagtttatttttgttttactatttacgtttcatttataagaaaaaaaacgtcaacggtaaaagatccatattgcatgcatacaaagaaacttgatactcttgttgattattattacgttttgtttcttgttgtaattataatgata

SEQ ID NO: 140057 - DNA, 482 bp, Arabidopsis thaliana landsberg
gtgaaacatcaaccaataagacgagcacattttagatgcattcaggagatgattaactgctttctaagttggtttagattagttcttatactgaatttaactatttagtgagaaactagtatatagagatatgtgcagaaatcagtcttgatctggtaagattgagagaagttgtatatgcggatcaactcaaatgatttatggttctgttcttctttatcctgtgtgaaattccaacttctaatgtttgaatacaatcacagggtttatgaccagatgcctgagccaaggtgggtgatttcaatgggaagttgtgccaatggaggtggatactatcactactcctactcggtggttcgaggatgtgacagaattgtcccagtcgacatatacgtcccggggtgcccaccaaccgctgaggctttgctctatggactactccagcttcagaagaaaatcaacaggcgcaaggatttcttgca

SEQ ID NO: 140058 - DNA, 610 bp, Arabidopsis thaliana landsberg
  unsure (1)..(610): unsure at all n locations
gtctcagctcntgtgatccctctcggtattactactttcctcgtctctgggagtcgccacagagacagaaattgagcggaacgagacagaggtgcggctgatgtacgagcaatggcttgtggagaatcgaaagaactataatggtcttggagagaaagagagacgatccaagatcttcaaagacaacttgaagtttgtcgatgaacacaattctgttccggatcggacttttgaagtagggttgaccaggttcgctgatctaacaaatgaagagtttagagcgatttatttaaggaagaagatggaaagaactaaagattcggtgaaaactgagagatatttgtacaaagaaggagatgttttgcctgatgaagtagattggagagcgaatggcgcagttgtttcagtcaaagatcaaggaaactgtggtatgtatgcattttagttttcttagctttttgattattggataacgttttagagctagaagcgattgagattcatcgatgaataggaagttcttgggcgttttctgcggttggagcagtggaaaggatcaaccagatcaaaaccggagagttgatatctttgtcgccgcgagaactcgttg

SEQ ID NO: 140059 - DNA, 1082 bp, Arabidopsis thaliana landsberg; identical to SEQ ID NO: 27157

SEQ ID NO: 140060 - DNA, 683 bp, Arabidopsis thaliana landsberg
tgttaacaaagaaaactgagaaaggttttcttataagatcccattcttgtagcaaaaacccagaagaacaaactttcgaagaagacgactaatcaattcatctgattatggagagactacagagaatcttcggagctggtggcggtttaggtcacgcatcgcctgattctccgactctcgatacatcggagcaggtttacatctcttctctcgctctcctcaagatgcttaagcacggtaatcaatccaaacccaagctctaatttagtcttctcttgcttagggttttatgattttgtctcgttctctgtgattttactctcgtcctcttttgctctggaactctagggttttattcgatctgtttctgagattcaaaatgcggatttgagtagagatttaatgaaaattgatcggaatattgcaggaagagctggtgttcctatggaagtcatgggattgatgcttggagagtttgtggatgagtacactgttagggttgtggatgtttttgcgatgcctcagagtggtactggtgttagtgttgaagctgttgatcatgttttccagactaatatgctcgacatgcttaaacagaccggaaggtaactagttcttctctaaaacctatttactacgcttaagtgaggtttcctatttaggttttggatctgattcttctt

SEQ ID NO: 140061 - DNA, 1571 bp, Arabidopsis thaliana landsberg
tcaatctaggcgaattagaagtcgcagatatcacaagttttgaattcgtatggcgatactgctctcgtcgagataacaagaagagtgtttccttctacaaacctgacaaattacctgaagatttccattgcttaggtcattactgtcagtctgattctcacctcttgagaggttttcttcttgtagcaagacaagttaataagtcttcagagcctgcacttgtgcaaccactcgattatacattggtctggagctcaaatgatttatcagaagagcgtcaaagcgaatcgtacggttacttctggttaccgcagcctcctcaagggtataaaccgatcggatatttggttacaacgagtcccgcgaaacctgaattggatcaagttcgatgcgttcgagctgatctaaccgataagtgtgaagcacataaagtcataatcaccgcaatatcggattctttaagcattcctatgtttatatggaaaacaagaccatccgaccgcggaatgcgtggcaaaggagtctcaacaggtacattcttctgcacaactcaatcccctgaagaagatcatctcagtacaatcgcgtgtctaaaaaacctcgattcgagtttacacgcaatgccaaacatcgaacaaatccatgctatgattcaacactatggtccaagagtttacttccatcctaatgaagtctacctaccttcttcagtctcatggttcttcaaaaacggtgcactcttatgcagcaattcaaattcctctgttatcaacaatgaacctatagacgaaaccggctcgaatctacctcatggcggaaccaacgataagcgatattggatcgatttaccgatcaacgatcaacaaagacgcgaattcatcaaacgaggcgatctcgagagctcgaagctttacgttcacgttaagccagcatttggaggaacgtttacggatcttgcgttttggattttttgtccgttcaacggaccagcgactctgaagctagggcttatggatctctcgttggctaaaactggtcaacacgtttgtgattgggaacatttcacagtcagaatcagtaatttctccggcgagctttactctatttacttctctcaacacagtggcggcgagtggatcaaacctgaagatcttgaattcgttgaaggaagtaacaaagctgtggtgtactcgtcgaagaatggtcacgcgagcttttctaagtctggaatgtatttacaaggatctgatttgcttggaattgggattaggaatgattcagcgaagagtgatttgtttgttgattcgagtttgaagtatgagattgttgcggcggagtatctcggaggagcggtggtggagccgccgtggttaggttatatgagagagtggggaccgaagattgtgtataattcgagatcggagattgagaagttgaatgaacggttgccatggaggttgagatcttgggttgatgctgtgttgaggaagattccggtagaattatccggcgaggaaggaccgacgggacctaaggagaagaataattggtttggtgatgagaggtggtga

SEQ ID NO: 140062 - DNA, 3877 bp, Arabidopsis thaliana landsberg
  unsure (1)..(3877): unsure at all n locations
aggactcttgggataggggaattccgcgtataaatacgctgttccaaaaggataggcacactttagcatatgataaaggttggagggtccggaccgacttcaaacagtaccaagccctgaaacaaaatcctttctggtggacacaccagaggcatgatggtaaattgtggaacttgaacaattaccgaactgatgtcatccaagctcttggaggtgttgagggtattcttgagcacaccttatttaaaggaacatagtgagtcttgcttttcgttcgtgctcaatttattatgttctttctttcacattgacatttgatgttttgttgctcacagctttccgtatcaattttgctaaaataattttctttacatgaatccagctttccaacttgggagggacttttctgggagaaggcatctggttttgaggagtcgatgaaatataagaagttgactaatgctcagaggtctggtctgaaccagattccaaatagaagattcacgctttggtggtcgccaacaattaatcgagcgaatgtctatgtgggtttccaagtgcagttggatctgacaggaatatttatgcatggaaagattcctacacttaagatatctttgattcagattttccgtgcccatttgtggcagaagatccatgagagtgttgttatggatctctgccaagtattggaccaagagttggacgctttggagatagaaactgtacagaaggagacaattcatccaaggaagagttataaaatgaacagctcttgtgctgatgttcttctatttgctgctcataaatggccaatgtctaagcctagcctggttgcagagtcgaaggatatgttcgaccagaaagcgagtaacaagtattggatagatgtgcaacttcgatggggagattatgactctcatgatattgagcgttatactagggccaaattcatggactatacaactgacaacatgtctatctatccatctccaacaggtatttattactttttccattttactttgttttgttagtctttacttttctgcagtatgtatcaaattttcttactaaatctgtgcaggtgtaatgattgggcttgatctggcatacaacctgcattctgcctttggtaattggttccctggttcaaagcctcttcttgctcaagcgatgaacaagatcatgaaggtaatcaattttcttcttgggtgtcttttgcagtactcgttttgtttagatctatgacttaccgtttaaaatttacatattgcagtccaatccggctctatatgtgttgagagagaggataaggaaaggtttgcagctatactcgtctgagcctacagagccatatttgtcatctcaaaactatggtgaaatattcagcaatcagattatatggtttgttgatgataccaatgtttatcgtgtcacgattcacaagacatttgaaggaaatttaacgacaaagccaatcaatggtgcgattttcattttcaatccaagaactgggcagttgttcctgaaggtatttcttcctctcccgcacttcactttaagaacaggcatatatgcattgttctacaaaactactacttctgtttctctagtaacaggctacagaatcttaagtaactgttttttcttgtcctttaggttatccatacaagtgtttgggctggtcagaagcgtcttggccagctagcgaaatggaaaactgcagaagaggttgctgcacttgtgcgatctctccctgttgaagaacagccaaagcagattattgtcacacggaaaggaatgttggatccccttgaggttcacttgcttgatttccctaacattgttattaagggaagcgagctgcagcttccgttccaggcttgcctaaagatagagaaatttggtgacctgattttgaaggctacagaaccgcagatggtcttgtttaatatatatgatgattggttgaagagtatttcttcttatactgccttttcaagacttattttgatccttcgtgcgcttcacgtgaataatgagaaggctaagatgttgttgaagcctgacaagtccgttgtcactgagccacatcacatctggccctctctcactgatgatcaatggatgaaggtaactcttctgccactttccaagtacttcttcttgctatattcttttatttgataggatccctctttacattctatatctgctgtttttatttactagtgagttatgtgatatatagcttttactttcttctctttttttgaaatagtccttccttactcacgatcatgttaaattcaggtggaggtagcacttagagatcttattctttctgactacgcaaagaaaaacaatgtgaatacctcagctctgacacaatcagagatccgagatattattcttggagctgagattactccaccctctcaacagaggcaacagatagctgagattgagaaacaggtactcgtaactgttacttctatgttctatcaggttttctaacaaacacaaacattgtgagagtggactgtgactattattctttgttcactgtaaatctatatcctatttgcaggcaaaggaagccagccagcttactgcagtcacaacaagaactacaaatgttcatggtgatgagctcattgtcaccaccacaagcccttacgagcaatctgcattcggttccaagacagattggcgtgtacgtgcaatatcagccactaatctttaccttagagtcaatcacatatatgtgaactcagatgacataaaggttagaatccaattcactttgtcaattaagtaaaagcctttcaggtgtcgaccttaaacactgtctgttgttgtcacaggaaaccggatacacctacatcatgccaaagaacattttgaagaagttcatatgcgttgcggatcttcgtactcaaattgctgggtatttatatggtattagtcccccggataatccccaggtgaaggagatccgttgtgttgtgatggtgccacagtggggaaatcatcagctagttcacctgccgtcatctcttcctgagcatgatttcctaaatgatcttgagcccttgggatggttgcacacacagcctaacgagctgcctcagctatcaccacaggtatatatatatatatatttatctttaccttctgttaacctcattgctaactgatcttttctttgataggatgtaacctctcattcccgtattctggagaacaacaagcaatgggatggagaaaaatgcatcatcctgacctgcagtttcactccgggctcctgttctttgacgtcatataagttgacccaaaccggatatgaatgggggcggcttaacaaggacaatggcagcaatcctcacggttaccttcccacccattatgaaaaggttcagatgctgctgagtgaccggttcctcgggttttacatggtaagacaacagagtttgcaattgtgcttttgtccttggatgatataaaccattgaaatctgatttttgtaactgatgttatgataggttcctgannnnnnnnnnnnnnnnnnnnnnnncactggagtgaagcacacgttgagcatgaaatacagtgtcaaactcggatccccaaaggagttctatcacgaggagcatcgacccactcatttcctggagttcagcaacatggaggaggctgacattacagagggagatcgcgaggacacatttacttgagatatactcaattttcttaccgtgtgtgtgatttagctttattttgcagtatagacttgtaagatgttgtactgtcttgtgctttactgagatagatagtaaggtccctaaatcttaaaaagatggtttgccactat

SEQ ID NO: 140063 - DNA, 1133 bp, Arabidopsis thaliana landsberg; identical to SEQ ID NO: 12834

SEQ ID NO: 140064 - DNA, 984 bp, Arabidopsis thaliana landsberg
gtagctttctcgtttcatgccggtgatcgtcacttctactgggtcctcccaggcatgtttctctttggactcgacaagatacttcggattgttcaatcacgatctgaaagctgcattctttccgccaatctcttctcttgtaaagccattgagcttgtcgtgccaaaggacccaagtaagaaaattaatttctccaagtattttaaacatataaaaaaacgttccttaactttggtgaattattttggtattttgcagtgcttaactatgcaccatccagttttatattcttgaacattccgttggtctcacggtttcaatggcatccctttagtattatctcaagctcgagtgtagacaaacactcattgtctattatgatgaaatgtgagggagattggacaaattctgtttataacaaaatagaagaagcggcaaattgtgaaaataagattaacaacataatcgtaagagtggaaggtccttatggacctgcctcggtagattttctcaggttgctaaaacactctctacatcagctcaatttcaagaaattgttttatatattatataattattgatttgtttggcaggtatgataatctgtttcttgtggcgggaggaattgggatcacaccatttctaagcattttgaaagaactagcgagcaaaaaccgactcaaatctcccaagagagtgcagctggtgtttgcggttaggacattccaagatcttaacatgttgcttccgatagcatctataatctttaacccaatctacaacttaaacctcaagttaaaagtttttgtcacccaagaaaaaaagccttccaatggtacaacaacactgcaagagttcttggctcaatcacaagttcagtctattcacctcggaaccgacgaggaaaatcaaaaattcccgattcgcgggcctgaaagtttcagatggcttgccacattagtcctcataaacgtgcttacgcga

SEQ ID NO: 140065 - DNA, 1918 bp, Arabidopsis thaliana landsberg
agctttatgaagaagaatataatgaccgtgccgacatctattcttttggcatgtgcatgttggagatggtaacatgtgaatatccatacagagaatgcagaacccaggctcaaatatacaagaaggttacctcggtaagtctgacctgatatatataagtcttacatttctcttcgacacagggatcgtccttgaccattgttgcattagcagggtataaaacctcaatctctcagcaaagttgatgatcctcaagttaagcaattcatagagaagtgtcttctcccagctccttctagaccaactgctctagagctcctgaaggaccaactccttgcagtagatggcgccaaggactccactcttactgcttcatcaaacacaacattcaaacctgcaatgccaccacagtctgaatatcgtcctatggatgttgaatataagaagaatacaagtgtttccatctgctcttctgctaaaagcagccaagaatgcgcattgctccagaccatggaagtccagagggttgctgaaagtaccgaattcaagctgagtggagagaggagagatgatgtggcagcatcaatggctctgcggatcgcgggctcatctggtctgtttcacgatatcttatggccattttctttttctcttctcttgcatattttcgaattgcttaatgacagtataaattttatatcaggtcaagcgagaaaagttgattttgacttcaatctgaagacagacacagcaagagcagttacaggggagatggttgaagagcttgatctgtcaagccatgaggttactgtgatagctgagatgatagatgaactgataatgaagctgaaggctaatcgaagcctgcctaatgcaaacagtgtatatcagtccaaggatgaagaagctggagaatcaatgaagtcagagatatcagcggactactaccatcgggtctcctcaaacgaggggtcacggctcggctgctgctgcgaggcagtagagtcattgttgtcctcgtttctggattcatgctcaatggtgtcaaacaagcagtcggaggatctgaagacggagctgaatgtgatagagtcacaatataaccaatcgtgtcaacgactgcttagaatgaaagaggaagctatagagaaggcgaaacggaagtggatgaagctgagttgatgattccttcatttcatttaacgtagccacagttttgggatttactcaactttttgttttgtttctttgccttttatttcatttctcgtagcttttggttacatgtaaaaatatgcattgcatcaggaatcacagattgaaagaatgaaatgtatttgacgctaattcaaaatttagaactatatggattgtgtcattgtgtgtacatatctgttaatagtttagaaaattggcaaattcattttcgagatataaaaagataggagccaatgaagaagaataaataattaagagatgataacaaaaacaaaacaaaaaagaagcaatgactgtttgctttaataaataaagatattcaaaaattccatcacatgattgcaccgacaacagcgcaagccagcgaagcagcgacagtggagaaagcagaaatgagcgaggaggaagcagacgatttctgagagagaggaatggacccgaaggcgttttggtaagagggagcgtcggcggcagaagacggagacaaggcctctgcttcggcggagtaggtgccgacggagactaggagcttctggtacttggtacagtggccggggtttgcacttgtgaagtatagggttccgttttgggtgaggttgaagagagagttgccgtcgttcatgtacaagattgggtctttggtgttgcagctcttgaaattggagggcgtcacttgaatcagtgagtcttcgcttggtgg

SEQ ID NO: 140066 - DNA, 822 bp, Arabidopsis thaliana landsberg
actaaactttcgatgtttcaatggcggctgtgaactcgaaagctcttaactttatgtaggaattggcaaattaaaggttttgattgacgaaataggtgattaattgcttaagctgctggtgcttagaggtaattactttatactctctttgactatctttgtttatgtttttgagttatttgttttgcttaagttacaagtcttcaatagtattttcgagatggtttttgggatgtgagcgtttagtttctgcttttgttttgatactgtttattgggattcgattttcaggaagatacgtgttgctgatttcaatttgcttccacaatgttgcttcaactacaagttgttaaagcttgattctttttgggacatgagcatgtgacttatgaaagttttagtctttatttgtgatttgagctggctagagaagactcttgtctctgtttgatagtagtcatggtgatcattctcctattggtcttctttgttggttcttctgtgagccaaccatgtcatcccaacgacttatctgcgctccgggaattggcaggagcgttgaagaacaagtctgttacagaatcttggttaaatggttcccgttggtgtcaatgggatggtgtgttttgtgaagcgacccatgcccctgctcgagatacaaagttggttcaaccttaaaaaggtttgtaaggtgtgaattccaagtctttaggatacttgaatgagctctgagtcctcgatccatctagaaaccagcataaaggctaagtgccagcgccatatttctcagctagaccagctcccagttcttgatatgcgtca

SEQ ID NO: 140067 - DNA, 3428 bp, Arabidopsis thaliana landsberg
caaactctttgcggatgctggtttaatctgtattgccagcctcatatccccgtatagaaaagaccgtgacgcctgcagggaaatgatgcagaattcatcttttattgaggcaagctattcaaaaccaggctttacagtttgtaacccccattcggttggatcttaaaaacatcttgtttgatattgtggctaaatttgttaggttttcatgaacatgtctctgcaattgtgtgaagcaagggaccctaaaggcctatacaagcttgcacgtgcaggaaagatcaaaggtgagataacatagcttcaaggttccatataaacagaagatagcaagttgcttcaatatcatttgagttgttctataaaagtttttttttcttcatacccttttgtgtaggtttcacaggaatagatgatccgtatgagtctcccttgaactgtgaggtatgtgatccatgtgaacataagattcttcttcaagaatattgcaaacaacgcgtatgtgaatacgtttctctgtttcttttgtatgttttgaaacataacagatagagttgaaagagaaagagggagagtgtccttcccctgtagctatggctgaggaagtgatctcttatctagaagacaaaggtttccttcaaaacgagtaacgtccatcataatctaacgaccgagatttgtttttccttttactttttatgggtgttctctgtttgttactttcctgaaacactgcaaattcttaagaagtttcaactaatgaagacatatatatagcttcttctccttcttctgaaacttgtcttctacactgaaactctagtcagtcaataccagaattcgatcctatacaaacaacaagagccatgccattgttttcattgttaatttatactacgatacaacgattatactaagacaaccattaatttacatagtgtcattgtatttagaaatttagtttttttgggggtcaaaaacaatagttttagttatgttagtgaataaatagattcagaaaaaactgtcgatcttatttgaatagttcgtaaaagagagggttctgtttgtaattttcctaacttttagatcctgagttctgcaatataaataaagaacaaaacaaaacacgatcacgaggcaattttgagacaagaatggtgttgaatagtcgattggtggagacaacagttaatctgtcggcggatctctggcaatatgttgcgtgtaaccccgagatacttcctcgcgccaccgtcatccatttcatcttctgcatccctctcctccaactccgccgtctcgcttcctctctaggatcatacctatgcttcgattccggcgccggagttgatcaccgtactcattccgattaagttaccggcgcgtttccatgaatcgtctgttaaatttcgacttttgattgtgtaatttttgttctgattgtaatgtaattttgtttgtttgtaaaccgaaagggacatacaaatttaataccagaataaaccggaaacatttaaatacacacagaaccaaaccgggttgtgtggaattgttgtcgtcacaggagagaaataagcagagacgtgtaaaccaaagaacaacgaaggtttcgtttcgtggggaagaagatgaagtcgcttgtggctcatttctcaacgcctttaatcaccgctagattagttcctcgatgtatcatccatcgagcttcaatctccgccgtctctttttccaccgtccgccgtcgattttctcctctcaccatggcctcagcagctcagtcttcttctcaggtacctatctggaggattcaatgtttggagttttattgatgaatctgtgttctggttttggattgtagacttgtagtgggtgagttttattggtcaggaaaatcagtgaatctgtatcttgattgatgtggctcgttgatctgtaatttttgcgccgattatatatatgaattttattttatatgatcagagaaagaaaaggtcgaatctttttcaaaatgccagacttgtgcatataaagctctacgagtatgctatgttaacttgaaaggggaaagttatattcgtcaactgttgaaaacttctaactttgtgtcatgtacttctactaatcaggctgtgtcttacgggagtggcaacagtgatacagatgtttttaaattgattcaagctcacgaggtaactaatttgccaattttgtaaccatgctagctgaatatatctatgttctcaatgcgatgtgaaatgagttttaaagtattgatatgtggtcgtctaattttcaggagaaggctgctcgtctttccccagtcaaagaaatccgaactgtgcttaatggtagcatatgcggtatgctttccactttttctcaggtgagcaattagttatgaatatgatttctcatagagaaataagggtgtgtactgaagtcctaggattctgattattggtcaccatgtcatatgatgtaatttcaaaagccactgtgactttctctcatttaccgaaattttgatctggtgcagaagtatgagggttatccttcagggtcaatggttgattttgcatgtgatgctaatggttctccgattctggcagttagtagcttggcagttcatacaaaggtttgtttcttgttcaaggacttatgataatgcctttctgttttgctgcaatttagagctgcttgcttatgcgatagtttacaaagtgaaaatgagtggattagcgaagtgatgccggaagtaaagcaaaagagccattgtctattttctctgatttagatgtcttggccatataatccatatggataatttctgccgtttgcaggatctgttagctaatccaaaatgctcattactaattgctagagacccagaggataggactggtttgaggatcaccttacatggtgatgcagtgttggtatgtatttcgctgtgctgttttatatgcacttacattcaaatacaatgcttgaatgtttttctatgtattattcaggtttctgaaaaagatcaagcagctgttcgatctgcctatttagccaagcatcccaaagctttctgggtaaataccctttcttgtaatcactagaaagtgaagaacttcccaatgacaatgtatcatgacatctcaattaagttaactgaaccttttcttcttgaaactccgaaggttgattttggggacttcagctttatgcgaattgaaccgaaagtggtcagatatgtttcaggggttggaactgcttttcttggatctggaggtatcttactgcttcttcttgttaactcttatgcgatccagtttacttactcactgaaatctccatttgcagaatttagcaaagaggagtaccaagcagccaaagtcgatcctatagctcagtatgcaaaacctgtaacggtataa

SEQ ID NO: 140068 - DNA, 1054 bp, Arabidopsis thaliana landsberg
acaacatgttggaaggtgaaatacctacttccttgttcaacatatcctatcttcagctactggacctttcttcaaacaggttatctggggatatacctccgcacgtaagttccatatatcatggggcagtgttactcctccaaaacaataatttatcaggggttattccagacacactactactgaatgttattgtacttgatctgagaaataaccgactgtctgggaatcttccggagttcatcaacacccaaaacatcagtattcttcttttgcgggggaacaattttacaggacagattcctcaccagttctgcagtctaagtaacatccaacttctggatctttccaacaacaaattcaatggatcgataccatcatgtcttagcaatacatcatttggtttgaggaaaggggatgattcttatagatatgatgtcccttcaagatttggcacagctaaggatcctgtatattttgaatctctactcatgatagatgaatttaatatggtcaatgaaaccaactcccagacgaaaattgaatttgcaacaaagcacaggtatgatgcctacatgggtggaaatctcaaattattgtttggaatggatctctcagaaaatgagctgagtggtgagataccagtagagcttggaggtcttttggaactacgagctctaaatctttctcacaacaacatatcaggagtgataccaaacagcatttcaagaatggagaaaatggaaagctttgatctttctttcaacagattacaaggccggatcccatcacaactaacagagctgaccagcctctctgtattcaaagtctcacagaacaacttatcaggagtcattccacagggaagacagtttaacacctttgatgcagaaagctacttaggtaatcgtctcctctgtggacaaccaaccaacagaagctgcaacaataatagctatgaagaagcagataatggagtggaagctgatgaatccataatcgacatggaatcttcctacttgaagataagctgctgcttatgtgacaatactaa

SEQ ID NO: 140069 - DNA, 927 bp, Arabidopsis thaliana landsberg
tgtcaactccaagaacaaaaagcacctctgctctgttttgagatccaaccacagttcaaactaatcaaaagtcccaatttctaacttcagtctaggctttttctctccatggatccttgattctgaggtcagtttctgttcttgaggttttttttcattctgctttctctctcaatcagattttcatatcatctcttcgagaaacataaattataaatatttagttatgacttatgaaggttacaagattaaaattagaaattaatgattaaatcatccaaaaagtcaactaatgcccttatccatgcttctctgacaccaacatttgactaatctaattaaattaggaacaaaattattatcattaacaaatacacctccaacattaagtaaaatttctatatacacaaattttcaaacactaatggtttacttttcaactcaaaattcgaaataaattttccaagaaatataattcttatatcattgaacaagcctccaagttttcttaataagtttttcctctgtaatcatcatttgcttgttaagataagcaggtttcagttctattattcctcttttctattttttttggattatattttccatcttcttgatatgtttttggttgtaactgattactaattcttgatcgctctaaaagttcacttttctttcttacagatcaaccaatcgaaagaaaccaaaatgggcttcaacgttgttgtgttcttgagttgtctgcttctacttcctcctgttacttttggtagcaacatggaacgaaccaccttggttatagacggctcacgtcgaatcgctgagaccgatgagaactttatctgcgcaacgcttgattggtggccacctgaaaaatgcaactatgatcaatgtccttggggttacgcatctctcatcaatttggta

SEQ ID NO: 140070 - DNA, 1720 bp, Arabidopsis thaliana landsberg
  unsure (1)..(1720): unsure at all n locations
ttagattgtttctttccaaaaactcggggaaaagattatacatttgatctgatttcaataatataatctttgtgtgcaggagaagattatgcttagtactttgcaattcaatatgtcgtnnnnnnnnnnnnnnnnnnnnnnnnnnnnnnncctcaaggcagctcaatcagacaagaaggtaaagaaacaaatctatcaatgtacacaataatataaatggattgtgaattacaaactaatcttgttattgaaacagcttgagatcttggcgtcgttcttgattgagcttgctcttgtggactacgaaatggttcggtatccaccatcgttactcgccgccactgccgtgtacacagctcaatgtacaatccatggcttcagtgaatggaacagcacttgtgaattccattgtcactactctgagaatcaactcctgtaagtctcttttacccattagcacctataaagactcatctttgtaactaatatgggtttgttttacagagaatgttgtagaagaatggtgagactacatcagaaagctgggactgataaactaacaggagtacatagaaaatacagctcctccaaattcggatacatagcaacaaagtatgaagctgcacactttcttgtgtcagattctcatcattcttaatccaaaaggacagtagtaagtagtttgtacagcttcctgacatagttccctcattcactctgtagcacaaataagaagaaacaaaaaaaaaaagccaattaaatttgtcttatgattgattctgtttttttgttgttactctttgttcacttcacttgtcagtattaaactctacaatgaatgataaatgattgaatcatttcattctttgttcagaatgaaatgtattttgtatcttatttgagctaaatacaaaaacaacgtcgttttcgttgttttcactttgacttctctttagatctctctcccaccaactctcttcttcacacttcactaaacttcagatactttttgttttttcctcaagatcaacgataatggcggcgtcaacgaactcattcctcatcggaaaccaaacccaaatcccttctttgaaacccaaatcaatatcccaatcctttatccacttcactaaacccaacaccatcaacctcaccacccgaaccaaatccgtttcaatccgatgcgcttccgcttcaaccaccgtcggatccgagcagcgagtcatcaatttcgccgcaggtccagccgcattaccagaaaacgtcctcctcaaagctcaatcagatctctataactggcgtggatctggtatgagtgttatggagatgagtcatcgcggtaaagagtttctctcaatcattcaaaaagctgaatctgatctccgtcagcttctcgagattccatcggaatattccgttttgttcttacaaggtggtgccactactcaattcgctgctttacctctcaatctctgtaaatctgatgattccgttgattacattgttactggatcttggggagataaagcttttaaggaagctaagaaatattgtaaccctaaagcgatttggtctggtaaatctgagaaatatactaaagttccaacctttgatggattggagcagagttcggacgccaagtatttgcatatatgcgccaatgagactattcatggtgttgaatttaaagattatcctcttgttaaaaaccctgatgggg

SEQ ID NO: 140071 - DNA, 1527 bp, Arabidopsis thaliana landsberg; identical to SEQ ID NO: 29533

SEQ ID NO: 140072 - DNA, 717 bp, Arabidopsis thaliana landsberg; identical to SEQ ID NO: 45271
  unsure (1)..(717): unsure at all n locations

SEQ ID NO: 140073 - DNA, 1222 bp, Arabidopsis thaliana landsberg; identical to SEQ ID NO: 33128

SEQ ID NO: 140074 - DNA, 767 bp, Arabidopsis thaliana landsberg
ctctgtgtttctattattcacatgaaacaatggaaccacatgaccaaactcacggcggcgacggaggagaaggagagaactgttcagtttccggattcgattcagctgaaaaagtcatcatccgatgggacgcgacggcgtcagaagaagcaagagagaagatgatcttcaacgatccacaagaagttaacctttacctcaacgccgtcgatgaaatccagaaatatgtatcttccggtggagagattgagaatcgagctaattcagctatccagatagctatggctcgtcttgaagacgagttcaggaatattctcgtttctcatagttctccgatcaactctgattcgttaatgctgtcttcttcatcttcttctcaccttgaggttgatgaagatggaagtagtagtaataatggtaacgaagaagatgatcaacaagaggaagaagaaacggatcttctgaaacgatccggttcaagtgcaagtaccggttcagcgacggttcgattaccaaccggaagaggtagttacagtagatccaccagtagtatacgcgagatcgagctgattccgatcgaatcggtgattcatctgagctggattgctcggcgaatggtctccgctggttatctccgtgaatgtattcaagtgtacggaagcgttcgcaaatccgccgttgattccagtttccgacggttagggatcgagaaactcagcatcggagatgttcagaggctaaattgggaagcgcttgagcagaagatc

SEQ ID NO: 140075 - DNA, 4270 bp, Arabidopsis thaliana landsberg
gataatatctagatcgaaggaactttacctcgtctgagtaataaactccgagcgaagagtcgtcgatttcaaaaactcgatagtccacactgacgcggtcgggaaccacgtcggaaaggaacttcgacaaagcagcttcaataggcaaatttccgatagggatactaacattttcgatcgagccaaatcggagacggtcttcttctccgttgtagacgatgggtgccgggaaattatcaggagccggaagattgaggaagcctagggtttcaaatacgtgagaaggtggagtagagaagtaatcgatgttgagaaatcgagttcgcatcgtaattttctagatccgtcttgggagctcagactgtatcagtgatgatgatgatgatgaagaagagaacgaattttgaaattggcggttttgaatttttaagaaattaaaaaatatcccccgtcgatttcaagagggagatggagataccaaagcaactctcgccacttgtcgtctttcaattttaattgagtacgttatgccgttttaaatgttcaaaacagcacacagttgatagctgaattgattttttcttttgccgttttgttatatttaaacaacacacagtgcatttgccaaataactacatgatgggccaataaacgtggaccgactaaaactaaataatagaagatacatcgataggcttctctaaagatcggataaaagataatgtcgcatagccacgtagagagcaactggctgagacgtggcaggacgaaacggacgcatcgtacgtgtcagaatcctacagaagtaaagagacagaagccagagagaggtagttcggccatatgtcatcgttctctctataaactttatggaactttgttctgattttctcagagacacgaaaagaaagaaaacaacactagaacaaagagggtttgattgattcacttgaaaaagagaaaacacagctttggaaaatggagtcacagttgacacgtccttatggtcatgagcaagcagaagaaccaatcagaattcaccatccaggtatatatatatctatgacagaagattctaatttgagaacttttctcttaatttgccttatttattgtgattcggatacagaagaagaagagcatcatgagaagggagcatccaaagtgttgaagaaagtaaaagaaaaggctaagaaaatcaagaacagtctcactaaacatggaaatggtcatgatcacgatgtggaagatgatgatgatgagtatgacgagcaagacccagaagttcacggcgcaccaggttaatttctctgtattaaagtcctcgtcaatcagcagttatatttttttgtgtattaacggtttttctgtttttttatgtgtatgcacagtgtatgaatcctctgccgtgagaggtggtgtaacgggtaaacctaagtctcttagtcatgccggagaaactaatgttccggcatcggaggagattgttcctccagggacaaaagtttttcctgtcgtgtcttctgaccacaccaaacccattgagcctgtatcattacaagatacctcttacggacatgaggcactggctgatcctgtaagaacgacggaaacatcggactgggaagcgaaaagagaggcaccgactcattatcctctcggagtgtcagaattttcagacagaggagagagcagagaggctcatcaagagccattgaacactcctgtgtctctgctttcagcaacagaggacgtgactaggacgtttgctcctggtggtgaagatgactatctcggtggtcaacggaaagtcaacgtcgagacgccaaaacgtttggaggaagatccggctgctccaggaggaggatcggattatctcagtggtgtatctaattatcagtccaaagttactgatcccacgcataaaggtaatgactttggccgagactttttttagggtttatgaatctgtaataactcttgtctgttctgtttaaggtggagaagctggagtaccagagattgctgagtctcttggtagaatgaaagtgactgatgagtctcctgatcagaaatcaagacaaggacgcgaagaagactttccgacgagaagccatgagtttgatctgaagaaggaatctgatatcaacaagaattctccggcaagatttggaggggaatcaaaagctgggatggaggaagattttccgacaagaggtgatgtgaaagtagagagtggattgggaagagacttaccgacgggaactcatgatcagttctcaccagaactatctcgtcccaaagagagagatgattctgaggaaaccaaagatgagtcgacacatgagacaaaaccaagcacctacacagagcagttagcttcagctacatcagccataactaacaaagctatagccgcaaagaacgtcgttgcctcaaagctaggttacaccggagagaatggcggcgggcaaagcgagagccctgtaaaagatgaaactccgagatctgttactgcttacgggcagaaagtggcgggaactgttgctgagaagttgactccggtttacgaaaaagtcaaagaaacaggatcaacggtgatgacaaagctacctctctccggaggtggaagtggagtgaaggagacgcaacaaggggaagagaaaggtgtgacggctaaaaattatatatcggagaagctgaaacctggagaagaggacaaagctttatcggaaatgatagctgagaaacttcattttggaggaggaggagagaagaagacaacggctacaaaggaggtggaagtgacggttgagaagataccttccgaccagatagcggaggggaaaggacatggtgaggcggttgcagaggaaggaaaaggtggagaaggaatggtggggaaagttaaaggagcggtcacttcttggctcggtggtaaaccgaagtcgccacggtccgttgaagagtctccacaatcacttggcaccaccgttgttccggtgcagaaggagctttaagaatatgagaactgaaattttcaagtttcactttggatgtttatgtgtgttttgtttgacgtctttgatgtattatggtataattccttgtttgtgtgaaaaaaggacatttggttaataaattgttcggctttggattaagaagttcctccataccagctactaggtctaaagtgggtaaaatcattggatttattcccttcaaagttcttagaattattcacaggattttacattatgagctagtagtgtgacttgttgaggtgttgtctctatcgttaaagttctcgaatatttctaggatgagagcatatttgattttgttttctatagttgcttttgtttgttttgggactccctaataactcatcaaaagttatacaaaaaagaaacgaaaatattttgaatgatatttcattgttaaaatccactaaatgacaattacataagcttaaaagatgacgaatgtgatgtttttgtggctaaagttagttctttaagtgaaaacttgacattgaaatgctcattatggaaaattatttgttgattcaaaaaggccaagaaacacaaccaacttaactaagaccatctccattggtcatcaaaataaagagtctttaaatataaaattaataaaaataagaataaaaaaagaatttaaagaatcaaggtgggaaatgtgtcttcctagagacatttaaaatcttgtaatagtcagtttaaagatcattccctccatatgtcttgttgttagtggtcagtttgtttttgatattaaaatattaaatatgttgattttgagacataaaaaaataatttagcaatgaggatgctctaacttgcatcactatgaggtgtatattgtttctacactgattttggatattcaatttcacaagtttagtgatcggtttgataaagctaaattctgaactacttattttcacatcatcatcaagtattatttctttttttccatcattttgacaagtcatgctcatgagattagttaagctttatccacaagtttagtgtaaatatattgatcatcaacttgacatttattttgattaggtgcaaaaagatgaaagatttgttaatttaaagagttttgcttatcttgctcctgtgatggtggacacaaaaaaaaacatattttacattcatctttgattattaccattgtgataacaaacaatcactgaatattgtattttaaagtgaatagctgtttattgaaaattaggtac

SEQ ID NO: 140076 - DNA, 522 bp, Arabidopsis thaliana landsberg; identical to SEQ ID NO: 9956

SEQ ID NO: 140077 - DNA, 745 bp, Arabidopsis thaliana landsberg
gaatttttgagggaatttgaagattaatccaaactccttaaaaggttagccaaggaccattaacttacgtgtgggaatgtgaattctcttatttttttcatcttcttaatttctccacttctttcttcaggttaaaagctcattttgaagctaatccaagagacttagatctgttgagacatgacaagcctctgagtaagactgcacctgcaccacatctaaaggacatccccgagtatctagtggacgcaaagactcaagaagcaagcaagatggtaaagctagctagagccgcaatgggcaacactaggagatctggtggaggcggtggtcgcaacaacaaaaacaagaaacggtctagaaaaggcagcgacccactcaaaaccttcaaccctaatgtaaaacacaactgaatttctccatttcttctctgttttgtgtgtatatttgtgctaattttttctatgttgtttgcttacttcaatcaaccaggggtctaagagaggagccgttggccagaaggatggcaaagattctagctcgaccaaaaaacagaagacagtttaagttatttcgtttagcgtaagtgtaaccaaattttgactcgttatagtcaatcacacaaaagaacggagacgagagcatcaatctttgtagctctattcatgtagcatcaggagacaaagttttgtgagcatattattagccttttgaggtttttattgaaatagatttttgtaagctt

SEQ ID NO: 140078 - DNA, 811 bp, Arabidopsis thaliana landsberg
gcaataacaagccgagaaggttgaatagagaagatccaaggggaaagagaaattaaattatttatttatttctgtcatcttctccttttctatttcaaaatcccaaatctaaagcactcctcgagaaaagtgtaacaatggcgagaagaccggacgaagaatacgactacttgtttaaagtggttttgatcggagactccggtgtcggcaagtctaatctcctctctagattcactcgcaacgagttctgcttagaatccaaatccaccattggtgtcgaattcgctactcgtactctccaagtacgcacacatctctctctatatatatagtatatagtgtaatcgaaatgttgctggatctaggtttagttctaagttaagcagcatccggtgcttttcgattcgatccgtatctgtgttcgtatgaatactcggaagcagtcattgtgtgtaggaacatttgggcttggttttgaattttgatgtttacatgtgtggtgcctgtttttttcatttggtcgagatttttgctttggtatctcttaatttaagcgttttattgataatgttcccaaatttgtcgatactctggtacgtggtagtgtaaggctccctcacatgtcagatctaaaaccttgtttaaggcagatctaagaatctcttcatctgaaattgatctcgaacatgattttcttttgaagtatgaatcatggttgttgtttcacagtttctagaattcatactgggttgtttgtggaatttagctgcgaagttactaattttgttgttgcagacacactaatcataga

SEQ ID NO: 140079 - DNA, 889 bp, Arabidopsis thaliana landsberg
ttataacaactccaaggaaagcatcaatggtgggagaagaagcttgcttgtgataatatattcagctacgtcgagtgaagaaccagtgaagcataagtagcagagacagagagagatacgtgagtgtgtgtctgtgtttttcgctttttggctttcttcgctgattccacgaacggcgtgaatcgacttttctccagatctcatctctttcagtgtttgattctgtcaaaatctgcaagcgaatcgagatttctcagatctcgttttcgcttgcacgagattcagatctgatagtgtcggtgttccattttctcaaatccaaatggagaaaccggagagcgagaagaaatcggcggtgtctgatgtcggtgcatgggctatgaatgtaatcagctccgttggaatcatcatggctaataaacagctcatgtcttcctctggtttcggttttggctttggtatgcctctctctctctgactctgatctatctatctcccattagcttacacacttcatgaatctgacgatttctttgtttatatattccacagctacaacgttaacgggatttcactttgcattcactgctcttgttggtatggtgtcaaacgcaacgggactatcagcttctaagcatgttcctctttgggagcttctctggttctcaattgttgctaatatctctatcgctgctatgaactttagtcttatgctcaactctgttggcttctatcaggtaacttgtcttggagatttgctctttcggttattcgattgaaagattgttgttttgattttgcttattcattttcactttagatttcgaaattgagcatgattccggtggtatgcgtgttggaatggattctacatagcaagcattattgt

SEQ ID NO: 140080 - DNA, 3518 bp, Arabidopsis thaliana landsberg
gatgctttaggtggaaatcctcatttagtgaaactaattccagcggttgggattcttgcatttgctacatggggtcttagaccccttctgcgccttgccagaactaccctgtttgaggtgtgatgtcattctctctcgactcttatacatttcttcaatttcggttcatgggctacttgctatagtttattttaagtggatgcaactttaattccagaaggggaatgatgcaaattcacagaagagtagcacgcagtacattgttgtgtcatatcttcaacctttgctgctttggagcggagcaatccttttatgcaggtcaatagtatttttgtttctaactagttaactattatatgtgtttactaacatcaatatggaattgtctttcagaacattggacccaatagtattgccttcaagtgccggccaggctattaaacagcgtcttctgatctttgctcggtccatatcaacggtgttggcattttcctgctgtttatcaaggtaagcaagagtttctgtatattgttactgtaataacgcttttatggtggtataagtacttgcgtaaggatacatgtctccaaaacagttagctgaccttactgcaggttcaccatttagcttgctttttatcagtttgatgcaattttatctccgcccttgtatatatcataacttagctttactgactaccaaatggtttttcagttactgagcatgtttgatgcaatctttgggctaatacaaaatgtcttttctgcagcctacttcagcaggtgcagaaattttttatggagacaaataatcctgctgataccagaaatgtacgtcttcctatcctgaaacagatttggacactgttttcattattgatagttcatcctattacacggcatgaagtggtaacacaacacctgcagctgcctatatgttctaatgcctcaactgtagggagaagtttgaatatgtttcagattgtgtctctcatgaaagaataagcattttgtcctccaaatccaaacttctattgtctttgtgaatatgcaatttgcatttatatttttagttgctctgaaggaataaagtctttcgacatagatgtacaaaaactcagttggctgatgcttgagattagatgatgatatctttatgactctccagctaagggtttattcggaaaaatgtttatctatttattgttatgccagatgggtttcagttttgctggaaaagctgtttacactgctgcgtgggttgctgctgcttcattgtttatggaactgttaggcttctctacccaaaaatggctaacggctgggggtctggggacagtactgctaactcttgctggccgtgaggtgcgttcatctctttgtggaaaactttggcatactaaatcgtttttacggtgggaaaattattccttttgtggatggtgcagatacttactaactttctttcaagcattatgattcatgctacacggccctttgttctgaatgagtggatccagaccaagataggaggctatgaagtttctggcacagtagaggtctgttaacttgtcagtttatctttgttaaatttatttttcttgttcgtgttcacgtcactagcttcagataggagtcttctttttgacatatgaactgtgttccataaatgacacttctttttcagcaagtcggttggtggtcacctacaattatcagaggtgatgaccgggaagcagttcatattcctaaccaccagttcagtgtgaatattgtgagaaatctcactcagaagacgcattggcgcatcaaaacacatcttgccatcagtcatcttgatgtcagcaaaattaatgtaagcaataatagactagtttacaaggtcttacacccctgcactctcttggtcaatgtggcaagttattgtatctttttttcaactatacagaatatcgtggctgatatgcgcaaggtgttgtctaaaaatcctcaaatcgagcagcaaaaaatacacagaagagtctttctggaggatatagatccagagaaccaagcccttagggtaagaaaatatcttctatcaacatccaatatgtctgtttcacgttaactcagatttaatatctatatctgatatttttgcagattctaatatcctgttttgtcaagacttcacgttttgaagaatacctgtgcgttaaggtatgttaaagttaactgaatacacacttttcatcacatgagtgtatctctttggctgctaagttatatcattcaaattatgtgtatttaatcataccacactaggagtagtctgatcaactattttgacatgtctcattttcatcactttcccaagacattgttttgtgtgtgctaatgcatgtgtacttgagtgcatctccgagcatatgttcccgtgggcacatgtgtttatgtgtttgtatgtgtatgtcccaatgtcatgaccttatgtgatagaaatttgtatctttgaacaggaagcagtgctcttggatcttcttactgttattaggcatcacggggcacgtctagcaactcccattagaacagtacagaggatgcgtaatgaggctgaggtggacactgcaggattttcagacatcgttttcaatcaagcagcaatgaaccgccgatacatgctgattgagccatcttataaaatcaacagcgatgacaattcaaagtctccctcacccagcccagggcaaaagtcacccagcccagggcaaaagagtgaagaaagggaccttcaagaagaaccatcggaaaccaaggccgaaacagaaaacaacggatcggtgccggtttcaaatgccaaaaaggaaaaccagaaagcggctcttggttccaactccaatacaggcactaagggttcatcaacctcaacatctgaccagccagtagcacaaaagtcagaagaaaagaagaaagagagcgtgggagatccacataaagcagagaaggatgaagtttctgatgacgaagctacaatagagcagacactgaaatcaaaagcaaaacaagggagcgagaaaaacaatggagagtcgaaagctcgagatggtggtgggtccggtactagttctttactggaggagaatcttgttcttggtgttgcgttggatggctcaaaacgtacactcccgattgatgaagaacacaaagcatctggtgcactaatggattcagaagaacttggtattggatcagaatgagtagacggagaagagatataaagaaatttgtgttctaagcaatttaatgcttctgtagaaagtaacaaacagaaacggagaaatgagcgcgactctctgttaattttgtaagcatagaggtttgcgccatttcatctctgtaaataatactagcgattcaaaaactgaaaagtagtttgtttcaagtgactagtttgagatttttcgtgttttgaaaattcttaaggatcaaatttgattatcttaaatcccacggaaacacttcaaaaagatatatacc

SEQ ID NO: 140081 - DNA, 1931 bp, Arabidopsis thaliana landsberg
gttttgcattcgaattgagttcctcctcggagcagcgtcaaagtcaacggccgtctgattcttgtttatctcctaaacccaaaaacaacgatttcactgtcaccgttgtcaagctcgaatcacactagccgagacgatggcgagaccatcgatcgccacgtgtgatccaagcgcacgaccttgtttagcgacgcgtggctcacttcctcgtagccgtacatgcgcgccgcttttattcctctgcctcctcctaggtttaacggtcttttgtgcggacgcaaatccttctgactcgaagcttctctgctcccgtcttcttccatgtgagccttctattgaaatggtgagaaattgtaagaatctgtggaaactcttggaccggaaagtgagtgttccttgccgtaagattacaactttgacgaggtaaaagaaaatctatttttttgtattttttcaactttgtggttttagacagtgagctgatgttatttacactgtttatgatcaggacagttactctaactgaactaccagataagactatggaagctaagtgtcttcagggcatgtttgagttgattgattctgcattcttcaatgaaactaaagtaagtcttttgattctcttaacagtctgttaatgttctgtaatgattcaaggaatcacctttctacgtttttacctgattggtttgaattgatttagatttgttcatttagatagccattttgggtttctaaatcatactttgagtaagaaagtgtatgttttacttatcagttatgataatggagttttgatgtttgtgattggtctatatagctacaggagattgcaaagggggctactgaaatgaatgttcctatatatcgagccacccggaaactagtagctactaagaatggtgggttggaaaatccatccccgttggtgtttaatccgtcttggaacagagaagttcaacgagtgcaagacaagagattcaaatacccttcggcatccggagtaaaactccctagagatgaagaagatatcgccttcatgagcgtaagtcatcactcttttttatggttgttatttcgatagactggtctattcgtctaactagaggaatgcattatggcaggttcttgaactcggagaacttataaagacgagacaaattacttccaaagaactcgttcggatttatcttaagcagttaaaacggtaagggagcttccattttcactgaacgtttgcagggaattttacatgatgctgattttgttaatggtgaaaggtacaatcatgttcttgaagcggtagttacttatactgaagaactggcatacaaacaagccaaagaagctgatgatttactctctcaaggaacttatcttggtatctttctctagtgccgtatagtctgtttgatggaatctctaatgccacatacaaatctgtttgatggattggtgtttcaagtttcttactatgaaatttttgtgcgtgataggacctcttcacgggattccatatggtttaaaggatatagttgcagttcccggatataaaacaacttggggttcaacttctttcaaagaccaatttcttgacattgaagcatgggtttacaaaaggtcctgaaaataaaatttcactatgttcattgattttcctttttgctgtattggagttacaacgtccattggacacttggtttttttggttgtttagattaaaagcttcaggtgcagttttagtagcaaagcttgttacgggttctatggcttatgatgatatctggttcgggggacggactaggaatccatggaatatcgaggaattctctaccgggtcatcagctggacccgcaacatcccccccggctggttagtttttattttagaaataagtgtcaagattacgtttcagtctggctatagct

SEQ ID NO: 140082 - DNA, 1281 bp, Arabidopsis thaliana landsberg; identical to SEQ ID NO: 61018

SEQ ID NO: 140083 - DNA, 2914 bp, Arabidopsis thaliana landsberg
aggtaacttaaagaaaccaattgagtgtggtttgtgtcttctttttgaaaatacacctttctgccgattatcaccttttgttattagtaacatttcttattattgtctacaggaaaagtcacactatgctttagcagcattctgtgagaacatgggagaggaaattgttccgctgcttgatcatttaatggggaagcttatggcagccctagaaaatagtccgcgtaatctacaagagacatgcatggtaaactgacaatctttgccagagtttcttttgaactggtgtatctgaaatattgatttaagcgtcgtgctacttgcttgcagtctgcaattgggtcggttgctgctgctgcagagcaagcattcaatccatacgctgagagggttctagagttgatgaagtttttcatggtgctcaccaaagacgaggatcttcgtgcccgtgccaggtctactgagcttgtagggattgttgcaatgtctgttgggagaaaagggatggaggccattttgccacctttcattgatgctgcaatatcagtaattgccttactatatatttatattctgtatctttgaactatatatgctattttgaggaagaaagagctcacaatcacaaaataccagggatttgaattggagttcagtgagttgcgagaatatactcatggattcttcagcaacgtagcagaaatattggatgacacttttgcccaggtgtgcatacatttctttcaaatagacttcataatactccagtgattaggtttaaagtaaacatagcgtttttcccgcagtatttgcctcgtgttatgccattagtatttgcttcgtgcaatcttgatgatggatctgcagtggacattgatgagtcagatgatgaaaatgtcaatgattttggtggggtatcctctgatgatgatgctgatgatgagcccagagttaggaacattagcgttagaacaggagttttagatgaaaaggcagctgcaactcaagctcttggcctgtttgcactccacactaaatctgcttttgcaccgtatccttcaacttccctttaacggttgtttcttctttggactttttacaagaaacctttttatgcctccttaactaacttataagctacctcgaggaatcattgaagattatggacaaacattctgcatattttcatgaagatgttcggcttcaagcagttactggtttgaaacgtgagttttcaatctattgattattcaatattctgttccattaattgtcattgtttatactgggtgggaactatgttagtatttaaaagcttacctaatctatgggttagacttgataatgattgtggcattacagcttgtcattctaatttgaattgcagatatattggctgcagctcatgctatcttccagactcataatgtaagaacttgatcatgcatatatcgaatctcaatcctatctaatttccagccatggtagtttcctttttcctaatgtttggctcttttgtaggatggaactggaaaggcaaatgaaattcttggtaacacataacacagcattttttctcattaacacaagaatgacgggaagatattgaaaccgtttttgtccatcgcagatacagttatgaataattatatcaaaactatgactgatgatgacgacaaggaggttgttgctcaggcttgcatcagtgttgccgatatcatgaaggattatggttacccagccattcaaaagtgtgggtatctattcttgttggagtcaatttgatgtaaattattttcaggatatttaaatgatccttactcatgtatcatatgctgacaatggttctagatttatcaccccttgttgatgcgacattgctactgctgacggaaaaagcagcttgccagcagttagaagatgagagtgatattgatgatgatgatactggacatgatgaggtcctcatggatgcagtttctgacctccttcccgcctttgcaaagtgtatgggttctcaatttgaacctgtctttgcccaattctttgagccgttgatgaaatttgcggtgggtattagtgaataaagtattcattgacatatcttcttccattgaaacttaggcacttactgtttcacttcttgtgtctgtagaaagcttcacgtcctccacaggataggacaatggtagttgctagtcttgctgaggttgctcaagacatgggtcttccaatctcttcctatgttgatgtacgtttcctcatctgatgttctctatgattggtgtttgagccttattaaaccaactattgggggtaattctcttgcagagattaatgcctttggtgctcaaagagttggggtcaccagaagcaaccaatagaaggaatgcagctttctgtgttggagagctatgcaaaaacgggggtgaaactgctcttaagtatccttttcgtgttacatgcttcaactctactctagtcgtaaagacttttatccattgatttctatgctcattcatcgtccttctgttttggaagaatatgagaattgtcagtccatgcgatacttgtctccctttgactcaataccagatattttggtgatgtgctacgcggaatttccccacttttcggggattcagaaccagaccttgctgttagggataatgcagcaggtgctaccgcaaggatgattgttgttcatcctcaactagtcccgctaaatcaagtatgatctaggagctaggccattttcatgtatttttgcttacttcctgaaaccttatgaaacacggtactcatccctaagttatataatccaggtacttccagtgttcttaaaaggtctacctctaaaggaagatcaagaggagtccatggctgtttacacctgtatatattacccttgtat

SEQ ID NO: 140084 - DNA, 3189 bp, Arabidopsis thaliana landsberg
atttactctcatcctcatcatctctcatcatcgagattcatagtctcttttgccgcttggattcttccaaggttagtgagctgctatggcaactcatcagcaaacgcaacctccttccgattttcccgctcttgccgatgaaaattcccagattccaggttcaatttacaccttctaatcattatttcttaatttttctttggtggattccatgaacagattctcagtatttcgcctggtgatgaactactgcgattgcataggatttttattgaactattattgatgatgaatgttcaattacaccaataccaaattttaaacctagaaaagattgatccttatgatctatatttatttgatgatatagagtaatacatagtaggatttctactaatgttattattgatgaatgtgtttgttacagaggctactaagcctgctaatgaggttcagcaagctaccatagctcaggatcctccaacatctgtgtttaagaattctgaaccaatacgggaggatcaaattcagaacgctatcaaattcctttcgcacccgagggttagaggctctcctgttatacatagaagatcttttcttgagaggaaaggtctcactaaagaagagattgacgaagctttccgccgtgttcctgtaagcttcctccttacttcttttgtttggagtctttttccattcctattgcttacctctctgtgaaaaatcttaatcataggatccaccaccaagttcgcagacaactgttacaacaagtcaaggtaaacagcaacgacatgtatttgtttgtttgttcctttgattactagactgggaggtaattttgtatgaattgttatgtgacaagcagatggacagcaagcagtgtcaactgttcagccacaagctatgcagcctgtagtagctgctcctgctccactcattgtgactccacaggcagcttttctctctcggtttcgctggtaccatgctattcttgctgttggagtacttgcagcctctggtgccggtacagctgtttttattaaggtatcatgatcctgttctccatttatatgcagtgtactgagttttttatgttatgaatttactttgtacactggatagtttttagggttacttggcatagtcctctaaagacgtatttagtgggataaaatggttaggccattaagaaaatggaagcagactatataggaatttggcttatctaatcaatttcattcctctgacactcgaacaccagaatatagttgccaagaactttcatgaaaatattatccgtaagagtttgttagggtgttagaaagttgttaatccctttctggcttttactgattgctgctagatgtgttttaatgctccatgtggaatgcaactttatagtatgaatctcccttcttcaaaatcaatatcttattgaagtgagatttgttcttgtttcagagatctctcatacccagatttaaatcctgggtccaaagaattatgttggaagaagaaactgaccctctgaagaaagctgatgctaaacctagcttagctgaagaagctgtagctgcagccaaagctgcttctgcggctgcttctgatgtagccagggttagtcaggaaatgatgataacaaagaatggaggtagatatatttctgcagcttatattgtagactaattttgtctctttttctgtgatcatttctggacttttcttgcttgttccttcttttcctctaaattaaattatatacattgcttcctgtcagagaggaaatattttgaggacttaacgcacctgttaggtgtccaagtacaagaaatgaagtccttgagcaataatatccgtaagcttgaaggtaagtattaagctttactgaaacagagatttggtcttggtctggacaactcttatcgggagtcatggagggtctagttaccttaatatttggttgatcttaagatccattgttaaagcttctcttacttactttcagggcaatccaacaacatcccaaagatttattcagctgatcaagaggtttataatggttcggtcactacagcaagggtgagtttataggttttggtttgagtaagctttgattcatagatttgtttttttgtaaaggtgattcatagattatataggattataaacacaaagaaaacccaaaaactatgtatcataattcttttggtaacattaggaaccttgatatgtgatgcagaaaccctatacaaatggcagcaatgttgattatgacacacgttcaggttattatctctctttttctctgcctcaaactgcattatgttttgttgtttttggttagcttattttttctaactaatggacaatacagcacgatctgcatctcctcctgcggcaccagctgattcgtcggcgccccctcatccaaagtcatacatggatgtaatgttctgaaatccctcaagtttgctgcagaatcatggatttataataaatcttatcctttgaattcctaataatctttgtaacatttagttgattattggtgatgctgcagataatgtctatgatccagagaggagagaagccttcaaacattcgggtaagttgaaaactacaatcctttctcgccccatttctagactaacaatatagttttgtggtgacaaacttatggcactttcactgaaatctacaggagattaacgacatgccgcccaatccaaaccaaccactatcagatccacgcattgctcccaaatcaaaggtacaaactgaaaatgtccctgaatgttaatctaaaagtacattatttgtaaggaatcttggtcaaatttgtggaactgaacttattattaagacttcattaaactcgtattctctcttattaccagccatgggactatggtcaagcgccgcaagacgagagttccaatggtcaatggtggcaacagaaaaaccctagatccacggatttcggatacgagacaacaacagcggcgcgtttcactgctaaccaaaatgaaacaagtacaatggaaccagcagctttccagaggcaacgatcatgggtacctccacaaccacctccagttgccatggcagaagcagccgaggccattcgccgtcctaagccacaagctaagatagaccaagaagcagctgctagtgatggccagtcag

SEQ ID NO: 140085 - DNA, 667 bp, Arabidopsis thaliana landsberg
  unsure (1)..(667): unsure at all n locations
ttcaccctcggagcttttcttgaagcagggattcttctaatcattaatccctacttctttctttcttttttgtttgttctcctttgagatctatctagtactagtagtaaaaccccctcccctccattgaatttgaattgaattgannnnnnnnnnnnnnnnnnnnnnnnnnnnnnnnnnnncgacattccttctacgcctgggaaattcaagatgatggataaatcccccttcttcctgcaccgtactcgttggcaatcctccgtcgccaagcttgccttttggtcccttgtctttttcggattgctcttcatcttcttctaccgatctcccatctccaatcccgattcctctcgccgctctcttcgcacctactcttggggcggtcccgcctgggagaaaagcgaccgatcctccgctagtgtccgcacccgcaacggcgtctccgttctcgtcaccggggccgccggtttcgtcgggactcacgtctctgccgctcttaaacgacgcggcgacggcgttctaggcctcgacaacttcaacgattactacgacacctctctcaagagatctcgacaagccctcctcgagagaagcggagtgttcatcgttgaaggagacatcaacgatctgtctctcctcaagaagctcttcgaggtcgtccctt

SEQ ID NO: 140086 - DNA, 2047 bp, Arabidopsis thaliana landsberg
ttacattaacaccaacaaattagtgattcatcgtagatttactaaaaaacacgttatctctcttcgagaaagcccaagtccatcatcacttattgggccgagagatctgagtgcgagtttggggttacttaacgatccaggaaacccgaaagtgaagtcggtcatgagggtggctgagacggcggtgttggcctctgatccggcgaatggtggagcttacttggcagggatggccacggctcaggacaaaaccggtgatctcaaggcacgtgggtatcacgtggtgctcgggtcaaccgatgtgtcgctgtacaagaaggctgtggttgatgaggtcaacgcttttaaagcgtagtgtcggaattagattagagtctgaataaaacgggaattagagtgctttgtaataagtgatgagtttatgtaccccatgattatcttctactttgttagttatgtctactactttgttagttatgtctactactttgttagttttgacttttgagcaagtcttgttaagattcgcattatccgaaagaaaatttaaagccgcattaacagtgtttagctctggtgttactaaagaaaaagtgattatgcgggtcaaacacttctcaaatagtttgctttgatttctttggagaactgaaatgcatgccgtttcgaaatattagaatgcatgtcgtttcgtggatttcagtaccagtaaaggctaatgctgatgcatcgttgcattttaaaaatcgtgtcgtttttcattccgttttagtggccactcttcgcaaccagataagaactcgaagattttctttttctttatcaaaatgcaatctttatctctgcaatcgcttccatggaaaccaaattcagtgactttacctgaaatttatcttttgaatcccaagcaattgactgcatcgagttctcagtatcgtagaactcgaaactggagaattagaagttcgtcggaagataatgtagcaatttcgagtgacggcggagatttgaagaattctctgtccggtattgtgggaaatcaagtggaggagctattgagcagagaagagaacaaaggtttgcttgatggtctggaaaaagcttcgttgagagtggagattgcgaagagagagctcgaagatatagagagacaagaaattgaggcgaaattgctacaggattatattaatcagctcgaatcaagagccgctgaggtgagagcttgttctcgaaatggtgttagatatgaaaatgattgaacatttgattcttttgctctttggaatttgaggtttttgggaggttctactatagagtatagattaaggttgcattgagaatgattggtttatattacaatggactagtgaatttgtgcagtatatatttatatgccaggataagctcaagttgtgcattgtatgcttaggataggataggtaattcaaagtatcaatcaatatcaatggtgttgcttttgtgcttgaaacctggaaatggggtttctcttagtttgtgtgaaggtacttcattagataaggttactaactaaatcatgagtttggttgcattttgtgttttctcgtgttttggaacaaagtctctagtttggttttgtatttgtagacagagcatgttaatcttattcaatatctgattcaagattgcagaatgccagcaggagattgacgcagcaagatcaatggttgaggaagcagaacgctccttgtcattagcagataactcgacaattggaagttcggagaaaggttattcgattgataaagacaaggagaggttagaatctgcaaaagcggcagtgatcgcagctgcggttgggaccattgcggaactcccatttgctctttctcaagtcgcaagcatggagcagcttgttctgcccctgggaatagcgtttgcaagctgtgcattgtttggagtcacattcaggtatgcagtcagaagagacttggatgataatcatctcaaatccggatccgttgcagcttttgggtttgttaaaggtatcaacacatttcattactga

SEQ ID NO: 140087 - DNA, 617 bp, Arabidopsis thaliana landsberg; identical to SEQ ID NO: 18560

SEQ ID NO: 140088 - DNA, 2937 bp, Arabidopsis thaliana landsberg
  unsure (1)..(2937): unsure at all n locations
cacactctcatcaaaaaccttctcttcggttcagaagcattcaagaatccattatgagctcatctgattccgttaataacggcgttaactcacggatgtacttccgtaacccgagtttcagcaacgttatcttaaacgataactggagcgacttgccgttaagtgtcgacgattctcaagacatggctatttacaacactctccgtgatgccgttagctccggctggacaccctccgttcctcccgttacctctccggcggaggaagataagcctccggcgagcgaaggcgagtggctcacacgcgccgaggcagaaggggatgcagtacagaggagtgaggaggaggccgtgggggaaattcgcggcggagattagggatccgaagaagaacggagctagggtttggctcgggacttacgagacgccggagacgcggcggtggcgtacgaccgagcggcgtttcagctcagaggatcgaaagctaagctgaattttccgcatttgattggttcttgtaagtatgagccggttaggattaggcctcgccgtcgctcgccggaaccgtcagtctccgatcagttaacgtcggagcagaagagggaaagccacgtggatgacggcgagtctagtttggttgtaccggagttggatttcacggtggatcagttttacttcgatggtagtttattaatggaccaatcagaatgttcttattctgataatcggatataattagttttaagattaagcaaaatttgtccaacgagttttgctgtatgaaatatctatcgatgactcaacaggttttgatcatgatcatatgtaatgtgatggaaattaaatattgacgtttgtttttttcttctaaattcggttccatagtaaaacttctataataatctattttcttatataactaggaaaaaaaagatttcaaatagagcaagtaacaatcaatgtgggatgtattatatttctactaatcatgggcttactagtctatttagagcatgcccattagttaagaattaagatagtgngatgtatcatgtagggatacataggattngtgtttttattatcgctttgtcacggctagtctttttccatttgtggaatctgctgagtgtttgaattgtcagcattggaagattttaggaagttggataggcttatcttgagacatttatatagttagttattccggtttcggtttgaaacaaagtcattacatgatgtggaagtcgaagttgatgggttgtcatgatggtatgtaatgtgatggaaacacaaagtctgctcttggtgtgaaactaataatgatatcacgaagtaccatcatagaatccagaacacgtctttctttccctatataagaatatttagattatcacccaaaacaatattccaaaatacaacatattgtgggaagagttggtaaagatggttgtggcaacgtcgatggcaatggaggtagtcccattgttgggataggcagatttgggatttgaggaagaggttgttgttggagaaggcggcgtgaggctgagcaagtgttgatcatcattgaggaagagacgctcactaagaaagcaatgagaaagagcttgtatgatgccattttggatgtgttgataaatctctaactatggttaagtgggcctagtgatgttaaaatgggtttcactgcccatttaattaaatgggtatgttgttaaataaatagtccatttagacccatttataaaaaattgttttaattggttaaatgggttaacccagttaagcccacttcctaaatgggttttctcttaaataaatggatagcccatttatttctaacctaaagaacaatttgcagagacacagtgaacaatttgttgcgtcgctaatcgaatcaatttgctgagattttgctgagaaaaaaactctctctccaattcactcaggtaaaggaacaagacccatctttcttcttccatcaattttgttccagacccaattttgttccaaactgggaagtgacgttttgttttattaatgagtaccaccaattcttcttccatcgttttaccttttttcttaattagtgaagttttgttttggacttttgggctacatgaggctttcttattagtacttctcaaatgattggtcgtatttagcatgattttattagtatttcttatatttcaaactcaaaatgttatttattggttttgtttgtttggtttcttttggtttcttgatagaaacaggtttgttgtgtttaagtgttttatatgaattgaaaactaaagtaaagtggtttcttgatagaaacatgttcgtgttttttgagtcttgagtcttagttttgtaaactaacgttagtgcttttgtttctctttttttcagaatggatttagagtctctacaaacaattgcatttctcaatgcacaaaatgacttaatagacatgaatgaggaagatgcagaagtgcaagcaccggagcaaagtgaaacacaaattcagccgactcaaactcaacaaactccacgtaagagacgcaaaacttcaaatgtttgggatgatttcatttcagtagggttagagagtgatgaaaaagaaagagctaagtgcaaacattgtggtacaaagttggtgataggttctagtagtagaccacatggaaattatggaacaaatcacttaagtcgccatttagagaagtgtcctaannnnnnnnnnnnnnnnnnnnnnnnnnnnnnnnnnnnnnnnnnnnnnnnnnnnnnnnnnnnnnnnnnnnttatctatcatgatttaccgttttgatacgtagaatatgagaaagttcgagcgagagacaaatatttaaatccggattatcagtctattttgaggcaaactgctgctgctgatgtttttgtgagatatgaagtagaaaaagaaaag

SEQ ID NO: 140089 - DNA, 3385 bp, Arabidopsis thaliana landsberg
atggacgtgcagttgaacaaggaagtatacaacaacctactgtgcccccaactgagaaatccatggtatgcaattgtttgcaagaaaaaaatgtattgaatcacattccttcagacttttgagcttaatggaactgttcttctgttgaatcatagcttgaagcagcacacgaaagagagaaagaactgctccatgacataaccgacctgcaatggaggtaactatcgaaaccatctccttgtatagtttagattaaaatccatcattctcacttgtttttgtgtgtgttcataggctcatttgtgcagaagaagagcttcagaaatacaaaaccgaacacgcccaagtaagtatgagtaactaaacacaatcgttcttatatgcaatcttttcaattccactatatgtcaaagatcagtaaaactcatcacttgcctgttaaaattccaggtttgatttcctaagaagcctgagaagatatgtgcttaagtaaagaagtttgatttcatcatcaacaataagtatttttaataagataatacatctaatgaaggtaagatttgctttcagatgttttgtcatttgattcataaaatacatcactccctagtccctactatcattctgtgttatcttttttttttttttttttaggtttttaggtttgtttaaggaatatgtattatgtaccatggtagctatttataaccatggttacataaggatttgtgtaatattgatgatacaaaaagcgttattgagaaacattttcgtgagatggtgattaaaaacatagcatcttgataaactaatggggtgtatgtgtttttggatgcgtgtgaatgaatgcatctctctctctcaacaagtcagtgggacaactaaaacttgtcgtcgtgtcgcattggccagcacacaatccgtgaattctattacagtcataattgcttctcttttaatgctgctcatatgtgtacatctttatttatattttgtgttatagattagatgcttataccatatatatgaagatgtgattaacataggttgttcaatctgtataaattaaaacgatttaattcataccaaaattgaaaaccccaattggttagtaattatgtacttcccaaaaggccaaatcaagtaaacaacacattagatattatcaacatttatttgattttaaaatttgttaaaggttaacacaagtggatacttcaattatatcattttttggaagaaagacaaaacggagttattatatttttttccaaaacttggctggcttcagaaatcagaatttaggtttaataaaggcagaaaaggacttgtggctgatcaattgtgaatacttaactaaccattaattaacaatcaaattcgaaccattacacacagacagacgacaactttgacacgtggcaaaacgtaattgggttattttcgggtgaaatggatgatacgatgcagccaagaaccaaattttcccacaattattattgttcagaaaagaaaagaaaaaacactcaaatgaaagatctcacgtgcggaaccaaactatgacctttgtctgaccattgcgtttctctctctctctcaattgttctatgaactttttttggtaattctctctatccagaagtggagttagtagtaaacgttggtctttgttgtgggtctgaaagtattagcgtcgctgtttccaagtaatcctaaatcagttcacaagaatctgatttgaacagattgtgatgttctgttttctttctcttttttccttttaattctcgcaatatgcaaaagtatgagtctttttacccgagaaaatagcagttttcccgagaaaataaaccagaggtccctaaagctaaagctaaaactaaaagctaaagtagtgtggattttctagatgccaagtttcgttttttgagccttttaagctcttttctggatttcgtttttctcgtttcgctctattcttcgccgagcaagtaatcattgccgacaacccccagaaaaatcgtagatttcttcaatcggcgatttaaaaaatttgaactttttctttaaaagctttgagctcttttttcttcggattattttcaaaatgggtctgtgttattcagtagataggactactgggaaggaacctggagaagcaagctccaccgccactacggcggagactgtggaggagagatcaggctccggaagatggcggcggccgagagatttaaagggtggcggcgatatcgaagggattccacaggttttgggtcgtttggtttcgaatggttcaagtaagattgcatgtctttacacacagcaaggcaagaaagggactaaccaagacgccatgctcgtctttgaggttcgtttcttttatctttccaaaaattcatcttttttgcaacccatttggattttatcaatactcaagaggacaatttcagggtattttggtggagaaatgttgttcaatgtatgaggaagctacttgatttgtttggatgtgttttgttacagatcaaatggatcttcagaacatgattgcattaatcttttgttgctagtgcttagtaagagagagagaaacttggaatgattcatcacttttctgggaccattacaaagcttagtgctttgaagattgaggtggctttgttttgccatttgtgttgttcttgtgctgtcttgagtctttgacctgtttctacagggaccactagttacttgacacttagattctatttctgcttacttccttttgtgttacattcacatatcaagacaagtttctaacttatgaaaactacttcactttccagaacttttgttcgagagacgatacagtgttttgtggtgtattcgatggacatggaccatttggtcatatggttgccaagaaagtccgagatacattgcccttcacactcttaacccagttgaaaatgacctcagagtcagatcaaagcagcttagttggtgccaatggttttcagatcaaatgtacagaggaagaagaagtgcagacaactgagtctgaacaagtgcagaaaactgagtctgttactactatggatgagcaatggtgtgagttaaatccaaatgtgaacaacgatgaacttccggagatgtatctgcctcttaaacatgcgatgctcaagtcttgtcagcagatagataaagagctgaaaatgcatccaactattgattgcttctgcagcggaacaacttcagtcactttgatcaagcaggttctcagcttagatctgcttgtaaccaaaagaccatcatcgattgtgtattaattgctgtaaatggtcataatgaattcttttagggtgaggatttggtggttggaaatattggtgactcgagagcc

SEQ ID NO: 140090 - DNA, 1731 bp, Arabidopsis thaliana landsberg
gaagacccaagagtcccaagaccaagggctgattaattaatgctgttttaaccatatgcatatcatggacacactttgttctccgagtcgactcgttctggtcaccttcttcctcctctgcttctttgccggagattcatcggcgacgaggcctggtttcatctacaccagacacagaggacgatgcacgccgcagtaaatcaatcaatcttgaatttcattttctttacaaaaatctttagctgagtcatatctcaactcgttggtggtgtttttgagcaggtattggagcagccagagggaagcatggccgaggatggtacctgagagatcaaccgtggagaaaatattcggagtgatggtagcaaaagaacggtggagatctgatctaacgctagtggaatcaacggctaggaatgacgaagaagggaacgcgtacggtgcattgctgaaacaggggatcgcagctctgatcaactcttacgcgagaaaaagtttctcttatgcaccatgggaagtgaagacgatgctgatccaagccatggtttcggagtcggcggctcgccggcaagccgaacatttcgccgtcgctaacgttgcttgtgactaaaaacactgagacagttacttttgtcgtctttaggttttgaatttaagctttttgtcgtgtaaccaaagtttgattctgatcagtttgctaatagattatgggcctccgaaaggcccaaattaaacacagaccttgagcgctttgtagtgtttgggaacgactcttcttatatactctctatttacttattaacccgactcaggatatgtatatccgtctttccaaacaaatctttaaaatatggtacagattcgaatctaatcccctcttcttttgtttgtttgtcaagtaatttttttgaactttccattttcttccaaacaatataaccagaaatatgtttttgtatcttaatcattctcgaggaccgattcttagggcttttgctgctctgtttcttcaaatcttgtttgtacaattcactacgaagaaggttgttctaatggcgattagaaagataattcgagatttactgatcacaaagcagcctcttttacgtcaactattccaccaacgagttctggtgaatattttgttctttttcttctaactagtttttgtgattaggatgattgatttagtaactctgtgtttgatttagagagcaaacgcaagatcagagtttcttcctgctattgggtatacgagtcatcgccggttcagcgttttcaccgagttctcgaagaatattagaggagaagctcataggtaatgtgtatttgttatgtatgtgaggcatatgaaatttgtaatcagtggttgatgttcttagttcaatttttgttaacatggttgatgttgcagcaatcctgaatttcaaagaacagtaaaggagctcaaggaaagaacagaagagtttaaaggtgtaacagaggacctgaaagtgaggtaagttaaacatttgtaatttgaatttacttaagagttatacacttgtatgtcaatggaagcttatgaatgaattggctattgcagaacgaaacaaacgactgaaaagctttacaagcaagctgatggtgtgtggactgaggctgaatctgcggccaaaaaggtatggttcttgttcacgagcctcgaattggcacgctatctgtcttcgcttgtttcgtagatttgatgct

SEQ ID NO: 140091 - DNA, 345 bp, Arabidopsis thaliana landsberg
gaagagaatttgcgcgacaacaacgatcgatcagtcgtcgtcttctcagatcttgttcttcaaaggattctatgccgcaagagcttcgattgtatcctctctgaggattgggtaatacccaatgccatggataacaatagcgagcgcaaaggaaaacgaatcgataaggataatattcgtgtcaagcggaaaactttgcaagctttgctcaatgattgccagagagccctcgagttattaaacttagccgaagtcagttctgaagacgatgaagatgataaaagcaccggcgagggaagtgggtcacaagagagcaggggagaagtttcttcttccgatcgagaa

SEQ ID NO: 140092 - DNA, 695 bp, Arabidopsis thaliana landsberg
ctgtatatgtaaagcgggcgttatctccctaacttcactctcttaccttgcctcttgcttcaacctcctaagcacattcttatctctttctgaaacgagttcccaaattagctctacaaaaaccaggatcttgatttctcatcagttaaacatgggaactcctgtcgaagtctctaagctccatttcttgctcttccctttcatggctcatggccatatgataccaactctagacatggctaagctctttgccaccaaaggagctaaatccactatcctcactacacctctcaatgccaagctcttcttcgagaaacccatcaaatcattcaaccaagacaacccgggactcgaagacatcaccatccagatccttaatttcccttgcacagagcttggtttgcctgatggctgtgagaatactgatttcatcttctccacacctgacctaaacataggtgacttgagtcaaaagtttttactcgcaatgaaatatttcgaagagccactagaggagctcctcgtgacaatgagaccagactgtcttgtcggtaacatgttcttcccttggtccactaaagttgctgagaagttcggagtaccgagacttgtgttccacggcacaggctacttctctttatgtgcttctcattgcataaggctccctaagaatgtggcaacaagttctgagccct

SEQ ID NO: 140093 - DNA, 864 bp, Arabidopsis thaliana landsberg
ttgtgttttatgtgtgcgttcgtgggtaggaactagggcttctggaagtgggaagcctctttacttgacttcatgcctgaaaatagctgagggggtggcctgaactctgctctacatacatcagaatcctggcttgactcatgggaatttgaaatcgtccaatgtcttgttaggtcctgattttgagtcctgcctcacggattacggcctcagcactctccatgaccctgactcagttgaagaaacaagcgcagtgtctctcttttacaaagctccagagtgcagagacccacggaaagcctctacacagcccgctgatgtgtatagctttggggttcttcttctcgagcttctaacaggtagaacaccattccaggaccttgttcaagaatatgggtcagatatctcaagatgggtgcgtgcagtgagagaggaagagactgaatcaggtgaggaaccgacttcttcaggcaacgaagcatcagaggagaaacttcaggcacttttaagtatcgcaacggtttgtgtgaccattcaacccgataaccggcctgtgatgagagaggtgttgaagatggtgagggatgcaagggctgaagcaccattctcgtctaacagtagcgaacattcgcccgggagatggtcggataccgttcagagcttgccaagggatgatcaagtgagcatttagagaaattgggtgggccttcttcattgctttcatagaatgacacgtgtgattcttgaagtagggttcatagtgtaaagcttcttttttattttgtaacgccattttgattcatcgaccttgtaggacttgcataagatctattgaattgagatgctggcattgagtagttgaag

SEQ ID NO: 140094 - DNA, 618 bp, Arabidopsis thaliana landsberg
tcaagaaagttggtactcataatggaagctttcactgcgacgaagctctcggctgtttcatgattcgcctcgtcgataaattctccggcgctgatatcgtccgttctcgtgaccctaaggtaactctaacaatcctcctgaagtagctctggcttaggaaatgagtattaggagattgattagtagctagagattgactgcttaattttggaattaggggtttttgatgtaaatctgggttaattgtgaggaggatatgattctatgttgttgtacggtacatgtagatattggcagaacttgatgcagtgcttgatgttggaggtgtttatgatccggagcatgaccgttatgatcatcaccagaaaggttttgaagaggtttttggacatggcttcaacactaagctcagtagtgctggtcttgtttacaaggtattgtagtgtttgctctcattctcactgatatttctatgaatatgtcaatttcgaattctgaatgttggtgttttactctcagcattttggaaaggagatcatagctaaggaacttaatgtcgaacaagatcaccctgatgttcttcggttgtttttagctgtctacaagagcttcatggag

SEQ ID NO: 140095 - DNA, 519 bp, Arabidopsis thaliana landsberg
gctgatcttgttcggatcgatgcacactccatgtgttcgcctggtttctcttgtgactctgctcttcaggtgacttacattgtgggtggaagtggaagagtccaggtggttggtgctgatgggaaaagagttcttgagacccatatcaaagctggttctctcttcattgttccaaggttctttgtggtttctaagattgctgatgctgatggcatgtcttggttctccattgtcaccactcctgagtaagaacttttctctgcactttcctttttgaggtttgaaattgaaagaaactaatatgtttgaaacttttttcttgtgtgtttgtagtccgatcttcacacatttggccgggaatacatcggtgtggaagtctttgtcccctgaggttttgcaggcagcgtttaaggtggctccggaggtggagaagtccttccgatccacgaggacttcatcagccattttcttccctccttccaactgaagaaggagaagaatgagaacaagaaccagctc

SEQ ID NO: 140096 - DNA, 1151 bp, Arabidopsis thaliana landsberg; identical to SEQ ID NO: 6425

SEQ ID NO: 140097 - DNA, 3292 bp, Arabidopsis thaliana landsberg
atgcggctgggacaggttggttatcaattgctctgtctttttttatttcactctcttgggtcatgaagtgttctgttttacttatatagcttctctctatacatctattaggagaaatcgagttgctaaaggaattgctctctagaggtgttcctgttgattctgaaagtgaatctggcacgccattaatctgggctgctggccacgaccaaaaaaatgctgtggaagtcttgttagaacacaatgccaatgtaaactttgtgtatatctctatttgattatctgtctaaaaccgtactttcttataaacctataacctttttgttgatgactctgcagcctaatgctgagactgaagataatatcacaccgttattatctgcagtggcagcgggttctctgtcatgcttagagttgttggtcaaggtttaacatcttcttaacatcctctagtattgcgttggttcagctgccaaatatcttaaatcagagctaacaaaaaattgttctttttgtaatcacaggcaggtgccaaagctaacgtttttgctggtggtgcaactccattgcacattgcggctgatattggaaaccttgagttaattaactgtttacttaaagccggggctgatccgaatcagaaagatgaggtaaaaccaacttggaaatcagttcatatgcaagaacctgttcccttgttcatatggtacgacatgaatacaatcttgtggtactatactgattctactgtaaactcgattatttttaggagggcaataggccattagaagttgcagctgctagagacaacagaaaggttgttgagatcctcttcccattgacaacaaaaccagaaactgtttcggactggacagtagatggaattctcgctcacatggaatcaaacaaagtaggcatatcagatctttcctggcattagtgtcggatatttcgatattttttgtctgaaacaacttaacattttcaggaacaagaggaaaactcaaacaaggcgaaatcccaagagactgggatcaagaaagatcttcctgtggtacttcatactttgatcaatatgcatttctctttcaacaaattgtttaaagtacttaaagataaccatttttaacttccacaggtctccccagaagcaaaggcaaaagccgcagaagcaaaagccagaggacaagacgcctttcacagaaaggattttcagatggctattgatgcttacacacaagtattctactctaaaacttcttctgaaatcaaaacaagattcttaatttttgcctatatgtgattttgtggtttgtttgaacacaggcaattgattttgacccaacggatcataccttattctcaaaccgaagcctctgctggttgcgactaggacaagctgagcatgccttatctgatgctaaagcctgcagagaactaaacccagattggcctaaaggttgcttcagagaaggcgctgctctgcgtttgctacaggtaaaaagcatctacaatgccactaaaaatctttgatctcttaacgttgaaactgtatgactcaccgagtttctcatgaatctccagcggtttgacgaggcagccaatgctttctacgagggagtattgcttagccctgaaagcaaagagctcattgatgctttcaggttcgtaagaaacacttatggtgttgatttttatcggttggtattgggttttcgagatagatgatgttgtttttttgtctatttcttctacagagaagctgtagatgccggaaggaagtttcacggcaagggtgaggttaaggccaaatcataagatcttcgagagatggtttatgtagtatatgtatgaagttttgatctacttcttacctttgttctcccttgtgcactattcttaggaacaaagttttgtttgtggtcgaatttggtaatttgtccgagtttacagcttagataaaaaagagttggtaatacattagactgattttgaaacttttcttatatttacaaacaaaagtttaattacgaaaatcaatatcaagaaacaaccaaacaaaatctttacttcgtctcaacaataatttttccttcaaggagagctagtatacttgtgttcaagcttaaaatgacatacgaacaacgattgtgtttaatcacaacgtaatattagaaaaatatcgaagttaagacattaaatctgaaaaatagtctacgataaaaagatgaagatatgtcttacaatgacttcaaacctaaggtgccgaaactttagcacattcacacacaaaaatcctaaaaattagcaagtagaacctaacttttacttctttccttgagaaacaagttaaagcccaaactcaaccaaaaccttaatacgactcttgacaccgaaccctaaacttacgactcttgacaccgaaccctaaacatacgactcttgacaccgaaccctaaacatccgccttagcatgaaactcctttcttttgggggctcatctccaccgtttatgtcttcatatcaaagctttaaggtcttcaaagcatcattcctccttgttccaccacgttgtcaattatggcggaaggaaaccttaaataagaatgacacggaatcatctctggcaatggaacactgactctttcgcaacaaaaggatggctcaacagctgggctgcggtggccctacgtgacggctgcaacgccaagcaccgcatcaagaagtcgttggccaccggagatataagtttgggaagcccccacatgtaacagtctctggtcatcactggacaacctccaaacatctgaataaccacacaccctagagaccatatatcaacggccggtcccatcactccatcatgtccaagagattctggtggcatgtactgcagcgtaccaggaaataacgacctagaatccgtagaaggctctttagatgaaccgaaatcagcaagcttaagatcccatggctctccaaaagtggtggaagggaagacgaggacgttggctggcttgaggcagtgaacgtaaccatgtgagtgaagagcgtcgagtccttgtatgatcataagagcggcacctttgataatattctcaggcattggtttcccacgaaactgggagatcatattgaagagagtgcctttggaggcaaactccatatagatgtaacattcttcgggttggatccctaagtgaagaacagggcttgaggcttggacgatgcgaggatgattgtggaaacaaagcatgatcctaagctctttcacgagaatctttatgtgatt

SEQ ID NO: 140098 - DNA, 1271 bp, Arabidopsis thaliana landsberg
gagctctcagagcaaaaaacaaaaaaaaagaaaaaaaaaccctaaatctaaatctcaccttccacctctgtcttttttttttttgttctttttttttttttttactggatcttctcttctctttgctctgcaaaaatctcacatccatggatccatctcttggtgatcctcatcatcctcctcagttcaccccttttcctcattttcccacctccaatcatcatcctttaggaccaaatccgtacaataaccatgtcgtcttccaaccgcagccgcaaacgcaaacgcaaatcccgcaaccgcagatgtttcagtcatctccacatgtttcaatgccccaccctccttactccgaagtaagttcaatcttaaaagcctcttcctttataactaaattcagttacttttttttttgttactaattttttttttctgtgtgtagatgatttgcgctgcgattgcggcgttaaacgaaccggatggttcgagcaagatggcaatttcgagatacatcgagagatgttacaccggtttaacttctgctcatgctgctttgttgactcaccatctcaagactttgaagaccagtggtgttctttctatggttaagaaatcttacaaaattgctggttcttctactcctcctgctagtgtagctgttgctgctgctgccgccgctcaaggtctcgatgttcccagatctgagattctccattcaagtaacaacgatcccatggcttctggctctgcttctcagcctctgaaacgaggtcgtggtcgtcctcctaagcctaaacctgaatctcaaccacaaccactacagcaacttccaccgaccaatcaagtccaggctaacggacagccaatctgggaacagcagcaagttcaatcacttgttccggttccgactccggttacagagtcggcgaagagaggacctggtcgtccaaggaagaacggttctgctgctcctgctactgcaccaatcgttcaagcttcggttatggctggaattatgaaacgtagaggtagaccaccgggtcgtcgagctgctgggagacagaggaagcccaaatccgtttcttctactgcctctgtgtatccttatgttgctaatggtgctagacgcagaggaaggcctaggagagttgttgaccctagcagtattgttagtgttgctccagtaggtggtgaaaatgtggcagcggttgcgccagggatgaagcgtggacgtggacgaccacctaaagttggtggtgttatcagtaggc

SEQ ID NO: 140099 - DNA, 2555 bp, Arabidopsis thaliana landsberg
atggcgagcaatcttctccgatttcctcttcctccgccatcgagtcttcatattcgtccaagtaagttcctcgtgaaccgatgctttccaagactgcgccgttctcgtatccggcggcactgttcgcgacctttttttttagtatcaaactcggtcgagataagtactcaatcatttgaatctactgaatcttcaatcgaatctgtgaaatccattacgagcgacacgcctattctcctcgatgtgagtgggatgatgtgtggtggctgcgtcgcccgagttaaatcggttttgatgtctgatgatcgagtcgcgtctgctgtggttaacatgctgactgaaaccgcggctgtgaagtttaaaccggaggttgaggtgacggcggatacggcagagagtttagctaagagattgacagagagtggttttgaggctaagaggagagtctcgggtatgggagtggcggagaatgtgaagaagtggaaggagatggtaagtaagaaagaggacttgcttgttaagagcaggaaccgtgtggcgtttgcgtggacattggtggctctgtgttgcgggtctcacacttcgcatattcttcattccttgggaattcacattgctcatggtacattgattataatgcaaaaaaaattgtgatgctagatgtcatttgttggataagagatgtagtttatgactttctcttgcacctgatgttactaggagggatttgggatttgctacacaactcttacgtgaaaggtggtttggccgttggagctttgttgggaccaggaagaggtttgcttttgtttaaacttttagttcgaatctatgattcttaccagctaatgcataataagtttagtaattagtatcataagagagagatgacaaagtagtcgttcttaggctattgtttagacttagataagtgctagtgttctactctgattatataggtgagctttgttgaatcagttcttcttatggataatgtttagcttaattgagtcgtcgttgtcataagagagaaactctgaattttcaaacttcttaagtgatagtgatggttcctactattctttgcgactttcataacaaagtggtggtagtgatatttgaggctgttcggaaacacaaatgactgaaacagatagatgtatattgtagaattgctgtttgatggcataaaagctttcgggaaaagatcacctaatatgaactcgttagttggattgggatccatggctgcattttccatcagtttggtgagtttttgtaccctgtaatttatatttgactggtgagtatcctattctgaaaacctgcagtttctgcattctgaattttgcagatctcactagttaatccagaactggagtgggatgcttccttcttcgatgaaccggtgagtttctctagcagatccacaagaggatgaaagctttttattattacttccactacatgcaaaatacagtttcaatagtaaatttctgattgatagctcttgtcatttagtatgcaggtcatgctgcttggctttgtgctccttggtcgttctttggaagaaagcgcaaagcttcaagcatctaccgatatgaatgaactattggtatgttagacatttcttgattctcctcccaagattaacttgtaggctttatcctcccttttttttgacttgaaacgtatttttgcagtcactcatctccactcaatcaagacttgtgattacttcatcagacaataacaccccagtggattctgtactttcctctgattcaatttgcatcaatgtgtcagttgatgatatccgagttggagactcgctattggttttgcctggtgagacatttcctgtcgatgtaagtgtttctgtctttctgacatctaaaaatttccctagttgcttatccatgctgaactgtctgatcatagcaaaagataatagtgtgggtttccgaaaagagttatgaaaatctatctaaatggttggtaaccatcattctgcaattttaggagttctatttcaatttatcagtgctgagaaaaaaacatgtggatctttcagttctttttgagattcagtttaattgcacattcttctctgcacgtgataatggatattattttttcttgctcaagatagcttggttataatccttgtgactggttaatgagtagttctgattctagtagtgatattatgttaaattaatcactttcttcataggggagtgtcctagctggaagaagtgttgtagatgaatctatgctgacaggagagtcacttccggtgtttaaagaagaaggctgctcagtttcagcgggaacaattaactgggtaagtatacgcaacctaaacaaaagttttttttttttaaaggctacttatgtaactaactgtgctcagttactaagttagatttacatacactgatcatgaatctttttgaataactgaatctcactttacctatttcaggatggccctctacggatcaaagcttcttctactggtgccaactcaacgatatctaaaattgtcggaa

SEQ ID NO: 140100 - DNA, 1264 bp, Arabidopsis thaliana landsberg; identical to SEQ ID NO: 10611

SEQ ID NO: 140101 - DNA, 2460 bp, Arabidopsis thaliana landsberg
ggtttataagagtggccctctcttcatatcatcaaaaggtgaactcttttattttccccttctttcaaaattatcttttttttggttacaagcatcttgttgtttactaaattctttatggcattctgattggcaggactaggttggacatcctggaagaagcgttggtttatccttacccgaacttctttggtctttttcaaaaatgatccagtaagtgtttgtgatcctttgatgtgattttttctccaattcatataatacttttactgttgagcttttggaacttaggatagttgatcaatagaaatcttagatggttgtattaatttgctaaaagctttaggaggatgttgatttacattatcaactccaaactttctagaactattttataacttaaactcattgtttcaactgtttgacagagtgcattaccacaaaagggaggtgaagtaaatttgacccttggaggcattgacttgaacagttcggggaggtagaaatttcatgtggtttttgtttataagaatagctccaactttctagcctgcgttaacatccttgtttgcagtgtcgtggtgagagaagataagaagttgctgactgtactattcccagatgggcgtgatggacgagccttcacccttaaggtgatttatatatttgcttggctaacttaatttttaatccccctttttcgatatgtgctatgttatgcttctatcgaatgctaattatttggctctcataggctgagacattggacgacttgtctgaatggaaggctgcccttgagcaagcccttgcacaagctcccaatgcagcacttgtgactggtcacaatggaatattccgaacagcagcaaacgatactattgaagcatctttcaatgcatgttagctctcacttattttattattatcagctcctctgctatggctgctttcatattgctgatgtatatcaataacaccctgacatgcaaggagggatcagcgcccgtagaagtcttcggttgttggaagaccaattttgctagcttagaagaaatcgatggaagtccatcttttcttgagaaagcacttcaatttcttaagacatatggtgagtattggcctcatagtttaattacgttcctcccattatatgttcaccatctgatatcattattgtctgttgtttgtcctctagaaaaataatttttttatattatcttcagtgccgtatatactttttaattccttttataactcatcatataggctattatagaagtggtgattgtttctaatttcccatagaaatgttttcgttttgattgtgcacctctttgttggcacaggaaccaaagtagaaggaattttaatacagtctgcagatgttgaggaggtagaacgcagagttcaagaatacgaacaaggtattgatcttccacatgtggaccctttatattgggtagaaactttgaaatgttatatatatctgggggcttaggatagaagctcattttttgtattacttatccgatgtcttcctctgaaaggttctttttaaatgaaaatttccaaatgtacttatctaggcaagacagaattcagtcctgaagaggatccgcatgttgttggagactgtgttaaggtacattgtgtataaactatgatttccagttttaattgttgtgttgacatatttgtgtcatgctattttttctgtagcatgttctgcggcaattgccttcttctccagtcccagcgtcgtgctgcactgctttgcttgaagcttatagtaagtctttatatgtatggaatctatgtttgtactttggtgtatgtgtgtatataacttgcgttttaccttttctgtagaaattgatcagaacgaagctcgggttaactcactgcgctctgctataattgaaacatttccagaaccaaacaggcgactactactgcggtatgctctcagttgtagtatttgaaatgatcataaaactgcttaggcattctatttaagcattgaacataagaggaaaacttaatactcagttgcatatgatgtgggaaatatgtggtgctttcacagaaagctgcttggaagtctattatttaggttacttaaaacagctttattcttagcgtgggttgtattctgcaggatgctaaagatgatgcatactatcacctctcattccagtgagaatcgcatgacttcatctgctgttgctgcatgcatgtccccattgctcttacgtcctctattggctggagaatgtgatctagaaggttttgacactctaggagataactctgcccagcttcttgctgccgccaatgctgccaataatgctcaagccattgtcacagcccttttggaagactatgggaatatgatcaatgtaagattccatttgccccgttaatttatatctggtgccacaatgctatttgctcacctat

SEQ ID NO: 140102 - DNA, 2417 bp, Arabidopsis thaliana landsberg
atcactctaaaatatctcccaccacataccacttaacccgacccgacccgaccggaaaacccgacccgatccatcccaatgtcaggagctaccaccgcttcctccggagaccacaacaacctccgtctcccaactccgacgcttgacgccgaatcgcaaactctgctgcaatcgatttctgctgaagggggttacgcttatgctcgcatggcggtgttagcggtggccggtgaccaaagcgcggcggaggcggcgcgtgatatggcttgggagcaacttcactctggtccgtggcactcggttctccccgtttggcgcgacgcttactcaatggcttgtctccacgtagctaaaatccatttcgccgccggcgagtttggtgaggcgcttggtgcgcttgatatgggtcttatcatgggaggtatgcttctccgcaaggatcttcatgattctgttttgttggtctcctctgaagctcgtaagatgacgaagagtcttgaagaagcttctggagatttcaaaggtgagagattggtcccggaagttcccgtcgacgtcaatgaggtgagacatgttttggctaatctacaattacttgtaagactcatatcttgaaacctcgataagctctaaatgaaaatggagatgtgctgtgaagagaatcagactttgaattgtttcgtgttgatttagttttgtgttgttgttgttgttgaaacttgcaggtccttaagattctaccttgcaggtctttaacttgtaaaagagtagagaagaggtctggtttatctttggaggggtttctgcgtgattattatctgccaggtacaccagttgttataaccaattctatggctcattggccagccaggaccaagtggaatcacttggactacctcaatgctgttgctggtaaccgcaccgttcccgtggaggtgaaagccatcatttcttcacttagttcttagttagcttgtgagtgttgattagtagtcattaaacgatggttttagctttagttggctcctacgctgctctaagttgccatgtccatatttttttagggttcttcttaagaatgttgaatctcatagagtcgtgtcaactgtatgataaaagggtttagggtctaggtttgaaataagatttgtatctaggttagattatcacataaaatcagaataagaacatgacaatttcacgagcgtaagatttctcatttttgcttcatagagatatgagtcttattaccactatttagtctgagctaataagaagatgggttggatcagaataattttttccgtagctgaaagctggtgaagtttaaaatgctattcaggtggggaaaaactatttgtgttctgattggaagcaagagcttgtgacattttctaagttccttgaacggatgcggaccaataaatcgtctccaatggagcctacttatcttgcccagcatcctttgtttgatcaggtatataagtaccgagatgtttgatgtatatgtttgtctgtactcggtgtgtgtcatactaaacctatggctattggtttaacacgaatgggcagataaatgaactgagagatgatatatgtattcctgattactgttttgtcggtggtggggaactccaatcacttaatgcatggtttggcccggctgggacagttactccgttacaccatgatccacatcataatatacttgctcaggtaactacggtgaaagatcttttccttacgtgagctgagcatggctcttgtctgtgctcgctgtctttaatgctatccaatatatatatatgtatgttctgtaagtgtttaacaacctttttcttctttgatgttcttgcataataaagcctgatcttctcgctggattgaagtttgatgactctttgactaaccaaagaaatcgtttggcctgcaattcatatgtttctagtttacggaaacttctttacttagatgctttctccttctactgaagttttgatatcatctgttcttcaggttgttggcaagaagtatataaggctttacccatccttcctgcaagacgaactttacccttactctgagacaatgctctgcaactctagtcaggtaagctttttcattccgaagtcaaatctcattttttggattaaacatacaaccgaaagctgactcgattcttctgttccaaaactgggtggtttcaaactatggttgaaggttgatctagacaatatcgacgaaaccgagttcccaaaggccatggagttggagtttatggattgtattctagaagaaggtgaaatgttgtacatccctcccaaatggtggcactatgtcaggtccttaacaatgagtctctcggttagcttctggtggagcaatgaagcagaatcttctagctcgtagcgaatgga

SEQ ID NO: 140103 - DNA, 1247 bp, Arabidopsis thaliana landsberg; identical to SEQ ID NO: 16313

SEQ ID NO: 140104 - DNA, 830 bp, Arabidopsis thaliana landsberg
agccgataaatcctcctcttgatatattaccaggatttgaactagttcttcaaaaatatggtttcttatatccaaagagaagtccctgcgaagacccttaagttctggcgtttgcaatcaccaagacatttctatggtggtgattggaaccagaatggaagttgtttgctcgataagccactcgaagaaaaccaggtatggtaacgagctttactaagcaagtctggtctttctctaggctttcctcagagatgggtggcaaagatattcgctttcgatttaatcctattgcattcttataaatgatgttgatgctaagacctagacagcttgacttgtggtttgatcccaggaacaatggagtgaacaaagaagcaagaaagattaaccaaatcatcaagaatgagttgcaaacgacaaagatcaagttactggatctgacccatctaagcgaattcagagcagatgcccacccagcgatctggttagggaagcaggacgcggtggcaatatggggacaagactgtatgcattggtgcctacccggtgttcctgacacatgggtcgatatattagcggaactcattctcactaacttaaaaacagagtgaagacgctatcaggagtcgagaacagagacttgcttgagcatatggaagctcaaatgtcggaaaggttccatcttttggttttaactgtaaatgattcatatctggatgaaattttgttcctttaccaagacatcttctcaaaacacaaacatttaacttgtattgtgtctcttgcttgtaactactgtttccatgaagttaatgtttttgcaattgggg

SEQ ID NO: 140105 - DNA, 498 bp, Arabidopsis thaliana landsberg
ggtattcattgatcatttcattacttaagaagacgatatttatgaaagaggttagtcatgtgagtaatttcacgtaatggagcaggtttcattaccgttcatagttttgcacggtgaagacgataaaggcacagataaagcggtgagtcgacaactgtatgaagttgcatctagttcggacaagactttcaagttgtaccctgggatgtggcatggtttactctatggagagacaccagagaatatcgagactgtttttgctgacatcattggctggttggataagaaagttgctgatgaaagtggaggctttgaatccgagcttaaacgtaaaaatgatggtattcctttgaaagggtagttatcactttaacataaacaaataaaggatagttaaaatctgtttgtctgtttgtttttctctcttttcctgaattctgtttatgttaattagttgttaccatgtttgtcactctctgacttagtgtaatactattt

SEQ ID NO: 140106 - DNA, 313 bp, Arabidopsis thaliana landsberg
cttttcagagagagaaacaatatttctaatctattacaagtaacatgatcggccaacttatgaacctcaaggccacggagctctgtctcggcctccccggcggcgctgaagcagttgagagtcctgccaaatcggcggtgggaagcaagagaggcttctccgaaaccgttgatctcatgctcaatcttcaatctaacaaagaaggctccgttgatctcaaaaacgtttctgctgttcccaaggagaagactacccttaaagatccttctaagcatcctgctaagtaagctacacatttacatatatatatata

SEQ ID NO: 140107 - DNA, 1616 bp, Arabidopsis thaliana landsberg
ggaagaagaagaagatggtgaagaagagagttaatgcaactgcaagaagatagtaactaatcagcaccgtccatttttgtcatctaattctttcttacttggccgcaacttccaaccacatcacacactctttctattcccttatatattcccatctcaaaagttcttggagacacataaacattaaaaaaagaaaaagaaaaaaactataaacataaacgccaatcgcaactttcttgtctttcaatgggagagaaaggtttgaagcggtctggtgttgcggtggtgagttgcattactagccatggttcatgtctctgtttcagttccgttcataatgcttcatgggatctcagctcaatgttctaatgctagggatgctaacttcacacagcttctcactaccctctctggctctcctggcttttgcttgtaagtcaatccacaaaatagtttatgcgttttgataaccaaaagatcgggacatgtagaagaagagttatgtattcttgctatctataagacgataacgtccaaagtggctcaactatgttgatggatttgttctaatgaatccagagaaattggaaatggagttgccgattcatggttaatgccgcttacacgacaagcggaaatagcgtgtgagaaggtgaagcaaatgaaagagttgagtcaaggatacaacattgttggaagatctcaggttcttgatacactttcttgaaaatcctaaaataggttcttgatcattatttacatagtgtttaagtttcatggatgttgattaataatggaacaggggaacctagtggctcgaggcttgatcgagttctgcgacggtggacctcctgttttcaactatatatccttagctggtcctcatgctggcatttcttctcttcctaggggtctttgtggtgtaagctttttttatttttcctcaaattatctaaaacttttatctgtaatttaattttaatcaatcaaagtaacaacaacgattgttttgttttgtttcttttcttttaagttaacgtccgatccagcatgtaagaaatttaatgagttgatcaagggagctctctatagcgagaccattcaagtatatatatctctttctctatatatatcatgattaaagactcaattagaaaataataaaaaatcttcaatgactctgcaggctcaccttgctcctagtggttactacaaaatccataatgtaagtccattcaccatttgtttataagaaaacttgcagaatcaacaaatgagtgattgatattcaaaccacctacatatagttttagcagaatgtatgtagctcgtttatttattctcaggatatgaaacagaacttggaaagatttaagcatctacgtaagcttaccgatgagataccaaaccaaagaatcctactttacaaagaccgtttcgccagtttacacaacctggttcttgtcaaggtttggtctcatcaaaaccatctagacttttcaactatcttctcattcccttcttgatgactctgttttttttttttacagtttcaggacgatgaggttattactcctaatgattccacatggtttggattttatccggatggtgag

SEQ ID NO: 140108 - DNA, 792 bp, Arabidopsis thaliana landsberg; identical to SEQ ID NO: 56664

SEQ ID NO: 140109 - DNA, 405 bp, Arabidopsis thaliana landsberg
  unsure (1)..(405): unsure at all n locations
ttttcaacttttcattgagtcttcggttttcgactttggatcggagtcggggaacatgaatttcgacgagaccgtgccactgagccaacgattggagtggtcagacgtggtcccattgactcaggacgatggtccgaatccagtggtgccaattgcctacaaggaagagttccgcgagactatggattacttccgtgcgatttacttttccgacgagcgatctcctcgcgcactacgactcacggaagaaaccctcctcttaaactccggcaactacacagtaatcaatcttataattcatataatcaacaactatctgaactcttatggttttgaaatttaatggatttagtcttttattggtccttgttgcttcaattnttagtcttaccgatatttttgttt

SEQ ID NO: 140110 - DNA, 1727 bp, Arabidopsis thaliana landsberg
tcagaaagtgatgagatatctgggctagttgaaaaactcccatcccatgcgctacatgaggttgtgtcttctgcgaatgacacgagtgtaattgtaagcgatgacaccaaaagtcaaggtttatcagaggatcatggagttgacactaaccagacaattcaagatgattgtagtgctgagttggaagaagttaccgatgtgaatgtaaaacatgctccaaatgagaaagttcaaggagacaatagcgaggggaacttaaatgttggtggtgatgtttgtctaaattctgctgaagaagcgaaagaattacctacaggggatctttctgggaatgcatcacatgagagtgctgagactctctctacaaacatcgacgaaccattgagcttgttggataccaaaactgctgtctctgactttgcagaaagctcagcaggagtggctggcgaaatagacgctgttgccatggaatctgaagctgctcaatcaattaaacaatgcgctgaagcacatgtagctccatccattattgaagatggtgaaatagacagagaagtcaattgtggttcagaagtgaacgtgacaaagactactcctgttgctgtgcgcgaggatataccacctaaagaagtttctgagatggaagaatcggacgtcaaagaaagatcttcgataaatacagatgaagaagtcgctactgcctcagttgcatctgaaatcaagacctgtgcacaggatcttgaatctaaagtggttacatctactgataccatacatacaggagctaaagactgtgtggacagccaacctgctgaaaacaaagaaggtaataagttaattaaaaatgaaattaggctatgtacttctcttgttgagaatcagaaggatggagttgacagtatatataaattgttgtgttcaggaaatgttgttgatagaacagatgataaagtagcctcgaccggtgaagtttctgtacttgatgcttctgaagggcttactgtagcggcagagatagagaaaagacctttttactttctgcctagagttcctagatatgatgatgaaaagttagccgagcaactgaagcatgctgaagagcaggttgatcagaaaacacaaaatcgggatgctcttagagcggatatccagaagatacgcgtaagaaacgcttttgagattttcatatggtaaaacatctttgttctaaatttgcctctgacattttttgaaattgttatttctaggcaatatgtaaggactatgatatcagttacaaggcggtcatggcagaagagagatctgcaagaaaagcaatgcattcaaaacggcaggaaattgaggcccttcagtctatgattagccgggttaaaagtgctgcgtctgttgatgatattgattcaagggtgagactcccaatgatcacatttccagctaagttttgttcaagtttttagcttgtctaatttgattatgctaatctatcttatttctctgcctccaatcaggtgcgtaatatggaacatacgatgcagcacacaactttatctctgaatgaaaaaaaaggtttcatgcgtgaaataaagcagttgaagcaacttcgcgagcagatatcttcgagtatgggtaccaaggatgaagtaaagcaagcattggatgagaaagagaaaacagaagaacgtttgaaggtacactacagtttaaacgtcctagcagtcatcttttcg

SEQ ID NO: 140111 - DNA, 2486 bp, Arabidopsis thaliana landsberg
ccgatttgatctctttccactaaaaaccttgctgacaaagaattcaattttgattgtcgtcgatcgtacggtatcttgggggattgatggagaacacagacgtcgtctcgggtctgcataatttcttgagtaaaccctccgccaaagatttcatcaaatcaatcaaaaggttatctctctctctctctctctctcgcttctcttcttcgctttttgtatactttaggtttatttactctctagttatgattacatgtgtgcaagataagatatcttgctgatttcacattgctctctagtagttatgaatagtttttttcgtttttgcgacaatgttatgatatcgatgatttgctataaacttaagcagatttttgttgtgatggaaacatcacatgccactggttttttgagttgtgaacgttttttgatgttttgcagtttcattgtttcgatcttgaacactgcaccagaccctgaaaaagattgtgatgcagttcaggacttcttttacaagatggagtctgctttcagggctcatccactttggtctggttgttccgatgatgagttagacaatgcgggagatgtgagttattcttcttccctttttcctgcttatctctctcatgatttatctataataatctttcttgacttaatttatgtatacacagggcctggagaagtatgtcatgacaaagttatttccccgggtttttgcatcaaacaccgaggatgttatatccgatgagaaactctttcagaagatttccttggttcaacagttcatatctcctgaaaacttggatatacaaccaacttttcaaaaccaaacatcttggcttgtaagtcacatctatctctccatagtgttgcttgttttcttataatggttcttacttgtgatgtttttttttcttattttatggcagctagctcaaaaagagctccagaagataaatatgtacaatgctcctcgtgataagcttatgtgtatccttaggtgctgcaaagtcattaataacttacttctaaatgcttcaattgcttcaaaccagaatgaacctggagctgaccaatttcttcctgttctcatatatgttaccattaaggtatgttgtcaaggattgtacaatttaagcaaaagctatttctgaatatgtctcatgtttacttcatattaactcttatccttggattctgaaaatgacattatttgctttgtttctccaggctaaccctccccagtttcactcaaacttgttgtatatacaaagatataggcgtcaatctaaactggttggcgaagctggctacttattcaccaacatactctctgcagagtcattcatctcaaatattgatgcaaaatccctctccatggatgaagctgactttgaaactaaaatgaaatctgcacatgcacgtctttctggtccgggaagccagtcttatcaaacggatcacggtgctgcattacccactgctcataatactaagagggaaaacatgcttctgcatacaaaatcaactgatagtttctctggtaccaatgaaacactgagtgaaacaccaataaagaaagctgaccccattaccgatttggaaaataagggcgctgctacgcttttgaatgatagaagtgaggcaaccaaaatatttcaagaatatccttacatgtttgccagtgttggtgatttaaagataggagatgttgaagacttgcttaataattataaacagctagttttcaaatatgtttgcctttccaaaggcttgggtgatgcaacatctttaactccatgcatttcaccattgcaagcgtctaaagtctctgagaatcatacaacattgtcttcagattttcaaacgaaaagcgaaactgacaggagtgttgataatttgtttcgagctctacaaggtgagggagacaatgttcataatatctcagatgtaaaacaataatcagacttatctcttccaaatgtaatcggattcagttcttgaatgctacatgtaattttacattcactaattatacggttctacggttatacgacaaattgaaacacttaccggttttatctgagaaccggttaagggttcattacaagatatgaaaccaagataagcgaaaagggtattattgtaatttcgcttcattttctgctcctctgccattcccacaccactcagaggaacagagcttaacggcgactatggaagggattggactgcgaagttgcggagatgatattctccgtctcggattcaagctacgcggtggtaccggtggccggattcagattctccagcgagctatggtgataaaaatgagagaccgtagcaagaacaggaaaccattgcagagaggacgaatgctcagtatcgaagcgattcaagcggttcaagccctgaagcgagccaatccacttcttcctcctcctcccgttccttctacttccacgacttcttcttcatca

SEQ ID NO: 140112 - DNA, 1088 bp, Arabidopsis thaliana landsberg; identical to SEQ ID NO: 56068

SEQ ID NO: 140113 - DNA, 695 bp, Arabidopsis thaliana landsberg
ctttaagatggagaaaaatcaacaaaagccggaatttctagctgagacctcagagatgaagaacaccaaaaacaacgacgactgttctgtacaacaacaacaacgatttgtgtggccatgggttggtctagtagccaacataccaacggaggtggaaccatcgggtcggagagtaggcaaaagcggttcaacgttacgtgatgagttcactatgaaagggtttaatccaacaagagtccaacccatttgggatttcaagggtcattctggttttgctttggttgaattcgctaaagactttgaaggattcgaaagcgccatgaatttcgaaaggagttttaatttagaccgtcatgggaagagagattgggaaaaaggtataacattgtttcagagtttttaaagtcatttgctttcttgacattgatgagttcactttctttgtaaaaggtcatcgcttgagagacaataagctctatggatgggttgccagagaggatgattataatcgaagtgatactgttgggaagaacgtcaagaagaagagagatttgaaaagtatctctcagattgtggaggaagacgagaggaaaatggttcatcttgttgagaatatgtctcaaaccattgagaagaagaagcaaagtaaacaagagcttgaacagaaagttgatgagacttctcgtttcttggag

SEQ ID NO: 140114 - DNA, 670 bp, Arabidopsis thaliana landsberg
  unsure (1)..(670): unsure at all n locations
aaagctgcctcttggattggctattcttgtggaggctgcagttagtgtaagttttatatgaggatttggattgacgttagttattgtgatgattagttgaatatcttcttgtgtttggtgattttttcaggaaggatttagatatcaccacgcggagcctgagtacttgatgcttgtatcttggatctctgaaactcctgatacaatcccagccaatgcttctcatgttgtaggtgctggtgctttggtcatcaacaaaaatactaaagaggtagccaactgttctcttctttgcatagtttcgcatacgttgcttaacaaataatgataattcaatgagcaggtcctcgttgtccaggagaggagtgggtttttcaaagataaaaatgtgtggaagctgcctactggtgttatcaacgaggtgatttttacataagattgtttttgtgatcttttactatcccgttaaatatttacaatcncggtgaatgacatgaagagttaaatgctaaaaagaggcaatcttgatgaacgaagctcctaggatcctataccttattgtcctgtgaatgaaaacgagtgaactactagtaagggtttggcttatgaagggtgtcagcgtattgtttaggggagtatattctaggagttggtagtgctgagagttgtt

SEQ ID NO: 140115 - DNA, 1130 bp, Arabidopsis thaliana landsberg
aatttgctaatatacttcccattgtttctaatctctttttttatgatatttctgtgcatttctaactttaaaaaaaaaaatgagaatagggttgggtcgtatagctgggattgtatctctcgaagtagaaggtgaaaatactcaactagaggctattcagcgtgtaggctcagaactggctatgcatgttgtagcagcaaagcctttgtttttaagcaaagaccttgtttcttctgaagcaatggcaaatgaacgcgagattctaaagtctcaggttagtgtcactttatgttatgaaattgaactgtaatttgtaaaaagtacacaacctgcgttagaaaagtttgcttatcaaatgttgtatatgacaggcagaaagtacaggcaagaatcagatggcgatagagaagattgtggaagggcgtctccgtaagtattttgaagaagttgctctaatggagcaaaagtttattgtgaacgatgctataaacattaaggtatgtgggtcttagcttaaaacacctagtttaccgttttattacctctgcatcgcttgttgaattcaactcttgggctcctattccacagacactggtggataatttgtccaaggaggtaggttctccagtgaaggttaccgattttcttagagtcgaggttggggaaggaatcgaaaggtaaactaaccgtcacccgtatgtccagtacggcttatcattgttgtaagattagtcgcttatgaattttgttttttttgaaggcttgaagcatctgatgaaccagttgctcaaactgcttgaagacaaagaatcaacgacatggttttagatttacagaactctttccttctttggttcctttagagttcatggcttcaacgccttcttgagattatagaatctttctcatgattttgtttctcacacaatatggcaataagagtgattgtgcctaggaagctatgaccagaaaaaaaaaccatgtttgtgttctcctactcctactaagatcattatacaaaaaccttcacttatgtgtttgattttaaggtactcaagtatttgaataagcagatagtgagttcttggctcctccggttaccaacggtcgaaattgacggtttaatataa

SEQ ID NO: 140116 - DNA, 1040 bp, Arabidopsis thaliana landsberg
atggagaccccactccctcctttatcgcaactaaccccaaatcctactcccgccgccgccgtctcttccgctattccggcgccagtcaagagcgtagccgttcagcaaccgatcgatggatctccacgcgccgttgctactgataccggaggtattcctgagccacttgcggctgttcccggcgctaagcttcgtcttatgtgcagttttggtggccacatcatgcctcgtccacacgacaaatcgttgacgtactccggcggcgagactcgtattgtggttgttgatcgacgtgcgtcactgtcttcgctccgatctcgtctctctagtatgcttctcaacggccggtcctttactctcaagtaccagctccctagcgaagatctcgattcactcgtcaccatcactaccgatgaagatctggagaacatgatcgaggaatacgatcgcgcggcttcgtcagcgacggcgactgctacgcaacggctccggttgttccttttcgctaacaagctcgagaccgccgctactatgggatctctgcttgacggcacgaaatctgacacatggttcgtcgatgctctgaatcaatctggtttgcttcctcgtggtttatcagattccgccgccgtgaataataccttggtgaatctcgacgaagctagcggcggagagaccgagatccaaaaccttgaaactaatgttggtggcgagaacaataagcgaggggatttggttgctaacggtgtgatttcgcatcaggagatgcatatgagctcgatgcctgattctccaatgatggaagccgctggttcttcgataggatcttcttcttcatctccttccacatccaatttgccaccgattcgcgttagagtcagtgaggaccagaggatagaggaacaattggcacagatgaccttctcaaacatgcaaactcagaggcaatttgatgatggcgttagcttgatggcaaatcggccaatgatgattccacctggtgccatgaacgatgctgcgatggcgtataacaacgcacc

SEQ ID NO: 140117 - DNA, 659 bp, Arabidopsis thaliana landsberg
gtggcgtcgcaagagctcgcgcttttgcgaagaagttatctgatgcacctttagcaatagttgataaaagacgtcatgggcacaatgttgcagaggtagaaaaacctttggaaaatacattttaaccaagtctggattttgacatttaacaacccgtttcatgtaggtgatgaacttaattggggatgttaaagggaaagtagccataatggtggatgacatgattgacacagcaggtgagtaataagtcacggtctgcatatctgtaaacattccccattgtgcttagatacttacgttaggtatatcatatcaggaaccataagcaaaggtgcggctctgttacaccaagaaggagcaagagaagtatacgcttgtaccactcatgccgtttttaggtaagtccatgaaatattttctctgtgttggaattataaaaaaagagaaagaagctgacatatgcatttgtgtctatattcggaaacagccctcctgcaatcagtcgactatcgagcggactgtttcaagaggtgatcataaccaacacgattccattgtcagagaagaactattttcctcagcttacagttctctcagtagcaaaccttcttggggagaccatatggtgttttcatgatgattgctctgtgagtgaaaga

SEQ ID NO: 140118 - DNA, 1165 bp, Arabidopsis thaliana landsberg
  unsure (1)..(1165): unsure at all n locations
tcgatcaaaacaattgtctacattcatcttcttcttcttcaaacaaaaaatgggtttcttaaagttatctccaatgatccttctcctagcaatgatcggcgtttcatatgccatggacatgtcaatcatctcctacgacgaaaaccaccacatcaccaccgagaccagccgtagcgactcggaggttgagagaatctacgaagcgtggatggtggaacacgggaagaagaagatgaatcaaaacggtcttggtgcagagaaagatcaaagattcgagatctttaaagataatcttcgtttcatcgatgaacataacaccaaaaacctcagttataaacttggtttaacccggtttgctgatttaaccaatgaggagtaccgatctatgtaccttggtgctaaaccgaccaagagggttttgaaaaccagtgatcggtatgaggcgcgtgttggtgacgcgcttcctgattctgttgactggagaaaagaaggtgccgtcgctgatgttaaagatcaaggaagctgtggtaagaataaattctttttcttttgattttattcatttttaaaatttaacaaaaaaaaacattattagatttcgaatctggaaaaatccctcaaatcctgattattttacggatgagtcagttttttctttagaattgaaatgggtttctatgaaaattatcgaaaaagtagtaaaaactgcgaaaattcttggattgtttcataaatactccaagaaacttttgataaataattcagacatatcttgaaacttttgtctggggaatgatgagtttggtctgaaatgttgacttttacttttaggtgtaggtttcgaaaaacaaagattttgaattttatggagatgaataattatggttaataaatcttgagaaagacacaaacttctgatgatattttgtgtttatgcatcaaaacaaaatgttgaattttaggtgcacgtttcggggagctaatattttggttaaatctgagaaaattgatgatattttgggcctttatggaccatggtctttaaactttaaagttggtagtgggacaatatggccccattaagntntttgctatgaatctaggaagtcaaggnatggtggggacgatgatttggtatgtgttactgtttaggttgtaacaattt

SEQ ID NO: 140119 - DNA, 2004 bp, Arabidopsis thaliana landsberg
ggggttgccttttgcaagtattcatggttatccacacacaactcttttgctcgtttggggaaagtatcacggaccggttctgctattttggctcctactacccagcaagattcaatcgcgagccaactcaatgtaaacaaagtttcaaatttttagtaaacccttttaacatttttttcataagtttgaatgtttttgttggattattgcagaatggtgtaagagggtttatgctcgacatgtatgacttccaaaacgatatctggctttgccattctttcgatggaacatgtttcaatttccccgcttttgtaagttttgatacaatatatgtttgttgtaagtatgaggtatattaaggtcggtccaccgccaaaaatgttgaagatttttttttgtttttgtgtgcaatgtggtagcaaccggctattaacattttaagggagtttcaagtgtttctagagaagaacaaagaggaagttgtaacgattatcatcgaagattatgtgaaatcgcctaaaggtctcacaaaagtgtttgatgcggctggcttacgaaagttcatgtttccggtatctagaatgcccaaaaatggaggggactggccaaggcttgatgacatggtgcgaaaaaaccaacggttgctagtttttacatccgattcacataaagaagcaaccgaagggatcgcctatcaatggaagtatatggttgagaatcaatgtgagtcctatatatgatgcaaaccattttatctttacatttgtatatatgcatatcttatttttttgttaatgaatgaaaaaaattgcagatggaaatggagggttgaaggtaggagtgtgtccaaatagagctcaatcagcgccaatgagcgataaatcaaaatctcttgttcttgtgaaccatttccctgatgctgcggatgtgatagtagcatgtaagcaaaactcagcttctcttcttgaatccataaagacatgttaccaagccgcgggacagcgatggcctaacttcatagcagtcgatttctacaaggtacatctatatttctagtttttgaagattgtctggatcttgtcttattgaatttttgtgtgtgtgtgtgtgagttcagagaagcgatggtggaggagctccgcaagcggttgatgttgcgaatggcaatttgatatgcggttgcgataactttgcagcgtgcaaggtcgttttctttacctgttttgaatttgaagtcgttatgtaaatttcgatatagtttgttaaaattttcaatataatctgcaggctgacggcaaatgtggatagtaagaaagactgagccaccagaagcaactcccataaccaaaggctttctgcgtttgttgtcacctttgtgtcatcttttccataaagttttagctagtgtagtaacggttagtttttgttttagattatttagagattagtactgtactggttagtttcattactctaaatttcctaatcatatatgaactagtcaccgaataatctatatatactgaaaacactggtgactaaaaatgttaaacacaaagttatttaatagctaaaaatctaaattagggacatggtatgttatttgaccacaaaatttgtagtatagtttgtaagtaccgatgtcaccatcggatttaaacgcgatagaatttgtgtcatctaaaatttaattcattagctcaagtggaggaccaaaacatgtaatatagtcttcttttaagagtcagtccactaaatcaactggaaaagttacattaagtcatttatatatttcactcaccctcactggagaatacaaatttttctttttccttctttcccactctctttcttgtttctactatatccatgtttcctctagtactgttttctggaatgtagaattatccaataaaaacttgctacaattgccttgttttagaatttagaaaagattaggaaggtatagagaatataggatgacaacagagagagacatgtcat

SEQ ID NO: 140120 - DNA, 1383 bp, Arabidopsis thaliana landsberg
agaaatggcatgcgtgggagggaaggattggtatttctacagccaaagagaccgaaaatacgcgacggggctgagaactaaccgagcaacggccaccggatattggaaagccaccggcaaagacagaaccattctaagaaagggtaagctagttgggatgaggaagacattggttttctatcaaggtcgagctcctcgaggccgtaaaaccgattgggtcatgcacgaattccgtctccaaggatctcatcatcctcccaatcattctctgagctctccaaaggtatacacagttaaataatccagttattgatcgtcagttaatctcttctaagcaaatctgtaacgagtaatatacgtgtttatgtgttgttgagggaatcaggaagactgggtcttgtgtagggtattccataagaatacggaaggagttatatgtagagacaacatgggaagctgttttgatgagacagcctctgcatcgcttcctccactgatggatccttacatcaactttgaccaagaaccctcttcttatctcagtgatgatcatcactacatcatcaatgagcacgtaccctgcttctccaataatttgtcacagaaccaaaccaaccaatccggtttaatctccaagaactccagcccattgtttaatgcttcccctgatcaaatgattctcagaactttgctaagtcaactcacaaaaaaagtcgaagaatcacagagtcgtggagacggaagctcagagagccaattgaccgacattggcatcccaagccatgcatggaattactgattatgaataaggcttaccagatatatcactatgtataagtatcatattcatgattcgaaacaatttattcaaccctcttatgtaaactgttataccattatattagcaatccaatcatatatagttgctaaaaaagcaaaaaatcattaaatttctgttatataatattttatttacgttatataatatgaaacggtaggtcgtctcgtcccataaacaaataatccaaagttacttaatcattatgaaaatagaagaggaaaaaatcttgaaaatttcccttcaatgggaaagtaacgcattaccataataagtaatttccacttggcttttcgacttttcatgtgattgactttgtggaagagagagaaaacaaaaaaagtaaaagcttcttcggtctggatatttatttgattgggtaaaaccgtaaaagtgccactggtgttgtgttctgtccgttggattttaatatttccgtttttcttttcttactggaatctattagtaatatatattttgccataattcataggtcggtaaaaaaaataaagatcggcgtatcgtaccaaaaaaggatatttgtt

SEQ ID NO: 140121 - DNA, 497 bp, Arabidopsis thaliana landsberg
ctgagcttcaaacttggataactcttccaaggatgaacaaaccgaggaagatgtgttcgggagtttttatggacgggaagttctatgtaattggaggaatcggtggagctgattctaaaggcttgacctgcggtgaagaatatgatttggagaccaagaaatggactcaaatccctgacttgtcgcctccaagaagccgtgctgatcaagctgatatgtcaccagcagcggaagaccgcctcttgttgcggttgtgaataaccaattatacgctgctgatcacgccgatatggaagtgaggaagtacgataaggagaataagaagtggttaactgttggaagattgcctgaaagagctggctcggtaaacggatggggacttgcttttagagcttgtggagagcggttaattgttattggtggaccgaagtgctgaggaggtagttcatagagctaatcttggatacggacgacagtggtcacgtcagtggacacta

SEQ ID NO: 140122 - DNA, 814 bp, Arabidopsis thaliana landsberg
  unsure (1)..(814): unsure at all n locations
tcgactctatccctacgttgtctacacactaaagcttatctcaaactcacgtgcttgtcaagtggagccattctccgccgttgttcgtcgtctcaacgacattgttaactcatctcaaccgttgattctcttccacacaaatcaaacggctgtaatcaaatcatacgcctctccaccaccttcaccaccaccaccacctccgccaccgcaaaccggtttccaacacgtggttttcggtatcgccgcgtcggcaagactatggaaacagagaaaagagtacatcaagatttggtacaaaccaaaccaaatgcgtggttatgtctggttagaaaaaccagttactgaagaagacgaagaagacgaaattagcctcccgccggtgaaaatctccggcgacacatcgaagtttccgtataaaaacaaacaaggacacagatcggcgattagaatttcaagaatcgttacggagacacttaaattaggactcaaagatgtgagatggttcgttatgggagacgatgatacagtctttgtcgccgagaatctaatcagagttttgagaaaatacgatcataatcaaatgtattacatcggcagtttatcggagagtcatcttcagaacatttatttctcttatggaatggcttatggcggtggaggatttgctataagttatccattagcggtggctttgagcaaaatgcaagatcggtgtattaaaaggtatccggcgttgtacggttccgatgatcgnnnnnnnnnnnnnnnnnnnnaactcggtgttccactcactaaagaactcggttttcaccag

SEQ ID NO: 140123 - DNA, 517 bp, Arabidopsis thaliana landsberg
ctctctctctcgcctatcatctttttccagttcgctatcagacatatttgaaaccccataactcataaagcttcactcttttccacaatctcttactccaaagttttcttctttccccccaaaaaattataatggtcgacgttgatcggagaatgaccggtctcagaccagctcacgccgctggtctccgtcgtctctctgctcgcgccgccgcaccaacaacaccaacggttagaaacagtctcgtctctttctcttctctcgccgatcaagtaatctcacacttacacacttcaaggatccaagtccaaccgggtctaaccgactccgaattcgctagagcagaagcagagtttgcattcgctttcccaccggacctccgtgctgttctcaccgccggtttaccagtcggcgccggatttccagactggcgttctcccggagctcgtcttcatctcagagctatgatcgatcttcctatcgccgccgtgtcgtttcagatcgcgagaaacactct

SEQ ID NO: 140124 - DNA, 1069 bp, Arabidopsis thaliana landsberg
aaaaagagtctctctttgctctcaccacactaagaaagaagaagcgagggagaaggagactttttgactcttctgcttcttctcctttctctctgtcacttatttcccctctttgcttccgtcgattcatcccaatctgatcatctctttctccggttaaggtctcaggtttgtgtttcccctttctaattaaagcttcatcctttttgggtttcacctgatttcatttgctagggtttacttatcagctcttcaatttctagggttcttaatttcgttgcattttttgttctcgatcgtttgttttgcccttttatcaaatcgaatttgtcttgctgtaagttttagggattagtgagagtctttaattccttaaattggaaaaatttggagatgaattgataaagttttaagctttcttgatttggaaaaaatgacatgtttgcgtttgtgagtgatttagttgtttgatgaaatctcaggacttctcagattcgaattataaatgggaaattgttgtgcgagcccgggttcggagactgggagtaagaaggggaaaccaaagatcaaaagtaacccgttttatagtgaagcatacactacgaatggatctggaactgggttcaagctctctgttttgaaagatccaacaggacatgatatatctcttatgtatgatctggggcgtgaggttggtcgcggagagtttggtattacttacttgtgcactgatatcaaaacgggcgagaagtatgcgtgcaagtctatatcaaagaagaagcttagaacagctgtggatatagaggatgttaggagggaagttgagattatgaagcatatgcctagacacccaaatatcgtgtcgctgaaggatgcctttgaggatgatgatgcagtgcatatagttatggagttgtgtgaaggaggtgagctgtttgatcggattgttgctagaggtcattatactgagcgagctgctgctgcagtgatgaagactattcttgaagttgttcaggtttgtagtttttcgtttttcatttgcactctcgttttgtcaactttctagctg

SEQ ID NO: 140125 - DNA, 929 bp, Arabidopsis thaliana landsberg
tccctgtatgttacttttaccatagaatcaacaaaccctggtttcaacttttgattctagattattacaaagcaagcagccgttcaccgatgcaatgcgtccgtgaatctagcacccaatggtaaccaaccgatgccaccaactgtgaacaacatggacttatacaagaaattcaagaaggtggttagggatttgttgggtcaagaagcttttgtggaagcagtgcctgaaatgggatccgaggacttctcatactttgcagaaacaatcccgggccatttctccctcttgggaatgcaagatgagacccaaggttatgcgtcgtctcattcaccacactatagaatcaacgaggatgttcttccttacggagctgctatccatgcaacgatggcagtacagtacctcaaagataaggcttctaaaggttctgtctcaggctttcatgacgaactctaatccctgtcaaccttggtacagtttcctcatcggtcattggttcgaattcagaagtaccaaatttacactccattgttgatagaattccatttaaatgatgaaaagccttaattcgtagaacaatttcaattggcaaattctcaacttttatgatatgtttgtgtaactgtaacatactggcataatcttagaacatgaattataattaataggctagtcttgttgtaatgcattggcaaaaccacaccttttatatttatattgatcagaatcggagattttaagcatcaatttacattctttggaaggaaagaaactcaagattgcataatgcttcatcaagaccagcctctgctttaatactttaaatcatgaacttcattcggtgtcgccttgacccgctatcgagagaccaacgaattgtgcctccaaacgtctcctatctagctacttagtttggagtgttccaa

SEQ ID NO: 140126 - DNA, 1663 bp, Arabidopsis thaliana landsberg
gaaccaaaaatcctggtgcttctttgttttctggttcaacttgcaagcaaggtgaaattgaagcagttgttatagcgactggtgtccacactttctttggaaaggcggctcatcttgtggatagtactacgcatgtcggtcacttccagaaggtttgttctcactttggagtaaaatataaaagtttacaaagattttggagtcaatgactaaatttaatctttgtatattggtttccaggttttgacagcaataggaaatttctgtatctgctcgattgcagtaggaatggcaattgaaatcgttgttatatacggtcttcaaaagagagggtaccgtgttggtattgataaccttcttgttttattgattggtgggatccccattgcaatgcctactgttctctctgttacaatggcaattggtgctcatcgcttggctcaacaggtcaatacaagtcttaagacagagtcagttaacttttgttgatttgtgtttctttataaatgactttaaaatccatttcagggtgccataacaaagagaatgacagccattgaagaaatggcaggaatggatgttctgtgcagtgataaaacaggtactctcacgctcaacaagctttctgtggataagaatctgatcgaggtttgcctctttcctctgttcttcttactttgtatttaaaaatcttgataggttgaggacgatgatgtaattagagcactttcatttcttttaaaacaggtttttaagaggggcatcgacagagatatggctgtgcttatggctgcaagagctgcacgtttagagaaccaagatgctattgatactgcaattgtttcgatgttgtcagacccgaaagaggtattaattaaagactcaactttcaagtaaacaagattcagttactttcaaaggtataaacattgtgatgtattgatctgatactttgtcttcaggcacgtgccgggattaaagaactccattttcttccattcagtccagctaatagaagaactgcactaacgtacctagacggagaaggcaaaatgcaccgagtgagcaaaggcgcgcctgaagaggttataacctttgctgtcaactttctttataaatagctattactacattactttaagtttacccactgtttcctaagatattgttctgatgatttgtccttctctagattttggatatggcccacaacaaattagaaatcaaggagaaagtacatgctacaatcgacaaatttgcagaacgtggcctaagatcgcttgggttggcatatcaggtaattatgttttaaatgtggcacttgttttaaatgggataactcctacgattccattgtaacgatcccttttccaataataggaagtaccagatggtgatgttaaaggtgaaggtggtccatgggactttgtagctcttcttcctctgtttgatcctcctcgtcatgacagtgcacagacaattgagcgagcacttcatcttggagtcagtgttaaaatgatcacaggtaaagagccagtctttagctcctttccgccatatcattaggtcctactccaccttggattcttgtgtattcataaaatgtcaaaaatctcaatacttgcaggtgaccagcttgcaattgccaaagaaaaaggaaaaa

SEQ ID NO: 140127 - DNA, 540 bp, Arabidopsis thaliana landsberg
gctttatggttatgcagaaatatcagcggaaacacaaggagttgtgacgagagagacgatagaaagagcctttcatgcgacagaagaaggattcgcttccattgtgtcagagctgtggcaagaaataccaaatttggcaactgttggcacttgttgtttggttggagtgatatatcaaaatactctttttgtggcaagtcttggagattcacgggttgttcttggaaagaaaggcaactgtggcggactctctgctattcagctgtcgactgaacacaatgctaacaatgaagatattcgttgggaactcaaggacttacatcctgatgacccgcagatcgttgtgttcaggcatggagtttggagagttaagggcatcattcaggtagtttctcattctcctgccatcccttgtgatgttaattttccaaaagaaaaatgtaaaattagtcacttagacataactaggtcccttgttgtgttaactctctttggtaacgcaaactttgacatatctaccttatgcttgtttcggaagag

SEQ ID NO: 140128 - DNA, 723 bp, Arabidopsis thaliana landsberg
gcagaagagaatatggtggtaaggaaggtgggcaagtatgaattaggtagaacaatcggcgaaggtactttcgctaaagtcaagttcgctcagaatacagagaccggtgagagcgtcgccatgaaaatcgtggatcgtagcacaatcatcaagcgcaagatggttgatcaggtcccgtctctatcttcttactacttactctcttcgatttcattttggctgagatatgattagattgatgacatgtgttagcagattaagagagagatctcgattatgaagcttgttcgtcatccttgtgttgttcgtctttatgaggtaagtgaatgttttgcttcttcttctttgctttataatttactgaaagattcttgctttccatttgggattttgatatttggtcctttttaggttctagcaagccgtacaaagatttatatcatcctggagtacattactggtggtgaactgtttgataagattgtgagtagctcttggtgatgatttttacagcgttttactctgtcagatattgttaaatgattcatttgtttcattgctactataggttcgtaatggacgacttagtgagtcagaagctaggaaatactttcaccagcttattgatggagttgatcactgtcatagcaaaggtgtttaccacagagataaaaaggtgaaaacatgctaagaattaatacatttctaccacttgtgcttgtt

SEQ ID NO: 140129 - DNA, 2141 bp, Arabidopsis thaliana landsberg
ccaatagtttagtcaaaatgcagttcttacaatggctatgaaattagttacagattttttttcttgcgtaatacaaaaatttacccagtggcccttatttgacaaattattcttatgtacaaaaattgaattttagagccgacaaagttgaatttgaagtgaataatattaataaatgcgcggtttcttggactgatcaggtttcgatagggcccttgctgtttgcatctacctttgtacttgttggtgaccactatcaactaccgccactggtgcaggtaagcatttacaccttttttgacatacctctgtttttttcctgtagtttcagcatcattgttgtgttgatgaaagcagagtacagaggctagagagaatgggatgggaataagcttgtttcgcaggttatcagaagcccatcctcaggcaatttcagtgttacaaaaccaggttgccgtatctactaagatgaaactatgttagtacgtgttgttaataggtatgcctttctgctttgttgagacatcttctatgtgcagtaccgaatgtgtcgaggtattatggaactatcaaatgccttgatatatggagacagattatgctgcggttctgctgaagtagctgatgccacacttgtgctttctacctccagttctacttcgccatggcttaaaaaggtcagtgtgttgttcttaaacatttataagtagaggcatctttaagcaactaagaacattttatcacatctgtgtaaacctagatctgtgtatataatatgttccttctgcttaaaactctggatacctgggcatttgattatgcaactagccttggcctggacagcctatgaaaatcttaacaccactttcagatattgatgcaatgctttatttaattagacaaagcatttcagcttggctccagtcgcttgctttacaatatttgttatgttgcacattgactcggtgtaggcgttgtccactaataatctaattagcatcttaacttatatttgtttccatcaggttctggagccaacaagaacagttgtatttgttaatacaggtttttggctacttactagttgctttttttttcacatgagcgctttgccatatgggctggagttttcacgagactatatgatatgtttttgtagatatgctgcgtgcttttgaagctagggatcagaatgcgatcaacaatccagttgaagcttccataatagctgaggtactgttaagtatgcaagatgcatttaaacttatgaaaaagtgggctaactgctttacttagattgtagaggagctagttaacaatggagtggatagtaaagatattggaatcattactccttataactcacaagccagcctcattcaacatgccattctgacaactcctgtggagatacatactattgacaaatatcaggtttgcctctaggacctaccgttcttcttttcatgactatcttgatttggcaagtgctcgataaccaacgtttgatgagctcacattttgtagggaagagataaagactgcatattggtatcttttgtgagatcgcgagagaaaccaaggagctctgcttcttcactgctcggagattggcataggatcaacgttgctttgacacgagcaaaggtgagactgagagaacaactgatgtggtgttgagtaatgttgtttattccatcgatcattgattgaaatttgtttgggtttgacagaaaaagctgataatggtgggatcacaaagaacactctcaagagttccacttctgatgcttcttctaaacaaggttaaggagcagtcaggtatcttgaatctgttgccgggagatttaaaaccataacaactcatcaagaaacgtttcaaatatcacaagtttaacttgtatctccatttttgtccaaaaggaatgataatgtataatcgatttactttccgagtctgaatttgttgataagaaagaaatcaggagagcatgaatcacttgcataatgacatgtaacagaaaagcggagatattgtaatgatggagaagtttcatttgaaggttagctcagttaacgttatgacagtagattttgaacgaacaaagaagtttgtgtttgtaaaaacattcgcgtattga

SEQ ID NO: 140130 - DNA, 6898 bp, Arabidopsis thaliana landsberg; identical to SEQ ID NO: 34943
  unsure (1)..(6898): unsure at all n locations

SEQ ID NO: 140131 - DNA, 956 bp, Arabidopsis thaliana landsberg
gttaggaagattggcagggttgctcgggccatcgccattatgagccacccgattccaaacaccaatgattctcactcagtgcaggtcatcataccccagaaacagttggcccgcaaatcggatatgtaagttcttaaactttaactttgataagccagtggctgaaagaacttgaaaagttgaaatacctagtgcatttttctttttctttttctgtgttacataagctccatctcaatcattgtgagatacgtttttaagcgtgctataagattttccttggtacatgtagccggaaaatgaaagtaatattattcaggaaccctctttagtccatagcttgaattgcacatacacagaataatttcgccatagtgatgtttgttttgtcatatgtaatcactactctctctcttttttgttggatctgatgttgtgaaacttctacactctgacaggtatgtcttctgttgttcgtactcccacaacgttgctcccaagggaaaattcattgcatttgtgtctacagatgcagagactgataaccctcaaaccgaactaaagcctggaactgatcttttgggtcctgttgatgagatattcttcgacatgtatgatagatacgagcctgtcaacgagccagagttggacaactgctttatatcaacggtgagcgagatctcttttgattttatggctgcctacattaagtttgatgggttttaagtgtctaaccctgtccttggtctttacagagctatgatgctacaacacactttgagacaactgttgcggatgtgttgaacatgtatactctaatcaccggaaaggtaaagtttgtgaaattcgctacggatatttgtgatgcgatggaaagacatctcaggtttcctcgacatttttcacaacaagttttgtttcttacttatgttgcagcaactggactgaagtgttga

SEQ ID NO: 140132 - DNA, 1209 bp, Arabidopsis thaliana landsberg; identical to SEQ ID NO: 65630

SEQ ID NO: 140133 - DNA, 3196 bp, Arabidopsis thaliana landsberg
acgagaccaaggtcaaaatgatcaactcaaatccataacattgccttcacgtgtttttttattatccatttcattctgctttctctgttggtgttcttctcgaacttttgcaacgcatctgcatgatcacatagcagttagcgtacgcttttctgatattatggtgttgtgtcttgtgttattacagtgcaagacgttggtgtttgaatatggacctctgatactcgtaaatgcagaggaattcctagtgaaaaacgacgtctgcacactcttgcgcgcatgcccccctgagaaatcggttctaaggcagccggagttggctgattcttgaatgttcaaaacgttgctataacaggattttaattccttatgggttatacaagtaggaacacgagctgctccatgagaatggttgcagactttgtgtagtgtctatatgtatggattcaaacacatcctccaaaatgtccctttgccttagtgtaaataatgatcgctacaacaattgtccctctactatgatatcactgtattctatttgaggtttgttacattttatatgaatgatattagtgtagtttgccacacgtttgaaggatttctcaaaaaaaattacatattattaccacgaatatatctagtgtgccgcacgattggtactaggactgacgtggccaaaagtgtcaagatttgaccaagtcatataaagattagtgaattccattgaaataattattttgatgccccaacgagtctcgagacatttttagtaataatgaatgattaaaaacggtcgaaataactttatagccgttggtcttggtcatgtttctctcgcttaccgtttttttggcgcaggaccaagaagtaaaaactagccgttacccttacaataaacataaactaaactcttgtttttgtcttcttcctcctcactccaaccataattagtcttttgctacaacactcactcactcacttatttccattacctctctcactaaaaatcaaacttttctctgtctcactctctccaaaaacagaggaaggagaacaaaccaagaactcaagctcccctgctcttctcatctttcttcttcgttttctattttctttcttctttattctttgattcttttgaaatgaatcatctttacaaaaacccatttcgcatttatgaaattagtttccatttctgcgcgagtctactcttgtgtttcttactcttctctgctcaagctgttgcaggtggtggagggtggtggtcactcttgggatggaatcgtggtgactcaagcgaactatcaggcactccaagctatcaaacacgaactcattgacttcaccgagttctcaaaagctggaacaactctgcctcctctcaagtttgctccggctgggctggaatcaaattgcctccgaggtcaagtggtcgccattcagctcccttggaagggacttggcggtactatctctgagaagattggacagcttggaagtctcagaaaacttagcctccacaacaatgttatcgccggttcggttcctcgttcccttggctacctcaagagcctccgtggagtctatctcttcaacaatcgtctctcgggttccatcccagtctcactgggtaactgccctcttctccagaatcttgatctcagcagtaaccagctaactggagccatcccgcctagccttgctgaatccacgaggctctataggctcaatctcagcttcaattcactttccggtccccttccggttagtgtagccagatcatataccctcacttttcttgatcttcagcataacaacctatctggtttgatacctgactttttcgtcaatggctcccaccctctcaaaacgctgaatcttgaccacaatcgcttctctggagctgttccagtgtctctctgcaagcatagtctgttggaagaggtttctataagccataaccagctctcaggttctattcccagagaatgtggaggtcttccacacctccagagcctggatttctcttacaattcaatcaacggaaccatcccagacagtttctccaacctttcatctctagtttcactaaatctcgaaagcaaccacctcaaaggcccaatcccagatgccattgatagacttcacaacctgacagagcttaacctgaagagaaacaagatcaatgggccaatcccagaaacaatagggaacatatctggaatcaaaaagcttgatctgtcagaaaacaacttcacaggtccaatcccgctctcagtagtccacctggagaagctttcttcattgaacgtctcttacaacaccctctctggtcctgttccacctgtcctctccaagaagttcaactcaagctctttcttgggcaacatccagctttgtggcaacagctcctcaaatccatgccatgctcctgatcaccaccatcccctcaccctttcacctacctcatcacaagaaccaagaaaacaccaccacagaaaactctcagtgaaagacgtaatcctaatcgccatcggagctcttctagccatcctccttctactatgctgcatactcctctgctgcctgatcaagaaacgaaccgccttgaaacaaaaagatggaaaggacaagacctcagagaagacagtatcagcaggtgtcgcaggaacagcatcagcaggaggtgaaatgggaggcaagctagtccatttcgatggtccgttcgtgttcaccgccgatgatctgctctgtgccacagctgagatcatggggaaaagtacatatggcacagcatacaaggccacattagaagacggcaatgaagtcgctgtgaagcgtctgagagagaaaacaacaaaaggagtcaaagaattcgaaggagaagtcacagctttaggcaagattcgtcatcagaatcttcttgcactaagagcttactacttaggacctaaaggagagaagcttctcgtctttgattacatgtctaaaggaagcctctctgcatttcttcacggtaagtaaaatcaaagcaaaactctaactttggatttgataaagttgacatttttattgatctctgacattttgaatttaacagctcgaggaccagaaaccctaattccgtgggaaacaagaatgaagatagcaaaaggaatcagtcgtggtttagctcaccttcacagcaacgagaaca

SEQ ID NO: 140134 - DNA, 1370 bp, Arabidopsis thaliana landsberg; identical to SEQ ID NO: 12367

SEQ ID NO: 140135 - DNA, 682 bp, Arabidopsis thaliana landsberg
ataaacacaagattaatttttgtaaactgtattaaaaatacaaaacaacaccgctcattaaatggagagaataataaaattcaccaattataaaagaagatcaaaaccgctcctcagttctctacatcaaatctatgaaaaaaaatgacagacatttccagtctctttagaaaccgaagtcgcaaggaccaacttgactatggtttaactgtgatagttatatcaactctttgttggtgtctttggctctacgccaaatgcaaacggcggtctccaccgttgccgccgggaccttggggccttcccattatcggaaaccttccattcctccaaccggagcttcacacctacttccaagggctggctaaaaagcacggtcccattttcaaactctggctcggggccaagctcacaatcgtggtcacctcttctgaagtagcgcaagagattctcaaaacgaatgacatcatcttcgcgaaccacgatgtccctgctgtgggccttgttaacacgtatggtggtacggagatcatttggtcgccgtatggaccaaagtggcggatgctgaggaagctatgtgttaataggatactgagaaacgccatgttggattcctccactgacctccgtcgccgagagactcggcaaaccgtccggtatttggcggaccaggctcgggtcg

SEQ ID NO: 140136 - DNA, 1884 bp, Arabidopsis thaliana landsberg
atgctcattctgttagaagtgagaagagccgaataccacctggaaagcattacgaaagaattgggggtgctgagtctggtcaaagagttcctcctggcacgagtcctgcagacgtgcaatcatgtggggatccagattatgtgcagtcgatagctggaagtacaatgttgcagtttgcaaaaacgaggaaaatatctatagaacggtcggacttgaggaagtatgtttgacttccttttgtcgatctatcctcttcttcaatttatatttaactacatatggttcatgcatgaaaaattgtgtcctagttttataacaagtagcttgttaatcccaaatgatgtgagtgagttttttcaaaatttttcctcctccagccgaagcctccttcagaagagacagttcttccactctcatcgagctcaggtgatcttttttctttagctctcttgcttttgaagattgcaattgattttgactttgctatgtgtactatcgcagcccatggctctagaacaagtactttcggaccgggatagtgaagatgaagttgatgatgatgtggcagattttgaagatagaagggtatgtttttgaatttaatattttcaccgcatcagtagttgggtagaataaagctcagtagttgggtagatatatgtttcatgtgaaagggaaaggaatattgaagactgggcatgggcaaacgttaggagcaatattgtaatggttcagagatcaatagaaaatatgtgagcaagcctcacggtttgatatggagcagtagaaccagatcattagtgcttatataacactcattaaaagacgaagtgtgtccgtttgtactcgattctaacatagttgattctagcatagtttgtctgattctccatatagtgaataacgttatttcctattactattctttcagatgctcgatgatttcgttgatgtgactaaagatgagaaacagatgatgcacatgtggaactcgtttgtgaggaagcagcggtatgtcttatctcttttcagtacatgtcacgtggagttttccagtataaacatttagagtcgcgcatgtaaaggttgtggataattcctgcatgagttcttctggttaaaaaaaaaaaactgaacaattagataacatacgcatccatgttctctgactcattataagcattaccttgacagtggttttggaccctttgcagagtattagcagatggtcacattccatgggcatgcgaggcattctcaagattgcacggacccatcatggttcgaacaccgcacttgatttggtaattcaactctcatttcttccattgttttttccagtgtatcggagaagaaagcggttttgttgataaaagtgagctttttttgtgtaggtgctggagagtgtttatggtgaaactgtggaaccacggtcttcttgatgcccgaaccatgaacaactgtaatacctttctcgaacagctccaaatttgaaaacccaagaaatcattaatttaagtagaaaaacaaagaaagacaagagaagaagagttttggggtctcatttaactacttttggtgttttaagagaaagaggagcatatttatgcatgaatttgtcctcatcttttttttttttttttttattataaatgtgtacattggcttatctttgacgcttgttcttcgagtaatgctttatacatgttccttactcattaaggatatcataatggttgaaaacttgaaatactaattgactttgtacactggaaaccagacatggatgttactttggaaacatgcatcaacatatgtccatgaaaaaatattagttttggtagaagaaacaagcttacctttttagattgcaaaatcaaaaac

SEQ ID NO: 140137 - DNA, 2973 bp, Arabidopsis thaliana landsberg
  unsure (1)..(2973): unsure at all n locations
gaaaaataaaaaacctttaaaccctttttttgtgtatccgattccgtcgcaagtacattcggactctttcacggcgtcaatgtctgagaacgcagccaacaacatcatggagaccaagatttgtacagacgccatcgtgtctgaattacagaagaagaaagttcatctcttttactgcttagagtgcgaagaacttgctcgcaacatcgccgctgaatctgatcacatcactctccaatccatcaactggaggtttttccctctttccccattttctgggttctctttttgtgtttctggatgatgtttattgggtttatgtgagtttaggttaagtaaaaatcatatctttattctgaaacaaaattcccttgtgttggttttcctccagaatctgtgtgtttgcatgtgtggttgtttgatttgaagcttatgtattcaaaaatcttatcttttgagcaagtttcagttttctatgtaagaatatagcagtttaagtgttttaagttctcttctctcttactgttaaatgaatctctggttggatagtttttggtgattcatagatggcattgaggatatgtgaattgatgtggtcatttgttatgctttcaggagttttgctgatggattcccgaatctatttatcaacaacgcacatgatatccgaggccagcacgttgcgttccttgcttcattcagttcccctgctgtcatctttgagcagatctctgtcatttacttgctccctcgattgtttgttgcgtccttcactttggtgttgcctttcttccccactggctcctttgagagaatggaagaggaaggagatgtagcaactgcttttaccatggcaaggattgtctctaatatccccatttcacgcggtggtccgactagtgttgtcatctatgacattcacgctttgcaggtttgtttatttatttctgatatccccgggggtttgctacatttatttgtggaattattcaagttcatcactctctctatatatgttcatgtgttgcaggaaaggttttactttgccgatcaggttcttcctttgtttgagactggaatcccgttgttgactaaacgccttcaacagcttcctgaaactgagaaagttagttcatgaaaaactgttactgatagcatccacttgtgttttcagtggctgttcttttttgtttttgctcaataatctaaatttgattccatttgtttgcaggtcatagttgcatttcctgatgatggagcctggaagcgtttccataagctgttggatcattatcccacggtttgtagctatctaaaactgatattttataacgcttcatttgaacatctttatgacctgcataatatctaatggaactcaattttgattcataataggttgtgtgtacaaaggttcgtgaaggcgataagagaatagtcaggctgaaggaaggaaaccctgctggttgtcacgttgttatcgtggatgatcttgtgcagtctgggggtacactcattgaatgccaggtatcaaaattctcatatccctgcattttgtatcttcatataggttatagcaatcttgaataaattctgaatcacaagtgttgtgtcaaaactcaagagaggcttttgatcagaatctttgttatttctgatgttatatgagatttgttgagaatctagtttgaaattactcatcttaactgtttcactttctttttgtcacaacagaaagtattggcagcgcatggagctgtgaaggtgagtgcttatgtaactcatggtgtcttcccaaagagctcgtgggagcgtttcacccacaagaagaacggtaattatctgtgaaaatgaaagaaaaagtaactaactttgttcattgttctataaatatcttgcttgttgcatctttaaactgaagtcaatgttattgtttcttcgaattaggattagaagaagcgtttgcttacttctggatcacggattcttgtccacagacggttaaggccatcggaaacaaggctcctttcgaagtcttgagcctcgctggatccattgctgatgctctgcagatttgaagcagtagagataaagcctggttctttgctcgttttggacttttggtggttttatactcttaagagatgtgctttggatgatcatttatgaaataatcatatcacttttgctgaaataactagacagattgttgaaaccttgtactctgttcttgttgattgatcttcttttgcaatgaattgaatcgttaagttcagaaagaagaaaaactacacacgtgtggttgtcttgttcattatcaatggcgataatgtcacacgtgtgtaatctcctataaattatccaacctttaaacttaaatcgacaaaaatgtctccgacgatcttatccttctccggtgtgacggtgccggcgatgccgtcatcaggttccctctccggcaacacttatctccgattgatagacacacaatgtagtacgatgagagaacttaagcaaatccacgccagtctcatcaaaaccggtttaatttccgatactgttaccgcgagccgtgtcctcgccttctgctgtgcgtctccgtcagacatgaattacgcttatttggtattcactaggatcaatcacaagaacccatttgtctggaacactataatccgtggtttctcacggagctcgtttccagagatggctatttcgattttcattgacatgttgtgttcttctccgtctgtgaagccgcagagattgacttatccttcggtgttcaaagcttatggtagacttggcccggctcgtgttgggnggcctttccttgggttggttcttntgnggggtcttggggtcgactcgtttaaacggcatccggtgttgcntctgtgcgataaattgtgggagtttgattgtagcatggagaatctttctgggatgataggttttgctgttattgcttgg

SEQ ID NO: 140138 - DNA, 1622 bp, Arabidopsis thaliana landsberg
atcagaaccagtggtaatggaattcccagagcttaaaggccacacacgccgtgattactggctcactattatacaagaggtattatatgttcatagatacataaacaagtacaagatcaccggtttggcaagagacgaagcactttcaaaggctgtccttggcgttatgcgtgtccaagctcttcaagaactcaatttgacaaacgcaatgcggtacgaaaatcttctcccgttcaatctctgcgatcagcttcccggtggagatctgattcttgagacgcttgcagagatgtctacctcaagagagctccatcgatcaaataaatccaaagatacaggtaacactccttattcaaaataacttatacctaatggtattttctttatcttgaccaagagtgtgaaaatttaaagcgtgtgcgttattatatgaatataaaagatgaaatttccgaggaagttaatgtgtaatttatttaccagggacattacattcctcagcttctgatatggtttcgcagctgggttctgtgtttggagggtcaagtcctaggagcaggagggagacgagtagtcttgtggtaggtaaagtagtggttggagatgtgaatccattagagagagcagtgaaggagtcgcgcaagaaatacgagaaagtagttctagcgcaagagacgattaatggggtgaaaatgggtggcattgacaccaacttagccgtgatgaaggtaaagaaaaggaaagtttgacaggaagatttgtaactgcgttgtctgaaacaatgaattgcttctcttttctttggcaggaactgatgcttccaataatggaaacctggaacttaattctatctgtggtgtattgggatgatcctacaaagtctagtgttttctgtctcttgaccactttcataatttggaggggatggcttgtttatgtctttgctcttgcgtctctcttctctgccatcttcatggttctcacaagatgtttcagcagagaaaagctcatgatcgagctgaaagtaactgctcctcctccaatgaacacaatggaacagcttttggcagtccagaacgggatctcggagctcgaacagaacattcaagacgcaaacatcgttcttctcaagttccgagctttattattctcgcttttccctcaggtcagccttccctcttatatttaacacaaactgcttctcctaaagctgtgtctaaccacagttttgaaaccgctatttcaggcgagccagaagtttgcgattgcgattgtggtcgcagcgacgatgatggcctttgttccgggacgctacttgctttcggttgtatttgttgagcttttcacaagatactcgccaccaaggagagctagcacggaacggttaataaggcggttgagagagtggtggtttagtataccagcggctccagtggtccttctacatgacaagaacaataagaagaagaagaactaattggagagcgtctatagttgccacagacgtacatatatacttataatctatacatttatgtatgtatgtatgtatgcagtttgtgtatgtattaagcttaatttcgggagccaactcttgaattcaataaaattttacaaaaata

SEQ ID NO: 140139 - DNA, 1197 bp, Arabidopsis thaliana landsberg
taaatcttcttatgttgtacttggacctgattacgaaccgcaggtgagctttcttgcttttgaagccattcaaacccggtttgtatatgtttgaaattcgatgtgattactattgtgcagataactgattttggattggccaaatggttgcctaacaaatggactcaccatgcggttataccggttgaaggaacgtttggttatctagctccagagtccttaatgcaaggaaccatcgacgagaaaaccgacatctacgcattcggcattctccttctagagatcataactggtcgaagtccggttaatcccactcagaaacacattctcttatgggtataattctattatctagtcatacctatacttgtttgccttcttagacacgaaaggaaaccttctggtggtttcctcattggctttttttaccactacaggttatattgtcatataaccagttttgcttgttaaatctactttattttaatgtagtaatcgacagttgattgttaaatttcataggtttccaattcaaatatgataaaaatgttgattggttcatatattttagggtttcatctcttttcttattttagattagtaattcctctcgttgatcgttatattgatggaaaacaaaatgaacaggcaaagccggcgatggagacaggtaacacaagtgagttggttgatccgaaattgcaagataagtacgacgaccaacagatgaacaagctagtccttacagcttcacattgtgttcaacaatctccgatattacgaccaaccatgactcaggttggttacatagatatattcgataccagtcgtattatttagaattaaacggtccaaaaccgaattccaatggttttgattttttaatgtgtaattaaaggtattggagttgcttacaaatgggaacgaggctgagattgcaaagagctggagaatgcctaaggatatgactaatgacgatgatgataataatgaatgggatgattattctatgattttcggatatgatgttccttcagattcttctttttaatatttttgtttatatctaatatttactgagtgcttttgtttaggtttttctttttcattcttttatatgttatgagatctttaacgttatgtatcaagaattcacaactaatagaaataagttactttatcagttaacaaaaaaaa

SEQ ID NO: 140140 - DNA, 864 bp, Arabidopsis thaliana landsberg
attcgaaaccctaacaaaagccctaatttacgaaatacgccgaatcgttgacgagaatggagtttgacgaatacgagtacctggagaagacggttgaggaaggagctgggtcgaataagaaaaaggaagagagtgggaacgagaggagcgagaggagttacagaaagagagaaggaggagagaggcagggcgaagaaggaggtgaagaagagcgggttagcagtcggagtaagaagtctcgcggagacggcgaagagaacggtggtggtaagagggatcgggagagagagaggcataggagcagcagagacaaggatagggagagggataaggttagagaaggatcgagagataaagagagcgatcgagagaggagtagcaaggagagagataggagcgatagagacaaaccccgagacagagagagaagagagagggagaagaggagcagcagtagatctcggagggaagagaaggaacccgaagtagtggacagaggaagcaggtttgttaaatttctctttcttctttacatgggcaagtgtttgaggaatgatacaaagttccgatgagctttctttagtcgtttaagaacggttttaaatgatttcacgattgcagaagacacagggacaagaaagatgagcctgaagcagatccagagagagatcaaagaactgtttttgcatatcaggtaagttcttaaacatttgggtttaataattaggggaagacataacccacattgttaagtttactgattacgttaaagttaaatcttgttttattattgaacagatgcctcttaaagctacggagagagatgtttatgagttcttctccaaagcgggcaaggtcagttac

SEQ ID NO: 140141 - DNA, 1409 bp, Arabidopsis thaliana landsberg; identical to SEQ ID NO: 36003
  unsure (1)..(1409): unsure at all n locations

SEQ ID NO: 140142 - DNA, 609 bp, Arabidopsis thaliana landsberg; identical to SEQ ID NO: 13268

SEQ ID NO: 140143 - DNA, 1598 bp, Arabidopsis thaliana landsberg
cctggttgcgaggagattgtgaaaacacatataatgatatatatgtttaatggacctctcattatatttacatgagcgtttgatgttttcatacttcaggagattgagaacgaaaagttgaagctagagcatgtgcagagtgtggaggagaagagtggattacgagtgcaaaatcaaaaattagctgaagaagcttcatatgcaaaagaattggcctctgcagctgctattgagctgaagaatctagctgatgaagttacaaagctctcgcttcaaaacgcaaagctagaaaaagaattagtagctgcaagagacttggcagcggcagctcagaagcgtaacaacaactccatgaacagcgcagcgaaccgtaatggaacaaggccagggagaaaagcaaggatctcagactcatggaacctcaaccaagaaaatctcacaatggaattgcaggcaaggaaacagcgagaagcagtacttgaggctgcactagctgagaaagaatacatagaagaagagtttaggaaaaaagctgaagaagcaaagagaagagaagaggcccttgaaaacgatttagccaacatgtgggtgcttgttgccaagttgaagaaagccaatagtggcgccttgtcaatacaaaagagtgacgaagcagagcctgcaaaggaagatgaagtgacagagttagataataagaatgaacaaaatgcaatcttgaaagagaggcaactcgagaatggacatgaagaagtaatagttgccaaggctgaagagacaccaaaggaggaacctcttgttgctcgtcttaaggtaaaccttttacaaatttgctttctattttctttcagcattcttagttttctataagcctactccacagtctagcggtaggcaaatctagatatccattacctgttcgctccatatcctttatgccatgaccttcggatcaggcaacatatattaaaaccttcaaaacacccagaatatatggttcaaaatatgtaaatagctttacctgatccaatatattctaatatcatgtcctcctatctataatacaagtgacttttacggataattaagtcaagctacttgtgtgtattgaatatttatctggtttttcggggacatggaacttgtgtacccgtgtgtgagcttctatcttgtacgggtaatgaaaatcatgaatcatcatctcacacgttcaaacaatatgagctttaataaaaaaacaaactacttgttttcttgttctgcatttgatgctttatatacataacaggcaagaatgcaagagatgaaagagaaagagatgaaatctcaggcggctgcagcagctaatgctgatgcaaactcacatatatgtaaagtctgttttgagtcgccgaccgccacaattctcctcccttgccgtcatttctgccgtaagtctcactctcacattacctgaggatccttcattaagtactaagtaatcctaaaacgatcacaatctctccttttatgcagtctgtaaatcttgttcacttgcctgctctgagtgcccaatctgccgaaccaagatctctgatcgcctgttcgccttcccgtcttga

SEQ ID NO: 140144 - DNA, 1904 bp, Arabidopsis thaliana landsberg; identical to SEQ ID NO: 7514

SEQ ID NO: 140145 - DNA, 766 bp, Arabidopsis thaliana landsberg
cttttctccaactaactacatgattgagttagtcccttataagcaaaatgatgccaatgcaagatcacttgaggtacgtagctaaggtgttaaaataaatagatatactccagagcaagaaactgagctgaatccttgttttaacagataatgactccgaaagcccgcgcagacattcatatgaatctcccagctcttcagaagttggactcaatgctaattgtgagcggattatctcttttgttaatcttgtcttttcttattcttatatttcctgatctgattaaagttgcattacaactccacaggagacactggattctatggtgaacacagagttttggtattctgagattggtagtagagctgaagggaagaacaagagtacaagtgagagcaaacgatggtggcttccatcgccacaagtgcctaaacctggactctctaactcaggaaggaagaaattgcttgacaaaggaaaagttgtttatcaagtcttcaaagctacaaaagccataaacgaaaacattcttcttgaaatgccagttcccattgttatcaaggaagcaatacctaaagtaagcttgcactctttattatcccttgtgatagtcataattatacaactacctctaaaatcttgttttgtaacagtctggaaagaacagcctcggtgatgaactgtacaagatgttggctgtggaatctgcaacagtagatgaaatctttatatcgctcaatctgggaaccgaacatgcagcactcg

SEQ ID NO: 140146 - DNA, 579 bp, Arabidopsis thaliana landsberg
agctctttctttggacacggatggctcaagccttggctcaaccaccactggtggtcaccaccgtcgtcccagacccgccgccgccgccaccaccaccgcacccaaagccgtatgctctacgatacatggcggatcttcttggccggattggtataatggatacagacaaagatggtaacatcagcccacagagtccgaggagtcctaggagcccaagaaacaacattctcatggggaagtacgagcttgggaagcttctcggccacggaacctttgcaaaggtttatttagctcaaaacatcaaatctggagataaagtcgccattaaagtcatcgacaaggagaagattatgaagagtggtttggttgctcacatcaaacgggaaatctctatcctccgccgtgtccgtcacccttacatcgttcatctattcgaggttatggcgacgaagtccaagatttactttgtgatggagtacgttggaggcggcgagttgttcaacacggttgctaaaggtcgattgcccgaggaaactgctcggagatatttccagcagctgatctcctctgtttcgttct

SEQ ID NO: 140147 - DNA, 1448 bp, Arabidopsis thaliana landsberg
atcaaagaagtttcctttagagctttttctctcattctgtcttcgtctaaaaaggtgaaatctttaacaactgatcatattactcttaatgatttcgtaatctcctgttcgttacgttgattattgttatctgttaaaattgatgtttaagagtgtcatcgtactactggtagcttgattgcagataacaatggggaaagaagttgataacaagttcacttgggtgattaagaatttctcctctcagcagtccaggaaaaattattctgatgaattcttcgtcgatggctgcaaatggtaagaagtgaattttttcgaatgatttcatcaatttagttttttttttgttttccgtgaaattgaggattgactaaattttcttgaaggcgtcttctggcctttcctaaaggaaatggtgttgagaagttgtcactgtatctggccgttgctggtagtgaatttttacctgatggatggagaagacacgcatatttccacttcagtgtagtgaatcaactctctgatgaactctctcaagctagaggtgattgtttttctacacaatgctcgttacttgatatgcgttggaaattgattgcaacagttttttttttccttatgttgtttgagttggttggtttaagactagtgtcaatgtttcgtagcaagtttagagcatggttcatggatggctttattttatgtgaagtgaagtcaatgatgaaatggaatttatttcgttgttgttacagaaacaaaaaattggtttgatgcgagtactagtgactggggttttacatcaatgctttcccttaaaaaacttcatgacaaagatggtggattcctggttaatggagagctcaagattgttgtcgatgtttctgttcttgaagttattggcaaattagacgtaccagtggaatctgaagagacaaccaccaaagctctaagcgagctagaggaaaatgacgtaccagaggaatctgaagagacaactaaagctctaagcaaggtagacgaaaacgatggtgcagagtctaatgattcgctcaaggaagcttcatcagtaaaggaaagcatggatgttaatggctttcgagttcttccttcacaggtatgaaatcaagaatggtgtagttgtttcttaaaatatctaaccgacatatgttctattctgttttgtgaattgtttctcaagtagcagagagcacacttgtatattcagtaaaaacaagaaatgaaattgtaaaagtttcttgatacatgtatgatgtatctatgatttgcagaatatgagcgaaactggaatattggagatgtttttgtctgttctgatttattcaagtctctgataactgcctcctcaatttgtttttttctacttaattcatctttctatcactttcaggtggaaactgtgagctgtatatttgaaagacaccccgaca

SEQ ID NO: 140148 - DNA, 1510 bp, Arabidopsis thaliana landsberg
  unsure (1)..(1510): unsure at all n locations
atgggatgcgttctatgcaaagaatccaccggagacaaacggaaacacaataatcccgatgaacctcctccggcagacctccgtaatacggaggatttaccttcttcttcttcaaccaccaccgccgccgtttctgtcgaaatcggagagaagaagaagaaagatttagattcgattcagattcagccggagagaagaacatggcacactggcgacttctccgccggctcttctcgccgtccggggatgagtctccgtacgccggaaggatggccaccttggcttattgctgcttgtggcgattcgatcaaagacttaacacctcgcagagctaccacatacgaaaagctcgagaaggtaggtacaaaaacactaatcattaataaagtaataatcattactaggtttggtataattagaaagtgttcggttttgttttgattagtttatgtttggtttaatttaatgaagtaatgtttttgattgttatagattgggcaaggaacgtatagcaatgtgtacaaggcgaaagatttattgagtgggaagattgtagctttgaagaaagttaggtttgataatttggaagctgagagtgttaaatttatggctagagagattcttgtgttacgacggcttaatcatcctaatgttattaagcttcaaggtttggttacttcacgggtttcctgtagtctctaccttgtttttgagtatatggagcatgatctttctggtcttgctgctacccaaggtcttaagtttgatcttcctcaggtatgactaatgtgttgtgtttttaataccatagacagtggattatttatcaatagaagattattaaattagcatggaacagataaggaagaagttaatgtgtttggtagtaaattcttgtaatgtttttcaggtttcttttcaagaaccaatcacttttattatgttatgtttttctatttttttctttagggtacttttgttttggtcacatatggtaatgttatcgtctgattggttttgtttctggtgtgcttttggtgttgctagaattatttgtcggtggacccaatttgcattatgttttctgattgtgataaaatttcaacatcctttatgaattgccgttcattggatttggttcttttattatctctgcatatttgatatttttacttgctgttaagttgagtaattacatattagtttagtatggaaagtacagtaacaatgatatcaacttgtatatgaatatacaaaagttgaggtctaaaaaataagcttgatcttttgtcgtaattatatctagatcattctaaatggtgtgttattgtttttgttcttcaggttaaatgctttatgaannnnnnnnnnnnnnnnnnngagcattgccatagtcgaggagtattacatcgggatatcaaaggttctaatcttcttatagataatgatggaatactaaagattgctgatttcgggttggctacgttttatgacccaaagcaaaagcggg

SEQ ID NO: 140149 - DNA, 1131 bp, Arabidopsis thaliana landsberg
ttttacttgtcgcgcgtcctcttggtagcttgagaagctcgtttgattccattttgtctctaatggctgccctcgcttctccctccctcatcccctcttctctctgcttcgctgccgccgccgatggtccccgttccctctcttctaatttctctgccttttccgacggcggttccaatttcaggtatcacaagagcttcttgtcgctttcatcttcgtcttcttcgtctacgccttatcgaaatcgacggggccgttccctcgtcgtatttgctgcttccggagactactacgccactctcggtgtctctaaatctgccaataacaaggagattaaagctgcttatcgacggctcgctcgtcaggtttaccacctcctcctcatcctttctatttctttgtaattcgtttttctgctttgtgaatttctcccgcttatgacattacttacggccgccgaaattgccaatgtgaaaacctgatcatccaagtaattatgcatccggagattatgttagcattttctctaattctgggtctgtaaacggttgtgttgtgcaaactaggacgagtcaacgaatcaattgtttgtttccacatgaacatgatattatttgaatttttattactttaatctactcaacatcaagctctgctttagttttctactttatttcaagcttattgagctatgatctcagctgattatcaactttttatatctagtatcatcccgatgtgaacaaggaacccggagcaactgaaaaattcaaggaaatcagtgctgcctatgaggtatgcaccaaaagctaaggtccccccagttcgattctcttcatgtcatcttttcctgtcctatcaccactttttttgggttttcttttcttgttacttgttagcttgcatgattacaaggctttgcttttataacatgagttgtcagctattttgccttatggttactgaactacaacattgtcaggtgctatcagacgagcaaaagagagcattatatgatcaatatggtgaagccggtgtcaagagtacagtaggaggagcttctggtccttacacgggaacacttcatctttttctggctatgcttaatcatacccatgactggctagctta

SEQ ID NO: 140150 - DNA, 1413 bp, Arabidopsis thaliana landsberg
  unsure (1)..(1413): unsure at all n locations
tgtttgtagagttgcgattttggagtatttgattgtgttctggttagtgaggaagatcgacaatggtttgtggaagctatgcaagcacatacaatcgattcaatctctcgtatgaaagtaatatctcaaatcatgaagatgcctgaacaagtcttggaggctcaaggagttacacctgatgatcttgaaggttctttacttcgttccaatggcgattattcggttatgcaaaagaaccatactgatcgatttcataaacttatatctacttttgttttgacaggaatgttggctgagctgcaggaacacgtcgagtccatagatttggccaatggtttgatcttacataactagtctttgtttttcgaggttcttttttttaatatattatttggatctttaaatgttttagatcttcactccattggaggtttggttcctctccttagctatctcaagaactctaatgcgaaaattcgagcaaagtctgccgatgttttgactacggttgtccaaaacaatccaagaagccagcaacttgttatggaagcaaatgggttcgaaccattattaactaactttattgctgatcctgacattaaagtccggaccaaagcactcggggctatatcttgtaagagttactatttctagcaaagtttgctttgagaaccctaaagtttgacagtttttttcttgctttcgacattgcagctcttatccgtaacaaccaacccgggattacagcattccgtctggcaaatggttatgctggcctgcgagacgctttggtctctgataccgttagattccaaaggtaaatagggtctcaagaatatgtattaggtagatgaattgatccgggttttggttctgtttcggtnnnnnnnnnnnnnnnnnnnnnnnnnnnnnnctttctgtttcagaaaagcgttgaacttgcttcactatcttctccaagaaagcaactcagactgtaaaatcgttagagatcttggattccctcgcataatgatccacctagcatccaaccaagattttgaagttcgggaattcgctcttcgtggtctcctagagcttgcccgtgaagaatctgtgagaaaccttgatagaggggatgtgaatctaagacagcttcttgaggagagaacaagacgaataattgtgatgtcggacgaagatctttgtgcagctagagaagaaagacagctagtggatagtctttggaccgtgtgttatgatgaaccgtcccttctaagagaaagaggtctggtctacctcccttctgacgacgagctggctcctgatgtggttagggaccgctttgaacctcctctaagggcttgggctgcaagacgacatgatgaaacgagtgaatccccggttccacttcttcttggtcctgcaccgtga

SEQ ID NO: 140151 - DNA, 617 bp, Arabidopsis thaliana landsberg
tcttctgaaacttctcaggttcatttgtgactgatcagctgaccaataaacccaaaggatatgctttcattgagtacatgcacacccgtgacatgaaaggtgccctcacatctcttttctttcaaccctcttttatctccctgagatgtttgctctttatactgatgttgcattgtgttttgctactcttcctacagctgcatataagcaagctgatggacaaaagattgacggcagaagagttttggttgatgtggagagaggtagaaccgtcccaaactggcgtccacgcaggcttggtggtggacttgggacctcaagagtgggtggtggtgaagaaattgttggggaacaacaaccgcaaggaagaacctcccagtcagaggagccatcgagaccacgggaagagcggtaaagatattttcattcgtaccaaactcttttgccttgtgactaatattgtgctgataatgttgttaccttgtctccagtgagaaatctcgggaaaagggaaaagaaagggaaaggtctcgtgagctgtctcacgaacaacctcgagagaggtctcgtgacagaccgagagaggataagcaccacagagaccgagaccaaggagg

SEQ ID NO: 140152 - DNA, 1059 bp, Arabidopsis thaliana landsberg; identical to SEQ ID NO: 50490

SEQ ID NO: 140153 - DNA, 2694 bp, Arabidopsis thaliana landsberg
gtctcttcttcctcctgatttgactctctcgagtctcgtcgatttcctccgggaggagacttgaaattcgtgactttccgattgtgaattccccgatggatctgcctagcctcgccttaatcgttggcgcggctgctttcagtcccaatcctgacgagcgcagagctgctgagcagagccttaatcaggtatacaccaaatttttctttttctggtttttattccttcctctctgcttagttcaatttctctctttattattttagaattgtgatagaactaagcttatccaaattcggagtatcgatgttttttttcttcattagattgacttgatttgactgtggttgtattatctgctattaaggtttaaaatctgattgaaatttcggtttttttttttcagttgcagcacactccacagcatttgataaggatattgcaaataattgttgatggtggctctgatctttctgtacgccaatctgctagtatccatttcaagaatttcattgctaagcactgggaacctcattctggtaattgtttatttagtttgtttattaatcaaatattgttatgttacctgtttgcttggattacattgtttttgttttgttatgcaggtgaccagaacataatcttgccaagtgataagaatgttgtcaggaaccagattcttgtatttgtctctcaagtgcccccgattttgaggtagcagtttgtgtacaccttgcagcagtcgttaagaccaatctactttttttggttaatttgtctacggactgatatgtttgtgttatgtagagtgaaatgggcttgatttatacatacatgttaacaatgaagtatagataggaaagctagcctctgtttttggtccttattcttgctcgttattggtgtgtatgatgcagagttcagatgggagagtgcctgaagaccataatttacgctgactatcctgagcaatggcccgaactcctggactgggtgaagcaaaacttgcaaaaaccacaagtttatggagcgctatttgtcttgaggatactatcttcaaaatacgagttagtctgctttatcaacttaaatttatgttatgaatctgtttgtctgaaatcaccatgtgcgtaagaattctagctcaggtttttgccttctcattcatagttcatgttataagcataggattggcaattggccaatcatattattattattattagttcttcctctgaaaacaaccctggccatttatagttcctctacaccttttgccacttaatagtgatatgtagattttatctactctggtcaattttgatagtcatagagagttcatatctttgttgccatctcctgcttatgtttctgccatggtatcaactcttgaacttgcaaagcatggcatatttatcagtagcagattagtagaaaagagatgtgcatttaggtaagttggggttacatgctgtggggtttctgtctattgcgaagagttcggattatcagttattatattaaacatcatgaaaaatataatcatttttttaaaaatttctctttctgcttttcccacgttctgtttataggtttgggtcagatgaatatagggcacccattcaccgagtagtcgaggagacttttccccacctgttgaacatatgtaacaatcttgtccatgttgaaaatccttgtctcgaagtggcagaccatatcaagcttatttgcaagatattctggtcatgtatttatgtaagttgtaaatcttgtggtcattatcattaatggttcttcactgcctgcttcctggcttcaactaaagaaatttgtggattttgaattttgtaaggagtttatgggttttcggtggtttgccttgaagttttttcatataattctcttttatccttgttccgtacagctagagcttccgagaccattgtttgatccaaacttttttaatgcttggatgggtctgttcctaaacattttggaacgtcctgttcccgtagaaggccagcctgaagaccctgagcttagaaaatcctggggatggtggaaggccaagaagtggattgctcatatcttaaacaggctatacactcggtatgcggggacatgaaaatcttaccgttaacttataacctagcatttgttcatctaccttaaataacagttttgaaaacttgttataggtttggagatctgaaactccagaatccagataacaaagcctttgctcaaatgttccagataaactatgcagccaagatattagagtgccacctgaaattgttgaatgccattcgtataggtggatatcttccggatagagtcatcaacctaattcttcaatatctaagcaacaggtcggatgttctatatggcctacttttgatcaattttagaaatttatctgaatatgagttctctggatcaattaaactggaaaaatcattgcacgtgatgtccccatgatatgatatttttggctttattggagagttttgttagttatattttcttttgattttataaaaccgttggtgtaatcatactttttctcacagcctgttgtcagagccattggtagaatgttttgggtagattttctagttgcagtttctattgtttccttgaaaactgataatggttgtgtatctagattttcgttttcattagttggggtct

SEQ ID NO: 140154 - DNA, 498 bp, Arabidopsis thaliana landsberg
  unsure (1)..(498): unsure at all n locations
atactacccgccatcggaaaaccaccatgtcagcctccgtcgccgtcgtgtcgggttttctccgtatcccgtcaattcaaaagtctcaaaacccttcctttctcttttctcgacccaagaaatctttggtgagacccatttcagcttcaagctcagagttgccggaaaatgttcggaatttctggaaatggctcagagaccaaggagtcgtatccgggaagtctgtggcagaacctgcggtggtaccggaaggtttgggacttgtagccaggcgtgatattggaagaaacgaggtcgtattggagattcccaagcgattgtggataaacccagagacagtgactgcttccaagattggacctttatgcggcggattaaagccgtgggtttcagtagctcttgttttgatcagagagaagtatgaagaagagtcttcatggagagtttatctngatatgcttnctcaatctactggatctactgtcttctggtgggttt

SEQ ID NO: 140155 - DNA, 1894 bp, Arabidopsis thaliana landsberg
ttgtaatctgtcaaactcaggatccaagtgtgtactatacactgattgtgttgcggaaagattagtttgactttgaccaaccaatatacttgctgcaaaaaaaaatgtcaattgtttcctaacatttttttaaaaccaaggaatacgttgggttggtcgattttgtaattaacatcatcggtatagattttgacgcatagttcgtcttattacaattagtgaattagctgataaatacatcttaatcttgagcttatctacaaaattaactggtcttagtaaggtcttcatagcaataatctttggtcaaccttatttcataagagacttactggataatagacaaaggagatcgtcagaagttttggtattctttattttattttccttttcttttcgaaatttcactttaattttttttcgtatttccgtttattttattacaaatattaaatttccaagacggacgtggatctttccctaaaccgaaatcaatactttgatttttgtaattattatatcgattttcaactaattaaatccttaatattcctattaaataatacaactgtctacatgatatttttttatatatattatcgtttcttttcctgaaattttccattttatttatttctttgcaaaaaccctaaaaattcattcgtctaagagagaaaaattatcttctttttcttgtgaatttttttttggggatattgcatgtaattttttggggatttttgaggtttaatctccattgaaagaagctctggcatttctctgctacagtgttggttttcagctgcagaattggtgaaaaagtaaatctagaaactgtaatcaaatttctctgctttgatctttggtccttttgagctactatttcatatctcttgttccttttattgttcttagttattattacaaagaagaagaagaaaaaaaagaaacctttacttcttcttcatctgaaaaagctcattttttttttttttggaatcagagtttggtgaatttcaggagcagagtatttaagtaattttggggaattagtgagaaaatggaggagaaaggtgaaataagtccaagtggggtcgtcacagttaagggagatgaagctttggttccaagaacagagtttcaacaaaaccctagttttctccaattcgtgagtcccacaacggtagtgactcctctccctcctccaccagctccgtcttcggctccggtaccaaccaccgtgactcctggctcagccacagcatcaaccggatcagatccgacgaaaaagaagagaggaagaccgaggaagtacgcaccagacggaagcctgaaccctaggtttttgcgaccaactctgtctccaactccaatctcatcttcgattccattgtctggagattatcaatggaaacgaggcaaagctcagcagcagcatcagcctcttgagttcgtcaagaaatctcacaaattcgagtatggaagcccaggtaattaaaagttgagatatttgtgtttgaactgtttgcattggtttcagtgagacaagatctgatctgggtttcgagtgattttatgttgttgtgtggatttttgagatgttgggaagtgggaccaacataactggattttgctgggtacacttttgtctgaagaagctattacactcagaccagttagagacagagaaagggaatctgctgatgctgaccaaacaaaaacagaaataaaaagaagattttgtctttaaaaaaaaaaatacaaagacagaataatctctgtctcttcctttttatcttagaagataagtatgtctagttgtgattataagttgtttagcagatcttacgatttctcattatctgttttaattactgtgtgaataaaaagagat

SEQ ID NO: 140156 - DNA, 857 bp, Arabidopsis thaliana landsberg
aaatcatttacgttttgatcgacaaaaatggagttgataaacgactttctcaacctaactgcgcctttcttcaccttctttggtctctgcttcttcttgcctcctttttacttcttcaagttcttgcagtctattttctcgacaattttctctgaaaatctttacgggaaagttgttctcatcactggtgcttcctccggtataggcgaggtttggtcataatgcctttattttaaaattgtagacttaataacctaattggtcactggtactatagtactaagtttcacacatttaatcttaaatgattaatttatataatcatgactttcagtgctacaattatcagtgtattttcagggtaaaacattaggtttttctaacaaatatatatgaataagaaaatataaatgataaaacaaaaaaaaaaaaatatatataaacgatatttttgtgaaacggatatatattttatatggtaaaatgattgatttgagtctatttgcgtatatgaaatatcagcaattggcatatgagtacgcatgtagaggtgcatgtttagccctgaccgcccgaaggaagaaccgtctagaggaagtggcagagattgctcgtgaactcggatctcccaatgttgttaccgttcatgctgatgtctccaaacctgatgactgtagacgaatcgttgatgacaccatcacccattttggcagatgtaagtcacgccacgggacgctaatcactatcattctatcaaaaccgaccgtttttttgttaccattcacaagtttggtctacaaaacattgaatttctttggtcttgcagtggatcatcttgtaaataatgctgggatgac

SEQ ID NO: 140157 - DNA, 1031 bp, Arabidopsis thaliana landsberg
ttgagattcctaagatatgtcttcacttgcagatttaatcaatctcgatctctccgattccactgaccagatcatcgccgagtacatatggttcgtaaatttcttcattgatctctctgtcattctcagcgtttgaagttgagtttgcgtctaatataagttttaacgtatattctttgttattttcatttataagagataaaaagttaacttgagtttgcgtttgtgtcttaaaaaaatatctttcttgaggtttccttagattgtttatgaatcaaaagtcttaaacttggtctcatctcatatactacgttgaaagattttgggtttagattgtttatgagtcaaaagtcttaaacttggtctcaactcatctactacgttgaaagattttgggttgattaaaagaattttgatttattttcgtttgtttgatgattaataggattggtggatcgggcttggatatgagaagcaaagcaagggtaactattaattatatattaaaaaaaaatctttggtttcgtatagagcataaaggatgagtaaatcttgtttaagaagttaagaaaaatatgattaacaatattattgttgcagactttgcctggaccagtgacggatccatcgcagttaccgaaatggaactacgacggttcaagcaccggccaagctccgggcgatgacagtgaagtcatcatctagtatgtttcaaaatataattatcaattaatagttatttaattttgtaaatcatggagtaatattactttcgtttttgtatttgttgttttagccctcaagctatcttcaaagaccccttcagaagaggcaacaacatccttgtaaatgaaaacacaataaaacagtttctttaaactcaattcttgtaaattttgtttaaattattattttactcttgggattaatctgtgtgtattaggtgatgtgtgacgcatatacaccggcaggagagccgattccgacaaacaaaaggcatgcggcggctaagatctttaagaccctagtgg

SEQ ID NO: 140158 - DNA, 514 bp, Arabidopsis thaliana landsberg
gtttcaaaaatgtcacttgttgattcttctcttgttagtaagggtggtaagggtgggaaaacatcacgatctgatactaaaagaagaggtcgtcgcagatcttcaggtgataatttgtgatcagcttggttgtgaagtcagtgtgggtatttgctgctcatcattcatttgttgttcatatctttcaggttcatgtgaaatgaagctattgaattctagtcaaccaatagtggagcccctgaatactcgaaaatctgctagattttctttacagtacatagagaaggaagataagcctgatgaagaagaacagtgggagcctagatttgcaggtcatcagagtttacaggagcgagaagattccttcgtggctcaagacaagaaaattcattgcggctttgtcaaaggtcccaaaggatcttcaagcactgcgtttgacctgacagaagatgatactaattatatcagtagatgccacatcgctgttagctcatgcatctttggcaattctgat

SEQ ID NO: 140159 - DNA, 719 bp, Arabidopsis thaliana landsberg
atgggcagagcaaaatccatggtctctctcttgttggtgctcttccttgttagagctcatgtagcaacaacagagacgacaacagagttcattttccacggtttcaaaggaaaccaatcagaaattcatatgcaaggagattcaaccatcacatccaacggacttttgaggctcaccgatcgaaactcggacgttgttggtaccgctttctaccataaaccggtgagattgctcgacagtaactccaccaatacgacggttcgttcctttagcacttctttcatcttcataatcccttcaagctcaacaagcaacggaggtttcggcttcacattcacactctctccaaccccaaaccgtacagatgcggatcccgagcagtacatggggcttctcaacgaaagaaacgacgggaattcgagcaatcacgttttcgctgtggagttcgatacggtacaaggattcaaagacggaacaaatcgaataggcaaccacatcggtctaaatttcaacagtctctcttcagatgtccaagaaccagtggcttacttcaacaacaacgatagtcagaaagaggaattccaactggtgagcggcgagccaatccaagtcttcttggattatcacggaccaaccaaaacgcttaacctcactgtttacccaaccagattgggatataaaccaagaatccccttgatctcacgagaggttccaaaact

SEQ ID NO: 140160 - DNA, 1260 bp, Arabidopsis thaliana landsberg
ggatcttgagaagttgtttaccggaatgccagcggttttcactggaacgttacaaggcgatgaactctcacaacgttacgcaagtggagatgtgtttgtgatgccatcagagtcggagacacttggccttgtggttcttgaagcaatgtcttcaggacttcctgtcgtcgcggcccgtgccggtggaatccctgatataatccctgaagatcaggtcagtgaattatctgaattacaattaactgccaaaccatattgatgagcatatcaaccgaaccgaaatggttgaaaaaacaatttctgccaattttcttataagcgagctgtaaccgaactgaaactttattcaatcatagactggtacacaaaatgatcttgcattgattgttcttatgggtcaacctatattgagcttgtggttttctgattctgatgttttcatcaggagggaaaaaccggatttttgttcaaccctggagatgttgaagattgcgtgacaaaactgagaactttactgcacgaccgtgaaacaagagagatcattggaaaagcggcaagagaagagaccgagaaatatgattggagagcagcaacgacaaagatacgcaatgaacagtacagtgcagcgatttggttctggaggaaaaagaaagttcatgttttgggaccaatcaattggttgattaaacgactgtttccagtaccggaaggtaacgtgtagaaaaagcagtggacgaggatttggtatggaatgtgaagatttgatagtctatggtttcatttactgaaaatcctctgtttgattaatggtgtttatcttatacttggattgcttatatatgttcatggaaaggttgatgttgtaaattgtaagatatgtgtgtctatgtctaataggaggtttaaaacctggtttgaactttggcctttagggttttagtttttttttagatatatactttgtgtttttattctattgtttttttcttttctttttattctgtaaaaaaacgattagcagattagtttatgtttctcttgctatttttgtgactattaaggctcggacaaagaaattaaatgcacccacaaactgtttagttggtttgatcgttatacaagttgtcaattctgttttagtttgttgttttttgttcgaggaacgtgtacgaggccggttcttagttgctggaagcacaaggacgcaccagcctattgataggcccattaatcgctacaaacttgggccttttgttacaa

SEQ ID NO: 140161 - DNA, 979 bp, Arabidopsis thaliana landsberg
  unsure (1)..(979): unsure at all n locations
ataattcaaaccttcacacacaacaaaaagcaaaaaaaactcatagtaaaacctgaaaaaaaaagaagtcaacctctttagatgtatttgtgttggatctcataagcctctatcagttcttgtctgtttcagcaaatcagtttcaagatggtgaacgcaatcccaaagcctatcaaggacatttgggacgaatggagcattcgaagtaccttaatcttcagtctcagccttcaaacatttctcattttctttgcacctcaaagaaaacgctcatccagaaaagttttactctctttcatttggtcagcttaccttcttgctgattggtctgccaatttcgccgccggacaaatctcagatagtcaaggagatgatccagaacccggagaaccgaaaaagagcgccgagttgtttgctttctgggttcctttcttgctcttgcatctcgggggtccagatacaatcactgcccttgcccttgaagataacgagctctggctcaggcacttgttgggtcttttctttcaatcagttgcaaccgtttacgtgcttttgcagtcgttacccaatgctctttggaaacctattttgctggtgtttgcgaccggggtgatcaagtatgtcgagaggacattagctttgtacctggcgagtcttgacaagttcaaagattccatgattcagcggcctgatcctggaccaaactatgcaaagctcatggaggaatacgcagccaagaaagatatgaagatgcctacacagattatcaaggttggcgagcctgagaaagatccaagagacgatgctccggtaaagcctcctgacgggttcactccactcaatattctccagtacgcctacaagtactgtaatatcttcaaaggtcttgtggttgatctcatctntacatttcaacaacgagctgagagcaagagattctttgactcgctgaaagcagaagaagcttaagaatcttaga

SEQ ID NO: 140162 - DNA, 477 bp, Arabidopsis thaliana landsberg
tcatcttcttctttaaccaaaaacacaacttacaagaaaactgttgaatctttgtatttatctacatgtcctttgacctttaataagaatctgagtggttggtctctgatttgatgagatgactgttgagctgatgatgagcagctacagcggcggcggaggaggaggtgatggttttcctgcaatcgccgcggcggcgaaaatggaagataccgctttgagagaagctgcttctgcagggattcacggtgtggaggagtttcttaaactgatcggtcaaagtcaacaaccaacggagaagagtcagacggagataaccgcggtgactgacgtcgccgttaacagcttcaagaaggtcatttctctactcggtagatctagaaccggacacgctagattcagacgagctcccgcgtcaacgcaaacgccgtttaagcaaacgccggtggttgaggaggaggtggaggtggaggataa

SEQ ID NO: 140163 - DNA, 767 bp, Arabidopsis thaliana landsberg; identical to SEQ ID NO: 51862

SEQ ID NO: 140164 - DNA, 1261 bp, Arabidopsis thaliana landsberg
acgagatcatcgaagaggatcaagaagagaaaaaacagagaagctaccaccaccatggaggataagtcttcttccaatcttgacgcgtctcgtaagatcagaacaaaaacgaaaaaacccaaatttctcagtctcaagctcgagctcaacacttctcacgagatcaacgagaatcccagaagcaagaagagcaagaagaagaacaacaacaaaaaacagagcaagaagaaagaaccggatacgacgccgtttaaggagaagaagagagcagagactactactacactggggggaggagagaaagaagaagagcaatacgacaccgttgcagcttacctcttcaattccgccaccgacagtacaatttcttcgatccacgatctcctcccttcctccgcggccaccgatgtagattgcggcggagaaaggaataatctttctccgtatgatcgtcaagaccacggatcgtcgtcgtcttcccttctaaggacggcgatgaggaaaggagcgagcgaggaggaggagacgacggaggagcggtgggtgagttattcagaggttgtggaggaagtgatgagtcggagcgggactccacgttgttgcggcggaggcgatggaaacgatggacggccttcgttggctctgaagcttgattatgagcagatcatggaggcttggtcggataaaggtacgctttatgtcgacggagaaccgccgcagacagtgccggacttgcatgcttccgctgatgtaagcaaaccatctctctatttgtctttttctttggtattatataatcataatcaatgcttaaattgactaattaatttgacatatgtaaaaccggtgaaatatcgaatgagtcacgagttcttttgccactgtaatgatgataatcttattaatgtattgtttttcacttctgagatacttgtaatatttaagctttgactagaaagttgtaacggcagactgaaatacttaaattgcgaaaacgcttaaattatacacattgttgctagtaattaagcaagatttgatagtagagttgtgttggtggtcttaggggtttaatgacggcggagaggcggggaatttatgggcagtgccggagatggaaacgacggagaggttatggagagggcatagagaagccagcttgctccggtataaagagaaacggcaaaaccgtcttttctctaagcggattcgatatcaagttcgtaaactcaatgccgagaaacgtcctcgtgttaaagta

SEQ ID NO: 140165 - DNA, 703 bp, Arabidopsis thaliana landsberg
tatcttcttccccttgactttggaagctgctattcctctgtaaaacaatagcatgaagaagaagctccagacacgttttccagcggtatgaaacattacttttcactgttttatagtttgttatgttcttcttcttatggagataaccatgaactctgttttgtgagttgtgagagtagttaggttcaacttttgctatgatttcaggtttacttcttcagggttccatggtccttgtcttcattaggtttttaaatttatctttgtgaatgtatctttggacttggagggctcttttgttcatggctagatataaataaactgcagagatatcttgtttagggctaatcaaagatgttgatatctacataagaaatttcttagtgtctgagtctgattttgtatgtgttgatatgttcaaaatttgtttcacacaaggattaagaagattatgcaaactgatgaggaagttggcaaaatagcaatggcagtccctcttcttgtttgtaagtgatgtgatgtttttgattttcttactcaaacgttgttcatatgttagcttgtgtcacatgtagttgatctgttctggttttgaatttaacttttcagctaaagctttggagctgtttttacaagacttgtgtcatcacacgtatgatgtaactctaagccgaggtgctaaaactgtcaacgcctttcattt

SEQ ID NO: 140166 - DNA, 623 bp, Arabidopsis thaliana landsberg
ctctgatcaaccctcctcctccgccgctgctacaaacactttaatatatattgccaccgtcctaccatatatatatagtccacttaagatctttccactcatttataacccaaatttgttctgtttcataaatatgtgtcttccatttcgacccgtctcgaaaacatattattcgtcttcttcttcgactatcgtgacgcgtatggtaaactgcatactactttttgtattcattttgttggtctacctcctcatctcggcctcaagacttcaatctaaaaactctattcatgcatacttctcatcttctgatcaagatcaatctcagagcccgacaaaaatcgagcacatcgtctttgggataggctcaagcgcgaactcgtggcgtgcacgtagagaatacgttaagctttggtgggatgctcagaaaatgagaggctgcgtctttgttgagcgtcccttgccgtcttctcaaaaccacacagattcatatctccttcctccggtttgtgtttcccaagatacttcccggttcaggtaatttagttcaatttgtttattgtttttagtcagaaaaaagtttcaacttctgtttcatcataaattaaaaataagtatagttt

SEQ ID NO: 140167 - DNA, 597 bp, Arabidopsis thaliana landsberg
aaatatattctctcggttttttccagagcgtatattcaaattcttccttaaaaagtaaaaattaatctgattctctctactactactactacgatgggtgaggttagtcacttcatcttcttcttcttcgatttctctgtccgatctctctaacaaacacgtgattgatttcaatttctctttcgattttgcagaaaaaggaagaaacggcgacgaaacctcaaggagagaagaaacctaccgatggtggaatcaccaccgtcgttatgaagcttgatatgcattgtgaaggttgcggcaagaaaatcaaacgaatcttcaaacatttcaaaggtatttaaatcaattgatttctctttggatttgattactttcgaatttgaaaccctaacccgaattttaattgtaatttaggtgtggaagatgtgaagattgattataagagtaacaaattgacggtgatcggaaacgtagatccagtggaagttcgtgataaagtggccgacaaaattaagagaccagtcgaacttgtctctacagtagcgccgccgaagaaagagacacctccttcatcaggcggtgcagagaagaagcctt

SEQ ID NO: 140168 - DNA, 552 bp, Arabidopsis thaliana landsberg
gaaaagatctttaatattttttttatttctcttcctggttgagaacttttacttcctctccccttaattgcaacaatgggaaattgttgctctcatggaagagattcagataataacaaagaagaaccgaggccggaaaatggaggcggcggtgttggtgccgctgaagcctctgttagagcttctaaacacccgccagcatctcctcctcctgcaaccaaacaaggaccaataggacctgtcttagggcgaccaatggaagatgtaaagagctcatatacattgggtaaggagctaggtcgtggacagtttggggtgactcatctctgcacgcaaaaggccacggggctgcaattcgcttgcaagaccattgctaaaaggaagctcgtgaacaaagaagacattgaggatgtgagaagggaggtgcagattatgcatcacttgaccggtcagccaaacattgtggagcttaaaggagcgtatgaggataagcattctgtgcatttagttatggagctttgcgcgggaggtgagttgttgacaggattcgta

SEQ ID NO: 140169 - DNA, 2602 bp, Arabidopsis thaliana landsberg
aaaacaaaacaaaaccaaatcccaaaggattggtccaaaatctgtgtttacaaaatatcaatggcaatttcgtagtaaagataaaaaacaaggatattgtttttaatctttctattaccctattattctcttatatatatatactcttccctccggtcaaatctcgtcgtcttgtttggtctctgtttttcacgccggagatagagagagagaagtaaaaaagcgagaaaaagctagaaactttagaatacccaataatggatccgatcgaatctgtcgaatacaatggcttcgagacctctaacggtaacgtcgaccatggttggaagaaagtcgtgtacccgaaacgtcaccggaagcaaaaacaagcggatcaagcgacggcaaatggtggcaaaactgttgcttcaaatggaaccgtagctaacggcggagataacgttctctgttcgttggaagagcaagctgaggatcgtcgacgacggatcttagcggcgaagatgactgctattgattcagatgatgatggtgttgttagatctaaacatcgatctaatggttacggtgatgatgggtatgattttgatggtagtgatgatgagatcgcaacgctgaaggttgaggaagttaagaagccaaagcctaagaaggagaagaagcctaaagtttctttgcctgaagctgcatcaaagatcgatcctttaaatctcgaagcttttctcgttgaagcatcggtatgtgcatggatttgagatttgagatttggttttgatctgtttgtgatttagctgaattgtgatctaaagtttcgttttttcaatgttgggtttataggaatcgtatgcgagtcagcctgagattcagctaatgagatttgctgattactttgggagagcactttctggagtctcatctgtgcaatttccatgggtgaagatgtttaaagagtctcctttgtctaagctgattgaagtgagtttgtgtttttaacattgtttgaggttttggaattggattctaggtttaggttttgataaaggtgagatcgtttttgtttatgaataggttccgttagctcatattccggaaccagtgtataagacatcagttgattggatcaaccatcgtccaattgaggcacttggagcctttgtgttgtgggcttttgattgtattctcacagatttagcagcacaacaaggtggtgctaaaggtgggaagaagggtggtcaacaaactacttccaaatctcaggtgatttggaaaacctttctcgatctctaaactctgatctttgattatcaatgttattacctttcgattactaagtccattattgtacattcgtataggtggcaatatttgttgcattagcgatggtattgcgtaggaagcctgatgctttgactaatgtattgccaactctgagggagaatcctaagtatcagggtcaggataagcttccggttacagtttggatgatggctcaggtttgtgtgatttgttttgtaaatgagtattaattgtgtcaagatttgtgttttctgtgatctttattctaatttttgtaaaactgtaaaatgtggacaggcctcccaaggtgatatagctgtaggcttgtattcatgggctcacaacttgttacctgttgtcggtaataagaactgtaaccctcagtcaagggatctcatcctgcagttggttgagaagtgagtaaaaaacttcttgtggtcttattcttgctgtgtttgtagtcagtcatctaatcttgtttatatgcaattttcttatcagaattttgacgaatccaaaggctcgtaccatacttgtaaatggagctgttaggaagggagagcgtttgattccacctccttcatttgagatcttgttgcggcttacattccctgcatcatctgcaagagtaaaggtaagtcgtattgctggaattttgtaaaacgaaaccttgattcattttgttgattctcacaagcatgatcttcgttgcacacaggctacagagaggtttgaggcaatatatcccttgctgaaagaagtggctcttgctggtgcaccaggaagcaaggcgatgaaacaagtcacacaacagatattcacttttgctctgaaattagctggagaaggtactattaacaatcttgattcccttagttttctgcttccctcagctccgctagattagagttttaatgttatcgttgttacaggaaatcctgttttagccaaggaagctacagcaattgctatctggtctgtgacccaaaactttgattgctgcaagcactgggacaatctctacaaggagaatctggaagctagtgttgctgttcttaaaaagcttgttgaagaatggaaggagcattcggtcaaactatcatcatcaccgaatgatgctctcactctcaacccaactatgaaaagcttcaagctaaaggtaacagcctccacactttctaagctttaatttcaccctccagtctcttgtaaatctaatctccgatactttcctgtgatgatttagaacgaggaggtcatcactgcgggaggagccaatgcttctctttacaaagaagctgacaagtct

SEQ ID NO: 140170 - DNA, 844 bp, Arabidopsis thaliana landsberg
tacctccctctctatatattaaaccctatctacttaactcttcttctaactctaatctctctctctatttactctgcttctgttctcactctgaaagaaccaaaacatgacggtggttagagagtacgacccgacccgagacttagccggcgtggaggacgtggaacgacggtgtgaagtcggaccaagcggcaagctttctcttttcaccgaccttttgggtgacccgatttgtagaatccgacattcaccttcctatctcatgctggtaataacatgtttcacaatcttttatcttcttttacttgtatgtctcttcaaaaactctgtttgttttttgaacctagaagtagaaaacatagaacaccaacttctcaacctttggttaatccaaaaaacccattttccataaacaattaaagttcggttctttttttggtatcatttctatttttttccgattcttgataagatcaaaagactcatcatttatattattttttgcaaccaaatgatacccgagtaactataactaataaagtttcctctttattataaaaggttaaaaacatataataacggaaaatttaaattatgggactgtaacaggtggctgagatgggtacggagaagaaggagatagtgggcatgattagaggatgtatcaaaaccgttacatgtggccaaaaactcgatttaaatcacaaatctcaaaacgatgtcgttaagcctctttacactaaactcgcttacgtcttgggccttcgcgtctctccttttcacaggtacccttccgttttcctcccactcataatcacacgctattatagattttggttatcta

SEQ ID NO: 140171 - DNA, 774 bp, Arabidopsis thaliana landsberg
gaatggtcctactgagtatagaagcagaactgtgtttgaagatgcaactcctgtgatgttaagagactttttctgggatgatgagtttagaccaacttgggatacaatgctttctaattccactactgttgaagagtgtcccagtactggaaccatgattgttagatggatacgcaaggttagttactctctgcctctctagttgctttacttgttttgtaacattttgatgagtggttcttagattgatctttcctttcatgtatgttccggtgttgcagttcccgttcttctgcagtgatagagagtatgtaatcggtcgcaggatatggaattgtggaaactcttattactgtgttacaaaggtatgtgtactagtaacaaaaatggactcttttacattgatgtgataaagagtaaaaagaagctcgagttagcttcgatgtcaggctagtttttctgcatagaattgcaattgaattgccagcttacctctaaatcagttggtttgggatttgaacaggttatatagaaaagagatgaagaatagattcattttttgtgctcttactttgcattgcaaagaaccagttacaataacaacaccctaagattgtatctcgttcttggttcagggagtatcggttccttctataccgcctaacaacaaacaaaaacgcgtggatttgttctactcaagctggtgcattcgaccaggtaaagatatcttctgtgatctttcaagaaccgaataactttaaacaaagtgaaaca

SEQ ID NO: 140172 - DNA, 1223 bp, Arabidopsis thaliana landsberg
gcatgcagagacatcttcaatagcttcacaaaaagtgtgtaagcaggtctgtagcttcttttctctcccagacaagttgtatgtatacataaattgatttcatgccatctgatattcctctgttttccacgcagcataatgatcagaagcatcgccttactgaacaaaagagccctgtgctccgaacaatgctaagagctcgtcgtactatagcaaaaactactgcagaacttgagcaagaggaactgaagaaggcaccaaagttcaaagcaaaacctttgaacaaaaaggtactccagctactgaactggtgtagtttaatactgtttacttcatttctctctcttaatctaacttgaaatcacatcaaatcacccagatatttgaaagtaaaggagaaatgggtatcttttgcaacaccaagaagcacataacgatacctcaagagtttcactttgcgacagatgagaggatatcacgaccagaatctgtcttagatatattcgacaaggtatacttcaattaacagaaccactgtattctttagtattttcctctggatgtctcggtctttgacacaatttttcttttcagctctcactgaactccgaatcttgccatgaaaaacctctaccaaggaacactgctccaaaccccttcaatcttaagacagaagtatgtgtacaacgaacaacctctctaaggtccaaatgacttgccaccaatctttgctgaccgttctttgaaaactacttttttgtggaatccaggaaagaggcgctgagaaagagaagaaattttatatggaactcatgtataagaaattaggagatgtaaaggcaagagttccaaaggcaaatccatatccttacacgacggactatccagtggtatgtacatcctaaacttcttattttccttccttggttttgtttttgtgttgcagaagagagagatggtgttgataaatcttacgtgttccaactctcaggtaccaccaaaaccagaacctaagcaatgcacacaaccagaaccgttccagttagagagtctagtaaggcacgaagaggaaatgcgaagagaaagggaagagaggaggagaatggagacagaagaagcccagaagaggctcttcaaagcacaaccagttataaaagagtaagtgaccttcccttttactatttgtttatctcccgaatctttatcaacgttttcaaaatgct

SEQ ID NO: 140173 - DNA, 463 bp, Arabidopsis thaliana landsberg
aagaagagtgatactgagaagatctgtgagattattatattcgattttgatcagtttctaaaaagctttcaacaatggattcgtcttcaaatttgaatcctcttggtgaagatacctcagaggaacatttagaacccatagaagctccggcgtctgtcttcgccgctcgtcctcttcgtcctccttctacgttagtttcagtttcaattctcaattctccttccgatctcgttttcatcgtgaaattggtttttgttgtttcaggaattcgtcggagaagtattcgcctgtagaatggaaaagctattttgataaagaagatgatatatcaatcactggctctgatgatgtaacgtttaacgagtttgatatctaagtttctagaaagtttttggttttggtaactaatggagtgtattatcattttttaggtgtttcatgtgtatatggcgggaaatgaagg

SEQ ID NO: 140174 - DNA, 2239 bp, Arabidopsis thaliana landsberg; identical to SEQ ID NO: 7290

SEQ ID NO: 140175 - DNA, 1433 bp, Arabidopsis thaliana landsberg
tgttgtgttgacaagatgtggtaagatgaatttgcagggggattaagaaccattatgaaaatccatattaaaaaggcaaattgttccgagtgggaagagatccatgttcctaagaggttcatataaaactaatcttatctttgattaaaactaaaaaaatggcttcacttataatctctctggttttgttttggtgtagcgtaagatctattgtggtgttgaatctttataactatggaagtggaagacatccatggggtaatctcagaccaaaatatttagagaaggtaataatgttttattcagtacactaatcttaggttttattgctttctctacaagctttaacagaacgtgttcgggttttataacagagaggatttgtggaggcgcattgtgatgacggactgatagagatcttcggtttaaagcaaggttggcatgcgtcatttgtaatggctgaaattatctcagctaagcacattgctcaggtacaacaaaatacatccaaagtttctttataagaataggtttaacctcggtttgatattaaaccgtttatcgttttaggcggctgcgattagatttgaactaagaggaggtgattggaaaaatgcattcttgcaaatggatggtgagccatggaaacaaccgatgaagagtgattattcgacttttgtagagataaaaaaggttccttttcaatcgttaatgatcaatggcgaatgatcgaggaaactcttttcaagaagttgtaaaaggattaaaaaagcatgattctttatgtatttctgttccatcaattagtcaaaatagtgatctatgttgagcttttgctacggctgttgttgtgctagtgaagcatttaactttgtgtattttatcaaaaaaagatggttatttattcaatagtcattaatatacaattaagatataagcaatcatcttcaggtagaccttgaaatcttgtaaacatgattttgctgtctttaaactctgtttcttaagtcgtttttcagtgttttggagatagtagtaatgggtctaaaaagttaaataatgtttttgtggggagaaaaatgaaaatagcagattttcgaggatgggaagagtaaaacatatatttgagaagtcgaaaagtgtgaaatatttgttctgtctcgcgaggaagagagaaaaatcgaattagaaattgcaagttttagggttttagaaaatctatcttcttcactgagttttccagctccgaagaacacttgcaacttcaggcaattatggcgagcaccaaagttcagaggattatgactcaacccattgtacattcctcgatttctgtttactaattcgatcttctttttttttattgtttctgtttagctcactgttcttcttacttttgatttcagaatctgattttcagatttctccaaagt

SEQ ID NO: 140176 - DNA, 1004 bp, Arabidopsis thaliana landsberg
cttatttttctttcttctaaaaattatttatttatgtttctgtaaataaaaattcgtttttttctgtcaatcatactgttttgtctcagaataaaaaaaaaaaaccttcactgttttgtgtggtgtggttacgaagaaagaactcttctccttctccttcttattctttctcttcttcttctctctctctctctctctgagtgtctggttacatttggcgcgaaaagttcttcactttatagcttttttatctctttaattatccgacagcttcgttacaaataaagatgtcagtaagtgcgttctctctttttgcttctctcttaactaccattacattacatacctcttctttctaggttgtccctttctcggaattgctcttcttcatcgtttctttaactatttacttctctatttttcatcattccgttggatcggattctaaacagtttgacaaacctggatctgtaattctaactcagattcttctgttgtagcaggtggtaacaatcttgatactggcattaaccagtgttattcccatttacgcaaacgttcacggcgccgggaaaatatgcgacgaacttggccggcgatcattgagtacaagaccacacagtgtctccattacagattttggagctgttggagatggcaaaacgctcaacactcttgcgtttcaaaacgccgttttctatcttatgtctttcgccgacaaaggtggggcccagctctatgttccgccgggacattggctcaccgggagttttagcctcaccagccacctcactctctttctcgaaaacggcgccgttatagtcgcttctcaggtatattacaatgcttctttctcattctcacatttatcccaaacttttaaatttatccaaaaaccccaaatttttacttcaaaaggatccatagcattgggaagtggttgatcctttaccttcatacggaaggggaattgatttgcctgccaagcgatacaagagtttgat

SEQ ID NO: 140177 - DNA, 1305 bp, Arabidopsis thaliana landsberg
  unsure (1)..(1305): unsure at all n locations
ctgtttgtactttataattcctcaaaccaaaaaaacaacaaaaaataaaataaagggaaaaaaaaaaattggagaggaagagaaaggaggaaatcgaaaccattcggttggtgatgggccaagcgccgtcgtctacggcggaatcgaacggacgagagttagatttgaggttatggtctccggtgattgttgctggaggtgaatcgatggctgtggggaatgttgtggatcgggatttcaccggagatctgccggatgagtgtttagctcatgtgtttcagtttcttggagctggagatcggaagcgatgctctcttgtttgtaaacggtggttgctcgtcgacggtcagagtcgtcatcggttatctctagatgctaaggatgagatcttctctttccttacctctatgttcaatcgattcgattcggtgacgaagcttgctctccgatgtgatcggaagtctgttagcttgagcgatgaagctttggctatgatctctgttcgttgtttgaatctgactcgtgttaagcttcgtggttgtcgcgagattacggatctgggaatggaagacttcgctaagaattgtaaaaatcttaagaagctatctgttggatcttgcaatttcggagctaaaggcgtgaacgcgatgctcgaacattgtaagcttctggaggaattgtcggtgaagcgacttcgaggaattcatgaagcagctgagttgattcacctacctgatgatgcttcatcttcttcgctcaggtctatttgcttgaaggagctcgttaatggccaggtatttgaaccgttgcttgctactacaagaacactgaaaacactgaaaatcattcgttgtttgggtgattgggataaagttcttcagatgattgcaaatggtaagagttctttaagtgaaattcacttagagaggctccaagttagtgacattgggctatctgcgatatctaaatgctcaaatgttgagacattgcatatagtgaaaactccagaatgttcannnnnnnnnnnnnnnnnnnnnnnnnnnagatgtaagctgctgaggaagcttcatattgatggttggaggactaataggataggtgatgaaggtttactttctgtagccaaacactgtttaaacttgcaagaacttgtgctgattggtgttaatgcaacacatatgagtttagcagccattgcttcaaactgtgagaaactcgaacggttagcacttccaggaagccgaacaataggcgatacagagaaagcttgcaaagctaggaaatgtggagcattgaggaaattct

SEQ ID NO: 140178 - DNA, 1770 bp, Arabidopsis thaliana landsberg
ttgcatgttttttgctcttgtcagggaaacctgctttcagtaaagtatttgttctggagagggacagggaaaaaaattgctcgcttgttaaggttttcttctgttccatcttatttccaaatgtcatatgtcacacaaggtttacccagaaagtaaatgagatagtaaaaccaaaacgaaagttagccacaatcatcttgtttttatgcaaaacaggtagagatacaatctggaagaccacatcaaatccggattcatcttgcatacatgggacatcccttggtaggtaaaaacttctgtttccttcgggtctgtcacacgttttgagctggtattatgcgtggtttgtgcatttatagtccttcattattagtatagaataaaaaaagttggatacgtagctttgtaagacaagatagacaaatgtttttttcccagataactaagcaataatggaacaaccaaactgctcggcggtgttaggaaaactttagtaaaacattgaatacaaattgatgaaaccatgttttgatggatgaaaagatcttactcccacttgatgattcaactagttataattgtatgagccatatacaatatagttgcaatctaggacatgagttgcttatggcatagtctaggaagctttttgctacacataagttttcttttggcagtggtctatgatagagatgacgatgtttactggatctgagtgcttacgtgctgatcaaagtgcaggggaccctctttatgtttcgggcggccatccaaagtgctttgatcccgatcttgtagatgatgccgcagcctttgccgaagatgggtacaaaattagatcatcattcttcatacttatagtttctgtataccttgagatgaacagtccttggaaattgaacaatatttgagctaaccaatgttgtacgatgcaatctagtacgtagtttcatgtggagtaaattggtctgttaactagatgctatcacctgttatggcatgtgtcgtcattatgactgaatatattgcagaggttacagaaggccaaatcaggctgttcctggggattgtggatatcatctgcatgctcatcaagtagagctaccaaacctgctgaacactcataaggtaactcacgtagatcatacctaagcctcagtggtcaggctctttacgagatctctcagtccttatctaaacaatccaattgttcatgtccttaccattctgcaggtagtaaaaattgtagcaccgctgccaccaattctccaaacaagatgtgagacgtaagaaaaaggtttatcctcctgcaagtgaagttgcataagtctttcactgtacaacattagacatgcttgttcatcaagtgttatcctttttgaaaaacatacagagagctaagcttagctcttagatctctctgttattatcagtaacattacaaatacaaacatcagctatgaattttctgcaggcacctaactttagctgaaccaaaaaaaaaaaaaatgcctatattaattgacattctaaattaaaaaaaaaagatgttaaaagagatataatacagataggttgacaagcaaagaatatgccaatcctccaaaacaaactaatcatgaccctaagaagctttttcattcacgtggctgcctctgctacaccatttacccctcctatgttaccttcatccttagcgcttgaggactcagctctatcttcgttatgcttaccaaagctcaaaattccaccattaacatccaccagaat

SEQ ID NO: 140179 - DNA, 2461 bp, Arabidopsis thaliana landsberg
  unsure (1)..(2461): unsure at all n locations
catcgattgcgatcgctcttacaattttcttcatcaccggtaaaaatatcgaaccccagacgagaagaatgcatgatttagcttcactatcccgtacgggatgcttctcatcgacggaggatttatcgggtacatgaagaaaggaagtataacatctttcgccggaggtgcaggcactggattattactcattctcgctggttatatcagtctcaaagcttttgagaagaagaagaattccactattgctatggttcttcagacaggtttttttcttgcaaatttctttcctttttagcgatctgggtttatatgtctttaacagatatttatgtttaggaagatttattcgtatgattccgttagatgtccatagggaagactttcaattacaagatgtgaatagcttttagtgacttatcacttgagccaaggaattgtttcattttgttttcaatttgttatggttcaatgtgttggatcatgaacttagcttgagagttgatgataggttatgttataaggttaaggatcttattggaccactaacgatctggatctgaataagtgatttgtgtgatgatgctaaacttgctattcaaagataaaaaaaattaatattttggttgtgtttggatcttcaattgcagcagtatttgaattggtttgctaattttttccactaatgtaatagtgtctctcttggacaagatgctgttttactgcagatgaacattcaatttgagttgttagatgttgtagttgagtagctgtttttaattagtgttcttgccattgattgacaatagaaccaacctcaaagatataacaagcttgcaaaatcgattttcattatctatggtgactgaaactcatctgaatgtttcttttttttttcgatacagtcatcgcagctgctctcacactagtcatgggacagcgttacttgctgactggaaagattatgccgggtggtttggttgctgggatcaggtaaaaatccttcaacactggctggctagtatctttgtttgcatcaagatttggtatttttaagtttttacaccattgacttaactctagaaccatatctgtattgcagtgctctcatgacctgtttttacgtatacaagatcgctactggtggcaataaattcccagcaaaagctgaatgatggttctgctacatgcagatgatactatccgttgttgaatttgtcgattagaattctttttggtgtacacaatgcggttgtcataacgccttaatagcttgtattagtcaaagaactgcatatggtcttgtgttttcttgtcatcgtgtttttgtaaccacaaactgttttgagcaatactactatatatattgagatatatctgccgtttcgatacacacttgggatctggggatgagcacatcgtaaaacaaaatagaagttgatcctcaaaacttctttgtaaccttgtgtcatcacaacaaaaaatcttcaatgtgtttgttctctccttaaagtatatcttgattcatgcagtaacaaaggcaagactcttttgcaagagtatagaaaccagactcaagctgtgcgatggtgattcttttggagaagttggatttgtgctctgatgtaaagggaaacttaagctaaaaggtccatcaatggaggtgacacatagttttagaaaatgtgcttttctcatgctagaaatgttatggagaccccaaaatgcttttcggaaaaaattctcatgctagtagctaggctctacttaacgaggtgacagctaanataagttctttttattccattttcagaatagtgacattcttcttacaaatatagaaaaactacaattaatgctactggagagtctgattacgttttaagctaattgttccatttttaggacgtggtagattgtgtagattattgctaaacagttcatgagttcaataattcacttattcttcactccatcttcagcaaaaaaaaaaaaaagtaagaagaaacactgaaagctctccactaccatggcgtgtcctagagtgatttttctgattctgatcacgttcttcattttacagactgctttctcaagttcttggcaaacattgagtggttagagacagagttctctcactttttatgtacgtgaatttttcataaatgttccttacagtttcttgatgtgttttctttagggaaacctccggctgtgattgctcgaggcggattctctggtatgtttccagattccagtattcaagcatatcagttggtgaatataacaacttcaccagacgtaatgctatggtgtgatcttcaactaacaaaggatggtgttggaatctgctttccaaatctgaagcttgacaatggttctaacgtcataagaattgacccacattacaaagaaaggttttctgttgatttcacatggaaggaactctctgatgtgaaat

SEQ ID NO: 140180 - DNA, 2457 bp, Arabidopsis thaliana landsberg; identical to SEQ ID NO: 29797

SEQ ID NO: 140181 - DNA, 636 bp, Arabidopsis thaliana landsberg
gattgttctttatggaaacatcggctctggacgccacaaatgtagacaaagcctttgagatcgttatcagagagatcttcaacaatgtcagccgcaaacttctcaactctgatgcttacaaagcagagctttccgttaaccgggtcagccttgtcaacaaccaagatggctccgagagctcttggcggaatccgtcttgttgctcccgatgatttcaatcaatcttgtttttaccagagaaagctttataaggttataattatcatttatgaagtcagacttataataagatacttgcaatctgttttgtcttgatactacacattggttctggccgagggattaaacaaaaatgacctgaccgaatagagaaaatggcgaaaacatgaactttagtgggagttatgtacatagaaaaatatataacattaacagatggaatggttgatcaagtacaatcagggttttcgtaaagcggaaccagcacccattactactgccaagacaaggccaagaccagctccaagtgaagcacctacagctgctgctgacattgatgatgacttggcctgtgaaccatctacgacacggtctttggctagttccaccagcagtctgtctctagcaagttcctga

SEQ ID NO: 140182 - DNA, 1307 bp, Arabidopsis thaliana landsberg
tctctctctctctttctctatctgtagttttcaagagaaaatttgattagcccagttttacctcaagtcaaaatcgaagacactgatgatgttacagaggagatggtggaaaccacgttaaagaggggtctagatttctattcaactatacaggcacacgacgggcactggccaggtgattatggtggtcctatgtttcttctcccaggactggtcagttcatatgtttcgtgcctaagctttcttttgcaaattttacggaaaacttgacaaaaactacttttgattacagataattacactctccataactggagcactgaatacagtattgtcggaacaacataaacaagaaatgcgccgttatctctataatcaccaggcaagaaatttctcgtatctttactataattctgtttccttgcaatgctgtacttggattttccatcgcaaaatagatgtttacacatctttctgtttcaaagattttcgtcttctactttctaattgttaaactaatttgcactattggtggcatgtggtttcagaatgaggacggaggttggggtttacatattgagggccctagcaccatgtttgggtctgtgttgaactatgttactctaaggttgcttggagaaggacctaacgatggagatggagatatggagaaaggacgagactggatactaaatcatggtggtgctaccaatattacatcttgggggaaaatgtggctatcggtactaaagttttgacctctatctgtcctttaaagttatcgtatgaaaatttctgttacttgactcatctttttgcttggatctgctaatactgtaaataaaggtacttggagcttttgaatggtccggaaataacccactgccacctgagatatggcttctcccatatttcctgccaatacatccaggtaaaatgacaatctcatgtgttcttgactttctcaacttatatactgtttaagtttattcttttccctgtctccaattgttgatctgactaaactattcattcaaatgaagtgcctcgtattatcaattcttggttcagccgctatttataaagaatggaaaaaccagagtgctgtaaccatgcccgtatctgttttgtctcctttatgcttccttaggttcaactatttatttgggatttaattatagttatattggtaatgcgctccataagcagtacattatttcagactttatgatatggaacaccctcgatcatggacaactcaagtgaagtaaatcttgaatttttttgtaaatctgcttggaatcgag

SEQ ID NO: 140183 - DNA, 737 bp, Arabidopsis thaliana landsberg
cagagactctccttccatctacccttagagggcgcgcctcccgtgcgccttcttaactggttatggaatccaaatgtctcatgttcgtttccattgtatctgtcttcttcatggttgttcatggcgtatcagagaccgaaactctcttgaaattcaagaattctcttgttattgggagagcaaatgctttggagagctggaatagaaggaatcctccatgcaaatggactggtgtcttgtgtgatagaggctttgtttgggggttacgactagagaatcttgagctctctggctctatcgacatcgaggcgttgatgggtttgaagtctctaaggtctcttagtttcataaacaacaaatttaaaggtctatttccagagttcaagaaacttgttgctttgaaatcactttacttgtcaaacaatcaattcgacctagagatacctaaggatgcatttgatggcatggggtggttgaaaaaacttcatctggagcaaaataattttattggtgaaattccaacgtccttggtcaaaagtccaaagcttatagagcttagacttgacggaaaccggttcaccggacaaataccagaattcacacatcatccaaacatgttaaacctttcaaacaatgcattggcaggtcaaatcccaaatagtttcagtacaatggatccaaaattgtttgaaggtgcactaatttttttcacttttgttataactctagaaaaacca

SEQ ID NO: 140184 - DNA, 662 bp, Arabidopsis thaliana landsberg
cattcacaaaccattcataaccaaaatcgtcggtgtcacattttgtcacgtctcttcttaaaaaaaaaaaaatgggagaaaacggagccaagcgatggaacttcggagctaacgaggtcgtcgaacgatctaactcacttaccattcgtgattaccttaacaccttaatcaattgtctcgacggtggtgatgtaagacccgtcatcccactaggtcacggcgatccttctccgttcccgagctttcgtaccgatcaagccgctgttgaagccatctgtgatgctgtccgttcgaccaagtttaacaactactcttcttcttccggtgttcctgtcgctaggaagtaagattacttcttcttcttcgttttttttttgttttcttttggtatctctaagggtctctgttcttgcttcttgattactcaaagacaataatctgaaacgttgaattggttaaaatctttgattagtgtatactttggatcacattggctttttgagaaaggattgatgatttggttggttctgtttctctacctcaatagggctgttgcagagtacctctctagtgatctctcttaccagatatcaccaaatgatgttcatatcacagctggttgtgtgcaagccattgagattttgatatccgctctcgcaatt

SEQ ID NO: 140185 - DNA, 1435 bp, Arabidopsis thaliana landsberg
acttaccagctcctttcatgtcgacacgtgaacctaatcaataaagatcacacctttaagatgcaaatttcccaacataaacagagttacatacagaaatcaaaaattaagcatggcacaatcgagaaacaaaaacctaaaacagagtaagagtaccaaaaccataaacttacttgaacagagaaaatctgtagaatcaagtaacgacggctaaagaggacaacgaacggcgaagaaacgagagaactcacgagaagtaaagagatcgtaagaccagaaaaaaaaagaggaaattatggtatttaatttaaaccgttggttttgcaatttcagttggttttaaaatactgtaccgaccggtttattacatgatacctttcgttaacaaagaaagccaacaaccacacgacacgacaccaacaaccacacgacacgacacgaccgatctatagcttcggcgagatcagaagaaagcttcccggagcaactcggtcgttgtgactcattccgagttaaaaaaatcgggttttcgacaccatggatatgagttcaatggctggttcaatcggagtttcggtagccgtactccgattcctcctctgtttcgttgccacgatccctgtttcattcgcttgtcgaatcgtcccgagtagactcggtaaacacttgtatgccgctgcttcaggtgctttcctctcttacctctcctttggcttctcctccaaccttcacttccttgttccgatgacgatcggatatgcttccatggcgatttatagacccaagtgtggaatcatcactttcttcctcggtttcgcttatcttattggctggtactaaattctgaaccctttatgctatgaattagtgcagaatcgtcttccttctgattgaccctgatttagttatggtgcaaattcgtgatttgtgtgtgtagtcatgtgttttatatgagtggtgatgcgtggaaagaaggaggaatcgattctactggtaactcttaatttcctcatctgaaagttgcttccttttgatttggatgctctttgttgttcatgtgtagtaattgtgattagcttcttaacttgcccttcttgttgttcatgtgttaggagcgttaatggtgttgacgctgaaagttatctcatgttcaatgaattacaatgatgggatgttgaaggaggaaggtctacgtgaagctcagaagaaaaacagattgattcagatgccgtctttgattgagtactttggttactgcctttgttgtggtagccattttgctggtcctgtttatgaaatgaaagattatctcgaatggacagaagggaaaggggtaagcttcgttttcttcttgagatctttcaatcttatcaagaaatcttaatagactagattgtgaatatgtaaactttgtgctttctagatttggaacttc

SEQ ID NO: 140186 - DNA, 986 bp, Arabidopsis thaliana landsberg
tttcgatcgtcttctctgtctcgcgttagtccgaagagtatgtttcttttcgtgattcactcgttttaccttcttcgttatagtcttttttttcccgttttctttttcctatggcaaaggttcctttgtttgataatttggattatgctctttttgttgcattctgtgtgaggcttatcccttgtctgttcactgagaagtcgttcttggttcgtgagggagatccagtcacgaagatgctcttcattatccgtggtaggctcgaaagtgttaccactgatggcggtagaagcggtttctacatccggagtttacttaaagtagtagttttctgcggtgacgagcttttgacatgggcgcttgatcccaaatccggttctaacctcccttcctctacaagaaccgtgaaggccttaaccgaagtagaagctttcgctctgatagccgatgagctgaaattcgtggcaagccagttcaggagactccatagcagacaagtacaacacacgttcagattctattcacagcaatggaggacttgggccgcttgcttcatgcaagcagcatggcgacggtacataaagaggaagaaattggagcaacttagaaaagaagaggaagaagaagaagcggcagcagcatcggttatagcaggaggaagtccttatagcataagagcaacgttcttggcttcaaagtttgcggcaaatgcacttcgtagcgttcacaagaaccgaaccgcgaaatcaacattgttgttgtcatctactaaagaattggtgaaatttcagaaacctccagaaccagatttctctgctgaagatcactgatccaatatcgcatacgcaagaattctttttctttttaacttgtacacaatctctaagaatgctccaaatttttttgttgttgtttaaacacttactgtaatataaatgattatttgtgatcgttcttaatcttgttattacatagaaatgtttttt

SEQ ID NO: 140187 - DNA, 631 bp, Arabidopsis thaliana landsberg
tgactatttataggtaaaaaacctcctctcagggacgcagccctcgcagacattgccatctcaacttcagctgcccctacatactggcctgcccatttcttcaaagttgaagatttaaacggaaacgctaaagaatacaatcttattgatggtggagttgcagctaacaacccggtaaatttctaaatattggatttatttatgtagcaatagggtttttatacgaagaatataatatatcaacaattattatggacttaaattgaataattataacatgaacacacaatgttagactatatttcattttttactatggaatttcttataataatcgatacgagttttctttaaaaatcttgaatagatcatgatatagttgttatatgtcaagtataggctttgttggccattggggaagtaacaaatgagatctcaggaggaagcagtgactttttcccaataagaccaaatgattacggaaggtttcttgtgctttcgcttggaaccggaaatcataaagccgaagagaaattcaatgcaaaagaagtagctggttggggactattgaattggttaacacacgacaactctacacctatcattgatgctttctcgcaagctagcaccg

SEQ ID NO: 140188 - DNA, 1023 bp, Arabidopsis thaliana landsberg
gttttatgttgcacaaaaaaattaaagatgtaatgattttttatacagtactatttcgtaattgatgtttgatttcgaagcaaaaaattcttggaaacttccttctcatcagaaagaagaagataaaaaggttggttgttgttgcatcgatctccaaatccagattgattcgtcacgaaatctgctcaccggttgtttcgtcgccgtcctctgttcacccaacgaagatgaacggcggtccctccggtttccgtacgtatcgtcttcctctctaacgcttgatcagtttcttctctgctcctgatttaaatgtcgatttctgagtgatgaattgttgactttgcagataatgctccggtaacgaaagccttcgttattacgagcgctcttttcactgtcttcttcgggatccaaggtcgttcttctaagctcggtttgtcttaccaggtatttcgcatttggtgtagatttctggggatttactttggaaattgctgtatgaacctagaatttgttcgattttgatctattagaacaatatgcagtacttagtgtgctgttgccttactgttttgaacaaacgttgttggcactcggaatgattctcgtttcgctaattatcatcatttatgagcttcaacttcgattttagtcagtcgtgtgatgctgaatattacatgatttgataaggagggtttagactcacttgtcgagtgttaagtagttcgatggcttgcatgtaattatctgtttctgttacctgaaagatgtttgattctagcatcctagtttatgattctaagttatttctacttgttatgtaaatctgatatctcataatactatttctctatttaatcttcttccaaacacgctgcaggacatttttgagaaatttcggatatggaagttaatcatgtccacttttgccttctcctccacaccagaattgatgttcggattgtatttgctatactacttccgagtttttgagagacagattggctcaaataagtactcggt

SEQ ID NO: 140189 - DNA, 794 bp, Arabidopsis thaliana landsberg; identical to SEQ ID NO: 10517

SEQ ID NO: 140190 - DNA, 1684 bp, Arabidopsis thaliana landsberg
  unsure (1)..(1684): unsure at all n locations
atgggttgctccccctccaagctcgacggtttaccggccgtatctctatgccgtgaccgctgcagctcactcgaagatacgctccggcgaagctacgccttagccgacgctcactcagcttatctcctttctctgaacaccgtcggtccagctctccatagattcttccaacatgccgtcgagtctccgccggatgttgaatccgaagctgacgaatcaccggagacgtattctccggaatcctgttcctcggctcactcggttaccagttctgattccgatttgcctcccaagttcgattcggattgtgaggaaggtgaaggtacgaattgcgatctcttaagcggttcaaaacctgaatctctaaatcttaatcatgactcgttctactcccggagatacgaatccggcaccataacgccgcctccgccaccgccggctccgagtaattacgcttgggattttatcaatttcttcgagagctatgagcttccgtacactacggatgtcaatgatttgaaggatagagagaccactccttctcatgaagaagataagttgaagaagaagaagattactgtgagccaaaacgatgagaagattaaagtagaagaagagaaaaaaactctgagaatctcagagaaaaataggaagcgtgctcctaaagaatcaaaggatcaaaaagtttcatcagatttatctgaagtaacaaagcaattgcaggaaatgttcaagaaagcttcagaatcagggaatgatgtttcgaagatgttcgacacttccagattcagatactaccagcaaagctctgtttatcaatgtaatgttcgagttcttcttccttcttcaaacattctctacacgaagaaggtgatgactccatttgatcccaaaccagtggaagaatctaatttcaataatctttcatctactctgaagaaacttttcatgtgggagaagaaactgtaccaagaagtaaaggtataatcaaaatgctctgaatggattgaagcaaaattatctaagtgttttatgttccttaagacttttgatttgttatttacaggctgaggagaaactccgaacatctcacatgaagaactacaaactattgaggagattggaagcaaaaagtgcagatctaagcaaaatcgaagctattcgttcttcgattcagtgtttgtctacaagaatgagagtttctatccataagataaacaacatttgtctgacgataaacaagttacgcgatgaagagctctggttccaaatgaaagagttgatccacaggtactacggacattaccataagaattttgtttgagaaatctcatgagttaactcagcttgttgtgtctcaatatttaggttgtctgagatgtggaactctatgctagaatgtcacagtagacaatctaaagtaatcgcagaggctaagaagcttgataagatgacaataaaggagaatctagacttatctcagcttgagcttgctatggaattgaaactggagttgaggaactggagtctaagcatgtcgaactggatagatgctcaggctcagtatgttaaagccttgaacaattggctaatgcgatgtttaaaacaggaacctcaagaaccaacaccagatctctcagaagagccaccgtagtttggtgctaaaaacacccggtccccnaac

SEQ ID NO: 140191 - DNA, 1006 bp, Arabidopsis thaliana landsberg
cacatcttatcatcacaatggcatctatgtctttttgcacatttgtcatccccatttatctgcaatgtttttcttttttgggggaatatgagtagtttgttaacagtatcgagaaataattatcatcttttttgtccaatggaaattgcagaaaatggttatgtatgcgaccaaacattttatatgtagcgagagtagtttagcagaacaataagcaaatatgcgtacaaactgaataatgttccaacttactatactattaaactaggagggagcaatgttttttcatgcctttactagttttctcataaaacttgatctggatattgcacttcgatgatctacgaaccattagcagatctccggtgattcgatacttctccttgtcgtttattgcacaggcacgaactttgacaagcacaagacatgacagtttctctatgaaatgtctcatttcctctagctcttcaattgttccttcatattcagttatcttcaatactttcacaggacatgacaatccatatattcttgtaaagttaagtatatatacagggagatcagactcgttggaaccactcgtactttgacttggaactgctccaaaactaaaagaatttttggtagatgattatgtatgtatccttctcttcctcctcttcttgttctagctttgatggactaaaatactagtcaaaattttgcttaatatataccccttattgcttctcagagatatatctacaaaaccgaggatcttccattttgatggaatcaactgagtcttgttcccggatgcttgtcatcgcagctagagatattcgagtggaaaggatatagagatagagtagaaggggaaaagttcttgacatacattttagccaactctaagcgtttaaagaccgcaacaatctctctgcccttcgatcttgaagatcaagaggtgatcatcgaggagttgaaagatattcctagggtttcaacaacatctcaccttttgttcata

SEQ ID NO: 140192 - DNA, 845 bp, Arabidopsis thaliana landsberg
tgtgtggctatggagaaactctattgtggcatgccgttactgcttctggttctgcttttagcttccattgatggctctacacagctacaatcatctcaatctcaaaccctcttgaggctgcaacagcttctctactatcccaaagtgttaaacagctggaacaactatacagatttctgcaattctgagccaagcccttcgctaaccgttgtgtgttatgaagatagtgtaacgcagcttcacattataggagacaatggaactcatatgttaccaaagagtttctcaataaactcgtttgttactactcttgttaagctccctgatgttaaagttctcacgtttgtgtcccttgggttatggggttggttacctcagaaaatcaaccgtttatcctctttggagattctcaatgtgagttccaatttcctctttggaccaatccctcatgaactctcgtcgcttgctactcttcagacgcttatactcgacgagaatatgttttctggtgagttaccggattggattgattctttgccgagtttagctgtgttgagcttgagaaagaacgtgcttaatgggtcattgccttcttctttgagtagcttgtcaggtcttagagttcttgctttagctaataaccggtttaatggagctttgcctgatttaagccatttgacaaaccttcaagtgcttgatcttgaaggaaactcttttggaccgttgtttcctcggttaagtaacaagctggttactcttatactcagcaagaacaagtttagatctgcagtttcagctgaagaagtaagttctctgtatcagcttcaacatttggatctttccta

SEQ ID NO: 140193 - DNA, 925 bp, Arabidopsis thaliana landsberg
ccatcttcttctactttgtcttccatcttcgccgacgagtcacatctccgaaatccggagccggagagggagaaagaaggagaatttgggttctccgagatcgaagctcttgcctcggaacccttgattttgttttggaataggctatttttttagtaaaagaggaaatggtgggaagtagtaattcgttagcgggtctacaagaccacttgaaattagcgagagaatatgcactagaaggatcctatgacacatctgtcatcttcttcgatggcgccattgctcagatcaacaagtaagtagctcctcttgtctctccagtcttgaatctagcttttttgtcaccccttttggcaatttcttcaagccctaagctactttaatagtttcgtgttggattgtattgaaatgggcttagaaaaatctagaattttgcaatgttcaccgtgcaatgtctgtgtagacagagatagaagactcttatgtgctgcgttagtggttctgaagctatggtatactgttttaggcatttaaacacccttgacgatcctttggcccggaccaaatggatgaacgttaaaaaggccataatggaagagacggaagttgtgaagcaattggatgcagagaggagagcatttaaagaagctcccactgggcgtcgcgctgcttctccacctatcaataccaaatcatcctttgtttttcagcccttggatgagtatccaacttcatccggtggtggtcctatggatgatcctgatgtgtggaggcctcctacccgtgatgttactagtcgaagacccgccagggctggtcaaactggtactagaaaatcacctcaagatggggcttgggctcgtggccctactacacggaccggtccagcttcccgtggtggcagaggtggggctactagtaagtc

SEQ ID NO: 140194 - DNA, 703 bp, Arabidopsis thaliana landsberg
tattaaatcacttgttgttgtctttcttttttcaaaccttggaagcaaggaattcttttttgatgatttaatcgaaagcttcttcctccaaacaaacatacatcaatggcggtttatcctaacgttaatggcgataagaagcactggtggttcactcacagaaaggtataagcgatctctaacctggaaatacagttcttgattcaaagatcatcatcaatcatgttaactttttttgggttttctcagcttgttgataagtatataaaggatgcaacaactttaatggcaagtgaggaggcaaacgacgtcgcttcagctcttcatttactagacgcagccttatctatctccccgcgtttggaaactgcgttagagctcaaggctagatctctcctcttcctccgtcgtttcaaggatgtcgccgatatgcttcaggattatatccccagtcttaaactcgacgacgaaggatccgcttcttctcaaggctcttcttcctccgacggtatcaaccttctctccgacgcctcttcccctggctcctttaaatgcttctctgtttccgacttgaagaagaaagtcatggcaggcatttgtaaaaaatgcgacaaagaagggcaatggaggtaatataactttttaactctcttttttgttttacttattacttttcaagcaaaacgcactcgttgatttttta

SEQ ID NO: 140195 - DNA, 1999 bp, Arabidopsis thaliana landsberg; identical to SEQ ID NO: 64594

SEQ ID NO: 140196 - DNA, 456 bp, Arabidopsis thaliana landsberg
aaaacaaagactcgagttaatatgtctagtactgaagaaatgtcatcagtcaaaaacacaactcaggttattggcgttgacccatcctccaccgtacgagttaccatcgttcaatcttccaccgtctataatgataccccggccactttaggtaactaattaatccattaattattccgctatatatatatatattttttttttttgatatgtaacatttatcaaaacgttccatctcaaattgtagacaaggcggagaagtttattgtggaggcggcgagcaaaggagcgaagttggtgttgtttcccgaggcgttcatcggcggttatcctcgaggttttaggtttggtttagcggtgggagttcataacgaagaagggcgtgatgagtttcgtaactaccatgcttctgctataaagtccctgtaaaatcatcccgtgactctattttttttt

SEQ ID NO: 140197 - DNA, 1089 bp, Arabidopsis thaliana landsberg
gaatgtttcctcgcaatcatcatcatcatcaccatcttcgtcttcttctttgaaacctccagcgacttcctcgtagttctctcacttatacacttactaatacagagtaacagagagagacagagtggactcttcttagagtaagatgggaggtgtgacttcttcaatggcggcgaagttggcgttttttcctccgaatccgccgtcgtacaagctggtcagagatgaaacaacggagctttttctaatgagcccttttccccatcgagaaaatgtcgacattttgcggctgcccacgcgccgaggcaccgaaatcgtggccatgtacatcagatacccaatggccgtcaccacccttctctactctcatggaaatgctgccgacatcggtcagatgtatgagctcttcatcgagctcagtattcacctccgcgtcaatttgatggggttagtaaatctcccagatcagatttttctttctatatttagctcaggatcttgctcagaaagtcctcgccttttttggttttgctctgttttctggatttgtgcaagtagatttgaagcttctagatgcagaattttggtcttagtgttagagagaagtggactttattaagctgtggatttgtgattcacaaagcttttgaaagtttaagttgcagactcataaaatcttggatttttgctggaagagtttgtctttagggtttgtctgaatcaggatctctactgatcctttatcaaagagacaaaaagtagttttgaggttgagatgtttgagtttgattgttgacacttgacaacaagtggtcttgggcaaacattaccatttctagaaattcaagatctgttattgtttctgtttctaaaggcaagtactgaatacccaaaatgtagttctttgatgtaacaactttttggctcattcaggtataacttgggattctgggatagattggtttctcaaattagtacgctatttttttctgtcgtatcttcaagtgaacctgaaattagtagaatttacttctgtaaggttatgatttccatcttatgacattggaaaatcctctaaatatgttgtga

SEQ ID NO: 140198 - DNA, 777 bp, Arabidopsis thaliana landsberg
atggaggcagagatcgtgagacgatcggaggtaacgggattaagaagggaggtggaagaatcgtcaattggtagaggagattgcgatggtgatggcggcgatgtgggagaagatgcggcggggttcgttgggacgagcgggagaggaagaagagatcgagttaaagggccgtggtcgaaggaggaggatgatgtgttgagtgagctcgttaagaggttgggagcgaggaattggagttttatcgctcggagtattcctggtcgttcaggcaagtcttgtcgtcttcgttggtgtaatcagctcaatccaaatcttatacgcaattcatttactggtattttctctcttttgaaagtattcaatttcaattggtgattccatttttcctgtgatcttctctttttttttgagttttgattcatctgtgttgaattgaggaatctagggttcttatgctgtctttcggagtgtggctgttgagcaaccttgtgtttttttgtgaagtggatgtgaaatgtgaacttggctgagagattgttagtccatttctagttttatatttttagtttgtatcgaaatgttttaaagtttgagacttgcaagtttttttggattttgatctactccttgaatcccaaaagaacaacaaagttaggttggataccatttgactacctctagttgtattgttatagctgatcgaaacacagttttatttaaggggacattagtagattattgcgttcttgttctgtaacatatcatcagtaacactaa

SEQ ID NO: 140199 - DNA, 513 bp, Arabidopsis thaliana landsberg
tactctgatgaggtccatgaggtccttttcagagccaaagatagatttcagaagcagcgagagatggcaaccgcatctaaaccgggtcctcaatctaagatgtaagaacaaaaaacttgaccactttcatcagggtctctatatgagagactccttccccctaaagataagtcattcgagatccaaacactccgtttaatttctcatccagtttcatggatcttccataatacagtatccaatttagtagtattggtgggacgagtgatggtccaaacctcgttcaagacacaaccgatcgtaaagctcgaagacgcaaatggagtccacctgacgatgtcattctcattagtgcttggttaaatactagtaaggatcgtaaagttgtcgtttatgatgaacaacaagcacatactttttggaagagaattggtgcacatgtttcaaatagcgcttcacttgcaaatctaccaaagcgagagtggaatcactgcaggcaaagatggaggaaaa

SEQ ID NO: 140200 - DNA, 3501 bp, Arabidopsis thaliana landsberg; identical to SEQ ID NO: 31250

SEQ ID NO: 140201 - DNA, 2448 bp, Arabidopsis thaliana landsberg
tctgatgaggagacatttgtttatatagaggcttctgctggctttcattggttacccgagtttcatgcggatcgatgacgtgtcatccatccatcggaaaggtttcgaataatcaacggacatgatggctctatcctcttaatcatttattattaatgggcctgggccctttgtttttttaaatagacgattctgatttccttttaatttgccgatgccgactgtaatttttatataatgtgaatttttttaatggaagtctgttgttcacggagacagagagagcgcgggagaaaatcgaaccctaaccctaattttgcgattgtctatcttttacgacgatctgatggtgagcgataagatagtagaatcaagccaccgcaaacaccgtaggtcgtattctccttccgacgaagtcgttaaatcttccaagcggcacaagcaccatcatcacaagcatcgacacagtcatcatcttgatgaggacggcaatgaaaagaatgtttatccatttttggggaatcctggtaacgatggtgaacttgatttggaggaaggggagaatttgaagaagaagggaagcattgatagagaaagcaatagagacaactacagaggtaggagtagtagagataaagctaggtctagtagtagagagactgggagggagaatgaaagagagagacgtaaggatcaagatagggatagaggaagaagagaagaccagagtgatcaggagatctataaaagtggtggtgatggatatggggaagttaggcatgatgcagaagatgacttagattctttaaaaagccataaacctaacggtgaaactcagggcaacgttgaaaggtctgaagttgataatgatgatgacggtgaagatgttgtttggggagttgaagaacaagaagctgcagagatgaaaagaatcgaggaaagcaagaggattacgcaagccatattggagaaatataagaaaaagttggagcagtcctctactgtggcagatgttcaagctaaagctgggttggatactgaggccgtagatggtgaagtcgccaagctatcttcagcagttggggaaacacctgcacggcttgtgatatcagactcagatatgacactagcttccgcaggcagcccaaagagtgacatgttcactgatgatatctttggggagtctcctctagctgatggtactcggaaagggaatgcacttgttccttttgtaaggagtggactcaatgataattgggatgatgcagaaggttattacagttatcagctttggtgaactacttgatgatagatatgaaatcatggctactcatgggaaaggtgtcttctctactgtggttcgtgctaaagacacaaaagctgaactaggtgaacctgaaaaggtggctataaaaattatccgtaacaatgagacaatgtaggtggtgcattctctaggccccaactaattttatcaaaattcttatcaagtgatgtttgatttatcttcctaagagttgtgaatgtctcactatcatatcacgttttgtgtaggcataaggccggccagactgagattcagatattgaagaagctagctggctctgacccagagaataagcgccactgcgttcgttttctttcaacttttaagtataggaaccacctttgcttggtgtttgagtctcttcatctgaatctccgtgagattgtgaagaagtatggtcgcaacattggtattcaactatctggtgttagagtgtatgcaacgcagttattcatatcccttaaacatctcaagaactgtggggttcttcactgcgatataaagcctgacaacatgctggtaagctatacttgtctgtgtttttctcctgcttgatgcacataaattttaacttctggtcgttccttgattatccaggtgaatgagggaagaaacacgttaaagctttgtgactttggtagtgcaatgtttgctggtacaaacgaagttacaccatatcttgttagtcgcttctacagagctccagaaataagtaagttccactgttgctgttgtcttaatcatctacttggatatttcatggctgtatgttctattataactaaagctgtactctcttttttcattgtagttcttggacttccctacgaccatccgttagatatatggtcagttggttgctgtctgtatgagctttttagcgggaaaattatgttccctggctccacaaacaatgaaatgttacgcctgcatatggaactgaaaggtgccttccctaaaaagatgcttcgcaagggagcatttatcgatcagcactttgataaggacttatgcttctatgctacagaggaggatagtgttactagaaagacaacaaagagaatgatggtaaacataaagccaaaagaatttggttcagtaattaaacaacgttataagag

SEQ ID NO: 140202 - DNA, 761 bp, Arabidopsis thaliana landsberg
aggtatgaacctgatatgcttgcattctcgggatgctattatggtggtggtgataaggaaaggagagaacttgcagcaattagaaggagatggaaaacattacatgtaatgcctattctgtataatgtttcagaaattacatgcgattcattgtactctatattaacaaggtaccgatgactaattttgcaattttattgcagattaacaacccagagaaacagaggcgacaaggaagatgtccactcactccagaagaagtcggactgatgcttagagctttgggatatggcagtgatgttcatatatatgtcgcgtctggtgaagtatatggaggagaagaatcattggctcctttgaaagcactctttccacacttctattcaaaagacactatagctacaaaggaagagttagaacctttttcttcgtactcttctagaatggctgcactcgacttccttgtttgtgatgaaagcgacgtatttgtaaccaacaacaatggcaatatggcaaaaatattggctgggaggaggtactgaaacatcttcttcttcttcttctatgtttttttggctcatctctttgtttaagcatttttcagtttgtttctttgatggaattgcaaaggtttaagcttttggttatatgaaatttgcaggagatacttaggacataaacccactgttaggccgaatgcaaaaaagctttacagattattcatgaacaaagagaacacgacatgggaggagttttcatct

SEQ ID NO: 140203 - DNA, 1564 bp, Arabidopsis thaliana landsberg; identical to SEQ ID NO: 27476
  unsure (1)..(1564): unsure at all n locations

SEQ ID NO: 140204 - DNA, 478 bp, Arabidopsis thaliana landsberg
gacaattagaagtttagaaccaaaacaaacgaaacttctctgcaatagccttctccaaatttcctcactttcacgcgtttcagtcttctctatataaacttgtttcatcaacccatcaaaatcccactcaaattctgtttcagtgttcttcaaattctcaatctttctctcaattcatctaaagggttcctcaaagtttcaatctttctctctgaatctaaaccatggctcgttgtagcaacaatctcgtagggatactcaatttcctagtatttcttctctcgatcccaatcttagctggtggaatctggctaagccaaaaagggtcaacagagtgtgaaagattcctagacaaaccagtgattgctcttggtgttttccttatgggttgtagcaatagctggtctaataggttcatgttgtagagtcacatggcttctttgggtttatctctttggcatgttccttttgattctcc

SEQ ID NO: 140205 - DNA, 211 bp, Arabidopsis thaliana landsberg
gcggagagagattcagctgcgttgggcaaaatcccagacgaagatcagtgattagtcttttgataacttgagccatggcaactggtaaaactgtgaaagacgtctcgcctcatgacttcgtcaaggcttatgcttctcatctcaagcgatctggcaaggttagtggataaagtctcttcttttttgtttgagtagaaatgttccaagaatt

SEQ ID NO: 140206 - DNA, 589 bp, Arabidopsis thaliana landsberg; identical to SEQ ID NO: 2778

SEQ ID NO: 140207 - DNA, 2579 bp, Arabidopsis thaliana landsberg
ataaaaagaattgatttttttggtttggtcggttggccttacaccggaaactattggcccgaataaccgaaatgaacaaaaaccctaaattatgttttacttcactcttcaataaatcatgattttcttttaaactttttatatccataaacgacgacgttttggctggcatatggtttgggtttttcacaaaatttaggattgatatttttagttttttattctcagagacgattgtgaggaagcttgttgatcgttgcggtctgagtaagcgagtagatcattggtttgtctcttctttcttacttcgattctttgcttcatccagaataatcacagttccaattctattacctttctttttggtgtttgtgactcttatgttcatagctcttctgttgaattcacaagcattgttttctttttgatctgattcatccctgagagcataatgtgattagttgtattcctgacactcctctgttacgtgtattttactatttagtttcagttttggtagacacatataaactgagaacattgcaagtaaaaaaaaaagagttttctttgagaaatttctctttagaatggatatgccaaagagtatcctgatcctctacttagctatataactagggatttttgaatctttgctatcaggttttgttatttactttctctggccaagccaactataaaagttaatggaagaggaccattgtgaggattctcataattatatgggttttgctctgcatcaggtaaaactagtattggttctataatactgcaaaagttagtttgttgcttttgagttgatttccctatgcctgcaggctaaacttgctctggaggctcttgaagttcccgtggggtctctatttttttgctttggcttcataccaatttgtgtttcgtaccagtgtatcaattaatgtcatataggataactaatgcgttttctttctggtttgtgtggaccagatgtgtttttcttgaggacggtaaggtcattgcttcagggcgaaaccgaacaaatgagacacgcaatgtaattattcaaacctttacaagtaactaagcttgatttgttatacatgttctagttataagctactgtcttcattcatttattggatagtctatttttttcactgtttctctctatcttgttttattgagtgactcagaaacgtatgattgttacttcggtttattcatctatattaaggcatttgttacaatgtggtttgaacaggccacaagacatgcagagatggaagcaattgatcagcttgtcggacagtggcagaaagatggactctcaccttcacaagtcgctgagaaattctcgaaatgtgttctttatgtaacatgtgaaccttgcataatgtgtgcatcggccttatcgtttctcggtatgaatccttacgctgaattagacagtttgtttgttctgttttgtttctgatgagaggtgatatactctgctcttaattgaaggtatcaaggaagtgtattatggatgtccaaatgataaatttgggggatgtggttccattttgtcgcttcacttaggtagtgaggaagctcaaagaggaaaaggatacaagtgcagaggaggaataatggcagaagaagctgtctctcttttcaaatgtttctatgagcaaggcaatcccaacggtaatagctctccctttaacttgtacacttctattccttgataaaacatcttgaaagatcctttgtttattatttggggtttagctccaaagccacaccgccctgttgttcaaagagagaggacttgaggtgaacgtatcgttaaaactgaagttcttcggcttctgcaacaacaacaatcagacctgaagattacactcacagtccagttcaaacaacaacaatccagagcagaagccataatttgggactccaaaagcttatttattagttttggattttattcacatatatgacaatcaaaataacatgttttgttatcaaatcatggctacttcctgcaaacgaggactgactttaacaaaacaaaaacataaacaattcaaggggtctaagatcaggagctcaaatcccaaattggtggaacatataacattaattaaaagtagaaatcaacttctgagcttacaacatatcttaaaaagtctcctgaaacattattcttaaacaaaagtcttccactagtagcatattgttctctagatagaatagatacttattaagaagataaaaaacatcttcttgcttaatccatggataggcgtgggacacaaaaatcaacaaggtaatctgttcgctttatgcccgtgtgtgtgccatccggagagtataactgaaaccacctgctcatagccactttcagaaatatgaacttcttgtaccataccttcacagttccaatagacttcccttggatcttctcgactccaacgatgatggcatctctaagtccgacatagctggctggctcacctgacgtgccacagtaaatgccctaccacacaaaaacacaaatattatagatcaaatgtctctctctctctcgttttata

SEQ ID NO: 140208 - DNA, 1441 bp, Arabidopsis thaliana landsberg
attctcagggaagagatcctctagataacgctagagactcgagggctgattcagcttacggatcgaagaaatggagggaggacaccggagaaaactatgcccaagcggctaaagacaaggctaacgaaggagcaagcaaagctgcagataaagcctacgagacaaaagagcaagcaaaggataaagcctacgaaactaaagagaaagcaaaggatacagcctacaatgcaaaagagaaggctaaggattatgctgaacggactaaagataaggtgaacgaaggggcgtataaggcagcggataaagcggaagatacaaaagaaaaagcaaaggattacgcagaggatacaatggacaatgcaaaagagaaagctcgacatgcaaaagagaaggtgaaagagtatggagaagatactaaggagaaggcagaagggtttaaggagactgtgaaaggtaaagctgaggaacttggagagaagaccaaggagacggtgaaaggagcttgggagagtactaaaaacgctgcccaaaccgtcactgaagctgtggtagggcctgaagaggatgcggagaaggcacgagctgatatgaataaaggcgtggaagatcacaggaagaaaaaagcagagaaagatcaaaaagaggacgatttcataacatttaactgatgaggaaagatacatatgcgttctgaagtgttattgctttttatgtattgctctgtttcctgtttattctctgttttaaaactacgtttgatcacatgtatgtgacaatgtgagatgcattagtatataaataaggtaaatctaaggttatttctaaaattagtatgattctatttcttttcgtcgatctcaatttcgatcgagcattgaagatttgatgttcgaaggtcataaagttaatttgagtagtgttttgttcaggtacacaattattgtccctaagttaattatctaggttgttttctgattttttttaattgttattcattctataaacttcttgtatacttgaatttgttatcattgtgatactgaggcatttcttatttaaccattctgttctcacaaattgaatccatcaacacagctttccattgccgtgtgcttactgtcaacacggtttttctgttgccatgtccttttgttgtttcaaagactcgattttgaagattttatagcttgcctgattgatagatcaggagggttttctctttgctatgtctattctcatctgtctttgttgaggtttttctttcggctccaatgtactttcatgcaatattgtgtggttttcacctctgaatagatgtttttgcacaagaatgtcttttgtaattttctgtatcaatatcagacggcaaaaaaaaatgtataatcttaattaaatgaagaaaatttctaagaaagatttctaatttttttttctgatacgc

SEQ ID NO: 140209 - DNA, 754 bp, Arabidopsis thaliana landsberg; identical to SEQ ID NO: 10971

SEQ ID NO: 140210 - DNA, 803 bp, Arabidopsis thaliana landsberg; identical to SEQ ID NO: 7917

SEQ ID NO: 140211 - DNA, 716 bp, Arabidopsis thaliana landsberg; identical to SEQ ID NO: 10319

SEQ ID NO: 140212 - DNA, 1374 bp, Arabidopsis thaliana landsberg
atggcgtctttctttgatctcgtatacataagctggattggtttcttaaacaaattcctctccttttgggtcttctgggtttgccttgtaagtgtttgtgtttttgcctctgagaaaaaatcatgccgactggtaggttcgagactatgcgtgaatgggtttatgacgctatctctgctcaacgcaatgagctcctctctcttttctccaggtttcttcttaaccctctcgctctctctccctgagccttgcttataaatgcatgtgtgttgtgattggtctcaagtcatgggtaatggttttggttgttatctttattagatatgtagcccagggaaaggggatattgcagtcccaccagctgattgatgagttccttaagactgtgaaagttgatggaacattagaagatcttaacaaaagtccattcatgaaagttctgcagtctgcagaggtgaacatataggatccgagtatcattttatggctacgttgtgttcatatatcttgatttgttaataaactcaagttttcgcattcaggaagccatagttttgcctccatttgttgctttggctatacgtcccagacctggtgttagggaatatgtccgtgtgaatgtgtatgagctgagcgtagatcatttaactgtttctgaatatcttcggtttaaggaagagctcgttaatggccagtaagtaaatcctgcgagcaaagtttttgtgtatatgtgtctatacttcttttctgcttggcttaaagtctcaacctttttcattagtgccaatggagattatctccttgaacttgattttgaacctttcaatgcaacattgcctcgcccaactcgttcatcatccattgggaatggggttcagttcctcaatcgtcacctctcttcaattatgttccgtaacaaagaaagcatggagcctttgcttgagtttctccgcactcacaaacatgatggccgtgttagttttttctacacttgaacgtagcttatgtcataaacaatgcgtaattagtatataacactgactctgtactctctctgtataatgtgcagcctatgatgctgaatgatcgaatacagaatatccccatacttcagggagctttggcaagagcagaggagttcctttctaaacttcctctggcaacaccatactctgaattcgaatttgagtaaagatcttttgctattcgcgtcatatctgtttttttctgtatttgttagttagcagattatgttgccttttttcttatattggcaatgttctttggtgaagactacaagggatgggatttgaaaggggatggggtgactcagcacagaacacattcagaaatggtgcatcttcttctggacat

SEQ ID NO: 140213 - DNA, 1396 bp, Arabidopsis thaliana landsberg
  unsure (1)..(1396): unsure at all n locations
ttgatcatgatggtgtcgaaaagtcaagtagagatggtgatcttcttcagatgacgagaggctttggcaatcaggctatctgatgaagaagatgataatgcttctgatgattctgaagagctaattagaaacgaaactccncagcttgaagaagtcatggaggtttctaatgatatggaaaaaagaagccaaccgccaatgagaccgagttctcttcctggaggatatgatcctcgtcatagagaaccttcttactggttagttaatctcatctttcatcaaaaccttaagtatactgcttttgtccccattaaacaagcgatacttggaacaacgataatattttaaaaactttcttgatattatagccttattggttggaactgaatccttgatctcaaattaacagtaacgcagaccgtgcaagttggtgggaattgggggttctttcaaaacatgctcacccctcggttgctacaatggctggaacccttctctcaggaacaaatattgtttacaacggaaacccgctgaacgatttatctctaactgctttcttggataaattcatggagaagaaaccaaagcaaaacacttggcatggtggttcccagattgaaccttccaagaaggtaaaaagctcatgcttcaactattaaagctttaaccatattgttatctacctttcccctgtaacgttttattttctcatctcatgttgcagcttgacatgtcaaaccgtgtgattggagctgaaattctctcattagcagaaggagatgtggctcctgaagatctagtcttccacaagttctatgtgaacaagatgaccagtacgaagcagtcaaagaaaaagaagaagaagaagctacctgaagaagaagctgctgaagaactttacgatgtgaatgatgaagatggtggagaaaactacgatagtgatgttgaattcgaggctggtgatgagagtgacaatgaggagattgagaatatgctggatgatgttgatgataatgctgtggaagaagagggcggtgaatatgactatgatgatctagatggagtagccggcgaggattatgaagagctcgtggctgatgtgagcgatgcagagatggacacagacatggacatggacctgattgatgatgaagatgataacaacgttgatgatgatggtactggtgatggtggtgatgatgatagtgatggtgatgatggtcgtagtaagaagaaaaagaaagagaaaagaaaacggaaatctccatttgcgagtcttgaagagtacaagcatttgatagaccaagacgagaaagaggattcgaagactaaaagaaaagcaacatcagagcccacaaagaagaagaaaaagaagaagtctaaagcatcagagtaa

SEQ ID NO: 140214 - DNA, 1282 bp, Arabidopsis thaliana landsberg
cccttttccgttctcattccctctcttctccgcatctctcactctctctgtgtatgtgtgatgtcatcgattgtgaatcgagctagttcagcttctcttcctaatttcctcgcatggcgtgctctggggtttcgcaccatctgctccggccgccttggtttcgctccgtctgttccagactcgccggcctccgcaggaaccaaaattttggaatcatttaaggaggaattcgaagtcggatcccgcgtggtctcgtttgagactggaaaaatcgctcgctttgctaatggttcagttgttctcggcatggacgagaccaaagttctctctactgttacttgtgctaagaccgactcgcctcgggacttcttacctctcactgtatgttactaatctccccaccatttcccttttagttaccgattttgaatgaattgtcttaaggaatctatgatctgtgaggaattaagaaatggtctagagatgtttggtacctttatgctgtatacatttgtagaattctctcaggaatctgctattgaaattgctttatctgtaatggttgatggtgatttgtttaaactgatgtttatgattcttcttggaaactactgtcaggttgactatcaagagaagcaatacgctcagggattgattccaaatacgtatatgcgaagagagggtgcaccaaaggagcgggagctgttatgtggccggctcattgatagaccaatcagaccattgtttcctacagggttttaccatgaagttcaggtatgaaaatttctaaaaaatctttgggatatagatctatgtgaaagtttgttttttggtatcttcatctgtaaattttgtcacatgcagataatggcaagtgttctatcgtcagatgggaagcaggatccagatatactggcagctaatgcatcatcagctgcgctcatgctatcagatgttccatggggagggcccattggagtcatccggataggaaggatatgtgggcaatttgttgtcaatccaactatggatgaggtaaaaagtggtatattggtatattctctacatttacaaattgtagcctctgttttgattttttgtatctttgttgtggtcgaactctgtatagcttagctcaagtgatctcaatttgatatacgcttgcacaagggataagactatgatgattgatgttcaatcccgagaaatctcagagaaagatttagcagctgctctgaggctagctcatccagaggtaggtacaagaacctttgtggatgtc

SEQ ID NO: 140215 - DNA, 1313 bp, Arabidopsis thaliana landsberg
tacaccttgactagactttggttgttctgcatactcatttgctgttttcgttcattcttgccataagtatatcatatcagtaatctgatactgtcttgtggttttcagattgctaatcttaagatggctctagtgaggaaaggaaatggtaacgatgtacaaccaacagctataccaatcaaccgtgagagaatatcgagaagaagatcactcgaaactcctactattcgacccaaattacctaccatgggaaacacatcaaacaacagtaggccccagatcatggatctaagtggaccagaggtatgctttggcttctttaaggagcaaccaaagttgctgatttaaactaactagaatctataagtttatgtcattatgtgtagatatgtaatacatataggctttgaaacggttgcaggcttttaacgacagtactgcatcttcaagaagacacagcttagatatccatgagctaatgaaatcttcttctccggcttggccgaggcagtcactcaatggaaaagacgaggacagagaatctaagtcgggcgagtggatcgataagcatgaagaattaattcaaaatcagaatccaaattctcccgagcaattctaccagtcaatggtccctcaacaacaatcactgtatgtaatacattttaataatttacatgtatctctctacatatgcttagtcttgatctttactatctttcaaatgacagatatggtgggaaacaagatttcgaagtgcagagtattacagataacgaatctgatgaagccgcaacaagcgattgctcagattccgatttgctgtggcgattgagcgttcaagtgaatgttcccaaagtttctaatatccaaaactcagcaaaccccaaaccaaagaaaattcagcccagaactgctaaactctcagaaactaggtaacaaatatatacttttttacaagtctttgcagctaatgtactgatataatcgggaacttttgtctatttcttgtggcagaagtttaattccatcgctgatcccagcaccaagcaagagacctcctaacacagtaaattcacagccgcagcgaccaacgagagatggaaaacgcagactgagtttaggcacatgaacacaccagttttgtaaagagtttaaaaaggaaggagacaaatatttgttgttttgtatattgtgagagaaagctttctctgttgtggccgctcttattgtgccattaaggtaaaaaatctcaaatttgctgttttgagtgtacaaaaaatgattccttattatacaatcttcttttggattct

SEQ ID NO: 140216 - DNA, 1506 bp, Arabidopsis thaliana landsberg
tatgtacaagctcttttttcttcattcttcctcttcatcagcaatagctttggatagaaagaaaaaatatacttttgctttgcttgtccacttatcagtttcttcattttttattctatatccaacaggaacttaagcgagagataggcataggtcgcataacaatcatgaaaccctttttgcaaggaccagcaggctttgattaccttacaaaagcatttgaaaagcgttatggacctcccactcaagcctacgaatcactaccagtgacacgaaggtggatatcaactcttttgtctagcaaagaagagtgggaagaacacaacaatacgctttcagccttgaatgtggttgagagatcctccatgggtatttctctcaaaacgggtggaagctttctatccccagtcaataccacgtccaagtcaactgttatggacactgcaggttttgcttgttaccctcattgaagaagtctagaaataccttcttttatagattatagcactaaaatgttttcatttgctttttggttcataaggtcaactatcagaatgcaagggagaaagagttgatttggcagtgaggcttgggttgttgaagctggtgaatcaggtagctggtttaacaccagaagttctaccggaaacttttcagctcaacctctttcgcgtgagggatattcaagctgaaattcagaatataattgtggtaaccacaaggtatgaacgattgttacatttggtaagaagactcatatagaaattagagtactttctcatcttaaaaggatttgtgttatgcagcttgctcatttggcgtcaaatgcttgcaaagagcgaaagcgaaacagaaagtatggcaaagaaattgttggagttgttagatgggaaggaaggagcaggactaacggagataatcgaaacaacaatgagtgaagaagatggagagaagaagaagatgatgagaggattattggggaagagtttgggagaaggtaacacagtgtatgagagagttacaagttgtatatacaaagcggctcgaggagctttattggctgggaatggagaaaatgggaagagaatggttgaaacagagatgaagaaagtaggaggaggtggaggattgaaagaaagggttttagagacagctcgagcccttggtgttgtagcttgtgtctcagtcagagttcatggtccatggttgactcaactcatgccacaacattgaaccaaaccaaaccactcggtaaactggtatagcctcttgtatatattatgatatatatcaataataattacacgtgtaatgtaagatgcattttgatttgaagatgcattatgctgatttgtaaaacataaacggctttggtccctttttagtgtgtccgaatgaataaggtgttcaaaatagcgtgtgatttgtaatttgtaatttgtaattagtctgaaacgttgtatatatgaatattcttcaattatataaaagcttgctttcaaattt

SEQ ID NO: 140217 - DNA, 4592 bp, Arabidopsis thaliana landsberg
gatagattttccatatggttgatatcttgtatcgacatttgctgattcagtctagtttatgtaacatggagaattgagtctaatcatatcgtaactcattttctttgcagaatgggaagccaaacgaatgcaagcaagacatctggtcctggaactgtccaaatgaaaggtcagccaatccagcagaacaatggcggttgctgcggtcagtagtttaaaaaatgtttcaatcaaaactatctgagactctttttttacttcctttttaactaagtgttgtgaaaaccaatggctgtttaaaacaactaagcaatgtaatattccatgtcgctgtgtcttgaataagctatggtgttagttgcaagatacttctctttaatatagttcagtcttgactttgaccacacaggggatatgcaagcaactcatggttttgaattttgattgtgtatatatattaaaaatagtgatagatattcgttgctgtataggctggaccatgttcattaccatagatatttaaaacttgcagctaagtccatagaatgaggaaaagcaaaaacaacatatgagagataaatctcaataatgtaaatgctgaattatatatacttcaaagatacgagtccaaatcaaattcttccattttcttacgctaaagtatacggatttccaaaagaagatttgttctatttcgtttacaacgcaattctagtttataataactcctcatatactcatgtggtttcaaaataccccaaatgcatgtttttctagaaacaatcagttttctgattttgatgaaatcaatcatacctagattcattcatttactcccacaattttagaagaaaatctcattcatgcacatccttattttaaaaataaaataaatcaaaagtgatcttatttgtttgtgtttaagttttataaaatcattttttttttgtttgaatgataaaaagacagacaggaaagatctcatgacaacgacagttaaccgacctggtccctctaaaataaagtctgacacagactctcaaactttgtcaaatccaattcttattattattggtaatgagactttttcttcacattctccagatatgtatattcccgagaaaatgagggaaagtatcttctaatcgggaaaaacatctccacgttccttgcccgtctcgtaggttacgcatcagcagctgggttttgtctggcaaaactataaccaaaagcttcctttcttataaattgccttacgttttaaggtgttctcttctcacttcttccccatgattcatcttgactccacaaattcagggcaatctttgattctctttggtctttgatttgaggattaatttgttttctaaaggtgtctgctgattcaattgagtatggagaagaaacgagatgtttctgagtacagagagagacttaatgagaccttgtcgtctcctgagctcattaatgagcaaactcttaaaaccctagtcagaaaacaactcaatgaaggtttttcttgttgttgatttgctatatactctttaattttgcctttgctacaatgttttttttttatgttttcacagagtgtagtgttgatatattggatcaaagagtagctgctttatccagtacaattgagaagcttaggagtgtatcaacaaaggatcaagacttgtctaaatcaagcaccgaggcatcttatggtgattggaaagtatgtttctcttttggctctattggacagtttttgtgaaacagaattgtcataatgttagccaattagtgttttcttgtttataggtgaaacatgatgataaagattgtcgtgttatgtaccgtgaaggacttaaaggaagtccatttcatacattgctcgttgaaggttgcactgatgggactatcgaagactgtaagtttttctatagagtttgcaccgcaagaaaacagttttcgatttgtatctaactatgtttatacaggtttatgtgtatgctgggaatcatcattctatgagaaatggtgagagtttaatgttttgtttatggaattgtctattgtttgcgaaattttttggtctttttgtttgatgttttctatgtctttcaggtggccaaagttgacatttccgtcattcagggtcttagaagctaaatgcttgcaaaagtttaggattgatgaacagatatgtttactgaggtttgttttcacaaattgtaataatgtttgttcctattgttacattttcgtgaagctaatccaaagctgaaaactttgatcatattttttggggaggtagggtgaaagcaccgtggccactgacagacagagaagctgttctgcagtttttcgtattcgaatactttaaagatgatttagtcatcatcctacttaactcggtaaaaccatgttagctttgtttttttgcatcttaatccagttcttagtgatttgacagtatcctaaactcttatctattagtacatctttagatcgaagtggagagcggcagtgtagctgaagtgaatgcggtgaggattgacttcgtaggcggagttgcgatacaaaaagtgactccagagaagagttacataaggtgagtgttgagtgaatgagaacatgtttctataaccaaacatttcgaatgtctttggcgggttttttgaatcgctaaacttttgtagatttatagcggaagtggatataaagctggacttggttcctccatctcttattaattttatgtctaggcagcttcttggtaacggtttcaaacttttcaagaaggtcagttccagttttatttacttcacaaaaacttgatatgcctggttgctagcttgtgtgatgttgtggtgtttacttgaatgtttacagactattggttcggtggctgaatccgatgattacaagacagttttagctgatccattgtatactcatatacgtgaagctctgtattctagtgataaaactgatgaaatctgccaagtaaatgagcttcatagccaacaaggaagagattgtgaagagaaagaacccaagttggaagctgatgatgatatggaaaaagagaatgagactcgagactgcgagaatgaatctgtaccttgcaaaagagatgttcctgagatcaaggaagaagaatgtgttgatgatttaaaggaagaaaacaaaagttctccttcttcttcttcttcttcttttgttgatgaagacaagaatggcaaaacacgttggtgcataagtccggaggtgaagcaagctttacggacattagagagagtaatatcaatggttagaaaatctcaaaacagataataataatacatcaacctcttcggaggaagaagaagaagaagcatcatcatctccaatgcagcattcagggagcactcagattgcttctagtagcaaagtttgtattcaagatcctaacactgaacttatcgatgaagcatcctttgcacattatcacaacagcaacaaaatagctcctgcatcacccgagatcgatcttacaacaaactctgaggtaacaaggataacagtctcgcaagcaacaaatcttttctgccaaacaacagagaatagtgacgacaattacaaaccgagcggtttaaacggaggtaagagctcaaatctgcagaggaaacgtaaaccgagctgctttggtttcaggttttggagaagaaggacttgaaattgtcattggtaaatccaaatattttgtctctttgaagttgcagatcattatatacaaggaaacatagtgttaagattttgagagcaagtgtttcaataaaaatgtaaccatagaaagaagatacaataaagttgtgtatgaataaaccgaaacttaatatggttaactcaaaacaaaccggttcggttcgtgagtaaaccgaataagccctaaatggctaatgggcttggacccgcgtaaaggggataataaaccctaagcaagtctcatcgtcgccgtctttctcatagacttaacatttcatatagagaaacttgaaacaacaatctgagcaaagagcgttttatcttgttgattttggaatctccattacgatggaaggtgcggctgatcaaactacgaaagcgttatctgaattagccatggattcttctaccaccttgaatgctgctgagtctagcgctggtgatggagctggacctcggagtaaaaagtacgttttcgtctgatgttattatattactctccgatttctgtgtatcttccttcgtacgggatttgattgtagcggatgcgttgaattcttttgtagtgctttgaagaaggaacagaaaatgaagcagaaagaggaagagaagagacgaaaggacgaagagaaagctgaaaaggctaaacaagtgagcactcttcttagctttcttatgattcctaacattctctatattctggggatgtcatcatagattattgaatcctcttggtagcagatttgattcagatatccagttttcgtagttattgagatttgattctattgatgcaggcacctaaagcaagctcccagaaggcagtggcagcagatgatgaagagatggatgcaacg

SEQ ID NO: 140218 - DNA, 2576 bp, Arabidopsis thaliana landsberg
ctgaaaccggttttagctaaaagagcagagcattatttctcggagaacatgcgagttatcaaaggcaaatgttcttgaattcttgtagatgtctctttatgtgcatgaatgattcattaagctctttatgatgcttaacggacttttatgaatgtttgttcttaaatttcaggacgggaagcctgggcttcagggaatcttgaagaatttggaaagctaatttcagcatccggcttgagttccattgagaattacgaatgcggtacattacactctcttttcttctctcccaaatgcaacatatcctatagtgaatacagaccactagtatgcttacagacattattctctcttagattcattattttggttttaaattctgtgagttttgtgaaggtgcggagccactgatccagctatacaagattcttctgaaggctcctggtgtatatggagctagattcagcggtgcaggtttcaggggatgttgtctagcctttgtagatgcagaaaaagctgaggcagctgcttcatatgtgaaggatgaatatgaaaaggcccaacccgagtttgctaacaatctaaatggaggaaaacctgttctcatctgtgaagcaggtgacgctgctcgtgttcttctctgatcaatcctggagtttttggtttcttccccacttaaactcgatttttttgtcccttatatctctcacgcttattgattctttgcttgtttatctctttttgatcctgtctgagaaattctctggtctctttggtcggagtttcatcattgcttgatacattttttttgctacaaatacataatgtaaatcattctctaccgttttcgagtcgatagaagaatcgcaaacttcaagaatgtgactaacatttctccataaatttgttaaattttcaacaattggtgaatttagttctgtaattgatctaacaaagacactatacaagtatgaaattagaaattgaaatcgaaagttagttattataatcttgtttgtataaaatagtgtatatctcaaatagagatacagattagttttttgtttggacacaaagacccccgccaaagtattgaaattcgcgcctgagaaattctccggtgtggctctctagggttttagcactttaatccatttgtacttgtaaaaatccctaaaaccctctgggcatgactccagtattatgccattccactgcttcaatccctaaccctaactctctcatgtctctctcctccactctccgtctctcttcctcccttcttcgccgctccttcttccgattccccctcaccgacccattatgccgtctccgccgcactgaaccctccgccacgcgtttcttctcctcccgtactcctcggtccggcaaattcgttgtcggtgctggtaagcgcggagatgagcaggtcaaggaagagtccggagctaacaatggcggtttggttgtttctggggacgaatctcgtattgtgccttttgagctacataaggaagctactgagtcgtatatgtcgtatgcgctctctgttttgcttggacgtgctttgcctgatgttagagacggactaaaaccagtacatcggagaattctgttgagtgactttcgttcggctcaaagctactgatatttttaagcttagtcagtggtattgttccttctaatgttcgattattttgtcttccagctttgcaatgcatgagttggggatgtcatctaaaaaaccatacaagaaatgtgcaagagttgttggagaggtatattattgatttttggaaagtgttttctcagtcgatttctctaaatatcttattctgaagaacgatttgtgctgttgaattctttgggttttcaggttcttggtaaattccatccgcatggagatactgctgtttatgattctcttgataggatggctcaggtaaatatctgaattcatggaatggaattcaagtcctcaaataatgtttcaggcacgttacgattcttcccaaacttctaacttttttgttttaaacccttggtttttttggcagagtttctccttgagatgtccacttatccaaggccatggaatttttggctcaatagatgcagatcctcctgctgctatgcgttacactgaatgcagactcgatgtgagtgccttttaccttactttcccttctagttgaaatggttttccctgcaattcactttttctagttgtttcacttgtctttgctatctatagtgtatctctcatctctactttttctcttgtcttgagatgaacatgtatttttgtcagtgttttcagctgattgtacttattttttttctgcagccactggcagaggcagtactattgtctgatctggatcaagatacggtaacctcactattaatttgttgccaagtttaccgatactcaactagatggtccttaacctcttttgttttggcaggtggattttgtggccaattttgataactcacaaaaagaaccagcagtgttgcctgctcgtcttcctgctttgttgttgaatggagcttctgggattgcggtaaaataa

SEQ ID NO: 140219 - DNA, 951 bp, Arabidopsis thaliana landsberg
  unsure (1)..(951): unsure at all n locations
aaaaacacaagataacagaattgccaccaaagctccatttttatccccacacagaagaagcttggggaatgagaagataagagctctcaaaattccccgaatttcgaatatgattgtaacactaaaccctaagattctccatttctccaaaatccatcctttttctcgaccttcttcgtatctctatagaactcgaaatgtgtctctgataaccaattgcaagcttcagaagcctcaagatggtaatcagagaagtagtagtaacagaaatctcacgaagaccatttcactttccgattcagcaccgccggttacggaggagaccggcgatggaattgttaagggaggtggtaatggtggaggaggaggaggaggagacggaagaggaggattagggtttttgaagattttaccaagaaaggttttgtcagttttgtcgaatttgccacttgctattacagaaatgttcaccattgctgctctcatggctcttggtaagtgttagggtttttgtagatttgaattggtttgttgcattagagttgagaaaatgattaaagtttcatctttttagggactgtgattgaacaaggtgaaacccctgatttcnnnnnnnnnnnnnnnnnnnnnnntaatcctgcactagggttcttcacttgcagatggatttccacacttggattggatcatatgtactctgctcctatttttcttgggatgttggttcttttagcagcttcacttatggcctgtacttatactactcagatacctttggttaaggttgcaagaaggtttgttttagttcctttgttcgttttgtaactccttctttctactgaagagcactaagggaactttggcaaattgcagatggagttttattaacccagacccggcgattaaaaagcaggagtttgcaaatactaatcctagagcttccattcaaga

SEQ ID NO: 140220 - DNA, 843 bp, Arabidopsis thaliana landsberg; identical to SEQ ID NO: 56012

SEQ ID NO: 140221 - DNA, 789 bp, Arabidopsis thaliana landsberg
agcaaatgtgtttcaggaacgttttatgtttatttctttatcataggaagacatgtttaaatgtggtgcttgtaaggttctaagcttgagtctcttgctgattctacagattgataaagtgtcgattcttgatgatacaattgagtatcttcaagatttacagaaacgggttcaagagttggaatcttgtagagaatctgctgatacagagacacggataacgatgatgaagaggaagaaaccggatgatgaggaggaaagagcatcagcgaattgtatgaacagcaaaaggaaggggagtgatgtgaatgtaggagaagatgaaccagctgatatcggttatgctggtctaacggataacttaaggatcagttcattaggtaacgaggtggttattgagcttagatgcgcttggagagaagggatattgcttgagataatggatgtgattagtgatctcaacttggattctcactcggttcagtcgtcaaccggagacggtttactctgcttaactgtcaattgcaaggtacagtcattaaaccaagcttgatttatgttactcaaccggaatatgagcaaaccgaaatgtgatatgtaatgtttaatgttgattgcagcataaagggacaaaaatagcaacaacaggaatgatccaagaggcacttcaaagggttgcatggatatgttaaggattcaaggtttagatttgacaaaattagctttttctctggtttggtttcccaattttcggtaatcagtgattctaaccgagtttttgtgattttg

SEQ ID NO: 140222 - DNA, 2139 bp, Arabidopsis thaliana landsberg; identical to SEQ ID NO: 67736

SEQ ID NO: 140223 - DNA, 1157 bp, Arabidopsis thaliana landsberg; identical to SEQ ID NO: 59038

SEQ ID NO: 140224 - DNA, 1304 bp, Arabidopsis thaliana landsberg
cgctctgctgactgttctcttgttacctgactgctagcctttgttttgatctggtataggatggtgggatgtgatacttaactcagtaaatgaatgtaaatgggctttcaaggagggagatgttgctgttctatcaaatcctgtgcctgaatcaggtgtggtggaacttgtagaatgtctggtcgattcgtatattgctggtgcttctctgtatattctggaatgttgtcgtttttatgtttagaaggagagcatgatgatgttgggcgtgtagctggtacagttaggagatatataccggttgatactcgagatcctcatggagcaattctccatttctatgttggagatgcttatgactctggcaggtacatgctttttcatatgtttaattatttagctattaataccatgtctgagtttctacccattcttactggaagtaattatttcctgcctctcatttctttactttttaattttctttaccagcaagattgacgacaatcatattttaaggaagcttaaacccaaggaaatctggcatctgactgtgcttggttcgattgcaaccacacaaagggaatatgttgctttgcatgcgttttcccagcttaacccacaggttggttttgttttctccaacaaatatttcatatatgctttcagttatgctgacgctgttgaaactcatatatccttcagatgcaaaatgcaattctcaagcctagcccagagcagtttcctaattacggggagcagactcctacagtgcccgattgtttcactccgagctttgctggccatttacacagaagctttaatgctcctcagttggcagcaattcactgggccgcaatgcatactgcagctggtacgagcagtggggtaaagaggcaagatccatggccatttactcttgttcagggccctccaggaacaggcaagacacacacagtttggggaatgttgaatgttatccatttggttcagtatcagcagtattacacttccttgctgaagaaattagctcctgaaagttataaacaagttaatgagagcagttcagataatattgtgtcagggtctattgatgaagtcctacaaaacatggaccagaatctatttcgtacgctgccaaaactgtgtgctaaaccaaggatgctcgtttgtgctccttcaaatgctgcgaccgacgaacttctctcacgtgtccttgatcgtggttttattgatggggaaatgagggtttatcgccctgatgtagctcgagtaggtgttgatacccaaacgaaagctgctca

SEQ ID NO: 140225 - DNA, 560 bp, Arabidopsis thaliana landsberg
gacacaaattctacaccaaaagcttaaccagatttttcccaagaaaaaacccatccatgaaaccatcatcagcttcaagattttctttaactttctcacactttctcacactctactgtcttctcacacaaacacatgtagctcaaggatctcatcaatggcaatcaccaatcaaaaccgtcgtcgttttagtgttggagaatcgatctttcgatcatctcttaggatggatgaagaactcagtaaacccgacaataaacggtgtaacgggtcaagaatgtaacccggttccgaattctacacaaactatatgtttcactagtgatgctgagtttgtggatccggatccgggtcattcgtttgaagctgttgagcaacaagtattcgggtctgggccgggtcagatcccgtccatgatgggtttcgttgagcaagcgttttccatgccgggaaatttgtcggagactgtaatgaaaggctttaaacctgaagctgttccggtttatgctgagctggttaaggaattcgctgtgttcgaccggtggttttcttcaatcgtt

SEQ ID NO: 140226 - DNA, 1679 bp, Arabidopsis thaliana landsberg
cagaggttaactatttccacttctacacatgacacttttgttcgacacctgacaagtccttctttaagggtgggtttttttggcctttgtcctcgccgtccacgacgcagagagatgatagcccatgaacaagagcctccaattccaaaatttcaggcttttaaactcttgccctcctagatcgatctccaatcatcacatatcgctacacccacatcattcaatcatagctctcgtatctccaatcatcttttcattcacctaatcttacaataaacgctaaaactctcatacccaatcgcaaaagagaatgaagaagaagctccagcgtctaaagagtacggattttataactgtggccaaatcatcctccaattgtgctatccgggatggtggtcgacggcggctctagggcgaaggaaaaaaaaaattccaaaaattaattccaaaaagactcttgagagtcttgattccccattttccatcttcactgtatttgatgaggattttttttccctttttagtttttttttttacttgttgcagatttgactctcttttttttttccaaagacaattaaatcatttaaagggttttgcctctgatgtctgatgtctctctgtctcatcaagttactgttttttttattctgagtgaaattttacatttttcacaggtgattggaaccaagacaaagatctgtatagttatggaatacgtttcaggtggtcagctttcagacagacttggaagacagaaaatgaaagaatcagatgctagaaaacttttccaacaattgattgatgctgttgattattgtcataacagaggagtttatcatagagatcttaaggtaagagaagacaacaacttttgcaaaactctgtttcctctgtttttctaactaattttgtggctaatctgattttgcttttgctttttgcagccacaaaacttgttactagattcaaagggtaatctcaaagtttctgactttggattaagtgcagttcctaaagtaacaatttctaattttctaatcacacaaaacaaaatatttgggtttgtaacaatcaaaggatgctaaataagacttttggtttatgtaattcacagtcgggggatatgctctctacagcttgtgggtctccatgttatatagcaccagaggtaaccttgctggttatcctccgttccatgagaccatatgctttctgttttgtataagaagatagatactcagagtagattacacgttcccacatggattcactagatctgaactggatcttgcaggaaaatgttgtggagatatataaatgcagcaactgcgtcttcaaatttcataaacgcagtaaacatggatacattgtcgatttaaaattgtgctttcatatgttcgttgggacattagatccaaggcttcatctagtacctataaaatatcaacaaccctaagaataactgattcttagagcaaaaaaaaggtcagctgcagagctgtgggtatgcacgacatgacatgatagcgatccgggaacaagaccgactagagagagagagttaacgatgatcggtaaaacaagtaaaaggtcattaagaaagaaagaaacagaatcaaagataaaagtggagataccagattatgcaccacacaggggtgtatatagttattaag

SEQ ID NO: 140227 - DNA, 682 bp, Arabidopsis thaliana landsberg; identical to SEQ ID NO: 8616

SEQ ID NO: 140228 - DNA, 919 bp, Arabidopsis thaliana landsberg
cagtatgtacattgagttgcgtaattcgtctttatatcgtcatatgttggatgatgttataatctttaactcttgcagtcaaccctcgtgacagctaccatcagtctgttaatgaaatggcttctggcttagaccattttagtggaggcattggcaatatgcttgatgatggtgactcacatccaatcggaaacatgcttcctgatgatgaggaagagcttttctctggtctaatggatgatttaaacttaagttccttgccagctacgttggatgacttggaagattatgatttattcggtagcggaggaggtcttgaattggagactgatccatatgacagtctaaacaagggcttctcaagaatgggttttgctgattctaacgttgacaatgttatgcctcaaaacattttccaaaatggagtgggatcgattgctggcgaacatccttatggtgaacatccttcaaggactttgtttgttcggaatattaacagtaacgtagaggattctgaattgcaagctctttttgaggtaatttctcttttgtattctcaaaaatcggttctttatagggtgaaagattggatctttatgtttgttttcccgttcttggcagcaatatggacatatccgaactctctatacagcttgcaagcagaggggatttgtaatggtctcttataacgatatccgtgcttctagagcagctatgcgagcattacaaggcaagctgcttaaaaagaggaaacttgacatacatttctcaatccccaaggtttcatattcttgaattctcttatatatatcattcttgtattctccttttttaatagatgatcttttcattttataggataatccatcagagaaagatgttaaccaaggaactcttgtggttttcaactggcgtccat

SEQ ID NO: 140229 - DNA, 1505 bp, Arabidopsis thaliana landsberg
cactttttcaaattgtcgtctaaagtctctaaaaccaccatcgaagtcttgacagagagaattcgaatcggacagagaatttcttccgtagtttttcttgtaagcgaaaaaggtaaataaaagctttttcttcttcctctgttacgagtttctctttttggtactttccttaaatgtcaaaaacccttttttaagaaccgagggtttcgaatttcaggttgattttgatgattaaagggaatatcgtaattgatttcatgtttttcaagtttgaaatctgtatcctaggttaaaacctcgttgacttgtgaaaagtctaggtctacggaacataaaatgtctctttcttgttgttggtgtttgagattttgatcggttcatcatgtagatgaacaatgaactatgtacttcttctgatatttggctttatttatgtgaattttttttgatttttcataattctgtttttgtaaatgctcaaaaaccttatccttataactattcttatttttgtttttactgataactactctgtgaagttctctgaaagttttcttctttttggttattactatgagaaaatcttgttttgcaacaccatttactgaaaatttgtgtctgaatatgttcatgttcgtgcacacggcatgattagccaaatgcacaagcttactcatttgcacatcttagagaaattcttccaatcttttctttttggaaactatttgctagcttttgttggtaacataagtgcctttaccttgtaatattaagcttagatagccgaatcgtgtttgcaaaactgtttattgtgcttgtattttaccttgtttatatatatagtttcataaacaggagatactagaatcttactctgcaaagctgttcatttttctgtgtctattcttcatgcctatagtttggtgcaaactgtttattagaggtctgtgtctgaacaatctctttgttatcaataagtttcagaagctgctcaaaccttgtttcttaccactgttttgttgacattttgtcttttctcttttagaagtttagttagctcgtgtgagagaagggtgtaatgagctgttttggttggtgtgggagtgaggattttcgcaacgctactgacactggcccaaggccagcgcataacccagcaggtagctcagttcctatttcaactgtattacttgtcagtgtttctgttagtttccatcctttggcatccaagttaatgggatttttaattgttataaaggttacaatggaggccactaccaaagagctgatccacccatgaaccagcctgttattcccatgcagcctatttctgtaccagccattccagtggatgagctgagagatataactgataactatggttcaaagaccttgatcggcgagggttcttatggaagagtgttttatggtgttcttaaaagcggtggtgcagctgccatcaagaaacttgactctagtaagcagccagatcaagaatctttccc

SEQ ID NO: 140230 - DNA, 490 bp, Arabidopsis thaliana landsberg
caacgccgcacaaatcaaactcgctgaagaagtaaccagattcgtacatggcgaagagggtttgaaagaagccattaaagcaacagaagctttaagaccaggtgctgagacaaagcttgattggaacttgattgagagaatagcagaggatataccttcttgctcactgcctattgatcgagtgtcgggtttatcgattgtggatctatcggtttctgcaggtttgtttgagagcaaatctgctgcgaggagaatgttgaagcaaggtgggttttatatgaacaatgagagagttgatgatgagaataagagagtggacgaagaggatattgttgaagggagaggtcttgttctatcagcaggcaagaagaataaagtggtcgttagaatttcctgattttttttcataacaaatctgtactcattttattacgtattttgttatgaactaacgttgaatcactaatggtttataacttttctcaactga

SEQ ID NO: 140231 - DNA, 658 bp, Arabidopsis thaliana landsberg
cgaaaaaccgttatgagagcatagtgctactagtggatcggtaaacaataaatgccgtaataaagaaatctaaacgtcacgcgcgtgatgaaaaaacaggaagtaaatcgtcgacgtcgttattcaactaccatttctggatcacaactcccacacactcttttaaatcaaaacaaaatatctctttcctgttagagacaatggacggattgatcagaggtttggtcgacgtggctatcggaggaaaccaacgccgcggcggagacgatggtggtgatgatgaaggcaactcgagggacgagagatccagatctacttgggctaatgttcgtacatcatcaattcctcttctgcgttatcagttttttttatttattgttgagagattttgaatttctgttgaacgattcttcttctggaatttggacatggtcgcaggtggtttccggtgaggaggaggatcagaatcgcgcgggaggatcgtcgcacggccgtcgccagaattcagaggtaagaagtcaaaattcaaaccgtttgggaaattcgaaccgatttatagaaaccagaactctgattagcaagttgtactcaagttatcactcagtatctataaacattggaacgtcattgaatttagctgaaatacacgattcgtaga

SEQ ID NO: 140232 - DNA, 1668 bp, Arabidopsis thaliana landsberg
ccggtggtggtgcttccatggaggaaggagccgccggaaaagacacaactccggtggctgcgattggcaagcaagaaatgccaagtgcaattgtaatgatgcgcctcatactaacagtcgtgggccgcaagctttctcgaaaccctaacacttattccagcctcttaggtcttgtctggtcacttatatccttcaagtgagtcaaaaaataactcaaatatcaaaatttcaactataatcattgaatttgtttgttatataactttaactcatattttattttgctaaataatgagcagatggaatataccgatgccaaatatagtggatttctcgataaagatcatttcagatgcaggtcttgggatggctatgtttagtttaggtatgaacatgttcttataaacctgcataataaataaaattattggatattatgtataacgtattctaacaaaattaaactataggcctgtttatggcgctgcagccaaagatgatcccttgtggggcgaaaaaggcaacaatggggatgttgatcaggttcatctcaggtcctcttttcatggctggtgcttcccttcttgtcggattaagaggttctaggttacatgctgctatcgtacaggtaaactattcagagtttaccttgatttggcccatatatattattgttggaaaattaaagaaaacatacttggtgatggagaaagtgtttaagattttgggagtgaattaggaagtttaacatatagaagggactaattagttaaaaaaaaatgaaggatagatatgttcatagctttcaaaagtacaaatatctatctcatataaacctaatatagtctaccattatatctagacttatatgttacaaagtatctagatattatgaaaatatctagatattttacatgatgcaattctcctgtattagtctaaggaggtattaatattttaagatggttctaaagagactctttaacttgtttcaagttttgcgtttggtccaagaaattaatgatacctggatcattgacacataattataactaatccaaaatcaagttaaatatttcaaaatataaattacccgtggctataatttaaacttcgtttcttataaaagttttcgattaacttatagtagagatatgtacatctaaatttgatgaagccgatatgttcttttaggctgctctaccgcaagggatagtaccatttgtgtttgcgagggagtacaatttgcatccagacctactcagtacattgtgagtctcttgctcttctttttgttgttcttcatttacatttacggttgaacgtttcaaaatgcggtattatggtttatgtgaaatctctgttcttggtgattttttgttttgttttcagggttatctttgggatgatagtatctttaccagtaactattttgtactacgtcctcttgggcctatgattcacacaacacactgaagaaaaagattacaccggagaaattaaatgatctatgaataaagaggtctggaaatagagaaactctgtgagctcttaagagttgttcttgaggagcttgtgagaaagattaattaacggttaattacattgttgaatcaaattactggtaaatggttaggtgaataatttaattttatgtatttgatatcc

SEQ ID NO: 140233 - DNA, 538 bp, Arabidopsis thaliana landsberg
  unsure (1)..(538): unsure at all n locations
atatttgctctagctaagcctcacgattctgtaggcaagaggactcgtaatcggattcctaaagaagagagaaagacactggttgaatcttttataaagaagtatgcacctaattctcttccttagccggaattttgaattttcccttttcaatcccagcttttgtaattagtgtttgttttcaggcatcagaaactaaccaatgggagttttccttcacttagcctcacacacaaggaggttggtggatctttctacactataagggagattgttagagagattatccaagaaaatagagtccttggtcctggtgacttgctacttgagggaaatggctctgtgcaagatcaaagtctgtcaagttcaatcctgatggatcctgtgccccctttatctttgtccccaaacggatttcattctgggtcatatcaaagtcttgatttttcttatgagtcccctgaggcccacgttancggtagccaggtttaaatggataaaaacaaagaagtgaaagaaagtcaccatttaaagaagg

SEQ ID NO: 140234 - DNA, 905 bp, Arabidopsis thaliana landsberg
ttggcacgagcaacgtcaatatctacgaaaagaatatttattttcttgaattcaagaaaaattctcgggatccgaactcaatatttgttctcttctcttctctctctctttgcccgtgattactgattactgtgttaattatttttattctgcgtacgttacgtaagagagatattgaggaatggctgcgaagaaggtttttggatcggcggaagcgagtaatttggtgacggagcttcgtcggagttttgatgatggtgtgacacgtggttatgaatggagagtgactcagcttaagaaactgatgattatttgtgataatcatgagcctgagatcgtcgcggctcttcgcgatgatcttggtaagcctgagcttgaatcttctgtttatgaggttaggattcttttttctctctttatgatctcgctttccctcagattgttttttttaaaagagtttttttaggattgattgtgattggtcaattcttaatttgaatctttgaattttaattgaagattcagtttcttgttatggtttaatatgtttgtgtagtggcattgtggtatataggatagatgaaaagtgaagctccaagttcgattttacggtgtatgattagagttatgtggttattcatagaaactttttagcctttttacccgaaattagactcaatctttttagtcgaagtagatttaagttcatagttcggatgtttttttatagtggtagacttgcagaaaacatccgagctatgaacttatatcgcttttatgattaattagaagttttggagaaatttgatatccaagtaataaagtatttgagtttattgtaattttaagaagcatgattgcttccgtgattactcagaagttttgaagaagaaattcgattatca

SEQ ID NO: 140235 - DNA, 523 bp, Arabidopsis thaliana landsberg
tgtggttcttctcgaaatgctgactggtagaagatcaatggacaaaaatcgaccaaacggtgaacacaacctcgttgaatgggcgagaccgcatctcctggacaaaagaagattctaccggttacttgatccgaggctggagggtcatttctcagttaaaggagcacaaaaagtgactcagcttgcagcacaatgccttagccgtgactccaaaataagacccaaaatgagtgaagtggtggaagtacttaagcctctcccacacctcaaggacatggctagcgcttcttactacttccagacaatgcaagctgaacgtttgaaagctggttctggttctggttctggtcgtggattcgggtcaagaaacgggcaaccagtgtttcggacattgtctagtcctcatggtcaagctggttcgtcgccttatcgtcatcagattccgtctcctaagcctaaaggtgcaactacttagattggctcgcaagtgtggacgcaagcaaacgtcttttttaaccgatgt

SEQ ID NO: 140236 - DNA, 522 bp, Arabidopsis thaliana landsberg
aaaatggagattttgagatttttgctttctctctttatatattttcttttgttgaatctttctctttcacattttccttcgatttcagctcaaaggactaaccatgaaaacttcctcaagtgtctctctcaccgaatcaacgaggacgactcaagaatcatacacacatcaaaagatccttcgtatttctcaatcttgaattcttccatacaaaatccaagattctctgttctcgaaacacctaaaccggtttcaatcatcactccggttcaagccaccgatgttcaatctacgattaaatgcgcacggcttcacggtatacacatcaggactaggagtggtggtcatgactacgaaggtttatcttacatggctaaaagcagaccgttcgttgtcattgatttgagaaatctccggtctattacattagatgttgataaccggaccggttgggttcaatccggagctacaattggggaattgtactatgagattggaaaattaagcaaatctttggccttt

SEQ ID NO: 140237 - DNA, 1158 bp, Arabidopsis thaliana landsberg
ttttcattgggcagatgccatgcaaatgatgtcttcgctttattttatttctttgatttaattttttttctttcacttttgaaggcccatgttggagttgccttactgaataataaacttcccttgtctccatcggattcgtctaaagatgacaagtcaaagtcaaaaaagtccaaactgccattagaaccagcaagcaaaaccataactcagaatggggaaggatcatcaaaaggaaagatcccaccccaaaaccgccacttaactgctgcggaactgcaaagacaaaagttgaagaagattatggatgacctaaacaatgatgaaggtgatggccggtcagctcccctagttaaacttggggatgcatcaatggcatcccccttcacagctaaacatgcgtcggttgccccagtgacagacataatccggcagggtcgtagcacacttgtgacgactcttcagatgttcaaaattctcggtctgaactgtctcgccacagcatatgtcctaagtgttatgtacttagacggtgtaaagcttggtgatgtccacgctacaatcagcggagtgttaacagctgcgtttttcctcttcatttctcatgcccgaccgcttcaaaccctctctgcagaacggccccacccgagtgtcttctccgtgtacctcttcctctctctgataggacagtttgctgttcacttgaccttcttggtctactctgtgaaggaagctgagaaacacatgcccgaggaatgcatcgaaccagacgcaagtttccatcctaacctggtgaacacagtgtcgtacatggtgagcatgatgcttcaggttgctacatttgctgtgaactacatgggacatccctttaaccagagtatcagagaaaacaaaccgttcttctacgcactcattgctggagcagggttcttcaccgtcatcgcctctgatctcttcagagacctgaacgattcgctgaagctagttccattacctcaaggtctgagagataagcttctcatctgggcatcacttatgttcatcatctgctactcatgggagcggttactcaggtgggctttccctggtaagatttcttcttggaaacataagcaaagagctgtcactgcaaatctggagaagaagaagaaagtttga

SEQ ID NO: 140238 - DNA, 3165 bp, Arabidopsis thaliana landsberg; identical to SEQ ID NO: 31108

SEQ ID NO: 140239 - DNA, 10323 bp, Arabidopsis thaliana landsberg
  unsure (1)..(10323): unsure at all n locations
tttgatataatgcaggtccgattcgtcattatgggtaatctgttttgttctaagttctctgttcacagtctctttgatctaaaaggagcttcttttgggcgtacaactgacaaacctgaatcagaaatcgattcaaacacgatcttaaaagacctcgacctgaatttcattttcagattgcagaaagcatggtaccaagaattcatcaggtaaaaaccattatactttactctatccatagtttgtttgtgcttgtttcatttctcatggttcattgtttacatcacaggcaaatcgataaagactgcgagtttctagaacaggagagaatcatggattacagtcttctagttgggattcacttcagagaagcttctgtcgctggagagctgattccttctggagctcgaacgcccattggttcgcttttgtccaatctaaaaactacttttcccatcagcaaaaatgtatcattcacagaaacaaagtaattgtttgtttatctacaggtgaatcagaagaagaatcaggccctcgtctttctagagcagaggttgatgagcttctttcagatccctcaaggtaacacaacataagatatcaattaacaacactttcaaaactcaaaaccgaaacacagaaacatggattttgaatatggttgtgttcttgcaggtgggcaagtattagattggggacaaacatgccagcacgtgcagagagaacgatgagaaaaaacgacagcgagctgcagcttgtgggagagcctacaggagagttctacgaagtggtgatgatatttggtataattgacattcttcaggattatgatatcagcaagaagcttgaacacgcttacaagagcatacagtatgatccttcctctatatctgcggttgatccgagacaatactctaggcgtttccgtgactttatcttcaaggtcttcacagatgacaattgagatggtctcaagttgtctctggcgtttttagatttcttgattcccaagtaagagctctgcaaataggctaccttgcaaatatgaagttcgacgaatcccatttcgtttgttcgtttgtttcaatttatagattttgtatcaagctttgtaatcagctaaaagccatagcaatgaatattcttttttcttgtatactttttatgtaacctttcataatatgattaagattttcttgtctggaaattcttgtaaatgaaatgattttaattatcgtggtggttgattcattttatattttaactatacatttgcagtatagtgttgtcaatgtgacgtagttaacataaaagaaaacaagttgcataatttcttttacagatacttttccactaaaaatacttcatcgacaactacataaaaaattgaagtggtttaaagtttatagaatttacaaatgtgattgtatattctaaattgggaacaaagaatatttgatgcaccaacaaaaagattcgttcaaaaacaaaagagattcttgaaagaaactagagtttttatttctctaaaaggtggaaagtttcttggtcaggtaattagatactgaataaagacatgaagcaaaactttataaaagatagacaactttgggcaatgttagttacgtaggtgatgatgatatcttttgttttcttcaataaagaaataagagtaaaagattccaataattgttctaaggttaacactcgctgttgttgtcgctttatgtggtaaacgtatagagaatctctttgttctcttctgccatttgtccccttacaaaattaaatttgcgactcttcaaacgctatttaattattttaaattgattacgtattcttgaaattgagccaagcacttgccatttatttacatattaactacttattcaacattagatttgtagtctatattcattcaattgttctaaagtacaatctgtaaataaagacatgcgtcaccaaacgcaccgctaaatcttagaaaatcgcgatcgcgtttgaagacaaaagaaagctaataaaactagcactttcatcaactttacaacaacaaccaaataagcgacggcgattagagagtcctgcgtagtcgtgctcactgatcactcttagctcgtgccgtgatctgagactgagaaaacatcaccggttgggttttctctacgattccggtgcaccgtacacttcaccgcagtggataaatctctgcttccattttgactttttgaaaataaaactacaacagtcgcagagagattaaacttcgaaatccgatcgatcgctttctctctcggcgtttcttctcagnagcttcattccatggctctacagtctccgagagctaccggagcttcatcttccgtttcccggcttctctcttccgcgaaattaagctctactaagactatcttctctgttgactcgcggatcctactgatttctaaggaaccaaacggcgtaacgaactctccggctttcgcggctacagtccactgctcaagtcctcgctgaggtctccgttttcggtgaaagcgatccttaattctgaccgagccgtggtgatgcatcgtcttccttttctgatctgaaacctcaggtaatcgtggttctctgcaatcagataaaagcttgcatctttatctgctgttgatctaggttttgacttttgcacttttagttctggtgtgtatatattgggtatacttaaaaattttcatttgcaagaggtttagttatggacgtttgtttttattttgcggggttttaattttgttttgcatcgtcgcaggtggcttatttggaagatataatatcggaaaggggagcatgtggtgttgggtttattgcaaacttggagaataaggctacacataagattgtaaatgatgctcttatagcacttggttgtatggaacacaggggaggttgtggttctgataatacttctggtgatggttctggtttgatgacttccattccttgggatctatttaacgaatgggctgagaagcaaggaatcgcttcttttgataggacgcatacgggtgttggaatgctgttcctaccgagagatgacaacattaggaaagaagccaagaaaggtgaacatagaatagttgtatgcataccactccaagctataatttttccgatgtatataacatgtaatattttccttgctaagtcaatgtttgaaacttctcttcagtgattacaagtatttttgagaaagagggcctggaggtgcttggatggagagatgttcctgtggaagcgtccattgttggccataatgcaaaacagacgatgccaaacacggaacaggtctttgttagaattgtcaaagacgataaagtagacgacgttgaacgagaactttacatttgcatgaagctgatcgaaagagcagttgcttctgaaagttgggcctctgagctctactttagctccttgtccaatcagaccattgtttacaagggaatgcttcgttctgaagttcttgggttattttaccccgaccttcaaaatgatctttataaatctcctttcgccatctatcatcgaagatttagcacaaatactagtcccagatggcatcttgctcagcccatgaggtttcttgggcacaatggggagatcaataccatacaggttatgcttctcttctggtcatttggtttgttgaaacttagactaagctaggtccttttcactgaaaccggaaaagtgttgcaggggaacctaaactggatgacgtctcgagaagcatctctaagatcacctgtctggcatggacgtgaaaatgacattcgtccaattagcaatccaaaggcttcagactctgctaaccttgacagtgcggcggaggtacgagtcatctaacctcctaacttgtattttttctgttctgatgctctttgtggtatttccttttggaggaaaattgaagaggcacataagtgtttcttgcgtttggaactaagcaatagtcctattctgcatacataatacttgtctttctgttgaccagaaaaataaacttctcagacatgtaacgagcatttcatgaaaaaagcaatacatcttgcaagtacatacatttatacactcttcagaataacctcaagaccctaagttatagtcttctttttttttctgcaagaattcaatgtgttttatgttattgtggtgtgtgcagctattgataagaagtggccggactccagaggaatctcttatgattcttgtcccagaggcgtataaaaatcacccgactttaatgattaaataccctgaggtattgctttgtgtttgcctttttagtctttatggatgtttgcatcttgcaagtgcttcccttatcttctttccaactgtaggctgtagacttctatgactattacaaggggcagatggagccctgggatggacctgctttggtattgttcaggtaatttgcttggagattttctacccttgagaattttaattatgtgcgtaaggtttaagctttcagttgcccttattcctccataaatacttaactaagaataatgagaatttacaactgttctagaaggctcgtaagtcttgatcactcagagctttcctgctctttttttggtggtatccatagttgtggacgacgagagagcaaatgaccctgttgataatttgtcgctcaaagtgatagctagttttgctagcaagtctgttgcatatctttcgtctgctcgcacattccaaaacatcgtcaccttttgtttggtgcagtgatggaaagactgttggagcttgccttgtccgcaatggacttcgaccagctagatattggcggacaagtgataatgttgtctatgtagcctctgaggtgcgttttgtcttttacccctatgtatgtgctctttatcatctaagcatggtggtaattgttgccagcagatgatttggcttatgcttgaatcttaaggcttggtcctgacaggttagaaaaaccaattcgtttaatcactttggaggttttttcgtttttcttttttgatttagtgtgacaaagttatacgaactgatttttgggagaaaatgaccaagtataagatagtttcatggtgatcgttttgtgtgacatatggaaaccgagttaatactttgtaaagcgagagaattggtttggatagaaggggatctgttaccaatcttgtttatatcgtggctcagaagaattgttaagtcatgcctttatacaggtcggagttcttccaatggatgaatcgaaagtcaccatgaagggtcgtctaggacctggtatgatgatatctgttgacttagagaatggacaggttggtgcaccagatcatggtcgattattctctttatttgttaacactgacaaataatttttgtttatgttgcatcccattagtaatatgtatattttcaggtatatgagaacacagaagtgaagaagcgggttgcatcatataacccatatggaaagtgggttagtgaaaacctgcgaaacctgaagccttctaattatctctcgtcagcgatcctggagactgatgagaccttaagacgccaacagtaagcctttttgtttctcttgttctatgcttccatcatctgctacatgcaaatcatatggtgatttatgaaaacacttaacttttcttaactgttattatcttcttgtatacttgacatacatctggtgtgagggtaaataagttgattatttcaaactacaaagtttatcaatggttttcaccagtagaattcaatggtttgcatttttgacgatgattgctttttcccgatcaagacactaattttggctatgatgtatcttactttgatggactagggcgtttggctactcgagtgaagatgttcaaatggtaattgagtcgatggctgcacaaggaaaagaaccaacgttttgcatgggggatgatactccagtggcagtattgtctcaaaagccacatatgctttatgattatttcaagcagcggtttgctcaggtttgttcacctcattagaagggcacgatttgaactggttgtttcctttgatctaggttaactgattacatgatttatagaaattaatgaactgtccttgaaatgattccccttgtggttcttcacatggtgtacttacaggttacaaatccagctattgaccctctccgggaaggattagtcatgtcccttgaagttaatattggaaagcgtggaaatatattggaggttgggcctcagaatgtttcacaggtcggagtgcctaaattttgtactggcttagaattatttggcttttgcaagattttgtatttatcaagacttgtgatttcataagcaggttgttttgtctggtcctgtgctaaatgaacgggagcttgagggtttgcttggtgatccactgttaaaatctcaaatcttgcccacattttttgacattcgtagaggaattgaaggatctttgaagaagggtcttctaaaactttgtgaagctgcagatgaagctgttcgtaatggttcccaagtacttgttctctcagacagatctgataatccggtacataccagtttccaagtgtatgctttcaattgtgattttaactatataatatgtagatgtatgattatcaccttttacagtgtcctccttttacatctacgttttggtctactaacaactatgctctaggctctcattctggactaacaacattattgtcttttctcatgcaaagattggaactgttgaggaaaagaaagttaaaatgtgaaaatataattgccataaattgttggtttctttttagtgaactggtggcatagttggtttctttataataaagtgctattggtggcatcgttacaatggtgcactattatgtattctcgctgtaagtctttgtatgcgctgctactttccagtttccttgagttattgtaaattttcccttaaattgaagctcattttgcttgtgtttttgtgtctcacttggatgatattttcttttctatctatctttacatactttgtaacttcactgtctattcctgattcagcagcctatcctttttcaggaaccaactcgacctgcaattccaatgttgttggctgtgggtgctgttcaccaacatctgatccagaacggtcttcggatgtcagcttcgataattgcagatacagctcagtgctttagtacacatcactttgcctgtttgattggatatggagcaaggtatcgacttttttcattgaatctttcattttgttaggctgtttcttatcgtaccaaagcaagtcatgtggaatttgtatgttgtttattgtctcttgcggttcttcatgccaaataatagcactctctataatagactcatgtttattttatgtagtttataatacacctacattcttaattttaaatttaggtaatgatatgagactgttttcctcaactgttatacattgcatctatagaaaatgatacggatctatgtccataaccaatttcagtgctatatgcccgcacctagcactggagacgtgtagacagtggcgtctgagcaacaagaccgtgaacatgatgagaaacggaaaaatgcctactgtaactatggaacaggctcagaagaattaccgcaaggtcaggacatattaatggttctaacgttgacaagaattttttgagtgttgataagccgttcgatctctttcttgcatgcctatagtgtttgctaaacagattgtaatatttccctattgtaacactgctactgtctttatccgtattggaagaaagacatcctaagattctttgaattgcttccgcaggctgttaacactggtcttcttaaggttctctctaagatgggcatctcgttattctctaggttcagtttctgaactatctatttcgtttttcgaccttatcactgtatctgtttacttccgatttaacacctgagctctctcttttcagttattgtggagcacaaatatttgaaatttatggattgggaaatgaggttgtggaattttcgttccgtggtagtgcatctcaaattggtggattaactttagatgaggtaagaatatcccccaaagtttttcatactaagatactcgactagttgccttgtttgagtacaaatatgttattggagcaatttttcagctattaactaaatacctctttgatattaaggttctggacgtcagtttagatgctagtttcatctatatatgttataaccttaaagcagcatataatatatgcacacattctcaaaaatgtgtgtactttttggcttctgttataggtttatatgtttggaattgtttttctttttatcttcttggaattgctttagtttaaatcagtgaaaaaaaaattaaggcagtaactgtacttttctccctaaattgtttgtgaatacctgcatgtcaaaggttctgataaaagtctgagttaaagtctaatgttgaatgcttctcatattatatgttcttcgaatgcaaaatagtttatattacaaaacgatgctatgggcctctaactcgtaagtgctatattttgcagctggctaggaagacgttaactttctgggtgagggcattttctgaggatacagccaaacggctagagaacttcggtttcattcagtttaggcctggaggtacttttctggactggaaatgcatttggtaatgaccttgcatgtctatgcacaaatacatactctcctgcctacaaaaaaaacgtgtatcatacgtacaactatgtctagttaagtagagcttttgaagtgtttattttcttacataaatgttgcatatgcacagacacatttcctctacactattttactgtccttttagtggattaaattgctaccattcattatccctataaagctttccagtattatctctaatttagtatattttgttatatgaaaggtgaatatcatggaaacaacccagaaatgtctaaattacttcataaagccgtccgcgaaaagagtgagacagcctatgcagtctatcagcagcatttagccaaccgtcctattacggtgagtgctataatctcatcttcaaatctgattgtctgttttctggaacaagtgaatatgattctttgtatattcttgttgtaggttttccgcgatcttcttgagttcaaaagtgaccgtaaccctatccctgttgggaaggttgagcctgcttcctctatcgtggaacggttttgtacaggtggaatgtctcttggagcaatctcaagagaaactcatgagacaattgctattgcaatgaacagattaggaggaaaatccaactcaggggaaggaggcgaggtagttgttcattgtctagttcagatcttgttcaacttcaaaacgcatttacctagctaaagattcaccgtctatcttgctaggatccgatccgctggaagccgctaacagatgttgttgatgggtattcttcaactctgccacatcttaaaggtcttcgaaatggggatacggctacaagtgctattaagcaggtactggaagtcaacttgacttgtggacatttcatattttcatgtgtacagtcttgcttactctaaggaagttattgggaattcttttgttttcttcatagacattatcaatttgtacttttctaatgatttccagttttcaaaatgaccttttatattatcataggttgcctcagggcgttttggtgtcactccgacgtttttggttaatgcggaccagttggaaattaaagttgctcaaggggcgaagccaggtgaaggtggccaacttcctgggaaaaaagtcagcgcatatattgctagacttagaaattctaaaccaggagttccgcttatttctccacctccacatcatgatatttattccatagaggatctggcacagttgatctttgatctccatcaggtattttactttggctgtaaatatattgccaactttagaatctgggctccctcttaacaaaaaattataatcaggtcaaccccaaggcaaaagtgtcagtcaagctagttgcagaaactggaataggaacagttgcctccggagttgcaaaggctaatgccgatatcatacaggtaacttgaaagttgaaaatataacattgcatcttgttactcccatgttcttgtgccgtctcattttgtgtctgccaccaagtttcattttgttcgttttgatatgtttttcagaaatcaaaaatgttggtggaaccggggctagtccaataagctccataaaacat

SEQ ID NO: 140240 - DNA, 891 bp, Arabidopsis thaliana landsberg
atgggcttggcccaagtgcaggctctcgctagtcgctacgctacaactatcccatatttaattagtgaagagtattttattattttggtcaacgggctatctttgttgacaaaactatcccattggtaaagaaatagcaaaataggcgtttcattctctatatttaaacttgattttatgaagagttgaatagctgaaccaggaagatatttaagaagcccgtacttcacgctttaactgtcaatcgatagatcataataaatgactatctatggataggaactataactgaattcagaaagaatctactactactataaatactaaaagagtattaatacaacggaaaaaacaaaacaaaaaaaagggggaacaagggagtttcatgttaaaaagaaatgaagctctcttgtttggtttttctcatagtatcgtctcttgtttcgagttctcttgccaccgctccgcccaacacatctatatatgaaagctttctccaatgtttcagcaatcaaacaggtgctcctcctgagaagttatgcgacgtcgttctgcctcaaagcagtgccagcttcactccaaccctacgtgcctacatccgtaacgctcgtttcaacacttccacgtcccccaaacctctgctcgttatcgcggcgcgttctgagtgccacgtccaggccaccgtcctctgcaccaaatctctcaacttccagctcaagactcgcagcggcggccatgactacgacggcgtttcctacatctctaaccgccctttcttcgtcctcgacatgtcctatctccgtaacattaccgtcgatatgtccgacgacggcggctctgcttgggttggagccggcgctactctcggcgaagcttattacaacatttggc

SEQ ID NO: 140241 - DNA, 585 bp, Arabidopsis thaliana landsberg
acaccccgtggagcgtcttgccaagagatttacgcaagattgaacattggagggtctatatacatgagggacatcacttgtcgttaatgcttatgctgtgatgagagatcctgatatttgggagatcctaatgagtttaagccggaaaggtttctagatgcctcaagattagggcaagaggaggagaaaaaggagaaaacactaaagttcctcccatttggcgctggaaggagaggatgtcctggattatatcttggttataccttagtagaaaccacaattggagtgatggtgcaatgctttgactgggaaatcgaaggagataaagtcaacatgcaagaaggttccggattaagatttttcttggatttggctcatccccttaagtgcactcctattcctcgaatcataaatcatgaaccttctaatacgcagattccaaattcgtgagttcaaggcttcacttaatttacaaatatataactatgaaggttcaaggatcgttattacacccctatggtatatacattatttttgcattcgttgatgttgttgaatgcactttccctaaactgttgtatttca

SEQ ID NO: 140242 - DNA, 445 bp, Arabidopsis thaliana landsberg
gggaaaaaaatggctcaattggctgctttgtcgggaaagcaagctgatgagtacttgaacgcaaggccaaaatatcctacaatatggtacaaagtgttggctggtcgaaccagcaaccataaggtggcttgggatgttgggaccggcaacggtcaggctgctattggggtttgttttctttctaaaacaatagagttactttgaaccttttgaagttttgatacatttccttcaaaatacttcaagccacgatcaatttttatgtgaagcctaaatgaactaatcgtacgtgagtcaaatatatattgtgtaattaggtcgctgagtactaccagaaagtggtggcaactgatataaatgaatcacaactccaacgtgcaatgaagcacccaaaagtcacttactatcacactccatcatcaatgtccgacgacgatctagtgac

SEQ ID NO: 140243 - DNA, 419 bp, Arabidopsis thaliana landsberg
gtcaaaaagaggagctaataataatatggctgctttgaagatgactatctcttgtttcttgtttcttcaagtaatatattgcttgctctcttcatttgctccaacaaatgtgcaaggattgaaagttggattctacgacaaggcatgccccaaagccgagcttattgtcaaaaagtctgtcttcgaggctgtgaagaatgatcggacaattgcagctcctttgctcaggatgttcttccacgattgcttcgttagggtaatgtcctttcttgacatcctgaattttccttttagtctttttgacaccttgtgatctaatgattgaatcatgatgttttagggatgcgaagggtcggtattgctagagctaaagaacaaaaaagatgagaaaaactcaattcctaacctcacccttcgag

SEQ ID NO: 140244 - DNA, 2638 bp, Arabidopsis thaliana landsberg
tgtgcaatgtcacaaaaagcttgtcatagagtgggttgcagctagtgacctgaagagataactgcacaagaggtgagcctggcactctggtttttgtttctctcagggtacgaaaaaatgtatttactctcatgagcttttgtatgacgtacccttgcagacgccagatgtccataaggctgcatgggatcttttgaaggtacgtgaattttaatggagcctggcacaccaatttggtaaatatgtttgactcaacacttcggttgttgcagggtgctgatggtatcctagtaccaggagggtttggtgatagaggagtgcaagggaagatacttgctacaaagtacgcccgtgaaaatcaagtccctttccttggcatatgcctgggaatgcagctggctgttgttgaatttgcccgctccattcttggttttcacgatgcaaacagcacagagtttgaaccagaaacttcaagcccttgcatcatatttatgccagaagtactaaacaatctggctctctcatttgattgattacatggttttcatgtattaagtatctacttatacttgttcaatctctcaatagggatccacaactcatatggggggcacaatgcgcttagggtcaaggaagacttacttccaggttgctgattgcaagtctgccaagctgtaagcacataatacagtagcacatgataactcgtaggattcattatcaccggctccacctacatctcattctggttctattcgggctggcccaccttagacaccaccaccacctcgacctcctcctcctaaagctaatatttcaaatgcccccaagccaccagcccctccgccacttcctccttcatctacaaggttgggtgctccccctcctcctccaccaccaccactatccaagacccctgctccgcctccaccacctctatccaagacccctgttcctcctcctccaccagggctgggtcgtggtacaagtagtggcccaccaccactgggagcaaaaggttcaaatgcaccaccaccacctcctcctgcaggaagggggagagcttccttgggacttggaagaggccgaggtgtgagtgttcctactgctgcacctaagaaaaccgcgttaaaacctttgcattggtctaaagttactcgggcagcaaaaggtagtttgtgggctgatactcagaaacaggaaaatcaaccacggtgggtttctctttgtgtttttctttcttttaaatgttttaacttgacatacatgatttccgaataattcactgataacaattatgaaacaaaaatgaattgtctttacagttctgtcttgcgattttacctgtttcccataaagtactatttttgttgaactaatccgatgaattttacgaatcttcatgacagggccccagaaatagatatatcagagctcgagagtcttttttctgcagtttcagataccacagctaagaagagcacaggtcgccggggttctagtatcagcaaacctgagaaagttcaattggtgaggcagctcaatttcacctctgtacacatataacatctatatatataaatgacagtttggtaaaccaaatattaccaagagtggatctattaagtaggtatcacctacagctatatagtgtacattaaccagatggattctttgatgatctaaagttaacttcggttgctagaagaagttgacaattgatagacattgcaaacatcatttattctctcaaatggatactctataactataataaatgattacgttcttgcctcttagtttgcttatctttcagttctaaccccctttttttttttctgtgtttgtattaggttgacctgcgaagagcaaataactgtgaaataatgctcacgaaaataaagattcctttgccagatatgcttgtaagttttgctttcagtatcttttctgctcatcattttggcattgtaacaatactgtgaagtggtcgtttagagggaataaacatacaagttttggattttggtgtttacataattacatatcttcttcatctatcattttgcatagttaaatctcttttcaatgaatgtttacagatttctactaattgagactttcaaatctatttcttatcttagagtgcagtactagccttggattcattagctctggacattgaccaggttgaaaatctcatcaaattttgtccgaccaaggaagagatggaactgttgagggtaatttcagttttcattgtcatatttctctctagcaccaggttcataggttcttcttgcttggaaatcctactttccttcccttctgaatggttgattaatgtttctgaaccaaagaaagatcctgttgactaaattcctttcaacactttattattccctgaagttaaatcatatgctgttcttgttttcagaattatactggtgacaaggaaatgcttggaaagtgtgaacaggtttgtttagttgctaaagcgttggattatacttgtatatcatctctgctctgactcttaaccttgcaaatgtaccagtttttcatggaactaatgaaggttccacgtatagaagcaaagttacgagtgtttggctttaagattacctttgcttctcag

SEQ ID NO: 140245 - DNA, 706 bp, Arabidopsis thaliana landsberg
tttagaatccgagattgaagcaaaccgtggagctttttgcagtatcatatgtactcaaccaaggagaatatctgctatgtctgtttcggagagggttgcttacgagagaggagagcagttgggtgaatctgtgagtttcaccctgcatgctcctatatctagttagcgtggacccttcttatactttgaattcctcacttttttactgattaagctctcttgcttttttcttacttttttgtgaaggttggatataaagttcgattggaaggtgttaaaggaagagatacccgcttactcttctgcaccacaggcattttgttgagacgcttgttggtagatagaaatttaagaggagttactcatgttatcgtggatgaaattcatgagcgtggaatgaatgaaggtatgtatacttttgctatcaagcagctcctcatttttagcttaacttgatttaggtgtcttactatattacttttgtattttagatttccttcttatcattcttaaggatctgctatctcgtcgctcagagcttaagctgattttgatgagtgcaactttagatgctgagcttttctagtcatacttcggtggggcaggtgtcatttatattgcagtaagtaaaaaacatatttgtttatcctctggagaacacttcgagatacttatgcttctgagagttcaacattccatggatcta

SEQ ID NO: 140246 - DNA, 1094 bp, Arabidopsis thaliana landsberg; identical to SEQ ID NO: 54938

SEQ ID NO: 140247 - DNA, 691 bp, Arabidopsis thaliana landsberg; identical to SEQ ID NO: 7382

SEQ ID NO: 140248 - DNA, 2755 bp, Arabidopsis thaliana landsberg
cacttccttgaattggagaaaacccgcaaacaatgcatatccatttttttcactgtttttgcccagcaaccttatataagctcatattggttttcaaagtcctatctaccaagcatggtcaatcttgtctgttaataattgagggatttagagactttcgttcttgcttcaagtgtaattgacttgtggacaatgaaatttttgtgctgaactgcttttgtatgctatcttgatgcttctgccatgtatatattagtctgttttaggttgaactatatgcagctgccttttatgtgtatatgattttcttcatgggatttgaatttcaggacaagtacaaggaaaagaagcataagaaggataaagaaaagagagagggtaaagagaaaaagagtaaagatagaagcaaagacaaacagaaggaaagaaaggagaaaaaagacaaacataaagatcagaaagacaaggagaaagataaagaaaaaagcaaacctttggaggagaagaaagccgagcctttgacaaacaccgggcacagagagaatcgtgtatcagatatggtgcagaataatagtaatggagagtcaaagtatgtacaggacctggcaagaaggatcagatatgacgaagaagcaacaggaagtcagagtgcacaaaggattgatcatcctaaccaaaaaaatgtaggaataacagaaaaagcatttgagaacagcccaattgaagaaacaagccatagggtagatgacaataagagaatcaaaaaccagaagaactttatagcggcaaaaagttctgaaaatgcagtttctcgagtatcatttggtgcagatcataaaagagctgaggtgatgtgtaaaccaatggagaacagagaccaggtgaggcaaacagaatcagctgagaagagtcaccgcaaggaaaatgtgaccaagagtgagaaaccaagggatcaagaaggggtaaagaagactgaagcaaaggataaagacagaaataaagagaagaaagaggaaaaaacagagtcaataaataaaactcgtcaggagaaaccaaaattgatacgagggcccaagttagaggaaagagaaaaggactctccggatttaagaaattgcaagctgcctgacgtttcacggacaagcatcaagaaccttcacaccgagggaaatcttggcaaacggaaggatcatatgacaaatggattcctgtatggtgagttattctctgatccaattctctgtctggtgaatgaggagtgtagttgccatattaaccatcgtatgatatatggtttggtacttagaagcatctaatagttttatccaatcatggtatgttttcttaccttaaaagattttttaaatttatgggtatcttagtggtttggtagtttcttagtttggagtaatgatgcaagatccctatttcttggttttggtctgaaatgttaacaatgtagtttattaacagtttgttgtaacattagtctttaattctttcgcagaaaatggaacaacgccacacaagttacagaagctgagttcttctgtaccatctgtggaaaatggaagaacattaggtgcaccccgaactcctccaatgcctgcttctgaggtgcaaggaacaacttgcaagccacaagtcaaagaagttagaattaatgggtttgctgtctctggagaaaaacgtaaagtctgtccaccaagccctttggctgcaacaatgaaagtgaaagtcaaggaaaatggtgaagcatccgcaaagccgcctcatcctgacctaaagtatctcaatatgatactcaatgtacgtacaagggagctgttgccagagattgatgatgaccaagaatggctacttggtcagtcgggtatcaaattaaaaaaggcgagaacagatcctccagattctggcgaatccttgcaggtctggaaccaagctttcagaatagagtctgcggatatcacagctcttccttatgtagttccattttagctatgactatattcctacgctacaatccctgaggagaagaactatccctcgcacaacgccactttgcagcagcatctattaaagaagaccgagctccccaaagcagtccatggctccccaaagtttatgagcagggatcaaatatgttatacacgcccataatatgaacacccacaaagctctgcatgggtgggggaaaagaatgaatgaggaagttgtaagtagagtaagtttatagagaagttgattgttgtttgacaccatgatgtgttataaggacaagaatatgtgtggcatttggttctgcacgcaattttgattccctgcttgcatcatcaacattagtggataaagtttgtatattacagagaatggaaaaagaaagagtagggctctatgtgtgttactgggcgtgcagacggaagaaagttagcatcacaaatctttaatctttccgttataactatagagtatatagtctcgagtttctcaggaatacgattgtaccgaatcctgaataaaccaatgatcacaagccaatcctagctccatgcctaataatgatgtgtataattttagtaaatacaatcatttctatcctaaaggctaaatctttcataaatttgacttaaaagatcggtctcttacttcaaatatcaaaccatggacttgaatcatttcaggaaatcttgtaacttcatttttttacggatgtattataccaacttcagttaacttcaatgatcttaatcaaatc

SEQ ID NO: 140249 - DNA, 1522 bp, Arabidopsis thaliana landsberg
cagggaattgtgtagctattgttcaaaggatacaccgaccatcgaaatatgggatcttgacgttgtatgtaattataccagactatgtatttatctttgcctttatcgattatgagtctattgataaggttattataatgcttcagagggacgaggtgctaccttgtatacaactaggaggaatagaggagatgatagtgagtaagaaaaagaagagcaagaaacagaaaccggtgtgtgcatcaaactcgtctatctctagttcgtctatggcaagttcgtatgtatttatttatttaattttgaggtctgtcttttactttacagaaattcaaagaaggtagccatactgagtcagtacttggtcttgcttggaacaaggagtttcggtatgtctaagcttactagtgctcattaattttaagttttttttcttctggtttgctctttaggcgtgtctgattttcttttgatttgtttggataaaaggaacatacttgctagtgctagtgccgacaaaaaagttaaggtctgggatgtggctactgggacgtgtaagattactatggagcatcacacaaaggaggtaaaaacgagagtcgtagaaggagaaaattctttattatatggcattctcattgtttattgtttgtatgatcacaggttcaagcggttgcttggaaccattatgctccagaagtgcttctcagtgggtcgtttgatcaaactgttgtcatggtaactgttttgttccatggttttactttcgtgtgttctggtcttttccctttacaatgattattaatagctgtatgtatattatgttgcagaaagacggaagacaaccttcacactcgggtttcaaatggtctgtcatgtctgatgtcgaaagcttagcctgggatcctcattgcgaacactcctttgtggtacatgacacttatctttttcttcagatagaaaaatcagtggtttcaagacatttttcaataaatagtttgttgtttattttccctcttaaggtaagtcttgaagatggaaccgtgaagggttttgatatacgtgctgcacagtcaggttcagattctgatttaaacccaacttacactatccaagcacatgcccaagacagaggagtctcctccatctcatacaacatttctgcacccaatgtatatatctctctcccttctacgtccttatggcatttcatggttttgttttttgtaatcagttctcaccatttatgagctgtaattaacagcttttggctacggggtctatggataaatcagtaaagctttgggatctgtcaaacaatgaaccttcatgcattgctacacaccaaccaaatgctgtaagaaccagtcaacataaattttttttgttccccattagtatctacttctttgtccctaaccattctgattttgtcatcagggagctgtgttttccatttcctttgcggtggacaaccctttcttgcttgctattggtggctcaaagggagagctacattagt

SEQ ID NO: 140250 - DNA, 2142 bp, Arabidopsis thaliana landsberg
ttttttatttttttaacatttacaccaaaaaaatgggaacaaagggtacctgaagaagattcactgaacctagtaattaataagtactctccattttgtttggtcaacttattcgtatactttccataatagtataggaacattaaaactgaattgaaatcaaagaaatctattgatgatttattatcttctacaattgaatgtgttcgagtgtttgaccgtttcataaaaatatataaaagttacaactataagatacaaaaactaaaaatcgaaaacacaagtataaagcccaataagaaactatataaagcccaatattattctttaaaagcacatgtatgctacctacaggcccatttagttttaaccgcgtgttttagttaaggagcatagaaacaaccctagtccttgccacagaggatcacagctaaccaaatattcccttgcacgtaaaatccgacactggtctatttcgtcgtcttcgacctcgagggaatctactgtagctctcacactatccactcttcaccggcagctagatttccgggtcctcagtatcgggtcagatctagatccggatccggagacgctgagaatgaaacacttcagaactgagcgagtccgtgcgactccgaagctcttcacctacgttctcgtcggtttcatcgctctactcggcttgacttgcctctactacggctcttcgttcgctcccggatccagaaagtccgatgagttcgatggatctaataaccgcgttcgcaccggaatcggatccttgaggaatcgagatattgtgcttgcagtgagccgtttcgaagttcctaaaagtgttccggttcgtgaatcgaatcatttgtttcgaattgagtagagatgtctagatttttagtgttcaacttaagatttgtgtagattagctcgttgaatttaggtttctcatgtagtggttgtactcattttgatcctgtgcagatatgtgattcgagacactcggagttgataccgtgtttggatcggaaccttcattaccagttgaaattgaaactcaatttatcgttaatggagcactatgagcatcattgtcctccatcagaacggcgtttcaattgccttgttccgcctcctgttggttataaggtcagaactctgtctgtgttgcatatgttatggctctagtgttgtggttaatgatgattttgttttatggagtttttcagatcccgttaaggtggcctgtgagtagagacgaggtgtggaaggcgaatatcccgcacacacaccttgaacaagagaagtctgatcagaattggatggttgttaatggtgataagatcaattttcctggtggaggaacacatttccacaacggagctgacaaatacattgtttccctggctcaggttcgtaccattatcatcatttggttcctctatccttttttgagtatcaagggtagagctcgaatctttagaacaactgtgcatctttcgctttatttttgttaccaatgttgctttagccagtgaacgtcaatggtataagggtatagcagtatgcaacattattgattgacactatttgactagaagatgtatagcgttgtccatttataccaaaaattatgtgggatattctgttgctcctataccgagcatagttgttttggctctgttttttattttcaagttcttctttcagatgacaaaaaaaactgcttattgctttagatgctgaaattccctggtgacaaactcaacaatgggggaagcattcggaatgttcttgacgttggttgtggggtagctagcttcggagcctatcttctttcacatgacatcatagccatgtctcttgcccctaatgatgtccaccagaaccagatccagtttgctctagaacgagggattccatcaacacttggtgttcttgggacaaagcggcttccatacccaagcagatcatttgaacttgctcactgctctagatgtcggatagattggcttcaaagagatgggatcttgttactggaacttgataggttgctcagacctggtggctactttgtatactcgtcgcctgaagcttatgcacacgacccagagaacagaaagattgggaatgcaatgcatgttctct

SEQ ID NO: 140251 - DNA, 1090 bp, Arabidopsis thaliana landsberg
atgaaggaacttggagttcatcctaatctgtttgtttttaactctctaatcaaaggctttcttaacatcaacgacatggatggagttggtgaggtgcgctttatagtttataaactttcaataatttttcactcactttcgtttttttaattttaactatgggcaagttaatataataggtggtggatctgatggaagaatttggagtaaaacctgatgtggtaacgtttagcactctaatgaatgcatggagttctgtaggagatatgaaaagatgcgaagagatctatacagatatgttggaaggaggaatagatcctgatattcatgcatttagtatccttgccaaagggtatgctcgagctggggagcccgaaaaagcggagcaaatcttgaatcagatgagaaaatttggtgttcgcccaaatgtagtgatctacacacagatcataagcggttggtgcagtgctggtgaaatgaagaaagcgatgcaggtatataagaaaatgtgtggaatcgttggtttatcgcctaacttgactacttacgagactcttatatggggatttggggaagcgaagcagccatggaaagcagaagagcttctgaaagacatggaagggaagaatgttgttcccacaaggaaaactatgcaactaatagctgatggatggaaatctattggtgtctctaatagtaatgatgacaatacattgggctcttccttctcaacttcctctaaactcaatatcccaaataatatcgcctcgtcgagaagtccattgttcttaaaaggaatgcctgaaaaaccaaagctatgtatcaagtctcagtttggtttgaggcagactcttttggtggtgttgtgcagagaccagattggggaagccgggagattttgtaagttcatgtagaatttgttttgctgtagagatggagctaaattaaagggtaagaaaagctgatcaaagattgttgtcgatcgatttttaagatttatttttctgtacagatatactttttcagttaaatgaaaaatatggtgtttaacaagcaagacaatgagatggataatgttagattgtgtttt

SEQ ID NO: 140252 - DNA, 1230 bp, Arabidopsis thaliana landsberg; identical to SEQ ID NO: 4295

SEQ ID NO: 140253 - DNA, 536 bp, Arabidopsis thaliana landsberg
  unsure (1)..(536): unsure at all n locations
atgtgggttcgactctttgatttccacaccggaaaggagattggtgagtgactaanaactacaagcagattaactaagctgttctagttaagtcacataaagcctttggttttgatgggtttctttttgtctgaactttaggatgcaacaagggacatcatggtccggttcactgtgtgagatttgcaccaacaggtgagtcttatgcttcagggtctgaagatggtacaatcagaatttggcaaactggaccggtgaatcctgaagagatcagcgagtcaaagccgaagcagagtgtggatgaggttgctcgtaagattgaaggctttcacattaacaaggaaggaaaaaccgcagagaaaccatctgatgcttaaaccaagaaaagaaccaagaaaaatggctgcttctctttgtcttcttactgtgtttttacttccagactgaatatacggaaattcaaaacaagtgtttgaaaaacagtcgttgtcaatcttcattcgagtcaagtttatggatgtggctgaaaatttacg

SEQ ID NO: 140254 - DNA, 548 bp, Arabidopsis thaliana landsberg
tccttatcatgagaagcatggcttgtggccatgtatggtagcaccaacacagattatagctggacttggtatgtcgctcggtattgacattttagaagctccgggagctactggagattaccggacgcttctgacatcgaaagcaactgctatagctaatgctctctcagctcctttgaatccctgccctaatgtctttgtaccgggagaggacgggcataaaccaggaaggtcagatggttatgatttcgggttccttcacataaaggtgaaaacttttttcagtcttttaacacaaaatttaaaaatttccactctgattttcgatcatatttctatattgttgcaggctatagatgatgcaggtcatgataaggcgacaatgttcaaagttcgaggtttagaagctgttgataaggcgatacgtcagcttgctaagcttttatggcaagctgagtcttctacacattaccagtatttcttgtgtgtgaccggtgatcattcaactcctgttgagtatggagacctctagctttgagcctgtccca

SEQ ID NO: 140255 - DNA, 747 bp, Arabidopsis thaliana landsberg
ctccaattctacaccaaaacatttgttcaagtgtgattctcattgacgaggatttcgatgcaaggattatagattcagggcttgcaaggcttatggttccctcagataacaatgagagtagtttcatgactggtgacttaggagagtttggttatgtagctcctgaatattctaccacaatgctagcatcattaaaaggtgatgtatatggactcggtgttgtcctcttggagttggctacagggctaaaagctgtaggaggtgaaggttttaaagggagtttggtggattgggtgaaacagcttgaaagctcaggtagaatcgctgagacattcgatgaaaacattcgagggaaaggacatgacgaagagatctcgaaatttgttgagattgctcttaactgtgtgagttcaagacctaaagagagatggtcaatgtttcaggcataccagtcactgaaagctattgctgagaaacaaggctattcgttctccgaacaagacgacgacttccctttgattttcgacacgcaagagaacgagaaagtgtgaaaatgaaccttttatgatacgaggaggaagtaagagtataattatttgttgtctatatcatcttgtactacttgtagagacactatatgttattgtaaaaacagaaatgtatatgttatttgttttctcttgtgtcaaagtctttagacatgttatgtgttgcaagtgtgtctttctatagtattggaagagtgac

SEQ ID NO: 140256 - DNA, 1325 bp, Arabidopsis thaliana landsberg
gcctgcaatgcctgttaaatgatttggttcgacgaatttattttgagcagtcgatcgtgctccggtctcgacgtaagtgaagctggaagatttatgtagaggtatttcttaacttgagtaaggtctgtaactaattaatactttacttttggttttgcgacagcatacagagagaagctaaagcataaagcaggtctctagagcatagtttttggtttttctttcttctttgttttctctgtatgctgtcgcaaacttgaaaattgtataaatctttcaccttttaccaaaaaaaaaaaaaaagatagattacacttgtgattttggtggagacaaaaatgtccatcttgttttcagatgcttttgtataaggcactagacttcatcactagtatactctgtaactaatcttgcatgtcttccacttgttgttttgttgtgtcttttggtaactctacgcggctcatttcttcttaggagaatatgacctgtctctgtcaatgtttttgtgatgaattgcattttgcaaactgtgtagactttcaatgttgtggggcttttttgtttatcaggctttggccttgtatggttactatatatttcaataaattatctctattgtgaaagaaattcaaaaacttttgatcaaagagaatggggaaagagtgctactacttgtcgtggatactcaagtttcatcttctacttgttttgattcagcttgttgattcaggatctaccatcagatttcttcctggtttccaaggccctcttcctttcgagctcgagaccgggtaggttcctcttcttattatcctgataatgtatgactatatatatgtgtgttagagttttggtgttgaatgagtaaggtacattggtgtgggtgaggcagaggaagatcaaatgttctactacttcatcaaatctgagagtaatccagagaaagaccctcttcttctctggttaagtggaggtcctttctgttcttcgttcactgctcttatttatgagaatggtaaaatccaaaaacttttcattctttctttatcacttgatcagaattagtgacttgtttgaattgccaacaactaccaaaaacaaaaacgcagggccaattgctttcaaggctgaggaatacaatggaagtatcccctctttggtctctaccacatatgcatggactaaggtaatatacgatattttagtagtgtactcatgaacacaaacccaatgaatcttcatcttcttaaagtattggatcatcattgcttcgtgtcaggtggcgagcattctctatttggatcagcctgttgggactggct

SEQ ID NO: 140257 - DNA, 1207 bp, Arabidopsis thaliana landsberg
caccaacgatcgagtccttatgatatttttctcggccattaaattcttcttcttctgcactgtttgtttataaatataaacctggaagctcagttccatggtaagctgtcttcttctatctggttcctttctctgtctgaatttcttttttccaataataaattttacaaatgctgttttcttgattggcttttttaatcctcactgagatttgtgcttgaatcttgattatcgcggtgagagtttttgttttagacaatgtatatatgtgtttgagaatacaagcttcttctttattttaatccaacattaatcagattgtatgaatttgaataagtctattaaattacaagacattgttttcgttttctgttgataaagtactttgctatcgattcttattttgatgtgtctttgatcattacctgcaggtgaagtatgttgtgttcaaccatatgagctctgatggtgattctggtaacaggaaattcatgaactttgtgattcattgcatcaagaatagaagactagaaggtgtataaaatggaaaaaaagagtgtaccaaattctgataagttgtctctgattagagtgttaagaggtataatatgtctgatggtgttagtttcaacagcttttatgatgttgatattctgggggttcttatcagctgtagtgttgaggcttttcagcattcgctatagccgtaaatgtgtttccttcttctttggctcgtggctcgccttgtggcctttcctctttgagaagattaacaaaaccaaagttatcttctctggtgataaggttccttgcgaggatcgagtattgctcattgcaaaccaccgaacagaagttgattggatgtacttctgggatcttgcactgcgtaaaggccagattgggaatatcaaatatgtgcttaagagtagtttgatgaaattacctctctttggttgggcgtttcacctctttgagtttattcctgttgagaggagatgggaagtcgatgaagcaaacttgagacagatagtttcgagttttaaggatccccgagacgctttatggcttgctcttttccccgagggcacagattacacgtacgtttcctttctttggagtatcattcttgtttagagaccttttagttaaaagcattttacaatggaactttatgcagagaggctaaatgccaaaggagtaagaaatt

SEQ ID NO: 140258 - DNA, 1806 bp, Arabidopsis thaliana landsberg
gagaaaacaaaagtggacgaagagcttgctaagctcgagaggtatcagacagcattgacccatctctctgaagaactggaaaaattgaagcacgcggatggcaatctccctgaggtatcaagttttatatcatttggatgtaaatgtgtgttttctataattttatgattattttaccggtatgttctaaactctaatgtttttcgtagggtacttcagctgtccaggttctatctggaagcatactgaatgaccaagccgctgcttacgtgtcagctgtagagtactttgaacgtgtggctcgttctattgccagcaattctcaagtcagcactaagcctactgatatggtgactgaaccttcctctggcattcctgctggtaatctaaaaagcaaacccaaaaacctaccaaattgtgatttttttttttaccccagtctaaagtgacaaattaatctttggcgcagctgagccttcaaccatgacgagagtcccttcttcaacacctttaataaaatctccggtggcaactacccagcagctacccaaagtagcgtcagacaacaaagagaagagattgatttcacagaaaccaagcactgagttccgtagaccaagtggtaggaggattgttcgtccccaacttgtcaaacctgaggaatctcccaaagttgatgttgatatgccagaagctgagggaactggtgatgaaggaaaacagcctgcagcccatgaaccagagagccaagtgactacatctgtacggcctgttcaaacacttgtccgtaaacgccaggctgattcgttggtttctgagccacaacaagatagtctgactcaaggggaaaccagttctgagattgcacctcctgcatcgaagaaggcaaaaggatctgagtctcatcctgatacttccgaaggtgaaaaccttgcaaaagagccagccatagacgaattgatggatgctacaactacaactgatggtgacaatgaagaaacagaagccgagaatgcagaggagaaaacagaggaatatgtggaagcacaacaagacaatgaagctgatgaaccagtggaagaaagtccaactgagacagaaaccattcctaccgaagaagagtctagggatcagaccgaagaagaaaaccaagagcctcttacagatatggaatccgataaggaagaaggagagctcgatctagatacacttgaagatctggaagagggtacagatgtagcaagcatgatgaggagcccagagaaagaagaagtgcaacctgagacgctagctacacccacacagtcaccttctaggatggagacagcaatggaggaagctgaaacaaccattgagacgccggttgaagatgataagaccgacgaaggaggtgatgcagctgaagaagccgctgatatacctaacaatgctaatgatcaacaagaagcaccagaaactgacatcaagccagagacctcagcagctacaacctcccctgtttctaccgctccaacaacttcctctactctagcttctgctattacttcaagcggagctccagaaacagaagatccaaaaagagcaccgtcaccaggtggtggaagttcaactattgtgacactagctgatagagcacagatgaaaagacgagaaagaatagccaatatagtagtaagtcgagctcctaatccagccaccagaggagctcgtggtcgaactgtaaaccttcgaggaggaggccgattgttgcctcgtggtggtcgagccccacgtggtggacgtggacaatccccgagcccaccatga

SEQ ID NO: 140259 - DNA, 544 bp, Arabidopsis thaliana landsberg
ggactcgaaaatggtgacagacaagagcaagaaggcgaaaaccgaagaagaaaacgtcgagcaaatcgatgcagagcttgtcctctcaatcgaaaagcttcaagagatccaagacgacctcgagaaggtaaattccaaatttttttaacaatccccatgtttaaattttctcgtgaattttcctttagtcgatgttcatttattgctttgatcaatgagaattgttctgtgttggactctctctcgattcagatttctagtggacaaattataaagaaaagtcagtatctttattagtaattatgttgttgttgtgtctttcgagtgaaatgtggtcgctttcaaattgactttgtgtgaggattgaattgttttgttgagtccaatctctcagtgacctctctggttttggttttgatagataaatgaaaaggctagtgatgaagtgttggaagtggagcataaatataatgtgataaggaaacctgtttatgacaagcgtaacgagatcatcaaaaccatccctgatttctggttaactgct

SEQ ID NO: 140260 - DNA, 742 bp, Arabidopsis thaliana landsberg
ctctatcacagccgcccaatcctccatccaaaaatggcttatttccggcgagcagccaccgcattggttctcattttccagctccacctctttctctccctctcaaatgcacataacataacccgaatcttggccaaagaccctgatttctccactttcaaccactatctctcagcgactcatctcgccgacgagatcaaccgccggcaaacaatcaccgtcttggccgtcgataactcagcaatgtcctccatcctctctaacggatactcactctaccaaatccgcaacattctctctctccacgtcctggtcgattacttcggcaccaagaaacttcaccagatcaccgacggctccacctccactgcctccatgtttcaatccaccggatccgccaccggaacttctggatacatcaacatctacgatataaaaggcggtaaagtcgcttttggtgtccaagacgacgatagcaagctcacagctcactacgtcaaatccgtctttgaaaagccttacaacatctctgttcttcacatcagccaagtcttaacctcgccggaagcagaagctcccacggcgagtcccagcgacctcatcctcaccacaatcctcgaaaaacaagggtgcaaagctttctccgacatcttgaagtcaaccggcgccgacaaaacgttccaagataccgtagacggaggcttaacggtgttctgtccctccgacagcgctgtcggtaagt

SEQ ID NO: 140261 - DNA, 631 bp, Arabidopsis thaliana landsberg
ctttctctccacccttctctctctccttctgaaagtctctcgctttgccgtcgttagcctcttcctatacttggggctgcgattcttccaatcctccgatttcaatttcatcctctcaatcatagtttgaaatcatcgagcttttacggtgctgttggtgtttgacgccgtaaaattcgatccttttttatacatttgatgttgattttatcgatagttttgtgagatcgattttttagggtttcgagtttggcgctgacttgagggtttgattggatgagaataaggggttatgggacttgagtcaattgggtttgtctccctaatcatcgcaaattcctgatttctcagctctttggaaggaattaggattcgttgatttcgagttttgtgttgtgttggttgatgagagagttgggtttggtcaattgaggggtttaggtgttgttttactgttttgattctgatcatggatgacattgattcaagcgatggtgctgcggctgcacgagctggtgagattggctctattggggtatccacaccgtggaagccaattcagctggtttttaagcgttatttgccacaaaatgggtctgctagcaaagttcatgttgccgtgaagaagccg

SEQ ID NO: 140262 - DNA, 1274 bp, Arabidopsis thaliana landsberg
tcagccaaattctgcttttgaaagaacgcaccaagtccacctaaacctcagaccgaggattccgatgagaacgacgacgagattctggacaagagcggcggcgaaagagatgataattcgaaagggaaagaaaggaaaggtaaatctgaatcggaatctgaatctgatggtttgagatctaggaagaggaagagtaagagctcgaggtctaagcgcaggagaaagagatcttatgacagcgatagtgaatccgaagggagtgagagtgattcggaagaggaagataggagacgaaggaggaagagttcttctaagaggaagaagagcagaagcagccgtagttataggaaaaagcgaagtcataggagaaagacgagatacagtgactctgatgagagcagcgatgaagatagtaaagctgagattagtgcttcttcgtctggggaggaagaagataccaagtcaaagagcaaaaggcggaagaaatcttcggattctagttcaaaacgaagcaagggagagaaaacgaactcagggagtgacagcgatggtactgaggaagattcgaagatgcaagtagacgaaacggtgaagaacactgagcttgaacttgatgaagaagagttgaagaagttcaaagagatgattgaattaaagaagaaatcttcagctgttgatgaagaggaagaagaaggtgatgttggtccaatgccattacctaaagctgaaggtcacatcagttatggtggtgctttaagacccggtgaaggagacgccatagcacagtatgttcagcaaggtaaacgtatcccacgtagaggagaagtgggtcttaacgctgaagagattcagaagtttgaggatcttggttatgtgatgagtggaagtaggcatcaaaggatgaatgctattcgtattagaaaagaaaaccaggtttacagtgctgaagacaaacgggcattggccatgtttaactacgaggagaaggcgaagcgcgaggctaaggttatgtctgatctgcagcggcttgtgcagcgccatatgggagaagaggtggggccaaatcatgaccctttcggtgctggaaagactgaagaagatgatgattgattttgcttggcttcctgcatctgttatgtgggtactcatcttatgctttatcttgttgaatgttccttatttgcatcatagatactgctgtttgctacttgcccgttaatgagcttcgtagtttatgctttaatctgctatgtatccgttaatgagcttcatag

SEQ ID NO: 140263 - DNA, 1223 bp, Arabidopsis thaliana landsberg
aggtggtgatagtgatcggaagctctgcgagtggagttgatatatgcagagatatagcgcaggtcgcgaaagaagtccacgtatcatctagatcaacttcaccggatacttacgagaagcttaccggttacgagaatctatggcttcactcaacggtacactaactaaccggccaatgaatgatgttggttgtttgataattcagttactccatctataagacggttgaatgtaggttacaacgttcattgtagattcaaattgcccgcgaagacggttcggtggttttcgagaatggaaagacaatttacgcggataccatcatgcattgtaccgggtaagatacatatcggctcaaatctctaaaagagattaaacatcagaacacagaacataggaaatttgaaaacgttttcactgacttgtttttatcttgttaatatcttcatcaggtacaagtattacttcccgtttcttgacacgaaaggtgaggtgactgttgacgataatcgtgttggaccgttgtataagcatgtttttcctccagctcttgcccccagcctttcgttcatcggcttaccatggcaggttaataatctttataatgtttatgatctggcttctgtgaatacatttgctgcttttattgcatatgatctcattgtttggttgaggtgcacacaaaaaaaaaaaaaaaaaaagatctcattggtttaacttggtttcttagatcactccctttccgatgtttgagcttcaaagcaagtgggtcgcagcggtcttgtccggccgagtatctctcccatcgcaagacgagatgatggaagacactaaggcattctacgataagttagaagcctcgggaattcccaaaagatatacacatttgatgccagatgactctcaggtacacatatttcgtagcacaacattacattacaaaacatgttatcataaaaaaaaaaaggttgagactaaacaaatttttggttgaattgttgttgcagtttgaatacgacaattggcttgcggatcaatgtgaatatccccggatagagaaatggagagaacaaatgttttacatcggtttcaagagaatatatgcacaatcctctacatatagagataattgggacgatgatcatctcatcgtagaagcatacgatgatttcgtcaaattcatgtcaagctatcaagaacttttgccgatgctcaaaacctaa

SEQ ID NO: 140264 - DNA, 195 bp, Arabidopsis thaliana landsberg
ctttcctttctttttggctgtctccggcgagaagagattttccgggggaaaatagcaaaagctcggttttagtttctgtttagaaagaggatacagaatagtgattactaacatcttctccgatggcggttgcgccggcaagagctcgttcagactatgattatctcatcaagcttctcctcatcggtgatagcg

SEQ ID NO: 140265 - DNA, 1651 bp, Arabidopsis thaliana landsberg
tgaaactccagggttactgtttacaagcataaggatgattctaagaagaggattcaggttgttgtaagtcctccaggcgcaagagttgagttcgtcggaactaattacacaggcgagcaagctgctatgcagacgaatacttatagagttggtgtttttaatagagaggctaaaactttgaggattcttcctgttgctcacaataaggtttaaattctgttaccttgttttgattttggtgattaattggtttgaattagttggaatgttttgagtgtatggttgtgaatagaaaagaaatgatttttgagagtttgagtttggttttgtgttacttgtagataatcagattggagcctagagttaaagctcaagaaacaaatgaggaagaagcttcaggaagtgctgtcgtcaaagaacttgaagaactaaaaacaggagaacgcgatcgttataatacaaaaaaagctgttactcgggtatgttactacagcatctgaaaacaccaattctactgtttcctacagtatctgtcttattggtatccagactagtagagaactgattgtcgtgagattcgttgggaggattatatgtctgagtgagaatgtgtgtctctatgcaggataagaagaagcgtgccttatatatgggagatgatgctgcgactcagaaggtccttgatgggaaactaagtgagttaggtgttaacacagctgctcttgaaggcaccagttctactgttgcacgcaacattcctccttacaataccgctgcaacgactgcaaatgaagcttatcccttagaaaagatcattgaaaagggggattggagttttcttgaagatatttactggcttctgcaacaggaaactgaagcagcaactgaggcttaccctgtatttgtccgcaacagattgtacagattgcgagatatcaaggtaaaattatgactattttcttggatgcaaaatattttatgttagcttgcaccactttcgcggtttgctctgattaaatggattctgaacttctcatggttttatctactgctcagaagattctttatgtatgtatgtcattttgttacatatgcaggacgatatgaaaaagcagacggtttgtggtgctgcaacgcttctcacccatctggttaagttcaaggacagaaactcaatgaatggttacgattccgctaaagaccacaagatgccagacatcttccgtcaaaaattcaacagcatgttcaaggattctgaatcagataggatacctgttgacaagatcaaccttctgataagctacgttcttgtgctatcccttcacgtggataatttcatgaccgatccagaagacatagcaaaagatctgaggataagcacagttgatctgaggaaacattttctacagcttggctgcaaattcctgaagcagaattctactacggttgctaccttaccgacccctctcaatttcccggaggttaaccggaggcgcagggcacgaaagtgatgacgatctaggagaagattttgctctatctttacatattttctgctattttaatgatatttctttgacggtctgttgagatattataaattgttttacttcctaagacatctgtgtcttgggtttaatgatatatgatg

SEQ ID NO: 140266 - DNA, 737 bp, Arabidopsis thaliana landsberg; identical to SEQ ID NO: 48892

SEQ ID NO: 140267 - DNA, 813 bp, Arabidopsis thaliana landsberg
tctaccaaaacttctctctttctctttttttctatatctctagagcgcgttactgcgcgtcgtgagtatgtttttattgacgccattgaaattgggttaaatcggtttgaatcggattgaacaaaaactgtattaataataattcttcctctacttttctctctgattgattccaatcttctttcattttcttcttcttcttcttcttctggggaaggggcaggttaaaattatgccatctattcaaatcgtgcctatcctcagatcttaactcttttctctacgagattcggcatctgggttttattcttcttggtgggtttttttttattcttcttcttctgatctcagatttcccctgattggtttttttttttgctaaatccgttttatgttttcccgatcaaactctcctggcagattctcggatctgttgttttctagattcaatctgaatttgattttacgtttttgtctttgtaaagaatgtttccttttgatcagattttgataatccattgacatctctgattcaagcaaaagctaattaactttgatccgattcctttgtgtgtgtgtgcagagcaaaatgcaatcggataatggaaagcttttcatcggtgggatatcttgggacaccaatgaggaacgtctcaaggagtatttcagcagttttggagaagtgatcgaagctgtcatcttgaaagatcgtaccactggtcgtgctcgtggtttcggttttgttgtttttgctgatcctgctgttgctgagattgttatcaccgaaaaacataatattgatggcagattggt

SEQ ID NO: 140268 - DNA, 2131 bp, Arabidopsis thaliana landsberg
tcttttccttcacttgctccctcatagttcgaacccgtgcataccttttaatttctgttgaatttctcattgtctttggtatggtcctaatctcaatacgtctctgtttctcatccatctctccagggatctgaaatttcttcctctgcatgtgctctcgtggtttcttccttgataattccttgctcattccctgcatgtgactcccgatcatcgtcttcctcttccaagttacgaatcaaaatcatagccgagattcagatttcatagacaatggcgactaaggcggcttcgtcttccagcctccccaaatctggagccatttccaaaggctacaatttcgcttcgacttgggaacaggtaatcacacaatctgatgatccaggaagatccattgatcagtctagtgtctggatctgaatgatgctctgtttgttgagaatatactgaattgaaattcccgttgcagagcgctcctttgacagagcagcaacaagcagctattgtttctttatcccacgcagtcgctgagcggccatttcctgccaatcttgtgagtctaatgttattagttttggatttagttcagaatgttttcccttttttgtggtttgatgtcagtgttagttcatggttttaggtacatgagcatgttcacaggcctgagaatggcttgtctgtctccgtggaggacacacatttgggagattctggagcaattgaagctgttttggttaatacaaatcaggtagtctcttgtactgctacttgatattccaatgcttagctgatttgcagtattataggagttgcttttgtatttgtgggcatctcttttttcttgcatctttatatgtgtactaatgcgacttcattttgacgtatgttggttttattacagttctacaaatggtttactgatcttgaatcagcgatgaagtctgaggttagtccgttagtgaaagtcatgttgtaccttggttaaaagttgggaaagattacttgaaatgtgtctaaaatgattttctctttttctgagttagacagaggaaaagtatcggcactatgttagtactttaactgagcgcatccagacgtgtgataatatacttcaccaggcaggttttcaacaagttttatgaattgctgtggtcttatcttgccaataaattataacacgtctgcttcattattgaacttgggatttctcctgcgcaggttgatgaaacacttgacctatttaacgaactgcagctacaacatcaaggagtaacaacaaagactaaaactcttcatgacgcatgtgaccgactggtaccgtttcctcttgtcttttatgcagcaagattatttattgtttctcttaatctcttgcatgttttcccgtcctacctgctatacataatcaaaatgacaaacaaaagttgcttaatgcatcatggctgttcaagagtttctgactcacactatttgactgttgttgtttgcttggctgagctaattttcactttcttccactttttctagttaatggagaagcagaaattgatggaatttgcagaagctctaaggagtaagctcaactattttgatgaactggagaatgtaagatttacattctggcctaccgacataatttttggcacatattaaagtatcagcatgtagttgcttcggatggtgctcttgttttattcattaacgtaatatatttgaattttggcctacttgtggtactttagctcatagttctttactgaagactggttgtagatttacgaggaaataactcaacaaggtgttaaactgctctaatatcttcttctttctttttttcgcaggtatcctctaatttttattcaccaaatatgaatgtatcaaactcaaactttctcccactactgaaacggctggatgagtgcatatcgtgagtaaattgattttacattcaatattatgaaatttacatccactacttggcaattttccataagaatgccgcactaattctttcatttcccttgaattgattgtaatatgtctcttttaccttgaattctgtaggtacatcgaagataatcctcaatatgcggagtcgaaagtttatttgctcaaatttcgtcaactccag

SEQ ID NO: 140269 - DNA, 1076 bp, Arabidopsis thaliana landsberg
tgcttaaaagcaatcctaaaaagaggctaactgctcatcaagtgttgtgtaagttgtcatgtctgcgaaagttgatgagtttttttttcttgtaagctgattcatatgttcttgtgtcaggtcatccgtggattgtggatgataaggttgctccagataaacctttggactgcgcggtagtgtcccgcctgaagaagttctctgcaatgaacaaacttaagaagatggctttacgagttattgcagagagactatctgaggaagaaatcggtggtctcaaagaactgttcaaaatgatagacacagataaaagtgggactatcacgtttgaagagttaaaagatagtatgagacgtgttgggtcagagcttatggaatcagagatccaagaactcttgcgtgcggtaaactagctactactcctttattatcaactttcacttttaacatctttgttgtggctggaagtaatatcatcttctcattgtgtgtgtgtgtgttaggctgatgttgatgagagtggaacaattgactatggagagttcttagctgcaacaatccacttgaacaagctggagagagaggagaatctagtagctgcattctctttctttgataaggatgcaagtggttacatcactatcgaagagcttcaacaggcatggaaggagtttggtataaacgattctaatcttgatgaaatgatcaaagacattgatcaagataatgtgagtagtacacaaatgatctttactgtttgtttgatgaagagcttggaagaaatgtttatggtggttgctttttttttgtaggatggacaaatagactatggagaatttgtggcaatgatgaggaaaggaaatggcactggaggagggattggtcggagaactatgaggaactctctcaactttggaactactcttcctgatgagtctatgaatgtctgaagtactcatttttagtgaaaataatttagcgcctttatggagcaaaacatgtcatatgatacaacttgctgtttctgcttactctagttctgcttttaacaactcttggtaattgcaagtaaaagc

SEQ ID NO: 140270 - DNA, 1401 bp, Arabidopsis thaliana landsberg
attcgatttctgtgaaaagtgttgttgtttttttcgcatttcagggggaaaggttgtgtcttttgatgataatttgacgaaccctaatgtatctgaaagctgttaaattgaataggagaagaagtagctttatggatgttgttgtttatatttactcctattgatggatgtgaatctttttggtcatgatgactcttgtagcaatggagcagaacttgatgattacacacagtttggtgtaaatttgcagactgatcaagaggatacctttccagattttgtgtcatatggtgtgaatttgcagcaggagccagatgaagtctttagtattggagcttctcaattggatttgtcctcgtataatggagttttgtcgctagagccagaacaggtggggcaacaagattgtgaagttgtgcaggaagaagaagtagagatcaattctggttcatctggtggagctgttaaggaagaacaggaacatttagatgacgattgctccagaaagcggtgagttttgaaaaaatataaactttttgtgatttggtggtagttggttgtgtttttaattgaatctgtgatggttgttgatagggcaaggactggatcgtgtagcagaggaggaggaactaaagcgtgtcgtgaaaggttgaggagggagaagctaaatgagaggtatgtttagagcttagtctatgtttttgttttgtgaagtgagttgtctcaaggggaaaaaaattgttgttgttctgttaggtttatggatttgagctcggttttggagcctgggaggactcctaagactgataaaccggctatactcgatgatgcaatccgtatattgaatcaacttagagatgaagctcttaagcttgaagaaactaaccagaagcttttagaggagatcaagagtctcaaggttggttgttcattcactttcacctaaaccaagaatcttgttcaatgggatgtgaacagatttctaagtttgtatgtttctttataggcggagaagaacgagctgagggaggaaaagctggtgttgaaggcggataaagagaagacagaacaacagttaaagtctatgacggctccatcttcagggttcatacctcatattccagctgcatttaaccacaacaaaatggctgtttatccaagttacggttacatgccaatgtggcattatatgcctcaatccgttcgtgacacatctcgtgatcaagaactcaggcctcctgctgcttaaactctcaattgtttttttttggtacccatagggaactcatagagatttctgaatcacttggtttaggattcttccgtttggcaagtgtaaaagctttactcttgatcttgggttgtatttttcttataaaataaatataactccagaaactt

SEQ ID NO: 140271 - DNA, 523 bp, Arabidopsis thaliana landsberg; identical to SEQ ID NO: 39794

SEQ ID NO: 140272 - DNA, 227 bp, Arabidopsis thaliana landsberg
aaatagagagagagagtgacagaggagtgtgtgaacatccttttttagaagatttgggttttcgagatgccgtattgaatcggctacgaatttcccaattttgaattttgtgaatctctctctttctctgtgtgtcggtggctgcgatggaggccagtgccggcttggttgctggatcctaccggagaaacgagctcgttcggatccgacatgaatctgatggcggg

SEQ ID NO: 140273 - DNA, 1456 bp, Arabidopsis thaliana landsberg
tgctactcgagatttcgggtgtcttgcattttagtttctgtttgcttagcacaagatattccaaatcacacattaccattaggctttgctatagatatccatgtgaatcattgaacctgatgaatttgttatccacaggtaccagagacgcttcacgaagaggcactctctaagatgagcgcaccaccaaagagtgaatccccaatcataaccccgaatgagctagctgaagctgatgggtttgtctttggtttcccaacaagatttggtatgatggctgctcagttcaaagcctttttggatgcaaccggtggactctggagggctcaggcactcgccggtaaaccagctggtatcttctacagcactggctctcaaggtggtggccaagaaaccacagcgtaagttctcatcaggaacaaacacttcacatcatctcttgccactatatttacttattgaaaacattttgtgttaatctatagattgacggcaataactcagctggttcaccacgggatgttatttgtcccaatcggttacacatttggcgcgggaatgttcgaaatggagaatgtgaaaggtggaagcccatatggagctggaacatttgcaggagacggttcaaggcagccaacagagctggagctacagcaagcatttcaccaaggccagtacattgccagcatcaccaagaagctcaagggatctactgcttagagcttaaaaagattatggtatcaataagaaaaaaagaaaaaaacagtttggttctgctttttttatattctttctctttgaatttgggggcttttgtgatttttcgggtttaattatcttaaaatacatgatattatttcacagcaataattcttatcttggttttacgtatagatgataatgtatgatttgtacttgtgtagcgctccaggcagaagggggcgtggacaataaaaaagttggtattcagaaaaattggacactcccacctagcggctggacaaaatgcaactatgatggtacctttcaacaagagacttgccaagtaaagctgcttggattatcagaaaatgacagaggaacgttcttaggagcagcgaccaagcggtggggataacaacaacaaactctcttgagaagcgagttacaagctctggtcttggcaatgcaaaattgttggagtaaaggccataagaaggtttattttgaaggaggtaacaaagaggtagccgatacaatcaatgacaggaatccaaactttgcggtttttaattggctaagagaggttgtggcttggaaaacaagatttgaggattgtcgcttcacatgggttcgacgaaattccaacatggcagcagacacattagctaaacatgcactaccttcacataattcttatcatttttctagttttactccacatgtaattacagacatactccatcgagactttgtc

SEQ ID NO: 140274 - DNA, 2184 bp, Arabidopsis thaliana landsberg
ctaaagaagaaaccaaaaacctaaaagaacagacagaggaagaaaagatctttaatattttttttatttctcttcctggttgagaacttttacttcctctccccttaattgcaacaatgggaaattgttgctctcatggaagagattcagataataacaaagaagaaccgaggccggaaaatggaggcggcggtgttggtgccgctgaagcctctgttagagcttctaaacacccgccagcatctcctcctcctgcaaccaaacaaggccctataggacctgtcttaggtcgacccatggaagatgtaaagagctcatatacattgggtaaggagctaggtcgtggacagtttggggtgactcatctctgcacgcaaaaggccacggggctgcaattcgcttgcaagaccattgctaaaaggaagctcgtgaacaaagaagacattgaggatgtgagaagggaggtgcagattatgcatcacttgaccggtcagccaaacattgtggagcttaaaggagcgtatgaggataagcattctgtgcatttagttatggagctttgcgcgggaggtgagttgttcgacaggattatcgcaaaggggcattactcggagagagccgcggcttcgttgctacggacgattgtgcagattatccatacttgccattccatgggggttatccacagggacttgaagcctgagaactttttgttgcttagcaaggatgagaattctcctctgaaagccaccgacttcgggttatccgtgttctacaagccaggagaggtgttcaaagacattgtgggaagtgcttattacattgcaccagaggtgttgaggaggaagtatggaccagaggctgatatttggagcattggtgtcatgttgtatatcctcctgtgtggtgttccacctttctgggctggtaatgatttctgtttccctcactacctgtcaaaacaaagaacagggctctactgattcattaattcatatttattttttcgattacagagtcagagaatgggattttcaatgccatcctaagtggacaggttgatttttcaagcgatccatggccagtcatctcaccacaggcaaaagacctcgttaggaagatgctcaactctgatcccaaacaaagattaaccgctgctcaagttctcagtaagcagctcttatcttaaaagctcctatatatatttcattgaactcttcttgacatttttgttgttttaaagatcatccatggatcaaggaggatggagaagcaccggatgttcctcttgacaatgcagtgatgtctaggctcaagcagttcaaagcaatgaacaactttaagaaagttgctttacgggtaattaacattcttctcaaaaccatatatgtattgtaataaacaatgcgagtcttttggtctatatatctcattggcatcatcaacaaacaggtgatagccgggtgcttatcagaggaagaaatcatggggttaaaagagatgttcaaaggaatggacactgacaacagtggaaccataactcttgaggaactaagacagggacttgctaagcaaggtacaaggttatccgaatacgaagtccagcaactaatggaagctgtaagtactctgttctttcttttgtgtgctatttatccattaagaaagatgtagagacctgatcttttctgtgtttgtataggctgatgcggacggtaatggaacaatagactatggggagttcattgcagctacaatgcacatcaacaggctcgacagagaagagcatctctactcagccttccaacactttgacaaagacaacagtgggtaagtaattgagcacatgtgtaacagttctgatacaatttgaaaccaaaaccaaatgatgctctgttccttgcagatatatcacaatggaagagctagagcaagcccttcgggagtttggcatgaacgatggcagagacattaaggaaatcatttctgaggttgatggagacaatgtaagcctctttcactatcacaaattaaattgatatgaacatataacaacaatctaataatacaaaacattttttcttataggatgggcggataaactacgaggaatttgtggcgatgatgagaaaaggaaacccagatcctaatcctaagaagcggcgtgaactatcattcaaatga

SEQ ID NO: 140275 - DNA, 520 bp, Arabidopsis thaliana landsberg
aagttgcagcacaacttgctgagggaaacgttcccattggaataggagagaacacaaaaattcagtaagactaactatcaacttcacatggtttaccttagaaacagttctcatttgtgaagtttcctcattccttccttcatttcttcctaccttcttcttttccctacagagaatgcataatagacaagaatgctagagttggaaagaatgtaatcatcgcaaactcggaggtaaaaaatttcttttgtttaagaaaaaaaaatggacccatcagacatacaattcttcttttgcttatctcatttccactaatgtgatgatttgcagggaatacaagaagcagataggtcatccgatggattttacatcagatctggcattacagtaatcttgaagaactcagtaattaaagatggagttgtgatatgatacttttaagatctaattgtaagaactgagaactaaaaaatgcagagcataaaagtcaacaataaattacaaagaaatttatttgata

SEQ ID NO: 140276 - DNA, 1104 bp, Arabidopsis thaliana landsberg
gcggtggtgaaaatggctcgaaacgactcgcgatctaggtcgccgtctcaccgccgacggtactctcgctcgcctgtgactcatcgtagcagccgtcgtaccaggcgcgaccgcagccgctcaccctacacatcaaggtctgcaacaatcttccttgcttaatgtggagaaatcgaatctcgtatcttatggtgatgtgggggaattacgtttagatacttgggattagagaataggattagggcttagagaataggtttagggtttagcgattttgtcgagaacaaatttcaaatttgttacttcactttggatcgttgctgttttgcaaacgaatttctatggacattaatgttcgatgtccagctgctagtgaagaaggagctgctttagttcaacacattttcataagagtaggtttccaatttttgtaggcataagaagagcagatctcctgcaccaaggcaacaccaaagggatagaagtagttcattgtctccttccgagcatagaattgcgattgaagtgaagaaagaacaggaagacaaggcaaggtaattgattaaacattgtctttgtctttcagattgtattatactttattattttgtgtatgaagcaatatagttttccacattaggggaatgtattttgctagtgagcaagttgacatgcacgaaagggcaaaaatacatttcttgaattatcgcctttgtgattgttgatcaacctctttgtttccttatctaaattgaatactgtttggacatgaatagaagaataactgatcaatttgtgcgtttatatgatcttgaaaagtttttattggctagtgttatcagtcttatctcctttctaaatcttttttcccctactaaatgtagattgcagcatgaggcggagctcaagcgactagaagaagagactgcacagcggattgaggaagcagtaaggaaaaatgtagaggaaaggatgaaaaccaaagaagttaaagaagaaattgaaagacggacaaaggaagcttatgagaagatgtttcttgatgtggaaatacagctgaagaaagaaaaagaagctgctctaaacgaggcaagaagaaaagaa

SEQ ID NO: 140277 - DNA, 1862 bp, Arabidopsis thaliana landsberg
tggtccgtactagttgtccgaacccgaagaagccccaatcgctgcagcaactgtctaggagccgccacgctgcgaagaagctctagggtttgttcgtcttcttcctcggtttcatcaggttttcatcttctcgattctgatttcggcttctgttttagctttattcggcttattgtgatttaatttgagctgatttggcattattgctgtgtagttaggggtcagggttttaatctgatcgcgtctaggttatgattcttttgatgatttcgatctttagaaagtcaattgatttgtttcttcgtatgtagctcgtttagctgacagatctgcatagtgtcttatcagttactagatctttgtgctatctctcactctgatttctggattttgattccttttttttttgttagctgacatacaagtgtgagtgatgtgtgtctttgctttgtttccattttagtttagtttctcaaaatggaaatgatgaatattgggggttttcagaacctaagttgtagaaatggtctttttttgttatcacagaactcaaaaggtacttggtaggagcgagaagaaagtttctggagaattgctgaattgtttctttcaatggttttgtttctaaggtactatccgagtccaatgtttctgagagttctggtagcttgttaatttgttatactgaatactaggattgatttggcaaagcatgtgatgtttgttgcaagttcaagcagatgtgtttctttttataaatttagaagaagtttacttccgcagccatctatgattctcaaagttcttagctttgcgtttgattcttttttctagaaactattggttagctttggataatgagtccttttctgcccatgatgtatttttctcagatggtaatcaagattgttgacggtgctctgaagatctgttgacctgctcagagtttgcttaaaaagtttgagaaaaaatggacgatgataatgggctcgagctcagcttgggtctttcttgtggaggatcaacaggaaaagctaagggtaacaataataataatgctggaagctcctcagagaactacagggcagaaggaggcgatagaagtgctaaagtgattgatgactttaagaacttcctgcatccaacttctcaaagacctgcagagccgagttctggttctcagagaagtgattcgggtcaacagcctccacaaaatttcttcaatgacctctcaaaagctcctacaactgaggctgaagcttctacgaaacctttgtgggtggaggatgagtcacggaaagaagcagggaacaaaagaaagttcgggttcccggggatgaatgatgataagaaaaaagagaaggactcgtctcatgttgatatgcatgagaagaagacaaaagcatcccatgtttcaactgcgacagatgaaggatcaacagctgaaaacgaagatgtagcagagtctgaagtaggtggtggttcttcttccaaccacgcaaaggaggtggttcgtcctcctactgatacaaacattgtggacaacttaactggtcaaaggaggagcaaccatggtggatctggcactgaagagtttacaatgcgcaacatgagttacaccgtacctttcacagttcatccgcaaaatgtcgtcactagtatgccttactctttaccgacaaaagagtctggacaacacgcagcagctacaagtctattgcagcttaatgctaatgctggaaatctcccgattatgttcggatactcaccagtccagctccttatgctagataaggacggttcaggagggattgtcgcactttctcaatctccatttgctggaagagttccatcaaactcag

SEQ ID NO: 140278 - DNA, 326 bp, Arabidopsis thaliana landsberg
atggacaagtcctttactctgttcttaactcttacgattctcgtcgtcttcatcatctcttcacctccggtccaagccggcttcgccaacgacctcggtggtgtagcatgggctacgactggagacaatggttcaggctgccacggttcaatagcagagtgtatcggggcggaggaagaagaaatggactcagagatcaatagaagaatattggcgaccacaaaatacataagctatcagtctttgaaacggaacagtgtgccttgttcaagaagaggtgcgtcttattacaattgtcagaacggagctcaggctaatccttatag

SEQ ID NO: 140279 - DNA, 896 bp, Arabidopsis thaliana landsberg
gttgaattcagtttttaaaggtgatggctagtaatgtatttgatcatccacttcaagaattagagggtgaagataatggtgtaaagagcgagaaagcgagtttattggaaacatctggttctgtagatactactcctgaggattctggtcatcgttcttctgatgggcataggggttagtcctctattcaaccttgttattgcactttgcccattgttactttctccgtcgtgttacctgtattctgaaatagacgataaccactgattcaagattgtatgttcttgaaggactagaccactgtgaaactgcacctgttggtctctatggagatatgcttatcaatgacagtgagattcagtactctcggtccttgacagagaaagggtctcctgcgattcataatcttaaattagatagattatcggagcaagaaaaggtaggaaactaaaccctcatgtattcagttgagcatgaacataagacaaacattttatccacatacatattgtcaatggtgttaatcttggatattaacaagtgaagaatctctatttgtgctgttagaatcactaggatatgtttcttgaatgcggtacactgaaatcattattatattctcatgatttctttttgataatatcttgtggttccagcaaaaactcattgttgagctagtcagaatacaaaatgacgggacagtggaagttatagataacggtactccggtgtcggagttatgggagtttgagccaacgaaagggcagtccacaatcacatttgaaaagtccttaactgagtccttgggatccattccaaggttaaaaattgctatacttgtggttggaactcgaggcgatgtgcagccttttctggccatggcaaagcgcctccag

SEQ ID NO: 140280 - DNA, 621 bp, Arabidopsis thaliana landsberg
atccaagcatactaacgggcaaacgacggtacaaaggcgaacaccggcaagatcgatttgaacggtgacggcgaatgtggcggcgaagtaacttaccggtgactgttatgcatcgctgagaattgtttgcttttttctctttccaggacattgatttgattttctgttttgcttttttcttgttggattatcatcaggggaatccagattccgatcagagcatatctggtgaggactgatgattgcttctttttcttcatctgaaatttcgattttagatctttgtgtttcattgtctatcgagtgattctcaagctgttgtttggtcttttagaggaagaagaagaaaatgatatttcgccgaaggagaatgcgaaggaacaagaggtaatgtttaatctcaactttcgattcgttaagcttgcataaagctctctgtgaactcctgagaagttgtctttgagaaagaacttggcaacttctgatttgccgaattgattgttgttggcttgagtagttttttttgaggagctatagggaatttgattgtggtttgaccatagttggcttcaatattgtagagaggattactacttcaaacaaagctcgaaaaactcatag

SEQ ID NO: 140281 - DNA, 960 bp, Arabidopsis thaliana landsberg
gataaatactaaactcactgttaaaactttctcaacaaagcttcctgtttctctacaaatggcatctgctctcgctcttaagagactcctatcatcctccatcgctccacgttcccgtagtgttcttcgtccagctgtttcctctcgcctcttcaacaccaacgccgttaggagctacgacgacgacggcgaaaatggagacggcgttgatttatatcgccgctctgttcctcgccgccgtggtgatttcttctcaggtaacaaaccaattgtttcgcttttcctccagatctatgtctctctgttgttaacgtagcgaaaatctagtaagaaaacaggtattagcttacactgagctcaaaatcttgacatgattgattgtgtctttgtgtagatgtgtttgatccgttttcgccgacgaggagcgttagtcaagtgctgaatctgatggaccagttcatggagaatcctctgttatcagctactcgtggcatgggagcttcaggagctcgtcgtggttgggatataaaagagaaagacgatgctctgtacctgagaatcgacatgcctgggctgagcagagaggatgtgaagctggctttggagcaggacactctggtgattagaggagaaggaaaaaacgaggaagatggtggcgaggaaggagagagcggtaatcggagattcacaagcaggattggattaccggataagatttacaagatcgatgagattaaggcggagatgaagaacggagtgttgaaagttgtgatcccgaagatgaaagaacaagagagaaatgatgttcgtcagatcgagatcaactaaaaacgtcgacgtttttttctgttctagttttgttgataggtctttgaataagaagtgtgtgtagtttggcacggtcgatgttgagtcatgtagtctctaaagactaaaaggttatatgtttctttcttgaga

SEQ ID NO: 140282 - DNA, 2861 bp, Arabidopsis thaliana landsberg
tcaactcattgaaatggaatcgcggcgagagaagaatccgatgacggaggaggaatctgatgggctaattgcggcgaggcggatccaacgattgtctttacacctatctccctccttgacgccgtcgccgtcgttaccgttggtgcagacggagacgtgttcggcgaggtcgaagaagctggatgtcaacggcgaacgtttgtcgctgtatatgagaggaaaacatatagatatacaagagaaaattttcgactttttcaattcccgacccgatttgcagacgccgatcgagatctccaaggatgatcatcgggaattgtgtatgaatcagcttatagggcttgttagagaagctggggtaaggccgtttaggtatgttgctgatgatcctgagaagtatttcgcaatcatggaagctgttggaagtgttgatatgtcccttgggattaagatgggcgttcaatacaggttagtagtagtctaaattgaaatatttttgttttgtggttgttcttgatggaaaaggtttgctcttgttttgttagtattgatgctaggattcatactctagtctctggatttgatttgttgatacgtatatatttgcagtctctggggaggctctgtgatcaatttagggactaagaagcatagagacaagtattttgatggcattgacaatcttgattacaccggttgctttgccatgactgaattacaccatggtgagtgatgtctaatgtcccctcagcatttagtagtctgtctcagtgtcatgcccagtattaagtgtctgtctatgtttcttctagggtcaaatgtgcaaggtcttcagaccacggcgacattcgatccacttaaagacgaatttgtgatcgatacacctaatgatggagctatcaaatggtggattggaaatgctgcagttcatgggaagtttgccactgtttttgccaggcttatacttccaactcatgattccaaaggagtctcggatatgggtgttcacgccttcattgttccgataagggatatgaaaacacaccagacactccctggtgttgaaatccaagattgtggacataaagtgggacttaatggagtggataatggtgcgttgagattccgttttgtgagaataccccgtgataatcttctcaatcgttttggagatgtgtcccgagatgggacgtatacaagtagtttgccaacaatcaataaaagatttggtgcaacactcggtgagcttgtaggtggtcgagttggccttgcctatgcatctgttggcgtccttaaaatctctgcaacgattgccattcgttattctcttctaagacaacaattcgggcctccaaagcaacctgaggtcagtattctcgattaccagtctcaacaacacaagctcatgccgatgttagcctccacctatgcataccattttgcaactgtataccttgtggagaaatattcagagatgaagaagactcacgatgagcaattggttgctgatgtccatgcactctctgctgggctcaaatcttatgtgacgtcttacaccgccaaggcgctctcggtctgcagagaagcctgtggaggtcatggttacgcagctgttaaccgatttggaagcttgagaaatgatcatgacattttccaaacatttgaaggagacaacactgtgcttctgcaacaggtcctcctttcactcctttaagaaactttcacttctcttgagaataatcatgctcaaagtttttcttttgctttcaggtggctgctgatttattgaagcgttataaagaaaagttccaaggcgggacattgacagttacatggagctacttgagagaatcaatgaacacttatttgtctcagccaaatcccgttacagcgcgttgggaaggtgaagatcatctaagagatcctaaattccaactagatgctttccgggtgagttagtgtttgctgtatataatatctctctgagactctcattgccttcattcattacaattgtattctttacatttgtctcctcagtatcgaacatcgcgattgctacaaaatgtggcagcgagattgcagaagcattcaaagactcttggtggtttcggggcatggaacagatgcttgaatcatcttttaacgcttgcagaatctcacattgaaacagtcattcttgccaagttcatcgaagctgttaaaaagtaagaatcacaccaaaatctttccataaaaacttcaccaaatcaagtttataataatctctgatatcaaaccgttactttcttcagctgcccggacccaagtgcaaaagctgctctgaaactagcatgtgatctttacgcattggaccgaatctggaaagatataggaacgtaccgtaacgtggattatgtggcgcctaacaaagctaaggtttgttttcttgtataatcgtaacccacagattatatcagtgacttacttctcgattaaattggtttaaaacaaaacaaaaatcgggtttttgtttgcaggcgattcataaactgacagagtatttgagttttcaagtaaggaatgtggccaaggaactagtggatgcgttcgagctccctgatcatgttactcgagcaccaattgctatgcagtccgatgcttattcccagtatactcaagttgttggattctaaaaacacaagaacaaaacatatatcatcacaatgatcttttgattcgaagcaaaaaaaagatgaaaaacaatttacagggggtacaaaagaatctgcagtcctttgtatgtgtttttagttgttgtttgttttcacaggagaataaaaaaaaacagagtaataaaaatgtcatttttttcgtaaacc

SEQ ID NO: 140283 - DNA, 294 bp, Arabidopsis thaliana landsberg
cgagaataggaaaaaaaaaaatagaaagagaaaacgcttagtatctccggcgacttgaacccaaacctgaggatcaaattagggcacaaagccctctcggagagaagccatgggaagaaaaaaactagaaatcaagcgaattgagaacaaaagtagccgacaagtcaccttctccaaacgtcgcaacggtctcatcgagaaagctcgtcagctttctgttctctgtgacgcatccgtcgctcttctcgtcgtctccgcctccggcaagctctacagcttctcctccggcgataa

SEQ ID NO: 140284 - DNA, 544 bp, Arabidopsis thaliana landsberg
gtaggtgatgaaatgaccagggttatttggaagtctatcaaggataaggtattaagcttactttttttgatgaatgagtgtggttcgtgttttcggcgtattttgaattttttctggtgaaacgttttcagcttattactccttttgtggagttggatatcaagtacttcgaccttggtcttcctcaccgtgatgctacggatgacaaagttactattgaaagtgctgaagctactaagaagtatgtgtgtttgagcttgaaacatactagaatgatgttgcatctctgtgtggaatattctgttaatctttaaagtttatgattttgttttgttttaggtacaatgtggcgatcaagtgtgccaccatcactccaggtatgtcaacagatgttttgcagttgaacattttttttaccagtgtttttattttacttagtgttgatctttgctctctgcagatgaaggccgtgtcacggaatttggcttgaagcagatgtggagaagtccaaatgggaccatcaggaatatcctgaatggtaagt

SEQ ID NO: 140285 - DNA, 1590 bp, Arabidopsis thaliana landsberg
aaatacaaaaaataaaaatccttaaaaatatatccttatcttcaaccaagaatgggagaggtccaagaaggtcccaaagttgaacaagagaagaagccggctgccaccgtagtcccagttgagactactgacggcaagccaaagagcggcggaggagattccgcggcagcagcagcaccaccggtcgccgcggttgtctctgcctttgtttacaaagtggatatgcactgtgaaggctgcgctaagaagataaagcgaatggttaagcactttgatggagtgaaagatgtgacggcggatactggtggaaataagcttttggtggtcggaaagattgatccagtgaaactccaggagaagttggaggagaaaaccaagagaaaggtggttctcgcgaatccaccgccaaaggtagagggacctgttgctgccgccgttggagagaggaaagccgatggtggagataaggaggcggctcctcctgctcctgctccggcagctccaaaagaggtatagatctaattgaataataacaagagacaactatacttttgctactgtacgccaagtttttgacggtttacgttagcaacttaaaaagaataatagtagtgtggatcacactagttaattaggcagataagctaaagtctaaacgaaaaaagattaggcagctaaaaagtaaatccagattttattgtctaacaaagtatggtttatgaatttattgatttgacttttaaattgtttgttgttcagagcgtggtgcctttaaagatcagactacattgcgaaggatgtattcagaaaatcaagaaaataatattgaaaatcaaaggtaagaagggattaataaccaacgaaaatttattaatttttgtttttaataaccaagtaagttactaaatttagaatacaaaataatttaactatgctaattaaaattttattaattgaaattaaacaggagtcgaaacagtggctattgacggagctaaagacgtggtgacggttaaaggaacgatagacgttaaagaacttgtgcctctactcactaagaagctcaaaagaaccgtcgagcctcttgttcccgccaaaaaagatgacggagccgccgagaataagaagacggaagctgccgctcctgacgcaaagaaagaggctccgtccgccggagttaacgaagcaaagaaggaaggaagtgacggtggagagaagaaaaaagaggttggagacggcggagagaagaagaaagaaggtggtgacggcggagagaaaaagaaagaagccggagacggaggagagaagaagaaagatggcggaggtgtgccggccccggtggcgatggtgaataagatggattattatgggtactcagcttatccaacggctcctatgcattggcaagaaggacacgtgtacggtcagagttattcgatgacaggtcagaattatccagtgggaggtcagagttatccaggttcaggatacaactacgcaagtgagagttacgtgccgtacgcgcagccaaacgtgaacgctcctggaatgttcagcgacgagaatcccaatggttgctctgttatgtaa

SEQ ID NO: 140286 - DNA, 461 bp, Arabidopsis thaliana landsberg
agagactctatatgtttggaagggaaagcaggatcagtatctgagatatcacgattaactggaacaagcgtacaaattctagctagggaagaaattccccgatgtgcttctatcaatgatgttgttatacaggtatgtttgtctatttttgaggagttgagcattttctaaacaacttctggtctcaaaagagaattcttatgtgaatgtcgatgtagattactggcgagatcagagctgctcgggaagcacttgttgaattaacattactattgaggagtcatatgttcaaggagctctctcaaaaggagacaccaccagcttccacatccacaactggccctctcgaaggtgttgcaggagtaatggaggtagcttcatcaaataacacaattcaatctcgtgaaggtcctactagttcgaatctgaacttgcagcaaaatagcacaatcttgccacag

SEQ ID NO: 140287 - DNA, 753 bp, Arabidopsis thaliana landsberg
atggcgtggatactggagaaatcctcatccgtcgaagctcagggtaacgccgtccgagctctcaaggcttcccgtgcagctaaaccagatatcgatgctgccattgagcaactcaacaaattgaagctcgagaaatctaccgtcgagaaggagcttcagtctattatcagtagctccggtaatggttcgcttaaccgtgaggcttttcgaaaagctgttgtcaatactctcgagcggcgtttgttctatatcccttcgtttaagatctacagtggcgtcgctggactttttgattatggtcctcctggctgtgctattaaatccaatgttctcagcttttggcgtcaagtaaggaacaacactattcacatttctctgtatttaaattcgacaagattttggttgtataaaccgagttagatttgttactaaacgtgattgaatggagtagaaattgagtcaaatgtgacaagattcatagagtagagttacgtttggaattatacagattgatgtgggtcaaatttgacatgattcatagagtagaaattgtgttaggcttgttcttatacgggagtgatttgcttcgtttgcagcatttcattcttgaggagaacatgctagaagttgattgtccatgtgtgacaccagaggttgttctcaaggcatctgggcatgtagataagttcactgatcttatggttaaggatgagaaaactggaacatgttaccgtgctgaccacttgctcaagg

SEQ ID NO: 140288 - DNA, 234 bp, Arabidopsis thaliana landsberg
ataagaaaagacttgaatgggaagcctttgacggacacaaaagatgataaaagcttaccagtctgctggaaaggcaaaaaacctttgaaatcacttgatgaggttaagaaatacttcaagacgattactttacgatttgggaatcaaaagaatggtcagctatttcaggttccacctgagtcgtatctcataatcaccgtaagtcacacatatactggcctagatatgacttga

SEQ ID NO: 140289 - DNA, 1549 bp, Arabidopsis thaliana landsberg
cgggtgtggaggaaagttatcaaatcagtttttgtggaattttgaatctcgtcgcttctgtgttggctatgactgaagttgcgagctcagtggtgtatgaagtgctcggacgcagagctcaggatgtggacgagccgattatggactacatcattaatgtcctcgctgatgaggatttcgacttcggtgaggaaggtgaaggcgcctttgatgccgtcggtgagctcctcgtcgctgctgaatgcgtttccgatttcgaagagtgccgtttggtaagtaaccattcgcagcttgttgcttggctttcttcatttcaattatcgtaattctagattcgttttatctttgcttgtttgtatttatgggattttttcggtagggcctctgtgactgttgaaatggtttcaataaggtctcgcttttgaatgagctgagatatttaattggatgtggtgtgtgtaggtttgtagcaaactgtcggataagtttggaaagcatggattggtgaagcctacacctactgtgaggagtcttgctatgcctgtgcggatgaacgatgggatggatgatggacctgttaagaagaagaagccagagcctgtggatgggcctttgctcactgaacgtgacttggctaagattgaaaggagaaagaaaaaggatgatcgccaaagagaggtatacagtaatggcagtttttttaccggttttgaactgagaatttgtttcttatcttgtgtttatttactggtttcttgtttatgcagctacaatatcagcagcatgttgctgaaatggaagccgctaaagcagggatgcctactgttagtgtcaatcatgacactggtggtggctctgctatcagagatattcatatggataactttaatgtttctgttggaggccgtgatctcattgtcgatggatcaatcaccctctcttttggacgtcattacggtgggtttgatcttcgtttttatttgttttagctgtctgtttaatccaaggaatagacggtatggaaaatctaccttacaaatgggtatttgctctctttggatgactttacaggtcttgtaggacgtaatggtaccggaaaaacaacttttttgaggtatatggctatgcatgctatagagggtattcctactaattgccagatattgcatgttgaacaagaagtcgttggtgacaagacaacagccttacagtgcgttcttaacactgatattgaaagaaccaaactgttggaagaagagattcaaatactagcaaagcaggttagacacaagctactttactaatatgtattagcatttactcactcaggtgttttaccttttcgtataatctgtctttggtggtaatgttgacttttgtttggttatctgaagagagaaacggaagaacccacagctaaggatggaatgcctaccaaagacacagttgaaggagatcttatgtctcaaaggcttgaagtaatatacaaaaggcttgatgcaattgatgcttatactgctgaggctcgggcagctagtatccttgctgt

SEQ ID NO: 140290 - DNA, 857 bp, Arabidopsis thaliana landsberg
tgattcattggctctaaaacgaaaatgggaattctcatcgacgacgccgttttaatcgaaccgggaaaaatctccggagatcccaccgtcgttaccgtcaattgtcctgatgaatccggtctcggttcaactctgtgtagaatcatcctcgaatttggtctctccattacccgagcaggtcaatattcaattttacttcgtatctgtttaggggaatattctctgtttgtcgtttagcttcacggaatattcttctttatgattcgaaaaattcaattctgtttttcttattttgagggtaattaatatgtttgtaaaaatggtgtttgcagatttttcaacagatggaagatggtgttatatagtgttttgggttactccagatattagctctcctaaaattgattgggacagcttaaagaatcgtcttttatcagcttgtccttcttgcttaggctctttctacttctgccttcaatccaatgtctctaagcctccttccctttatcttctcaagttcttttgccgtgataggaaaggattgcttcatggtatgtgtaaagttattgtcttttgtcttgtgcttggtgttttctttatatggttgattaaaagtttgtgtttttttggtgattcgtagatgttactaaagttttgacagagctagagtttacaatacaaagagtcaaagtcatgacaacaccagatggaagagttttggatatgtttttcatcactgacgcaatgtgagttttcttctttctttctaattctgatgtttcatttgagagaagaaccaacattaacgttgtggtttgtgtaacagggatctattgcacacgaaacagagacaagcc

SEQ ID NO: 140291 - DNA, 854 bp, Arabidopsis thaliana landsberg
agaagcagaacacaagaaacgtgagaaactttgagaagaccaagaagaagaagcagaagaagaagaaaatgaaattggtttggtctccggaaacagcatcaaaggcttatatagacaccgttaaatcggtaagttttttttttattttccggtgagttgtgaaggaataataacacacgcttcttctctccagttctcgaaaactcagatcttaattttgttaaagattcatggtttgttcttgtaacgatttttttcttttcttttttgttcagtgtgagaatcttgaaacgccggacgcggcggagctaatagcggcgatggcggcgggatggaacgtgaagctgatcgtggaaacttggtcagaaggagacgcaatagcttcaagtattggtttaaacgtagcaagcaaacacgcaaacgctaaacacatatgtatagtacaaaactcaagatcagaatctgcttatctccaagctattcaagaatcttcatctcccttgaactttccagagactatcgtcgctgaagaacccggaaaagcgatgaagaagctacaaggagtcgacttcttggtcgtggattggcggaacaaagaatttgcagcggctgcgttgaaaaacgctgcgtttggaaacagaggagctgttgtggtttgtagaaacgggtattcgagcttgagaagggttttaagagaccggaaagttgttagaacggtgactcttccggtcaccggaggtattgagatagctcatgttgcggctaggaactcagggaagagtggtaacaataagagaagatggatcacacatgttgatcagagatcaggagaggaacatgtgtttagtatctag

SEQ ID NO: 140292 - DNA, 558 bp, Arabidopsis thaliana landsberg
cgctcttcaaagcaaaaaaaaacatcaataatgaagcaatctcttcttctatccttcgtgttactactactctcatcatcatcactcgtgacaccaatccatgcacgtaacaaatcaaatccggcaaagtctcctgttggtgctccagcaccaggaccatcaagttccgattgttctacagtaatatatagcatgatggattgtctcgggtaccttggtgtcggatcaaacgaaactaagccagagaaatcgtgttgtactggaatagaaactgttttacaatataacccacaatgtatttgtgctggtttggttagtgctggcgaaatgggaattgaactgaatagcacaagagctcttgcaacacctaaggcttgcaaactctccattgctcctcctcattgtggtgattttttatatttatttctattgtgtctcaatattaagtttttttttttttgctttcttttgccttatatttttagggtttgaaagtaatattttctttccttgcaagtataataactttaggcgctacgacaccaagtgcatctcctg

SEQ ID NO: 140293 - DNA, 1170 bp, Arabidopsis thaliana landsberg
gttacaaagatgaacggaagaaagaaaaaaaggtgatcggagattttggcttattctcagatttgggagaaatggcggcagaagagggtcaagtgattggttgtcacacgaacgatgtatggactgtgcaacttgataaagccaaagaatccaacaagctggtctcgattctcacccctttgttatgcaattctctttgcttgtgttggatttgggaattaggtttttgtttgattagggttactgtttctagtgtcaaagaaagcattatggtttcacatgttatggtataggttttgattccggctaacgtagagttggaataaacggattgttaaggagatcacaacattagatgtgagggcaagtgaatcatcagtgaaacttacgttttgatgtgtaaacttttagagtattttctttaattgattcatctttgtgacttttgttgtgttcctcttttccttattgtagctcagagtcacccctctggtaaaaaaaatcattttggattgggttatttaggattctgatggtgtgataatttcattgttttcagattgtgattgatttcactgcttcatggtgtccaccatgccgcatgattgctccaattttcaacgatttggccaagaagttcatgtcaagtgccatcttcttcaaggtggatgttgatgaacttcaggtgaacaaatacactttctttacaaacaaattaatctcctcactcttagactttagaattacactgatatattctatatacttgtgatgatgtttaacagagtgttgctaaagagtttggtgtggaggcaatgccaacctttgtgttcattaaagccggcgaagttgtggataagctcgttggtgcgaataaagaagatcttcaggcgaaaatagtgaagcatactggtgttacaactgcgtaaatcagtttgaggcataaataataaggtctaatttgtttatcttaaactagctagacataacgggaatagtgcagattggagatgaagtagaagttattgatctctgactgtcataaaaccatgctttttttatatggtctttggcttttgcctaattcatatgtttaggtgttctttctatacctccatagaccaccactcagtcgaattttcagatcagtgaaatagactcttgtgaatg

SEQ ID NO: 140294 - DNA, 574 bp, Arabidopsis thaliana landsberg; identical to SEQ ID NO: 46459

SEQ ID NO: 140295 - DNA, 587 bp, Arabidopsis thaliana landsberg
tcaggtgttcgcagctcaaatgcagagacagaccagatcttagcacacaagtcttgcctgctctcaaacgtattcttgaatctgcaaatagtagactcaagacagaacaagctaacgcacgagcaccaactcactattactgtccaattcttaaggtaaatcgaataaccgatgcacaccaaccacaattctcgatggctcaggttttaaaatgtttgattctggttgattgtaggaaataatggaagatccacaaatagcagcagatggattcacatacgaacgaaaagcgataaaagaatggattcaaaaacatcaagatgtgtctcctgttactaagcatcggctcaaacattctgatcttacaccgaaccacactctcagatcggctatacgagagtggcgatctcgttcacgcttagacctctccactactcttggctcctactgatcacactaatatatatacagtctagtctaattcgtatattgactaaataccctgaacttgtttgaatcgggtgtatcatctctgtgaatatgtattgtggtattatataataagtcaacaaggatttggtttgctt

SEQ ID NO: 140296 - DNA, 1814 bp, Arabidopsis thaliana landsberg
  unsure (1)..(1814): unsure at all n locations
ctaatatgcctggtgatgctgctgaaacatatgctgttctctcttcatttttgacccaaaccgaagattatcttcataaacttgcaggtaagattactgccacaaaaactcaacaggaagtggaggaggcagcaaatgctgcagcagtagcagcgagattgcaggtatacatactgctttctctactccacagcgaatatccattacactctgtagataattcttcaaactttaacttaaatgttgacttttgcgtgtttcagaaaatagaactttttcttttcaaaggtatagtggatatatagtaccttacctgtttccgtttttgacgcaggggttgtcagaagaagaggtcagggcagcagctacttgtgctcgagaagaagttgtgatcagaaatagatttacggaaatgaatgcgccaaaagaaaattcatctgtcaacaagtaagggcattagtcacacaaaaaatgattaaaatagggaattagcaaagtactagttgtaactcataattaccaatgcagctgaatacttaaaaagtatgtgcttatctgtaaaatgctgataatcctgcacatccatatgtgagagaattctacagatcacaagattaggaataggcgccgtgggtgatgtctaactctgttatgtccaactctaggtactatactctggctcatgctgtaaatgaagtggttgtaagacaaccttcaatgcttcaggctggaactttgcgtgattaccagctggtatctcctccatctatactctatgttgttgcttttttctcactgtcatgccacgttttgatggtttctaaggttttttgctctgtgccaatcaggttggattacaatggatgctatcgttgtataataacaaattaaacgggatcttggctnatgagatgggtcttggaaaaactgttcaggttaaatctgttcccnatttgcaggaattcctgaatttacttttcattcgcctttggtgaccaataaattattatattgtcctatcataatatactaattgttttgtacaggtaatggcactgattgcttaccttatggagtttaaagggaattatggaccgcatctcatcatcgttcccaatgctgttctggtgaattggaaggtttgtgtttctgatagactctcttatgattttccacagaatcaatgcttagaaccaagggagtatttgagaccccaagtctcccaactcataattatctcactcagttccgcgagaacccacaagcctcttatatccattatctaagcttaactttgactctagctaactagctgttagttgcgctgacatggccatatcctgttgatgaactcttctgtgttctttagaatacgtataagtttttttgctatctttcgttgacttctctctggtacctgattaaagtccaatgggttttcttctgcagagtgaactccatacttggctgccatctgtttcatgcatatattatgttggtacaaaggatcaacgttcaaaattgttctctcaggtaaaatttgaaaaagtttcttttgctccagatgttttgaagacgttaattgatacatcccctgttctctttaacaggaggtttgcgccatgaagttcaatgtcctcgttacgacttatgagttcattatgtatgatcgatcaaaactctcaaaagttgactggaaatatattataattgatgaagcacaacggatgaaggacagagaatctgttttggcccgagatcttgaccggtatcgctgccagaggagattacttctcactggaacacctttgcag

SEQ ID NO: 140297 - DNA, 1946 bp, Arabidopsis thaliana landsberg
ttggtgatataggtaatgttgttcgagaaaatgacccaaagaacaacgaacgggaaaagatcgatcatcgtcctcgtacacgatctcaaaatcccacgcttcttgtggaggataatctcaaagtttgttccttttcccctgtattttggtgaacaaattaggtttcttcgttagatttgttaaactcatgtcatatgtgtatatgtctttgatctgcagaaacctgtagtcaagagaaacgcagtaccaaagccgaagaaagtggctgggaaaccaaaggtagtagacgtgattgagataagttcagacagtgatgaagaacttggtttagttgctgctcgagagaagaaggctactaagaagaaagcgaccacttacacatctgttcttactgctagaagcaaggtaattttttaccttgtgaaatgatgattctttagtgtgaagtaagaaaatgttttggtctgttcccaataaacctcttttgcttttcaggctgcttgtggtttagagaagaaacagaaagaaaagattgttgatatcgattctgctgatgttgagaatgacctcgcagctgtggaatatgtggaagatatttacagtttttacaagtctgttgaggtttgtatactatactattcatgaatctttccttgcagctttgttgtagtattaacttgtttacttaaattatcatttggattggcagagtgaatggaggccacgagattacatggcatctcagcctgatattaatgaaaagatgagactgatcctggtggagtggttgattgatgtgcatgtccgattcgagctaaacccggaaacattttacctcactgttaacattctggatcggttcttgtcggttaagccagtgcctcgaaaagaactgcagcttgttggtctcagtgctcttctcatgtcggccaagtatgaagaaatttggccaccacaggtgataaaaacagagaacttttgaatcttctggttttgattcttttttgtcttcggctaaatgaaaagataattcttttgcaggtggaggatctagttgatattgcagaccatgcatacagtcacaaacagattctggtgatggagaagacaatactgtctacacttgagtggtacttgacagttccgactcattatgtcttcctagctcgtttcatcaaagcttccattgcagacgaaaaggtaagagagcgtttttttagtttcttccatggttatacattacatcatattgaacattcagttgtgttttggtttgcagatggagaatatggtgcactatttggctgagttaggcgtaatgcattacgatacgatgataatgttcagtccatcaatggtagctgcttctgcaatctacgcagcaagatcttctctccgccaagttcccatatggaccagcactctcaagcatcacactggctattctgagactcagctcatgtaagaaagttcctttcttttttcatttgcatcatatgcgttttgcatttgtggttggatattcattcttgttgtaatgatgaaaaagggactgtgcaaagctgttggcgtatcagcaatggaagccccaagaccaagggagtgagagcagtactaagagagctttacgaaagaaatactccaaggacgaacgcttcgctgtggctttgatccctccggccaaagctttgttgaccggaactgaatctgcttaggagttaggaccctttaagaagacgaagaagctgaagaaccaagcctagtttcattttccttctgaaaatcaagtctagtttcattagataatggtattttgaacaagtctaatgagtcgctttgaaacctagtcctttagcatgattcattcccaaacactgcatatcttgtaagaagtcattttcttccgagaagtttaatttccttagatatataattctgtggtttaa

SEQ ID NO: 140298 - DNA, 534 bp, Arabidopsis thaliana landsberg
tctctccttgagtatcttcttatcctattttccaaattccaaaacaattcacaaaatggctacatgctggcctgagccgattgtttccgtgcaatccttgtcccaaaccggtgtaccaactgtaccaaaccgctatgtgaagccggctcatcagagaccggtctttaacaccacccaatccgatgctgggatagaaatccctgttctagacatgaacgacgtttgggggaaaccagaggggctgaggctcgtgaggagcgcgtgtgaggagtggggtttcttccaaatggtgaaccatggtgtgacccactcgttgatggagagagtgagaggagcgtggcgagagttcttcgagctaccgctagaggagaaacggaagtatgcaaactcaccggacacgtacgagggatatggaagccgccttggggttgtgaaagatgctaaattagattggagtgattatttcttcctcaattacttgccttcttccataagaaacccttccaagtggccatctcagcctcctaagatcag

SEQ ID NO: 140299 - DNA, 1623 bp, Arabidopsis thaliana landsberg
atgtttgtaaatttcaaatacttctctttctttatccgtacgaaaatggacggtgttaccggcggaggaacgaatatcggcgaggctgtgacggcgccaccaccgcggaatccgcatccagcgactttacttaatgcgaactctttaccgccccctttccttagcaagacgtatgacatggtggaagatccggcgacggacgcgattgtctcatggagtccgacgaacaatagcttcattgtttgggatccaccggagttttctcgtgatcttctacctaaatacttcaaacacaacaatttctccagctttgttcgccagttaaacacctatgtaagtataaattctctcgcgccctaatttctccaccattgatttctctaattgtactgtgtatagattatgatttcgttgaataatcttagtgcttgatgtgtttgataagatttatatgattcatgtgccaattttgatgaacagggttttaggaaagtggatccagatcgatgggaatttgctaatgaaggtttcttaagaggtcaaaaacatctattgaagaagataagccggagaaaatctgttcagggacatggtagtagtagtagtaatccacaatctcagcaattatctcagggtcaaggttcaatggctgcattatcttcatgtgttgaggttgggaaatttgggttagaggaagaagttgaacagcttaaaagagacaaaaacgtgttgatgcaggaactcgttaagttacgccagcagcaacaaacaacagataataaacttcaggttatggttaaacatcttcaggttatggagcagaggcaacaacagattatgtctttccttgctaaagctgtacagaatcctactttcctctctcagtttatacagaagcagactgatagtaatatgcatgtaaccgaggccaataagaagcggagactcagagaggatagtactgctgctactgagagtaatagtcatagccatagcttggatgcatcagatggacagatagttaagtatcagccacttagaaacgattcaatgatgtggaacatgatgaaaacagatgataagtatccgtttcttgacgggttctcatctccaaaccaggtatcaggagtcactcttcaagaggtactacccacaacttcaggacagtcacaggcatatgcatctgtaccatcaggacagcctttatcatacttaccctctacttcaacttctctcccggataccataatgccagagacttcccagataccacaattgacacgagagagtatcaacgacttccctacagaaaactacatggatacagagaagaatgttccagaggcattcatctctccaagcccattccttgatggtggatcagtcccgattcagcttgagggaatacccgaagaccccgagattgatgaactaatgagtaactttgaattccttgaagaatatatgccagaaagcccagtttttggagatgcaactacactagagaacaacaacaacaacaacaacaacaacgacatcaacaacaacaacaacacaaatggtagacatatggataagcttatagaagaattgggtcttctcacatcagaaacagaacactag

SEQ ID NO: 140300 - DNA, 632 bp, Arabidopsis thaliana landsberg
gtttgattggcatgtggtgcaattcatcatcgtctgcttgccatctgtaggtattgccattcactcccgttatcttagttgttatgttcaatgttttctgtcaaatgtgacttgtttataaatggctattgtttcttgtaacagctgtgtatctggttgctcaatatgctcgccggaaaatgaagatcatggatgctgtgagttctccttattgttcattatcaaactgatatgagtttctgatgatgtttcagtcatgtcttaatgtttatcctctgtcttcattctggttattgttagcatatgcctcatgatattggactaattctcaggaacttggagagaagaaaaggaaagaagaagaaaagaaagagaaagaagaagctgaacaaaaggcattacaagtagaggcagcaaccaagtctcacgaagagctaatggagatgagacagagactgggaaaaatcgaagagacaataaaagaaattgttttggaaaccaagaaaccttcagggaatgctccaaccaaaacccaagaagatcaatctactaaactctccccaaaagaagtatcacagccagaaaaagaacacaagggcaatgtacagaaaccaggtgatggacctcactga

SEQ ID NO: 140301 - DNA, 916 bp, Arabidopsis thaliana landsberg
aaagattcgatttttgactgcaaaaaagagaatttctaaaagcaaatcggagagcttcggcgatggcgttatcacgactttcttcacgatccaacactttcctaaagccggcgattaccgcctttccctcctccatccgccgtcatgtttccacagactcatcaccgatcacaatcgaaaccgccgtccctttcacatcgcatctatgtgaatcaccgtcacgctccgtcgagacttcatcggaggagatcttagcctttttccgtgacatggctcggatgaggaggatggagatcgcagcagattctctttacaaggcgaagctgatccgtgggttctgtcatttgtacgatggtcaagaggctttagcggtgggaatggaagcggcgattaccaaaaaagatgcgattatcacatcgtatcgtgatcactgtactttcattggtcgtggtgggaagcttgttgatgctttctctgagcttatggggagaaaaactggttgttctcatggtaaaggaggatctatgcatttctataagaaagatgcttccttttatggtggacatgggattgttggtgctcagattccattgggatgtggtttggcttttgctcagaagtataataaggatgaggctgtgacttttgctttgtatggtgatggtgctgcgaatcagggacagttgtttgaggccttgaacatttcggctttgtgggatttgcctgcgattcttgtttgcgagaataaccattgtgagtttattttttggttaattgtaatttgtttggtggaattgttgagacttttgtgttgatttggattgtttgatgtttagatggaatgggaacggctacatggaggtcggctaagtctccggcttatttcaagcgtggagattatgttcctggcttgaag

SEQ ID NO: 140302 - DNA, 1539 bp, Arabidopsis thaliana landsberg
gttctgccaaagtttctctgcagcttctcctcttctcagaaattagggttccgtcgcaaatcacgagcagatctcgtactctctggtaatgatttctcgtttcttatactttgtttataccgaagtatcgattcgcttgcatgtctcgtcatctttgtaccgattctgatttgaagtttctagggtttaccatcgcggaattacgatttgtatatatgttgttagccagtagagatcaattgaaattaccttcgtggatttatctcgtaagcgcgaaccatgtttagagaaacgagttcagatttgcttcacgcttaattattgtgttgtagctgtgtatatcttctggatctgctgcgtgtgtttgatttttctgggagtcaagtcatatttacgttgttcaaaaacacttttggctgtttgttttagaagatgtctgaagagccggagtaccgttgcttcattggtgggcttgcttggacaacgtctgatcgtggtctcagagatgcctttgagaagtatggtcacctcgttgaggccaaggtaaatcttttatctctctttcctcagtggctctctgttcttctggttactgaaacttagaagctttgttctgttttgccttcagattcaaacactgaagcttttatatgttttgtaatttgtttcgtttttgcaactctgtttatggtgaggcgtgtctgtttagtaactgacttcttttagtggctatcagctcttctggttgctgagacgttgaagctttgagtgatttgttcattttcttgctctttgcaaatctgtttgtagtgttgtctgtttgataagtttacttgaaatttatcattactaccttatttttattgccataactattatgggagataaaccttatctattgatacacaggtggttcttgacaagttttctggtcgctcccgtggttttggattcatcactttcgatgagaaaaaagctatggatgaagctattgcagcaatgaatggaatggatttggatgggcgaactatcactgttgataaagctcagcctcatcagggtggtgcaggcagagataatgatggtgaccgcggtcgagaccgtggatatgatcgtgatcgcagtcgtccctctggtggtcgaggtggtggagattgctttaaatgtggcaagcctggacattttgcaagagagtgtccttctgaaagtagtagagatggtggtggaaggttcagctcaaaggatgataggtacagttcgaaggacgataggtatggtgcaaaagatgataggtatggtgcaaaggaggataggtatggtgcaaaggatgataggtacagctccaaggatgataggtacagctccaaggatgataggtatggtagtagggatggtggaggtagtcgctatggacctgatcgcagtggtgaacgcgctggaggacgcagccgggatggtggcagccgtggagctccaggaggtgagaggcacagtcgtgctccatatgaccgccccagagctggtggtttccactagaat

SEQ ID NO: 140303 - DNA, 336 bp, Arabidopsis thaliana landsberg
ggttttagacttttagtcttaaaactaaagtctcttatcttgtagcccaagtctcagacatgatgaacaacaagccacgaaaaagataaagagggcaggaagataaacagggtagtgttcaagtaacatggacacttagttctcttattgatacagatccttattgatgaagagaaaagctgtgtatttagacattaggaggtggccaaatcttcccgaaaagctcttcaacacgtttcgcttggttcgcataaccttcaacaccggctgataaaagctccactgatgcaggacccatagatgaagccaagcttagctggttccatttgaccagct

SEQ ID NO: 140304 - DNA, 578 bp, Arabidopsis thaliana landsberg
gtggagtcggaaatattctgccttcacggtggattatcaccatccatcgagacccttgacaacattaggaactttgatcgggttcaagaagttccacatgaagggcctatgtgtgacttattatggtctgatcctgatgacagatgtggctggggaatctctcctcgtggtgctggatatacatttggtcaggtatttgaattatgaagcctcagtttcagaagctttcctgaatctcctttttcctttgttctagtaagtttgtaattgactttcttttttcatttttgtttccataggatatttcggaacaattcaatcacactaacaacttaaagctgatcgcccgagcgcatcagctcgttatggatggattcaattgggcacacgtaatacaatcaaactcctcttccctgcatagattagccaaaccttagattcttagctcacatgtatatattctcgttgacaggagcaaaaagtggttactatattcagtgcaccaaactattgctatcgctgtggaaacatggcctcaattcttgaggtcgatgactgcaggaaccacacgttcattc

SEQ ID NO: 140305 - DNA, 180 bp, Arabidopsis thaliana landsberg
ctactctctctctctctctcctctgttctaattctctaggaacagagtaaaagactttggctcagcttctgcctctccaatggcggttcttccgacatggcttttagcaatgatgtgtttactcttcttcgtcggagctatggagaacactacacacgacaacatctcttctctccctag

SEQ ID NO: 140306 - DNA, 1874 bp, Arabidopsis thaliana landsberg
aagccaccggtttctccgcccattcagatagtcatctgtttgctctccgccgctccgggtaccggagtatctttatcagtcgtcttcctctccggcgtcgcgcccattctttgttcaccctaccgctgtatgtttctttcaccaaatttccttccctcttcagttttttttttctaattaattttgaggcatgacattagcttccgagaagctgttctaggcggaacaagaaacatcgaaactgtataaatttagaaagaacataaatttatcagagagacttaaacatggaaaactctgtttgcttagaatgtgtgatttttctggtaatttttggacaaaggatcaaacaagtttgtcatatttttcacagttgatgaaatggggtggaggaagtagaagctggttttcgaacgaagccatggccacttattcaaattcagggttaattgatgtgccactagctcaaactggggaaggtattgctgaatgtgagcttctcaagtggtttgtcaaagaggtctctttggtttctccgctcaaagtttctttttttcaattgttctgtttcgtttcgttatgagatagacattttggtgtttttccttttgcagggagattctgtggaagagtttcagccactctgtgaagttcagagcgataaagcaactatagagatcacaagtcgttttaaagggaaagtggctctgatttcacattctccaggtgacattattaaggttagatacattttctttctttatggtgttagaggctaagtttgagcatgttactctattgtaaaccatgaacactaagagattttgacatgttaagcttttgtgttatctatatatatatgtttaaaggttctgatagatcaggtatcaaatgtttcacttttataagtacttatatgtggcaaaatctattgatgcaaggttggagagactctggttaggttggcggttgaagactcgcaggattcgcttctaaccactgatagttcagaaattgtaactctgggaggttcaaagcagggaacagaaaatcttcttggagctctctcaacgcctgcggttcgtaaccttgcaaaagaccttggcatagatatcaatgttataactggaactggtaaagatggtagagttttgaaagaggatgttctccggtttagtgaccagaaaggatttgtaacagattcagtttcttctgagcatgctgttataggaggagactcggtttccactaaagctagtagtaactttgaagataaaacagttcctctaaggtacgcctttgttggcaatttgcattgtacatgaacccatcttgtatctgaattaaccacctgaagctatatccttattctcaggggattcagccgagcaatggtcaagacaatgactatggctacaagtgtaccgcattttcattttgttgaagagataaactgcgactcacttgtggagctcaagcagttcttcaaagagaacaatacagattccaccatcaaacgcacttttcttcctactttaatcaagtctctgtcaatggctctaaccaaatatcccttcgtgaatagttgcttcaacgcggaatctctcgagatcattctcaaaggtattttttttctaggaacttctcattgttgttttggttttgaggttaacatccttggattattagatatagatatattcttggttacttgcaggttcacataatattggagttgcaatggccactgaacatggccttgtcgttcctaatataaagaatgttcagtcattatctctgctagagataaccaaagagctgtcccggttacaacatttggcagcaaacaacaaacttaaccccgaggatgtgac

SEQ ID NO: 140307 - DNA, 1671 bp, Arabidopsis thaliana landsberg
ataaatatgtaccgacactctctctcccccatcaccaccaacctccgtcaaaaccctaaaccactatctctctctctctctctcttcatatcgcaacaatggagtccgtcgctctatctcgcatcggtctcgccggtctcgcagtcatgggacaaaacctcgccttaaacatcgccgataaaggattcccaatctccgtctacaatcgaaccacttccaaagtcgacgaaaccttagatcgtgcctccaacgaaggaaaactcccagtcgctggtcaatactcgcctcgcgatttcgttctctcgatccaacggcctagatccgttatcatccttgtcaaagccggtgctcccgttgaccaaaccatctctgctctctctgaatacatggagcctggtgattgtatcatcgacggtggaaatgagtggtatcagaacacagagcgacgaatcgttgaagctgagaagaaaggattgctttatttaggtatgggagtctccggtggtgaagaaggagctcgtaatggtccttctcttatgcctggtggatctttcactgcgtataacaatgttaaagatattcttgagaaagttgctgctcaagtcgaagatggtccttgtgttacatacattggagaaggtggatctgggaattttgtgaaaatggttcataatgggattgaatatggagatatgcaattgatctctgaagcttatgatgtgttgaagaacgttggtggattaagcaacgaggagcttgctgagattttcactgagtggaattcaggtgagcttgagagtttcttggttgagataacttctgatatatttagggttaaggatgagtttggtgatggagagttagttgataagattctggataagactggtatgaaaggtactgggaaatggacggtgcagcaagcggcggagctgtctgttgcagctacagccgattcatgcttcgttggattgtaggtatttgagtgggttgaaagatgagagggagaatgcagcgaaagtgttgagggaagatggattgaaagacgagattggttctgcgtcgagtggaatcgataagaagagattggttgatgatgttaggcaagctttgtatgcttccaagatttgtagttatgctcaagggatgaatttgcttagagctaagagtttagagaagagttggaacttgaattttggtgaattggctaggatttggaaaggtggttgtattataagagcggttttcttggataggatcaagaaagcttaccagaggaacccggatttggctagtcttgtggttgatcctgagtttgctaaagagatggttcagagacaagctgcttggagaagagttgtgggtttggctgtttctgctggtattagcacgcctggaatgtgtgcgagtcttgcgtatttcgatacttatagacgcgctagattgccggcgaatctggttcaggcgcagagagatctctttggagctcatacttatgagagaaccgatcgtcctggtgcgtaccacaccgaatggaccaagcttgctaggaagaacaattgaaaaatccctttctgttttttgtaaaatccctatttgtcttgcttgtttttgagcaattggaaatgggatttcaaaccacattgtttaacgagtattttgttcagattt

SEQ ID NO: 140308 - DNA, 926 bp, Arabidopsis thaliana landsberg
ccgcggcttaggacaatatgatccgaatcgttgaagaaactgtctccttgtgtctatgtttcgttttgatcccacattcctaaagctccaggtaccttttctacgtttcccgaattctgattagttgattcttcttcctcaatccgttcttcccaaacttgttgccgatttttggatccggtcatcaactttgttgtttatttgtcatcaatgcaaaaattgagagcgtctgtgttttcacttgcatgttatcaattcctaatgttgtttgccgtttcattaaccggattcgagactcttcccgctggatttctttttttcacgtcttcttttctattttttatggatttggtattttgacatgttaagcaaccttcgttaatcagtttaaaatcggtgctttccgaaatttttagaagaaacatggaagcttaaaattttgaaattgctatttggaaaagctatcatttcataggcttagtctttgtaattcttctttacttgttgttcattggcatgaatatatgaaggattttatatttgattgtgtgtttgtttatgttgttagaaattgatcaaaatgggagaagctggtcaatccagagacggagaatctgtcacgcctcttgttgtaagtattgtggcttccttttctcactttttagataatactttcagaaactatacttgctttatgctctcatcttaatggaattctgtttggagtcaacttaacgttctcttggtttctatatcaacggaaacatataagttgattaaaatggggctaaagaggatattcgtaatttttggttctttatgcattgagactaccattctaatatcagtaatttttccatggcccgggcggtggtaatggggacaatgcggttgcaccacaagtgtttaattctttaccagctctt

SEQ ID NO: 140309 - DNA, 1542 bp, Arabidopsis thaliana landsberg
  unsure (1)..(1542): unsure at all n locations
aaaagatcattgattcacacacattttccttttttgttgttaaatattcacacacactttttcttccaaagaaagaaagatgccgattagccggagagttctgacgccgatcaccgccgctccggttatcttagccgtcctttgcttcttcttttggtcatcaatcatcgggccggacaatttaaagggcacgaaacacgtccttcaagatgctaagaccattcctcttcccgtcgatggaccagagagcctagagttcnnnnnnnnnnnnnnnnnnnnnnnnnnnnnnnnnnnnnnnnnnnnnnnnnncaaatggcgcggtgaagaactcggctgggtcgatttcgcctacacttctcctcacaggttcattcataaagcaaaactactaaattgcccttactctgttttattacttttttggtgaatgaattgaattcattatatgattttacttaatgttcccaattaattggagtatttttgttttttggtgaataaagagataactgttcgagtcatgaggtagtaccaagttgtgggagaccattgggacttagcttcgagaggaaaacaggagatttgtacatatgtgatggttactttggggtcatgaaggtcggaccagagggaggcctggccgagttagttgttgatgaagccgaaggtcgtaaagttatgtttgccaaccaaggggatatagacgaagaggaagatattttctacttcaatgatagcagcgatacataccatttcaggtaactttattacacttgctttactttaacacatccaataaaatcctttttggttgcaataaaaaaaaaaatagaaaaaaatttcatagcacatacaaatagtttgagactttaatttatgtttaacagattacagatgagattctatatatatgtatacgcatataaacgtgttatgttatttttgttggatagggacgtattttacgtgtctttgtccgggacaaaggttggaagagtaattagatacgatatgaagaagaaagaggccaaagttattatggacaaacttcgtttaccaaatggtctagctctaagcaaaaacggttcgtttgtagtcacatgcgagagtagtacgaacatttgccatagaatatgggtcaaaggtcccaaatccggaaccaacgaggttttcgcaacgctccctggttccccggacaatatccggcgtacgccaacaggcgatttctgggtcgcattacattgcaaaaagaatttgttcacacgtgcagttttgattcacacttgggtcggaaggtttttcatgaacacgatgaagatggagactgtaattcatttcatgaacggaggaaaacctcatggaattgtcgtgaaactctctggagagacaggagagattcttgagatacttgaggacagtgaagggaagacggtgaaatatgttagtgaggcttatgagacaaaagatggaaagttatggatcggatctgtgtattggccggccgtttgggttcttgatacatcggtttatgattccatatga

SEQ ID NO: 140310 - DNA, 2335 bp, Arabidopsis thaliana landsberg
aaatctaaatcttgccttcctgactttctctctacgacagaatttttgaagcttctctctgcttatcgacacgatggttctcgaggtgattttccaattacttgtgcttatcttcgttgatgatccacgttgaatgctttttctcatcgatgttttcttgttgtaggcgactatgatatgtatcgacaactccgagtggatgcgaaacggagattactctccgtctaggttacaggcgcaaacggaagctgttaatcttctttgcggagccaaaacccaggtaataatttacgttttttcacttgattcgattagggtttttgggtttgcgtgagattgtgatttttagggatctttcttttttgcaattgcagtcgaatccggagaatacggtggggattttgacaatggctggcaaaggagttagagtattgactactcctacctctgatcttggcaaaattctggcctgtatgcacggtatgtatctctctctccaatctttctatttattattagctgtctacttagagcaattagaaaaaatctgttctttctctttatcattgagtttgacatcaatttgctacttgcgtcatcttttcaggccttgatgtgggaggagagatcaacttaaccgcagctatccagatcgcccagctagctcttaagcatcgccaaaacaagaatcaacgccaaaggattattgtttttgctggaaggtaccgaattgcattgtttttgctgagtaacttttgtatagttttatactgatgtttttcttctgcttctactttttagtccaatcaagtacgagaagaaggccctagagatagttggaaaaaggctgaagaagaatagtgtctctcttgatattgtcaatttcggggaggatgatgatgaggaaaagcctcagaaactcgaggccctccttacagctgtgaataacaatgacggtagccacattgttcatgttccttctggagccaatgctctctcagatgtgcttctcaggtaccatcccttttcttctttttttctaggttatgtagattgtaaaaggaacagtttcaacaatatccggcttggtaggtgcacttcatgtggttttgtgtgtttaggtcttttgagctctctagtcttgctttttatcaatgctgcaacaaaacatttagacagtgatttgaatcatagatagtgttttaacttttaaattttcttccagcacacctgtattcacgggtgatgagggtgcaagtggctatgtttctgcggcagctgctgcagcggccgcaggtggggacttcgactttggtgtggacccaaatatcgatccagaacttgctcttgcccttcgggtctccatggaggaggagagagcaagacaagaagctgctgccaagaaggcggccgatgaggcaggtcagaaagacaaagatggggacacagcttccgcctcacaggagacagttgctaggacaactgacaagaacgctgaaccaatggttagttgttacttaaaattgagtgtagcattcttatatagtcacaggcggagagattgttaatcatacaaccttttgtggcaggatgaggacagtgcgttgctagatcaggcaattgctatgtctgttggtgatgtgaatatgtcagaagcggctgatgaggaccaggatctggctttaggtaagtagaacagtgtggtaaaagtatatccatggcaatcaaaattggcatttttcttatatttttttatactccatgtgcagctctgcaaatgtcaatgagtggggaagagtcaagtgaagctacaggtgctggaaacaacctcttgggaaatcaagccttcatatcgtctgttctctcatcggtaagcctacataaaccttagtcagtttttttcacaagcaaaatgaaagagaaaagtagtagggttagctttggtactaagactttgtgtacacgcagcttcctggggtggtccaaatgatccgcatgttaaagaactactagcgtctctgccagacgagtcaaaggtgtgtctttgttgatgtttatgattacatctttttgttatttgaaaaagaagattctgataaatgtatatggttaaaatgacagcgtaccgaggaggaagagagtagtagcaaaaaaggcgaggatgagaagaagtgaagaaggatctgagagtctcaataaaaattcctcttgtttctttggtttgatagagattggaactgaatttaactaatctctctgccttgtgaaatttggttttttctctctctctcgcctttttataatgttgttattgtacgagtcaaggactagcttc

SEQ ID NO: 140311 - DNA, 698 bp, Arabidopsis thaliana landsberg
atgatcgctgtgatccaccaaggcaagatcgtcgagaaaggtaaactacctaacattcttattcactttttgcatatggatacacatgtgtgatagcaaaatttgatgaacaggttctcacacggaactactaaaggacccggaaggagcttattctcagctgattcgtctacaagaagagaagaaatctgatgagaatgcagcggaggagcaaaagatgtcatcaattgaatcattcaaacaatctagtctgagaaaatcgtctctaggccggtctctaagcaaaggaggatcatccagaggaaacagcagccgccattctttcaatatgtttggttttccagcaggaattgacggaaacgtcgttcaagatcaagaagaggatgatactacacaaccaaaaaccgaaccaaaaaaagtctccattttcagaattgctgctctaaacaaaccagagattccggtgctaatacttggatcaatatccgcagcagcaaatggcgttatccttccaatctttggcatactaatctccagcgtaatcaaagcgtttttccaaccacctaaaaagctaaaagaagatacaagcttctgggcaatcatattcatggttcttggtttcgcatccatcattgcatacccagcacaaaccttcttctttgccatagctggatgtaaactagtgcagaggatcagaa

SEQ ID NO: 140312 - DNA, 504 bp, Arabidopsis thaliana landsberg
caattcaaaaacttcaccaccgagcaatctcgccggaaacagagcctctctttttcaccgccgtattttcttcttctccaggtactccctcgccggattcttatgcgatcaacaatcaccgatgttatcttccccgatcattcctctaatttcgatgaacaacaatccctcatttttatttttgatcttcgaatccgattagtgtagagtctattcgattagtctttcatacttacgcgatcaatcaaaatgacacagttttcgaattagggaaaaaaatcgtcaccgaatccatggaattgagatattttaacgattttgcttcgtcaatttctgtgtagaaatgtgggattgaagaagttgacgaagaagacgaagtttaacaatggctccagtgaaaaaatcagataagaaagcaacattagatgctgctgcttggatgttaaatgttgttacttctgttggtatcatcattgttaataaagctttaatggctacttatgg

SEQ ID NO: 140313 - DNA, 637 bp, Arabidopsis thaliana landsberg
ccaaatgtttacatcctcgttttaactctaaaagatacatctgggaaagtccttgattctgaatcaagcattgtgggcattcggcaagtatcaaaggcctttaaacagcttcttgttaatgggcacccagtcgtgataaaaggtgtaaacaggcatgagcaccatccacgtgttgggaagacgaatatagaggcatgcatggtcaaggtaacatgttttttttttttctcttgtccagctctactttctcccttccatggtttacttaggacaccactatttaacttgtgtactctattgggattttgatttaccccttgtactgttcctcaggatttaattatgatgaaagaatataatatcaatgcggtgcgaaacagtcattatcctcaacatccccgctggtatgaattatgtgatttgttcggcatgtacatgatcgatgaagccaatatagagacacatggttttgatctctctgggcatctgaagcaccctgcaaaagagccaagctgggcagctgctatgctggatcgagtagttgccatggttgaaagagacaaaaaccatacatgcataatttcttggtcacttggaaatgaggctggctatgggcccaatcattctgccatggcag

SEQ ID NO: 140314 - DNA, 512 bp, Arabidopsis thaliana landsberg
ctacttgatcattaaggagttatctccatcatctgatgaggtctttaaattttactcaatttcaataccaacatcggggcacttattgtacgtatattttctgataagttgttggttttttcgcccataggttatcatcgtgacaagctctctgatgaaggatatgaatagtaaaattgatatgtatcgagcaaatgctatccgtgtcctctgccggataatagacggaacccttctcactcagattgagcgatacttgaaacaagccattgtggataagaatcccgttgtttcaagtgcagctttagtcagtgggcttcacttgctcaaggtaccttttacacaccaaaactattaggtagcttcttaattgtaatgttatgcttatattcgtatattgctgttttcagacaaacccagaaattgttaaaagatggagcaatgaagttcaagaaggtattcaatccagatcagcccttgttcagttccatgccctagctttgctccatcag

SEQ ID NO: 140315 - DNA, 210 bp, Arabidopsis thaliana landsberg
atgtctcgattgctctcaaaaaccctaattcccaacggaagattcctcctccgtcgtttcaacgagccggcgattacgacaccaccaaacgtcgtctgtttcagccgccgcttttcatccatcccacaagtcatcgagcttgaaatcgattctaaaaacgaagccgaagcagcaattctcaaaaagctaaacgaattcgtacgaaggatc

SEQ ID NO: 140316 - DNA, 2066 bp, Arabidopsis thaliana landsberg
ctcaacactacacactgtttcaaaatcagactactatgctcagctcagccgccaccgccacctccgtgagtgctcgctccggcgatattctctgcggcttgtttcgcaaaaaatccgtcgcgccttttcgttttactcagcctgtgagttctcctctgtgtgtggacgtgttcctttgtgtctttgtttcatgttctgctaaactttttaatattagtggaattttcaatgagcaggtctatcgtacgtcgctgtgtccaaatttcgttgctgttcgagccatggcagagtctcagactgctcagaggaatcagccgcaatcctcaggctcctctggtttacaatttttctttttgctgcaatttcaaattcagtgatcgattttcagttacgttttagtgattttcaaataatcgggctttaattgaatcaggggagaagcaagctttgatatctctatctgacaagagggacttggcttctcttggcaacggtctgcaagaattggggtatgtgttcttcacaactctctcttacttagaactatacaaattttggttttgtttctatcttatatgtaaatgattccttttttcattgatatttgtgtagatacactattgtttctactggaggaactgcctctactttggagaatgctggagtctctgtgaccaaagtggagaagcttactcattttccagaaatggcatgtttttcttttctcttatgctcgctgctcttgctaaaagttttggtcttgtgatctcgctgatatttatatttaagttttggtttataccattgttttgttgagtttagtatattaaacttagctctcctttttttttttcttctcttaaagcttgatggccgtgtgaaaactttgcatccaaacatacatggtggtatcctcgctagaagggatgtggagcatcatatggaagctcttaatgagcatgggattggtgagttttgacctttgattgatcctctacattaagcttgagactaagtcatttatagtgtctccttatgtttaactgtaccttttttttttttaattctatgacaggtacatttgatgttgtggttgtcaatttgtacccgttctatgaaaaagttactgctccaggtgggatcagttttgaggatgggattgagaacattgacattggtggccctgctatgattagagcagctgctaaggtaatacatatatctgtgcatatgagactttttctttacacttgcaagattattttcaagattataaatgtatattttctattgttttttcaacagaaccacaaagacgttctcattgttgtcgattcaggagattatcaagctgttttggagtatctcaaaggaggacagagcgaccaacaattccgcagaaaacttgcgtggaaggcctttcagcatgttgctgcatatgattctgcggtttcagaatggctatggaagcagactgaaggaagtatgtgattgtttttatgtgatcctccttacactagttatggcaattggcaacttacattgattgatattcatgtctttctcagaagagaagttccctcccagctttacagttccgcttgtacttaagagttctcttcgttacggtgaaaatcctcatcaaaaagctgcattttatgttgataagagccttgctgaagtgaatgccggtggtatcgcaacagcgattcagcatcatggaaaggtaagaaagtatgctactttttctgtccggtgtaatttacagagcaaatagttttaaactgccatttatatccttatcctcgctttcaagccttattatgtttaacttttctatttatttctgtgagcaggaaatgtcatacaacaactatcttgatgctgacgctgcatggaactgtgtgtcggaatttgaaaacccaacatgtgtagtcgtgaagcatacaaatccttgtggtgtggcctctcgtgatgatattcttgaggcttaccggctagctgtaaaagctgacccagttagtgcctttggtggcattgtagctttcaatgttgaagttgacgag

SEQ ID NO: 140317 - DNA, 1205 bp, Arabidopsis thaliana landsberg
actagctaaaactaaaaattgaagaaaaaacatgagtctcaccaccgacgaaatcgaagtgagagatttcgtggtgaaccaaaagaatggagtgaaaggactcgtcgactttctaaccctaaccacacttccttctccatacattcaacctcctcaagaacgcttcacttccgacaagatcctcctcggatcacctgtcccggtcattgacgtgtccaattggaatgaaccgcacgtggctagagagatctgccatgcagcgtcaaagctcggcttgtttcagatagtgaaccacgggatagctccggctgagttcaagggtgtgattgctgcggcgcgtgggtttttcgagttgccggcggaggagagaagaaggtattggagagggagttcagtgtcggagacggcgtggttgaccacaagtttcaatccttgcatagaaagtgttttggaatggagagatttcctcaagtttgagtatcttcctcaacgacatgacttcgctgccacgtggccttctgtctgcaagtaagtatagttactgtgttactaagtacataattagtgttttgaagtaacaacataagtagtgtttaaaattaataaatgtgtgtagggaacaagtgatagaccatttcaaaaggatcaaaccaatcacagagaggatcttaaacatactcatcaacaatctaaacacaatcatcgatgagtccaataaagaaaccctaatgggaacaatgagaatgaacttcaactactatccgaaatgtcctgagccaagcctggccataggaactggtcgccactcagacatcaacactctcactctcctcctacaagaagatggtgtattaagcagtctttacgcccgagccactgaggatggagacaaatggattcatgtccctccaattccgggagctattgtcgttaatatcggagatgtattacagatattgagcaatgataggtataggagcgtggagcattgtgtggtggtcaataagtattgtagccgggtttccattccggttttctgcggaccggttcatgattcggttattgagccgttaccggaggtgttagataagaacaatgagatggctcggtatagaaagattgtgtattcggactacttgaagtttttttttggaagacctcatgatggaaagaagactattgagtcgataaaattaccatgatat

SEQ ID NO: 140318 - DNA, 351 bp, Arabidopsis thaliana landsberg
gtgttgccatatcttatgaagtcattggcacagctagttataaagttaccaaaagaaagacagaacgttgtgcttggtgaattgtatggtcaagtggctgagtcagacgatgtgattcgcaagccttctttggtctcttggctacagtcactgaactacttatgttctaataaccgtactgaagttttagcttctggatcaacgatagacacttcgaaccagttggctgctcgactctagggatctcctcatagtttacaaacatgtgaaatagaataaagtttgtatgacttgtatcatggaattatgttgaaaagaattataaattaacatcatctccattttttgatc

SEQ ID NO: 140319 - DNA, 393 bp, Arabidopsis thaliana landsberg
cagttgtgctcgtggtagccccaaacggcaggtattgcttgagaaagctggtcactttcaggtgagttagagaaatacatacctagagaaagagaggagaaggtttaaagtatgttgacactgatggtcgtgttatgttgttataggtgccttacctggaagatccaaacactggagtcgcgatgtttgagagtgcagaaattgttgagtatctcaagcaaacttatgctgcctaagtgttcgtcttcctcactttataccgtatagatatatgttaattgttgtgtgtatgttcagcctactttctgttccaacaataaactgaacgcagttatctgtagaggttttaaatgaagacatgtacttatatataagtaaaggaattgtgacaat

SEQ ID NO: 140320 - DNA, 1373 bp, Arabidopsis thaliana landsberg
tgaaaattcaacggcgaagagaccaagagaacgatcagagatcaccgttggatcagtcgtcgtcgtcctaatctaacggccaggagactcttctccgatatcttgtgcttctttcccgttacgacttcgtcggaccccaaaacctaatccttaatctcccattcttcaccatggttaccagaagaaggtcaaagcttggatcttgagttttcaaaaatttcaaattcggcttaaaaatatgatttgtagctttgagattttgagactttgggttttacttttacaggtcgaagaagaagaagaagacgaaaaggaagaaacagagtagcaaggaaaaagaaaagtatcaaactttcataaaccttccttgtgatctcttacaactggtaatttctcgtctcccgttgaaagataacatccgtgcttctgctgtctgcaaaacatggcacgaagcttgtgtttctcttcgagtgatacatacatctccttggcttatttacttctccaaaacagacgattcctatgaactttatgacccatcaatgcagaaaaactacaatcttcacttccctgagttatccggttttcgagtttgttactccaaagatggttggttactcatgtacaatcccaattcttatcaactccttttcttcaatccctttactcgtgattgcgtacccatgcctacgctttggatggcatatgatcaaagaatggctttctcttgtgctcctacatcaactagttgtctcttgttcactgtcacttctgtcacttggaattacatcaccatcaagacatattttgctaatgctaaagagtggaaaacatctgtgttcaagaatcggttacagcgaaacttcaacactttcgagcagattgtcttctccaatggtgtcttctactgcctcacaaacaccggatgcttagctctctttgacccatctttgaattattggaatgttcttcctgggagacctcctaaacgtcctggaagcaacggatgctttatgacagaacaccaaggagagatctttctcatttatatgtacagacacatgaacccaacagtgcttaaacttgaccttactagctttgaatgggctgagaggaaaacactgggaggcttgacgatctacgcaagcgctttgtcttctgaatccagagccgagcagcagaagcagagtggaatatggaactgtttgtgtctctctgtgttccatggattcaagaggacttgcatatattataaggttgatgaagagagtgaggtttgcttcaagtggaaaagacagaatccgtatgagaatatctggatcatgccaccactcaacctcattgatctccctttgtttgatcatcgtatctag

SEQ ID NO: 140321 - DNA, 353 bp, Arabidopsis thaliana landsberg
caaaagaagagtagacttcccatcatcctccgctataatgcgccactctccgcgttatctataatacgccagtatgccgtgcccgctataatgcgcaagtctccgtctcagcctctcttcgccgtctgatgtctgatcttctaggtcacctccacaaattcgaacaagaatttgtctttatgtgcaaaaccaaaatgggagtcaatgcttcagagccaaaacgaacacgatcgcgaccaagtcaatcgcaggggaggcatccgtcgacgagacgatctccgtcaacgagcaacaccggcacaacaacaaccacgacgacatcgaattctaacaaaactggtgcctcctcttcc

SEQ ID NO: 140322 - DNA, 476 bp, Arabidopsis thaliana landsberg
aattattccgtgacagcaaacctgaagatgataaagttcctaaagaagtggatgatgaggacaaagatgggttccttaagaaacttttcagggaaaaaaatgatgacaaaagacatggtagtgaaaagaatgaagccaatggaacagtgtatgccgataagaaatctggtgaagaggatgagagggaggggtttttcaaaaaattctttaaggaaaaatctgatgacaagaaagacattgtcaaggttgatgacgggaatgaaagtgagggtgatgaatctccagaattttctcttttcaaaagattattccgtatacatcccgaagatgcaaaacctacttcagaaaatgaaaatagcagcaatggcttagttgaaagcagtcctgggacagaaaactttttccgcaagttgttcagagatcgtgaccaatctgttgaagattctgaactgtttggatcaaagaaacacaaggag

SEQ ID NO: 140323 - DNA, 2317 bp, Arabidopsis thaliana landsberg
atggcgcagatccccagcttggagaatgctcctctcaatctgaaatccattaggtgactctattttcattacttagagattgattgatcgtttcttcttctttcctctcacatcatatgtttctcgtttcttattcagggacaagtctgagagggagctcgtaaacttgcttaaagacgtaagtctcattactctatcttttttttttttttgggttgggagacgaaagttaggaaatttcgcggattatatttgatcaaacatatctcttttgagaatgtgaaaataaaaaccaatgctttgtctctcttttactatgaattcttctcttttctatgcaattacttcaccaatgtcgtatgattgagaatcattaggatgaatagacttcggagatgatttaccgatttctcaagacttttttgttttctcttctttttggtgtctttggttgtaggttcgtggaactaagtgtttggttattgatccaaagctcagtggttcagtctcattgatcatcccgacctctaagcttaaggtaatttcgtttttcttttaaaggttgagtttggttttaacattagtggtgatttgattttttgttgttctttgcttaacaggaacttggtttggagttacgacatcttactgcggaaccagttcagactgaatgcacaaaagtgatttatcttgttcgctctcaacttagctttatgaaattcatagcgtctcacattcagaatgatattgcaaaagcgattcagagagactactatgtttactttgttcctcgtaggtctgttgcgtgtgagaaggtatgtggttatttgcgtcctctaatactattgttgctttcgtttgcttgttttattacttttttgaataagggtgataaaaaaaatcattctgctattttcagattcttgagcaagaaaaagtgcataacctggttacagtgaaagagtttcccttgtatatggttccactagatgaggatgttatttcatttgagctcgagctctctgaaaaggtgtgtagaactctcatgagtccaattcttgtaactttatgtgccattttccgtgaggccttaaaatcacagctttcctaattatcttgttcatgattttttaatgataggattgccttgtggatggtgatgttagctccctttggcatatcgcaaaagccatacatgaacttgaggtttaaacattttcgttattctttacatctcgtcatcacaactatcatctcattactaactcttcctatagttctcttttggagttatatcaaaaatgagggcaaagggcaaagcatcagttcgtgttgcagacattctaaaccgcatgcaagtggaggaacctgtcaattcgaatgatgtaaaatacctgcaatagtttgaatgtcataatcaccatttatttcgctatcttgtttttgtatccttctttcactattctaaatgatgtttgatctatatcacgtgggaaggcctgaagtggatacactcattctattggatagagaggtaagattacaatgtgtgtttcctgttatttgtaatccttaaatacaaagatatccttcaaggattgaatgttaaagagttggtgtgatgtaatcattgggaagtctgaattatgttttatatgacacaaacgatggatttggaaatgtgcatataaaggttaagagatatagaaagtggttaaaatcccacttaatctggaattgggactggctgataccttgttaggcggtggttaccttttacttgacatggcgctattagtttcaaattttacgtttctgtttcaggttgacatggttactcctatgtgttcccagttaacttatgagggactaatagacgaggtaattgtcacaaattttggatactgcagttttgactagaagtagcttaagtagattttgcagtcactgcaactggtggactttttactctctgaggaagtgacactgacttcatgtatcatacttttactagtaattatgttgagtgttttcggtttctcttctcgtaagaaagtcttacacaagtgtgagatccagattagcttctgcgggctttttcattatcatgctgagttgatgtacttttctggaatttggggagggaacataatggtgtgaaactatttggtttcattggatgcaatgataaccaacaacaacacaattttgacttaagttatgctggctgattgagttttcctgcgagctgactccaacctttctttaaagattttgcatatcagcaatggagctgtcgaggtcgagtcatctgtga

SEQ ID NO: 140324 - DNA, 2793 bp, Arabidopsis thaliana landsberg
atggatccaattgaatcagtggagtacaatggctttgaaactaccaatggtaactctcacaacgacgaccatggttggaagaaagtagtgtacccaaaacgtaaccggaagcaaaaaccggcggatcaagcggcggcgacgaagaatggtgtcaccgggaatctaattcccaatggtactttatccaatggaggaggcaacgtcttccgttctcttgaggagcaagctgaaggtcgtcatctacggatcctcgccgcgaagaaagcttccgatacggcggatgtgtcggacgggggaagatctaaatggcgatctaacgggtacggcgacgaagggtatgattttgatgacagcgacagtgaaatcgcggtggggaaggagaatttgaaagcggaggaagttaagaaaccgaaggttaagaaggtgaagaagcctaaggttactttagctgaagctgctgctaagattgatgtatctaatctcgcagctttcctcgttgaagcttcggtatgtgcatagttgttaatgtcgatttgatctgtttagttttagtcgaaattgtgatctttttgctaagtaaaaattgaaactttgaataggaatcatatgcgagtcaaccagagattcagctaatgagatttgctgattactttgggagatcactctctcaagtatcatcagctcattttccttgggtcaaaacgttcaaggagtctcctttatctaagttgatcgatgtgagcactatctctctgttcatctttatgattctgaatttgagtcaaaggtttagctttcgtaatggtgtagctatgggaatgtgattgtttgacttatatttgaacagattccactttctcatattcctgaagcagtgtataagacatcagctgattggattaaccaacgtcccattgaggcacttggagcctttgtattgtggggcttggattgtattcttgctgacttggctgtacaacaaggaggtgtcaagggtggtaagaaaggagcacaacaggcttcttcgaaatctcaggtattatggtagctgaacgttatagtcttgttgggctgaactacaccaattagattgcctaggttttgtggatgcatatgtcgatttttggtcatactactactcacttttcttttatcagactattattgtcagtctggttgaacttgttatcaattaccattgtgttactagctttaccgttttttgattcttttgatgaataggttgcgatatttgtggcggtagcaatggttttgcgtaagaaacctgatgctttaactaatatattgccaactttgagggagaatcccaagtatcagggacaggataagcttccagttacagtttggatgatggctcaggtgtgtgaaggtctattcataatagtataaacgaagaaccaaaatgtattgttttgatgattgagatgattctgaaatttgctttctcttaactgccaactatgcacaggcctcccaaggtgatatatcagtaggcttgtactcgtgggctcacaacttgttaccggtggtcagtagcaagagttgcaatcctcagtcaagggatctcattcttcagttggttgagaggtgagttaagtttttcctttgatgtcctgttttctatgtgatgattatctaagcttggttattgtgtttttattgcaggatcttgtccaacccgaaggcccggaccatacttgtaaatggggctgttaggaagggagagcgattgattccacctccttcgtttgagatcttggttcgacttacattccctgcatcttccgcaagagtgaaggtaaagaaacgttgagatttgaatacaatatttaagtgaatgcggattggttttgacctctagaatggtttgacacgcaggctacagagaggtttgaggcaatatatcccttgctgaaggaggtgtctcttgctggtgctcctgggagtaaggcaatgaagcaagtcacacagcaaatattcacttttgctctgaaagcagccggggaaggtatgacaaaactttctctaaatttctacctacacatcctctagaagacagtgcaattaaaatttgtaatgtcttggtacagaaaatcccttattagccaaggaagcggctgcaatcactatctgggctctcactcaaaatgttgattgctgcaagcattgggtaagattcactctttcttttcccacataggaggaggttattcgtgagtggatttttacttattgacgtttccggtttgtgggtcaacaggagaatctttataccgacaatttgaaagccagtgttgctgttcttaaaaagctcattggcgagtggaaggagcgttctgtcaagctgactcctgctgaaaccctcactctcaaccaaacaatgaagagcttgaggcaaaaggtttcaaaactaatattcttttatatctctcggccaatgattcattactcattactcatcaactgttaaatacccaacgatgttttactaaactacagaacgaggaagctcttactgagggaggtaatggtgtaagccagtccctatacaaagacgcagacaagtactgcaaggtgatcgctgggaaactctccagtggtggctgcatcaaaagtatagctaccactgctgcacttctagctgctactggttttgctggtgctgctgctctgtctgccaaccctgaggctatagcttacctaaagaacctggtggagtcattggacatcaacaaattcaccgagacagttatgacagcattgaagaactga

SEQ ID NO: 140325 - DNA, 3526 bp, Arabidopsis thaliana landsberg
  unsure (1)..(3526): unsure at all n locations
ccccaaatcacatcttcaagaaccctaataaattcccagagattcctctcatttaatcacttcagattcgaaaaaagttctctctttttcccaaaaaaaactttctcatacaatggactctactaccacaccttcttctctccgttcgaatactagatccgctttgcgtctagctcgaaacaacaaaactctcgtaaaatctcacattccatctctcgatttggttttatcgtctccgaagaacaacaacggtactccttacccatcacctgtttctctcagttcaccatcttctcctgttactcttcgtgagattctccttttatctccttcccctcttcgtaaatcgagaacccgtttaagcaatcggttcgatatggaagctgcggaggctgctgtgacggcacgacggagtaagacgaagggagggcaaaatggtcttttggcctcgccgtcgccgaggaatttccggaggtcgagacttaggtcggaggcgatggtagatacaaaggaaaatacggagccaattgttgtcgtgaccgatgaaaagaaacaaaaacagaggaaacagaagaagttgggtcgatctaagaaggagaagcacagttctgttcctctgttagcttctcctagtccatcttcagatcaacgtatgtccttcctctgtctattagctcattcgatttcactttcgtgctctaataattgctcaatgatttgtgtaattcagctaaagatgtttgtcaaggtgatttagagcggattagagagaatataagcgatttgattatgtggagagatgttgcgaaatcaacactttggtttggttttggctgtatatgtttcctatctacttgctttgctgctaaaggatttaactttaggtaacattgatttctctgtcaaggtttatctttctagctttaatcatttttcacattcatgagttgataatgaaactttgtgtggtttgaagtgttttctcagcgatctcctatcttggacttttgtttcttggggtatcgttcttgtcaaatactcttcgccaaaggtacaaacttttaaggtcccagtacataaatatcagcttgaactgcagttgactgaagttttgatccatttgttaccataaagggttactgaagaagcgtggagagagcttaaattgagtgaagatgatgtattacgaatagctagacgaatgcttcccatcaccaatttnnnnnnnnnnnnnnnnnnnnnnnnnnnnnnnnnnnnnnnnnnaatgacactcaaagtagaatttacaaaactttgccattctcataaaacttctctccaatgaatgtgactctcacgttgattttgtccttacactgtttttactttgatttcaggtggcaccttttgttctaatgggagctgagtatggttacctcataacattgtggagattatgtgctttttgtatgattgttgaaacactatatgtcaacattactccaaagaaagctaaactgttttctttagttgtatctagtagaattgacacagagtatgcattgtttctttaaacaggtttcttccttagcttcactattccaaagctatattcatgttacgcaagtcagcttaaccaaaaaggtaaactctattaacagactgcgtagctctttgatggttccaatgattgacactaaggattctttgatctttgcttatgtgtagttgagtgtgcacaaaggagatttgttgaagcttggggagtttgcacacacaagaaattcgtagcaggctctgcagttactgcattctggaatctaacttctctcaagacccgttttattgcagtgtttatcatagtagtagtaatcagatacagacgacagaatctacagttagattccgaggatgaggaggagaagaagcaacaagaaaaaactcacccggagcaacaagaatcgccggaggataagtcaacttcaccgcggtcagcagaagaagagcaagcgttggtgctagttgcagaaaccaaagcaccaaagaagctttattagtctagtcactagtgtcttttcagtatccacctgtgtaataatatttcacatttacgtaataataaataaagagcagtcattaatatcaaataataaattgacacgtggcaagctcatgaaactgtgagaagcaggtgataaaaactctcgtccgtcttgggagagagcacatcgtcgtcttttctttataaaccctaaattcccatttctcttctccaaaagttttatcgattccaccaaattagggcgaacgcgaaatctgggtattgtaatttgaagcgatggcgacgactggaactgctgcggttgcgacgggaacttcgacggtgaagagaaaaccggtgtttgtgaaggtggaacagctaaagcctggaacgactggtcacacgttgactgttaaagtcattgaggctaatatcgtggttcctgttacccggaagactcgtccagcgagttctctgagtcgtccttctcagcctagtcgaatcgttgagtgtctcatcggtgacgaaactgggtgtatcctcttcactgctcgtaacgatcaaggttattgtttctccacttttctattgctttatggatatagaaatggtgtcttcgtagtttattagagtgataagtcttatcctttgttgttctctcgtttgtcttaatcaatttctattttgagcaaatggtaaatgtgtttctattagtactatttggtaaatgatgtatcagttattgtatgtgtatttagtgatgtctttgtgaaattgaagcttgaaagaatcttggccttgagggtctgtaactctgtatagtcttacctaatgatgaaacttgcttggttagatgttgagttatgttcaattgaatggtctacattatcccaaaactttcatagcttttcataatgtgaagttttgttataccagttttcgtgcaattgatgtggctactgattagctctaatgatgttattggtttttttttttgtgtgtgtgtgtgtatagttgatcttatgaagccgggtgctacggtgatactgcgcaattcaaggatagacatgttcaagggtacaatgaggctaggagttgataaatggggacgcatcgaagccactggagccgcgtctttcactgtcaaggaggataacaatctgtctctcgttgagtatgaactgatcaatgttggtggtgatcagtgatcttttagtatgtttatggaggttaacccctgagagtgttgggttctgatttttctaccgtgaaggtctttgatttagatgatgaagattgtatgactggtccagagttgcttgtaggaatgatgcttgttcttttttaccttaaaatatgcggtcatgatcttgctctggagaagtattgagcctgcggtaatggcgtaatgcaattgttccttttaatttgtgttgatgtaagttaaaggccattgagagcttgcttgtgcactatctaatacagtaaaaataagtttttctttct

SEQ ID NO: 140326 - DNA, 1340 bp, Arabidopsis thaliana landsberg
gcaaaatcccggaacaaattgtgtcgttccacaatctccggttctttgatttctccggaaaccggtatttggaaggtccggctccggttatgagcagtatcaagcttcagacatctccacatcaaacaagacacattcttgctgaaactccaacttcaagtcccacgaacaaacccaacaacagcactacatcaaaagctccaaagggagctccaaaaccagggaagttgaagaagaagaagaagaagagcaagaagaagaaagtagcggcatggatcttagggtttgtcgttggagccataggaggaacaatctctgggtttgtcttctcggtgttgttcaaattgattattcaagcaataagaggatcagaaaaaccaccaggtccttccatattcagcccattgatcaagaaagctgaagatttagctttcttggagaatgaagaagcgttagcttctctggagatcataggaagaggaggttgtggagaagttttcaaagctgaactaccaggaagcaatgggaagatcatagctgtgaagaaagtgatccaaccgcctaaagacgccgatgaactagcagatgaagattccaagtttctgaacaagaaaatgaggcaaattagatccgagatcaacacagtcggccatatccggcaccggaatcttctcccattgttagcacacgtgtcaagacccgagtgccactacctcgtttacgagtacatggaaaaggggagtttgcaagatatattgactgacgtacaagctggaaatcaagaactaatgtggccagcgaggcacaagattgctttaggtatagctgcagggcttgagtaccttcacatggatcataacccacgaatcattcacagagacttaaagccagccaatgttcttcttgatgatgacatggaagccagaatttcagatttcggactggcaaaggcaatgccagatgcagtcacacatattacaacctcgcatgttgcaggtactgtgggatacatagcaccagagttttatcaaacccacatgttcacagataaatgtgatatctatagttctggagtgattcttgggattctggtgattgggaagcttccttcagatgagttttttcagcatactgacgagatgagtctgataaagtggatgaggaacataataacatcggaaaatcctagccttgcgattgatccgaagttgatggatcaaggattcgatgaacagatgcttctggttctgaagatcgcctgttactgtactttggatgatccaaaacagaggccgaacagtaaagatgtcaggaccatgttgtcccagatcaagcactag

SEQ ID NO: 140327 - DNA, 1950 bp, Arabidopsis thaliana landsberg
aacttgtattttctaaaaggaactggatacgtttaaaatacatgggttctactgatgagcccggaagttttatgcatggagttaccggtagagaacagagctatgctttctcggtagatggtagtgagccgaccaacacaaagaaaaagtacaatctgccggtggacgcggaggataaggcaacggttttcaagctcttctccttcgccaaacctcacatgagaacgttccacctctcgtggatctctttctccacatgttttgtttcgacgttcgcagctgcaccacttatcccgatcatcagggagaatcttaacctcaccaaacatgacattggaaacgctggagttgcctccgtctcggggagtatcttctctaggctcgtgatgggagccgtgtgtgatcttttgggtcctcgttacggttgtgccttccttgtgatgttgtctgccccaacggtgttctccatgagcttcgtgagtgacgcagcaagcttcataacggtgaggttcatgattggtttttgcctggcgacgtttgtgtcttgtcaatactggatgagcactatgttcaacagtcagatcatcggtctggtgaacgggacagcagccggatggggaaacatgggtggcggcataacgcagttgctcatgcccattgtgtatgaaatcattaggcgctgcggatcaacagcgttcacggcctggaggatcgccttctttgtccccggttggttgcacatcatcatgggaatcttggtgctcacgctaggtcaagatctgccaggtggaaacagagctgccatggagaaagcgggagaagttgccaaagacaaattcggaaaggtatatctctatctacatgaatatgtcaaaacaagttaggctaactatgtcatagatggatcggatataataggctaactcgtgatatcgtataaatcgtgtagattctatggtacgccgttacaaattacaggacttggattttcgttcttctgtatggatattccatgggagttgagttaagcacagacaatgttatcgccgagtacttctttgataggtttgttttctgtctcgattagaaattgacaacttcacatatattcaggaataacataagagtaaaatttatattcccttttatttttattttgtcaatcgttcccttttatttaaactaaaaaaatggtatgttcaggtttcacttgaagcttcacacagcggggattatagcagcatgtttcggaatggccaatttctttgctcgtccagcaggaggctgggcatctgacattgcagccaagcgcttcggaatgcgagggaggttgtggactttgtggatcattcagacgtccggtggtctcttttgtgtgtggctcggacgtgccaacaccctcgtcactgccgttgtatctatggtcctcttctctttaggagcacaagccgcttgcggagccacctttgctatcgtgccctttgtctcccggcgagctctaggcattatctcgggtttaaccggggctggagggaactttgggtcaggactcacacagctcgtctttttctcgacttcgcgcttcacaactgaagaagggctaacgtggatgggagtgatgatagttgcttgcacgttgcctgttaccttaatccactttcctcagtggggaagcatgttcttccctccttccaacgattcggtcgacgctacggagcactattatgttggcgaatatagtaaggaggagcagcagattggcatgcatttaaaaagcaaactgtttgctgatggagccaagaccgagggaggcagcagcgtccacaaagggaacgcaaccaacaatgcttgatcatgtgtcattgatatcaagaaattaataatttcacttatgtgaaatggacataaactgttggaaaataaagaaccatttctttcatcatttgcttt

SEQ ID NO: 140328 - DNA, 1269 bp, Arabidopsis thaliana landsberg
tggacaagtgttggttttgctcttacacaatatatcctggtcatggtattcaatttgtccgtaacgattccaaggtaattaattcggcataaatcttaatcaacctgctttaattcacagtaaatagtttgcttgagttttatattacatagtactcttagattctatatatgtgaatgtctccttgctcgtattctctagcttaaatgaacaatttttgatatatgtcgttatttgtgtgagtctttagctaaaaaaatgaccattttgtatattcttacaatatgtttatgtgtctttagctaggagtttagtatataagaggtttacaaatgttctgataaaaatttgagcataaatgttaatcaaaacaccttattgtttgtatgtcttgttatcgattagctttgtttcttatgcgttattgtaattcacttacaagcatggtatcttctcctttgcagatattccggttctgtaggtcgaagtgtcacaagaacttcaagatgaagagaaacccacgtaaagtgaaatggactaaagcattcagagctgcacacgggaaggacatgactaaggtacgtgttcatttgagcaaaagtttttctttgtttccttggggttgtctagttgatgctgaccctcctgcttgtctttctttgtttactttaccctaaaaggatacaacatttgagtttgagaagaagagaaacagacctgagagatacgacaggaacgttacagagaatacactcatggccattaagaagattgctaagatcagaaccgcaagggaagccaaacatatcgaaaataggtatacattccttcttcttcttcttctagtctcctgcaaatccttgataacactgcttgtatgattttaaaactagactctgtttttgattatgattgtttttgttttttgtatgggacttaggttgaagccaaacaagcagaagaaactcaatgacgatatgaaagaacttgatcagaacattcatatggtccaggctcccggggcacagaagatcaaagttgatgtttccgaaaagaagtctgttcaaaacgaagccatggaagagtgattctgtggtaacaatatgatccgtctaaaagcctctcacttactctgatgctggtgtcatcttaaagaacaagtcttctttagtttctcttaccatttgtttttggaagtctttaaaaaaaaaaaagttttgggtttttgtactgataaaacggctttaagttgctatcattttgcaatgt

SEQ ID NO: 140329 - DNA, 597 bp, Arabidopsis thaliana landsberg
attgaccgtcgatgacacacccattagagagtttaaaaactatgagtctctcggtgtcttgtttccaaagaacaagccgatgaggatgtacgcgagtttatggaacgcagacgattgggcaacaagaggcggtcttgttaaaactgattggtctaaagctccattcatggcttcttacagaaacattaagattgactcgaaaccaaactccaattggtacactcaagaaatggattcaacaagccaagctagactcaaatgggttcagaagaattacatgatctacaattattgtactgaccataggaggtttccacagggagctcctaaggaatgcacaacaagctcatagaatctcaaattatattctatttatttatctacacttcctctctttcttttatgtgaaaattgtgaatgctctgtttctagcttgtctattatgtccgagaatttctttttctgtttttgattcttttcgttgtatatctttgtccaataaaggaaatgatgtgtctttactcttatagatatgtataaaaagatgtccctgttttatttgttaaaaaaaattgtttatgataatgatagttcttt

SEQ ID NO: 140330 - DNA, 2068 bp, Arabidopsis thaliana landsberg
  unsure (1)..(2068): unsure at all n locations
agaaaactaaagaaaagggggctcttttattcaaagatccaaactttgacaattcaaaatccaacatagaacacggatcaagctttcaaattcagacagagatatgtcgtgttcatcctcatctggatcagaggaagacgatgagggtttcgatgcttaccgtaaaggtggatatcacgccgttagaatcggagaccagtttgccggtggccgttacattgctcagagaaagcttggttggggccaattctccaccgtttggcttgcctatgatactcgcacttctgtacgcatctctctccttatatcttgctttactatgccaacaagatcttaaatgcagaatttgatttcgtaaatttgttttaagcatgttcccgttagtcttctctaattcctttcatctgggctttgatctgttttggtacaagatcttggcttcgtgtgaattaatcttttagataagcaaagttctgaattttgtgggtctgatttggcactgcactctgtagttgaccaaccattgcagtttgtttaaatagcttagtaagggaaatgaatgttctattaaatggcgctgttccttaaatgccaacgttactctatgggtgtctcattaactataggcttaatttaatgatgcgctctctaatgagctctatctgtggagtgcttttaccttgtctgaagcagggaaacacttctaacgcctagattctgatgtttgctcttagaatgtaagatgcccatgactttatattaaggaattccgctgaagtttttctaaaagttacgaatngaaattaaattctacaagctccttgtcacatgtaacctccctcttggctttattctcattagttataataaaccatgtgtttttgtctgttgtagaattatgttgctttgaagattcagaagagcgccttacaatttgctcaagctgcacttcatgaaatcgaacttcttcaagctgctgctgatggggatcctgaaaataccaagtgtgttattcgtcttattgatgacttcaagcacgcaggtcccaacgggcagcatttatgcatggtgctcgagtttcttggcgatagcttgctgcgtttgattaaatataaccgttataaagggatggagttaagtaaagtgcgggagatatgcaaatgtatactgactggtctagattatttgcaccgtgaactcggtatgattcactccgacttaaaacccgaaaacattcttctttgttccaccattgaccctgccaaggatcctatcagatccggactaacaccgatactagaaaagcccgaggggaaccaaaacggtacatcaacaatgaatctgattgagaagaagttgaagaggagagcaaaaaaagcggctgctaaaatatcaggaagaagagtttcgatagtaggtttaagtgaaacaccgaaaaagaacaagagaaacttggatgggattgatatgagatgcaaagttgtcgacttcgggaacgggtgttgggctgataacaaatttgcagaagaaatacaaacaagacagtacagagctcctgaagtaatacttcagtcaggttactcttactctgttgatatgtggtctttcgcttgtactgcttttgagcttgctacaggcgatatgcttttcgctccaaaagagggaaatggttacggagaagacgaggtaaagatggtttttaagaaacctcatatcgttttgtaccaaagagttattttctctttatcagctgtttaacacattcttctttactgtcttcaggaccaccttgctcttatgatggaactcttaggaaaaatgcctcgaaaggtacccggaaaaatacttggtttctgtctatctcttgattgatcggttatagtctcgttgatacttgtgatttaactagattgccattggaggtgcgagatcaaaggattactttgacagacacggcgacttgaagaggatccggagattaaatactgccactcgaccgtttctgattgataatacaagcttccagaagcagaagcacgagaatttgcggattttctctgcccgataa

SEQ ID NO: 140331 - DNA, 1965 bp, Arabidopsis thaliana landsberg
taagcatcgtgaacagtccattatgtcatttgaagttcgatgattcggatggagtcaaagtcaacaacattacgatctcttcgccggagaatagccctaacaccgacggcatccacctccagaacacacgtaacgtcgagattcaacactccaacatcgcttgtggtaattcatattttcttacaataaattttcatttattttctttattaattaactatatagttccgatccatagatcattaacatttaacactaaaacgcttttcttaggaaaaaagaaagattttaaccagaaattataacaaagaaagaagaatatattattattacatatatacagttacaaaatgaattttgaccgttccattgttctaattatgcgcgactctatcattctgcaatgtgaaatacataaattgatatctatcaattacatgtatataattgaacatagtggttgtctcgttgtacacgccaaagtgaaataaaatgttaggacgaaaagataatgtatttttttctttcgtaaaagtagtattatagaataaaggcattaaacaagaaaagacatcattggtttaataaaaaacaccatttaatatcggtatatctgtcaccaaactaactttttatacagacaataggcaagcatgcagaatgaaaaggctctcttttcttttatttattgttaatcaattaagaaaagttacatggaccagagattctaaatgtttaaatactaaacaaaaatcatattataaacttcaataatcagtaatatgttataaactattcatctattttgggcaggacttaattctaaaatttctatttcaatctttctttaataagcaactttttacgtatatatatatatatatatatatataggagatgactgtgtatccattcaaaccggctcctccaatgtacatattcaccacatcaattgtggccctggccatggcattaggtatatgtatacataataataaattttcaattaattttcaatctattactttttcaattttttactgattttttttgtttgtttggtgtatatttgctttggtttgtgatcacagcataggtggactagggaaagataagagtgtggcatgtgtttctgatatcattgtagaggatatctctatacaaaacactcttgctggtgttcgaatcaagacttggcaggtacatatatagataccacatcataccttatataaataaatgattttgtgacttctgacccacgtaaatatagagaccacattatatgatattattgaaatatataaaactaaaactaaaagatagaaatgagaccttatatgaatagttgtaatttctgagaaaacttaacacgcaagtctttctacgtataggggcctaatctggctttatgttcaatttttttttgttataatataaactaatcacgtttgtgtatggtttagttcggatttatttttcgatgtccattgtaatttttcttgtgaatcacgtgtatatatgtatccgcagggaggattaggggtcgtcaagaacctaacgttttcgaacattcaagtaaaggacgtgaaggtaccgatagtaatcgaccaatattactgcgacaagtccaagtgtaagaatcagacgcgtgcagtgtcgatttccggcgttaaatacaacaacattgtcggtagtttcacggtgcaaccggtacgtattgcatgcagcaacaacgtgccatgcatggacgtggatcttatggatataaggctacgaccttctggaggaatcagagggttacaaactcatcagcaacaacaagctttgtgttggaactcatatggcaaaacacaagggcctttggttccttctagcattggctattgcttgaggaagagtaatattggtggttattattcacaaaaagtttctcggtcctatgacaagatttgcccttcataa

SEQ ID NO: 140332 - DNA, 262 bp, Arabidopsis thaliana landsberg
ttattctctcattctttcttcttcattattcatttctctcgttattcgtttcgtattttgtttgtgtttatgattttacctccttagttgctgtgagatcaagaagtggtgaaagaaaagttactaaatctggatgttatttgattgtcgtcgttgatcttgagctatgaggagcgttaataatagtagtgtcgacaccgtgaacgccgccgcttccgccatcgtctccgctgagtctagaacacaaccgtcgtcggttcag

SEQ ID NO: 140333 - DNA, 1074 bp, Arabidopsis thaliana landsberg
attgaccggtctgattacctgtggcataagacaaggtagatgccgagttgtctatttcatgatctaactaacatcaaccattgaagggaaagaattcctacaagatagatattcaagatgcttttacatcataatttgactgaattaccggaagttgtttgttgtatgtaatggctttttgcttctttgtcaaccaaatgtagaataagcgtatctgaagatgatatctcgttctggaagaaaaatggacctaactcaacagtgtcgattgatagcatgagggatgtgttacgtgtgtttgttaacaaacaactcgcaggtaatttacaacactcactcctggtttttatgcatgtctgcaattgtacaaatgcactgctcctgtattgtgtctgttcgtggttgggtatgccgtctcttgtgattcgctgtgtctaactatacatgagggttatagctttcataaagtgcaacgctttataaattgttttctcccatcttgtgctaactttttcctcctgctgaatggaagtaaaggcagtattgttggtcactgggtgaaggcagtgcagcctgtacgatttatacagggaaacaatgatttacttctgttgactcaaacagttggtttacaggttaatatctactacctaatttctctttttatcttttttcttacagctaattgtgatcactttcgactttgtggcacagaattatggtgctttcttggagaaggatggagccggttttagaggcaaagctaagcttactggattcaagaatggagatttagacctgtcaaaatcgtcatggacgtatcaggtgtagttagcgtgcatatggtttaaaattatatgtcttaaaaaaagttgaacgttgtggattcttttttctttctctcgctttatctgaaatatgaagattattttggaagcattgaatgtttggcgtttgttgtaggtgggattgaagggcgaggctgataaaatatatactgttgaacacaatgaaaaagctgagtggagtactttggagaccgatgcttcaccttcgatcttcatgtggtacaag

SEQ ID NO: 140334 - DNA, 1733 bp, Arabidopsis thaliana landsberg
tcatcacaataactcgaagaaattgattcatcacgaagcgaaatcatacaaaggtacgtctaacaatctcaaatcttaacaatcaaaccaaagcatataatattctcttaccatttagttttaccacaagcatagtgcctacaacctttctcatgaaaaatggatctttctgttacaaaagaaaaaaaaaagctgattttaaacgtttctaagaaatagagggcttaatggcaaaatgttgaaacattttaaggctccaaagcgaaaaatttaaccgccaaagcgtaggtttccccccaagattttgaaaatatttaaaaactcccaccaaactttttaattttaaaactctaatcccattctattcaaccagatttcgtttctttcgtcctttttttccttttgcattctctcgtcgtcgtctcaaggtactttacttctctttttctctcttccaatattcgagatctgtttctgtctttcttggatcgattctcgattctgttcttcgatttagtcttctttcgaatagatctggtagatttaagcattatactcttctttttctgatttcgtttttgtttttgtttgactgtgtacggttagatctagaagaaggaaacaacaatttcaagagacatggcaggcaaaggtggaaaaggactcgtagctgcgaagacgatggctgctaacaaggacaaagacaaggacaagaagaaacccatctctcgctctgctcgtgctggtattcaggtcatctcttaaaccctaatttcgacgaccttgtttgactctgattcgttcctaattcatcagtaccatttacatttttaggaatagatttgtttttttggttctatgtaaaagcatgaggaagtaaacttgctggatatgtgtaatttcttttactcggtaccatgttgatgtttttgtcaatgtttgtgttaattatacaaatttgtgttgcttgctcactggttgcttggtcatctgagaatacatgttgttgttgtttttgtctccccacattgtttaggtagtgtcttatggtatgtgcccaaatgttcccttactctgtagcttactattgatattgatgagtcatgagggttttaatatgttttgtttggttctagtatgtgcaatgttctgttttttattaagttatactattttaatggaactatttagtgtgcgctgatactgttttgacattgatgctgtgcatagccatacaagtagagagattggtcacactgatactgtttttttttttcagtttccagttggacgaattcacaggcaactgaagacccgagtctcggcacatggcagagttggtgccactgcagccgtctacacagcttcaatcctggagtatctgacagcagaggttcttgagttggctgggaatgcgagcaaggatctcaaagtgaagaggataacgccaaggcatctgcagttggcgattagaggagatgaggagcttgacacactcatcaagggaacgattgctggaggtggtgtgatccctcacatccacaagtctctcatcaacaaaaccaccaaggagtgatgtgtagctttttatggtgtttgtatttctgtagtcttggactcattttcctttatccttttcttagttctttgactagtgttgacctcttctggacatcctcaggtgtacattagttaatttgaactctttaggttccttgttcaatcatatgttc

SEQ ID NO: 140335 - DNA, 2673 bp, Arabidopsis thaliana landsberg
gtcttttgcgtgttctcgagtcgaattggatgatttgattcttaatttttgtttgatagtaacagtctaaagaagcaatggagctttgttcttcatctccatcttcttctctccttcgcatttgttcatcttcagcaccagaaatctcattttcatcttcaatttctcagttcccatctaaaacccaatcgattctcacaaaatccagattccaaaatctccgaatttgcgcttccgtgacggcggagactcaaggtcttccacgagacagccctcaacgtctcctcaaagagctagcacagcgtaaaacagcgacaggaccgaagaaaaaggttcctcctaaacgattcatcttaaggccaccattagacgataagaaattagctgagagattcctcaatagtccacaattgtctctgaagtcgtttcctttacttagctcttgtcttccatcgtcaaagcttaacaacgctgataaaacatggatcgatgagtatcttcttgaagttaaacaagctttagggtattctctggaaccttcagagagtttaggagatgataatccggcgaaacactttgatacgttgctctatcttgctttccagcatccgtcttgtgatagagcacgtgcgaggcatgtgaagaatgggcactcgaggctttggtttctgggtcagtatgtgcttgagcttgctcttacggagtttttcttgcagaggtatccgagggaatctccgggacctatgagggagagagtgtttgctttgattgggaagaggtatctcccgaaatggattaaagcagcgagcttgcaaaatctcatctttccttatgatgatatggataagttgattaggaaagagcgtgagccaccggttaagtaagtttctcttctttgacaatgatgattatttcagttgagtattagtccatagtttgtttgctttgaactgagtttttttagctttaatggaactactagatgttgttccattctctcaagaacttgctatgtatctaacattgtgtttagataagcccaaatcccaccatgagttgttatgacgccaagaacttttagctgatcaaagatttctcatcttggattatgatcagtcttatctgcttgtagtctgtcatcatttggattaagtttctctcttctttaatgatgatgattatttcacttgagtgttagtccatactttggttgctttgagctgagactttagcttcatggaaataaacaatgatatgtgttaatatctggttttgctgtatatggaactagtagatcctgtcaagaactatattctgtgtttagataagcccaagtctcactatgaaagcttttagctgttcaaaggtttctcatcttagataagatctgtcttatatgtttgtagtgtgtcatcatttgtttagttatttgattgaaaggggctttgtgatagctggtgctaattatctaggttgggctttccatttggttgaattaaatgactgaaaacttgacgagtctgtgcatcccaatgtctcataagtgacatgtacttatccatgttaatttcttttgttctggctagatctgtgttctgggctatgttaggtgccatctatctatgccttgggatgccggaagagtatcgtgtactttttgaggtgtttgggatggatccagatgctgatgagtgtcagcctcgaagcaggagacagctcgaggatgtagattatgtttctgttgaatttgaagggaaaaagctaggttggcaagatattgctacttacaaggtaaataaaactgcatgatataacaaaatcacagtctacttctttggtctatctaacaagagtgatttctttattttttctcctgttgcttcagcctcctgaagatgctttattcgcacaccctaggctattcagagcttgtgttccaccgggaatgcatcgtttcagagggaacatatgggattttgacagcaaaccaaaagttatgcagaccctcggataccctttaacgatgaatgatagaatcaaggagataactgaagcaagaaacatcgaacttggactcggtttacaggtacaaaagctattacttctggctttgtcatgtgatatgttactttccttctctaaacttttttcacttaccttaaatcacacagctctgcttcttgcatccttcaaagcataagtttgaacacccgcggttttgttttgagcggctggaatatgtaggacagaagatacaggtgaggataacgatctctcatcttaaaagatcaaaagaacggttcttttctttctttctttttttttaacccgatttttcgtctcgggatcatgcaggacatagcaatggctgaacgtttgttaatgaagcacttggacgcaccagggaagtggttgcaagagaagcatagacgtctattaatgaacaaattctgcggccggtatcttagagaaaaacgtcttcacaactttataatatactcagaggaggttcatgatcggtatgaacataaccggagacttaggaatccggcgacaaccgctgtccaacaagccattcacggcctcgcctacaccatctacgggaaacccgatgttcggcggctcatgtttgaggttttcgacttcgaacaaatccaacctaaagctgtctga

SEQ ID NO: 140336 - DNA, 2161 bp, Arabidopsis thaliana landsberg
gtttatcgattggaaaatgatggatactatggaggtgtaaggttactaatggcgatttgcaaagtattccgaaactattgcaaagaaaatggtatacaacttcatgacaaaaacttcactctttcttatgataccaatatcccaagacaggtttgttacaaactctttttgttgtaaattatgaattcagtttttgatatatgttatactgaagcctatagttttgatgttttttttcagacggggctttcaggttctagtgcaattgtatctgctgctcttagctgccttctcgacttctacaatgtcaggcaatcaatcagaatcgaagtccgacctaaccttattcttaatgcggagaaagaacttggtattgttgctggtcttcaagaccgtgttgctcaagtctatggtggtggtcttgttcacatggtgaggatgatctttgccactctttttgacatggaaattttcatttttcatcgattttgctctgttttgatcttctttacttttgcaggattttagtaaagagcatatggataaagttggatatgggatatacactataatggatatcaatcttcttcctcctctgcatctcatctatgctgagaatcctagtgactctggcaaggttagagagctattcactactctgcttctgattctattactttccttctcactgagcattgtttatgtttgatgatgcaggtacatagcacggttcgtagaaggtggttagacggtgatgagtttataatatcatcaatggcagaaattgcaaaattagctgaagaaggtcgaactgcattgcttaagaaagattactccaacctcaaggaactcatgaaccgtaacttcgatcttcgaaggtaacaaattagaaaatcttcaaaacaaaataaaaggcaaacacaattcaagattcttttttctttctctaggagtatgtttggagatgaatgtttgggagctatgaacatagagatggtggaagtggcacgtaagatcggcgcagctgcaaagttcactggaagcggaggagctgtggtggttttctgccctgaggggccatctcaggtcaaacttctagaagaagaatgtcggaaatctggatttatcgttgagccagtaaagcttgtgcctacccgcctcagtagttctgatattaagacattatcaaaaacatgattttgttacatcatcagacctcttagtcttatactaagaacaaaaacttggtccttgaaggatcttgagatcaatatctgaacttgtgcttagtccatgtgatgatagtatccattcataagtcattttgttttatatgtattaacattattttgtacgagtcactaatcattagtctttcatttacaaaaatttgtcaacaacatgtattacaacgtgtttaacagcatgcaataatctaatctagtgaggcagcgatatcagtagtacaaacaaaaaccaaaccaaatcattaatctgcaatagtcaacaacgaggcttctaaggatatacttacaacgtgccgtcttagacctttaagagaaaacatcgtgtcgttttaatttatcgtttaacatcatcatcacctcctcttctccgttggagaaccactgcaataatcaccggaggtggatttcatctttcccccgcctcctttgttctcaataatggcgaaatctctacacttcacaagactaatgtcttcttcagcaagaatgtcaatgacttctcctctcttcttctcctcagtcaaaccatggagaaacatccataaaccctacttggcttctctcttcctctccacaacatctactcgatacccacttcaatacgacatgatcatcaatcgtcccacacaatcatctctctctcaaaaccgtcgtcgtccccctaaagccatcgaatccggtgcacctgactcagcagagccggaattcgattcatgggtcgacaataaactggctatggagcgtgaacagggtcgacccggttctggagatccggaaatggataaagccaagaggaaatactacagtaagagaaggaggagactattccggtctgattctgaagatgagaacagtagcagaaaatcagatgaaggattcgttgaattgaaacctgaagttgctgaatttgatag

SEQ ID NO: 140337 - DNA, 1862 bp, Arabidopsis thaliana landsberg
gatggtaccttaatcaacacaggtaacttaaaacctcaatagattgtttcaatttctgtttatatatcttggaattcgaatttgatgttttttaaaaattcattgtagatggtgttgttggtgacattttgaggaaatacttgtgtaaatatggtaaacagtgggacggaagagaatcattgaaaatagttggcaaaactccagtagaagctgctactactattgttgaagattatgaacttccttgtaaagttgatgaattcaattctgaattctaccctttgttctctgctcagtaagttaccataaaaaaaaatcgatcttttgtccttattgttgtaatcttcatattgttgattacctccggttttgtaggatggacaaaatcaaatctcttcctggtgccaataggttgattcgacatttgaagtgtcatggagtacctgtggctttggcttccaattcttcaagagcaaatattgaatccaaaatttcatatcatgaaggtttgttttatatgaaatgttgttactcaatgcataagcttgtatagaggtaaacttgttttatgaaaatggtttcacttttgtgtagggtggaaggaatgcttctcggttattgttggtagtgatgaagtctctaaaggaaagccttctcctgatatgtaagatccatctcttatcacccatttgtggtttcatctattgattccaattaaacaatgtctggttaatgacaatgatcatatttgtaaaaagttttctcgaagcagcgaaaagattgaagaaagatccagcagactgtttggttattgaagattctgtgtaagtcttacttctagagtatcgttttgctgttgtgtgttttattcattctcactaatagttgtttgaaatggtaggcctggtgttatggctggtaaagctgctgggacaaaagtgattgctgttccttctctgcctaagcaaacacatctttatacatctgcagatgaagtcatcaattctctactcgacataagacttgaaaaatggggacttcctccattccaagactgtaaaaattcactcatgaactctgttcaatactcctcttccttgataacatgttcatctcggtaatgagacttttataccttgtaatttgtatttgcagggatagagaacactttaccaattgatccatggcatattggaggtccagtcatcaaaggatttggccgtggctctaaagtactcggaatccccaccggtcagtgtacaaacctcattgaactcagctcttttacatcattatatatggcttcttttcttatcgctgcatttgttttgtttttagctaacttgtcaacaaaggattatgcggatgagctagtggaacatccttcgggagtgtactttggttgggcaggcttggcaaagagaggtgtctttaaaatggtcatgagcattggttggaatccttatttcaataacaaggagaaaactattgtgagttcataaaaagttcaaacaaaattcttactccagtggttgcttctttaactttagcttttgttatataggaaccatggctgcttcacgatttcactgaggatttctacggagaagagctacgtcttattatcgttggctatatacgccctgaggttattataacgttatcatcattcattcttcatatgactcctttgtgtaatgcaatattccttgtttgctcatattgtttgtgtttgctaggctaatttctcttcactggagagtctcattgcaaagattcacgaggacagggaagttgcagagaaagctcttgatcttccttcgtatgctaagtttaagggtgatccttatctgactaaatga

SEQ ID NO: 140338 - DNA, 522 bp, Arabidopsis thaliana landsberg
caaatacatgcctgactccactggcgaatacttgaactatggaattccagcgagcgagggtaaagctctatatattaaagaatagctcttcttagcttacttacaaattgtgaaataattcacttctttggttgttcatcaataggttgaagtaaactttttgacgggagaaacaacgatcctgcgtacagatattatctatgattgtgggaagagtctcaatcccgctgttgatttaggacaggttagagccaggaaaccactctatgtgccgttttatgttatattgttctgtttcatgattctcttattttattttgttttgtttacagattgaaggagcctttgttcaaggacttggtttcttcatgcttgaagagttcctaatgaactcagacggtctcgtggtaacagacagcacatggacttacaagatcccaacggttgacacaatcccaagacagtttaatgtggagattctcaacagtggacaacacaagaatcgtgttctttcatccaaag

SEQ ID NO: 140339 - DNA, 1351 bp, Arabidopsis thaliana landsberg
aacctctctatagtggaaaggcttcagcttagatctctctttgcacatttttccaatggttccttatagttacagaatctgaagtcctgacatgttagaaagtatattgacaacgtatcatctcttttttctcttttataagacgcatcaccctgcatctaacataagcttctactttggtgtgttacagctttcacatggaccagaacagtgggctgatgagtttgcttccgggagaggacagcaagaaacagccgaggaccaatgggttaatgagttttcaaagttgaatgttgatgactggatagatgaatttgctgaaggtcccgtgggtgatagttcagctgatgcatgggcaaatgcttacgatgagtaagtccactgtactctaattgatctataatttaagttctcttcttctttttttcattcttcacaaatcttataagttccctttcaattccattctgttatccttgtgggggtaggtaagtgcagacacaatgggtgttttcaacttatttgttacttttcccctatgcatttctctctggttccttaatccttgcttaggcgaacctatttttgcaactatgcagtttcatatctaccattatgattcgcctgtttaagggattatttctgataacctcctaatttttatctatggagtctaacaatgtttatccaacatgcatctttgacttttaagttcatctaacaaaagtatgtgcctttctaggtttctgaatgagaaaaatgctggaaaacaaaccagtggtgtctacgtcttctctgacatgaatccttatgtgggtcaccctgaacctatgaaagaagggcaagaattgtttcgaaaaggacttctgagtgaagcagcgcttgctctagaagctgaggttatgaaaaaccctgagaatgctgaaggttggagattacttggggtcacacacgcagagaacgatgatgatcaacaggttagttagattaatttgcatgaatattaatctcctataccttatcaaaatgatgaaacttagtcaattttcaaaacaattgtcgttgtggatgcaggcaatagctgcaatgatgcgtgcacaggaggctgatcccacaaatctagaggtgcttcttgcgcttggtgtgagtcataccaacggtcagtgcatgttatctagcaatatgtgtttgttttgttcacatatatggatacttgtggtcatacattttttggaattagattggtaattaaaatcttgttctctgtaactacagagttagagcaagcaactgctttgaaatatctatatggatggctgcgaaatcacccaaagtatggagcaattgcctc

SEQ ID NO: 140340 - DNA, 1571 bp, Arabidopsis thaliana landsberg
gaagaaacagagaaaccaaagagttaagtggggaacctcgaagctagttcaaactagtgggaggttgtttcacgtttcaactttcaagtcataaaaccaaatccaactctaaacgtaaacccaaacgtcaaatcatcagatagaaggaaatattctgattgagagatggctcgtggaaagattcagcttaagaggattgagaacccggttcacagacaagtgactttttgcaagaggagaactggtcttctcaagaaggctaaggagctctctgtgctctgtgatgccgagatcggtgttgtgatcttctctcctcagggcaagctctttgagctcgctactaaagggtacgtattatatcatatatatatcttagtgttcatatatatacatgtgactaaagagtaacatatattatatatgtaaatctgattataaattcagaacaatggagggaatgattgataagtacatgaagtgtactggtggtggtcgtggttcttcttctgctacttttactgctcaagaacaacttcaaccaccaaatcttgtacgtctactttctctttcgttctcattaattagtatctactttcatcgagtttttctttatttttgggattgattatcgtatgtgtttgtttttttaaatagaatttttgggttgatattaaaactagtgcctcgtcgtcagtagtttcacttctttccatttcattcttttaaggggtagtttagtctttttgttccataaacattattttagtgtgcaacatgctaacacgtgttgacatgcagagggaaaatctgttggacgttgttaattgatttgaaattaaaatactcagggaagttaggtagggcacctgattctgattctatacatgaaaatagttagtgaagtacaacattcattgcacctagctctccaattctccgaatttttaatttgttgactactgagaggaactgacattgttgtggaacgttgtactatcataaaatagttacgaaacaagtcaaagtaattactgttaaagtaaaagatgcttagagacaatgtattacactttaattaatattttatatctctggttattcaatcgcattgtgtttcggaatgaagtagtattattggtttataatcagcacaatcttttaataaaagttgatctgaccactttataaaggttgccctaaggcctaaactatagttattgacacgctttgaactattattttatatattgatgcatatacgtatttcatgtttgtgtgtgtgtgtaccaacatgggtcactatttgtaattcgacatcttcaaaaaaattcacccgcttttagatatgtttacaaataatgtatagaaacattgaaataaaagtttataattctctaggatccgaaagatgagatcaacgtgcttaagcaagagattgagatgcttcagaaagggataaggtatactgattatttgcatgctatctccttacttatgggttataaatttatacatatatgagtaaatgcatttaaaatggatttcagctatatgtttggaggaggagatgg

SEQ ID NO: 140341 - DNA, 1216 bp, Arabidopsis thaliana landsberg
atatgcggatcgggcatacgctaactggactggctacttcaccagccgtcctgctcttaaacgatatgttcgggctcttagcggatactacatggtatcaaactgcatcttacggagtccgatttcccattttcttagtgaaattcaaaatgaatttacatggccttgcatttgtctgttttttttccaaaacaggctgcaaggcaacttgaatttctggtgggcaagaactctggaggtccaaacacttacagtcttggggatgctttagggatagcgcagcaccatgatgctgtcactggaactgccaagcagcatgtaacaaatgattacatgaaacgccttgctcttggtgcttctgaggtaagatactatatatgaaaactcttttcttttttgtcttttttcttatatcagtaatcatctaattattccgtaggcagaagctgtggtgaattctgcgctggcatgcctaatgaacaaagcaccaaaaggtggctgcacaaagcctgcaatagcattcagccaggttaaatctccaagaaactcattttggatttcattttttttacagaaatgtgattgaagaatccctttcatggtgatgactagtgtgggagttatttctttcctctatttagagtaaacgattattgtgtgtctctatatagtaatcacctggtttatatattctttcttggaatcaaatcagcagtgctcgttgatgaatatcagctattgcccatcgacagaagaaacccttccaggccagaagagcttggtaattccatcacatctctcatcaatcattatgatatagctcagattctccaactatctcagtgtttgatcttcagattctggtggcgtataactcccttggatggaaccgtacagaaatcatcaggattccggttatatttcatgcctctgtttacttgctcctttgagatcaaattctttaatgtattactaaagagttagggtatgtaacaggtcaatgatgcaggtctaagtgtggaagattcatctggaaacacccttgatgctcaatacatccccatggataatgtcacgagcaacctcagaagtttctacacaaaagcttatttaggaatatcttccctgcagcgtccaaagtattggctcgtgtttaaagcaaaggtgccaccatttggttggaacacattcttcatatctaaagcatccgcacaag

SEQ ID NO: 140342 - DNA, 533 bp, Arabidopsis thaliana landsberg
tgcaagtataacgacccaatttatgttaagatggagaagttggagattatgattaaacttgcctctgacagaaacatagaccaggtatcctcactgagctctaccatctgctgtgtgtcttgattattattggtgcatatctttatgatttttgaaaattgctactctaggttcttctggaattcaaagagtatgccacagaagttgacgttgattttgttagaaaggctgttcgtgcaataggccgatgtgctatcaaactagagagagcagctgaacggtgcatcagtgttttgctcgagttgatcaagattaaagtaaattatgttgtccaggaggccattattgtcatcaaagatatcttcagaagatatccaaacacgtaagttgacatttctcaatcactgttgaaatggcatcttaaaactcttctttgattttggttatgctattcaaatatttcatacaggtatgagtccataattgcaacactctgtgagagtttagacactttggatgaaccagaagctaag

SEQ ID NO: 140343 - DNA, 1973 bp, Arabidopsis thaliana landsberg
atgtctcagggtgcatgtgagaatcaacttcctatcaaattagctttgagtgacaaacatggagaagcttcgccgtacttcccatggctggaaagcttacgacaataatccttttcatccaactcataatccacaaggagttattcaaatgggtctcgccgaaaatcaagttcgtcttcttattagttacatcctaatgagttcgttatactttttcttcttctaataagttttttaatttagtttattttattgtgatttgctttcagctttgttcagatttgatcaaagaatggataaaggaaaatccacaggcatctatttgtacggcggagggaattgactctttctccgacattgctgtttttcaagattatcacggtctcaaacaatttagacaggtatttatctcatttcttataaggtttttttattattatacagtatctattaaattattatatacttatatatgttacagtatcaagtatttttatgctcattcacgtactcttgtttggtagtaattatacaccttacatttatgtaagattatgaattgagtatattataatcttaggaatttgagatttgtatatttctagaactataatttgctttcaaataatgttttgtttggggacggaaaataaacaggcgattgcgacgtttatggagagagcgagaggcgggcgggtgaggtttgaggcggagagggtggtgatgagcggaggagccaccggagcaaatgagacgatcatgttctgtcttgctgatcccggcgacgcttttctcgtccctactccttattatgctgcgtacgtatatatacacactttactagtattcaaataaatattattttggtcattaataattaaaaagacacattaattagggattttgatgttatgaaatagaataagtaaacattatactatattaaaataaaagtaatcgaaaagggcaaaagttctaatgatttcataattacataggtcaaaaaacaaaagactcttttgataatgggttttcacttttcagaattatttgtgaaatatacctcatttgattgattcaatattttaatttggtaagcaaccccgtccacacaagttacaactatgatcaaattgtcgattgactcttcacaaaagtcaaaccattaattaacacttgcttgacttgctctcttcagtactaattatactgggtttactaaaaattccagattcgatagagacttaaggtggagaactggagttagaataatcccttggagtgtagcagctcaaacaatttccaggttacaaaacaagccctagaatcagcgtaccttaaggcccaagaaaccggtatcaagatcaaaggcctgatcatctcaaacccatcaaaccctcttggaacatctctcgatcgagaaactcttgaaagccttgtcagcttcatcaacgacaagcaaattcacttagtatgcgacgaaatatacgcagcaacggtttttgcggaaccgggattcatcagtgttgcagagatcatccaagagatgtattatgttaaccgtgatctgattcatatcgtctacagtctttcaaaggacatgggtcttcccggtttccgggttggagtggtttactcttacaacgatgttgttgtgtcctgcgcaaggaggatgtcgagttttggattggtctcgtcgcagacacaaagttttctagctgctatgttgtctgatcagagttttgtcgataactttcttgttgaggtttcgaaaagagtagcgaagagacaccatatgttcacggaagggcttgaagagatggggatttcttgcttgagaagcaacgcgggtttattcgttttgatggatttgaggcatatgcttaaggataagacatttgattccgaaatggcgctttggcgagttattatcaataaggtcaagattaatgtctctcctggctcgtcgtttc

SEQ ID NO: 140344 - DNA, 1102 bp, Arabidopsis thaliana landsberg
aagatcttgggctaatgttgcttcttgatgagagacaagaagtgttgatgcttgtcacaaattcgttaaaacagtatccttactaaattctagtattaaatcttgataccttggcctttgcatggattcttcttctatggaaaatagtatagaacacttgatttttgattgcattgctgttatgggaattaaggagaaaaatatttaaatagatttgttcttgttcaaccttaagtcacgtgcagagatcttaatcactcgaaccagtatgttgtaggacttgctctctgtgctttagggaatatttgttcagcagaaatggcccgtgatcttgcgccagaagtagaaagattaatccagtttcgtgaccctaatatccgaaagaaggtgaagtgttttctaattcatatacagggtctcctggagtttagtcgcttttttttttccttcattgcctttaccatttatgttgtattatatgcaggcggcgctttgctctactagaataataaggaaagttccagatctagcagaaaacttcgtaaatgctgctgcttccttgcttaaagaaaagcatcatggggttcttataacaggagttcaactttgttatgaattgtgcacgattaatgatgaagccctagagtacttcagaacggtaagtctataaatattatacagaacactctacttatgcatacaggagcatcgacgtaatttaattgaatatgcgtacatatgatactatattacctgtatgatgcttttgtgtactatttttctcttgcaataaagtttgatatctgtggtattcacttataaatagattactctgctgaaatgaggcagacaatcaggttgttatattgttttatcagaccgtcagttttgacaaacccttgtctttgttttgtctctgcagaaatgcacagagggactgataaaaactttgagggatattactaatagcgcatatcagcctgagtatgatgttgcagggatcacagacccttttctccacatacggttgctcaggctcttgcgtgttttaggccagggtgatgctgatgctagtgatttgatgacagatatacttgcacag

SEQ ID NO: 140345 - DNA, 1500 bp, Arabidopsis thaliana landsberg
atgtccgggactattaatcccccggacggaggagggtccggtgcaagaaacccaccagtcgttcgtcagagagtgctagctcctccgaaagcgggtttactaaaggacatcaagtccgtggttgaagaaactttcttccatgatgctccgcttagggatttcaagggccaaaccccagctaaaaaagcgttgctcgggatccaggctgtcttcccgatcatcgggtgggccagagaatacactcttcgcaaatttagaggtgatctcatcgccggtctcaccattgctagtctttgtatccctcaggtttactattcaagactcctacgtactttttggcgcatatctttccttttatagccaacccatatctatattccatttttatcttttatggatgacaggatatcggatatgcaaaactcgcgaatgtcgatccgaaatacggactttgtgagtcttaaaacatttaaactaaagttttttttttcaattacgagatttgtggtagatccatagttgtgtgcaaagatttgaatgcatggctttttggtgtagattcgagtttcgtgccaccgctgatttacgcgggcatggggagttctagggatattgcgataggaccagtcgctgtggtgtctcttcttgtgggaactttgtgccaggccgtgatcgacccaaagaaaaacccggaggattatctccgacttgtcttcactgccactttctttgctggcattttccaagccggcctcggatttctacggttgggattcttgatagactttctgtcgcatgcggccgtggttgggttcatgggaggagcagccatcacaatcgctctccaacagcttaagggctttcttggcatcaaaacatttaccaagaaaactgatattgtttctgtcatgcactccgtattcaaaaacgctgagcatggggtacgttttcactactctaaatcatcaagaagttccaagcctaggctcaatacttaaatatctcatattcgttttcgttttattcatgatttctccagtggaattggcaaactatagtcattggcgccagtttcttgacctttcttctcgtcaccaaattcattgtaacacttttttttcttcatctccaatatatatgtgtacgtgcatctttgttatctccatttactaatataaaaattttcattacaggggaagagaaacaggaaactattttgggttccggcaattgcgcctcttatttcagtcattatctctaccttctttgtcttcatttttcgtgctgataaacaaggagtccaaattgtaagctcacacattcatgtcataaacatacgttttaaacctgattgatgaataatattttgatagattatactatagttaccaacaatatttttatgatataaactatgaaggtgaaacatatagatcaaggaatcaatccgatttccgttcataagattttcttctccggaaaatatttcaccgaaggaat

SEQ ID NO: 140346 - DNA, 1141 bp, Arabidopsis thaliana landsberg; identical to SEQ ID NO: 27528

SEQ ID NO: 140347 - DNA, 451 bp, Arabidopsis thaliana landsberg
ggaccaactgaaaaggagcaaattgatgttcaaggggatataatctatgatatcgttgaattcattacagacacttggcccgacgtaacatgacttctccttttctaatttgttcttggttctcactgcattcgtttgaaaacttatgattgttactttgccaatttctaggtacctgaaagatccattttcttcatcgaagatgggaagaaggttcaggctggttgatgatcacctttgtcctcgttttttggcatggcgggttcatgtagacgagctagttcctgagttttcctatgtgtttggaggaaatcgcatcttgattataactttcaacgtaacgtatagttggatttatcatactattttcttattcgggttgcgatagttccagacatgtttctccaaacatttctctttttgggggtcttaatatttaaaatgtgtcttg

SEQ ID NO: 140348 - DNA, 789 bp, Arabidopsis thaliana landsberg; identical to SEQ ID NO: 44494

SEQ ID NO: 140349 - DNA, 1752 bp, Arabidopsis thaliana landsberg
  unsure (1)..(1752): unsure at all n locations
atggcggaaaatctattctcagggctgccacctccttcttcatctcagcagcaagagctaccaatttctccaataccagacgagtcaaagattgaaacttcctctccagctccgattctggttctcaagagtgccctaaagcgatccaaaccagaagaatctgcacccaatgtttcaggtatgcttaattctcgaacaatttatccgataatgggtctatgttatctaaattcaattccttttggtactgtgttttacaaagcagaaagctttattgaggtatctgttcttactaatctgatttaatgctccaatgacacagctcctcctgttctcaagagcgcactaaagcggtcaaaaccatcagaatctactccggaaccagtaccagaaccggaaggtacaagtttgagctacttgtacttctactcgttgctaattagaatacgaatggaactatgaacttgtatgaatctttgaaatttctgttgcagctcctaaaaagcgtctacagtttaagacatcaaccgatgcatcagaggaacaagtgatagaagcgatgcagaagataacatctcacatcaagaacccttccaaattctccaaagcctcaaagcttgctatacggctgatccaagctggtagtgtgaagccagaaacaagcagctattttattgcgatacttgaagctgccatgtcgtctaaaactccttgtacagatcgctcggttcgagcagactatcatgcattgttctcggcagctcaggatgtagccgaggtaaacaaatagaactcatggttaaagttattcttcagctttattattagcatgttgatgaatgttcatatgtttttgtttttatctagtgccttgataaaagccagaagaatctgttgactatatggacattcaaagcagttgtggctaatgacctcttcactgatgacagctttatggtatgaaccttcgtgtgacttataccaatattttggactttgtttggctttattacttaatttcagagtattgattgcctcgtcgctgtgttatgacctgtaatatggatattgttgtcttgaactatcatcctctgaggttttcatggtgtctcacttacattgttttttggtttagttttccaagactgctactcgtataaaggaggctatatctgatcttccggtttcaaccgaggaggatgatggggaagaagcagctgctcttgaagaagcggcggtgaaagacaatggagatggccagacaacgcaggacgtggctgaagctgcttcagctggagataatgaggctgtcgagtctgatccctttggactagatgcctggattcccagttctggaaagaaaaatggtaaaacaaagataaagagaacaaatgaagatccagatgccgaagagaataagaggtttctcaggtcaaaaagagaagctttgattacatgcttggagattgctgcacgccgttacaaagttccatggtaagaatgctgccatgattcccagtaattgatctaaatttatcccactgaacttgttatcatgtcaaaactgtgaaactgaggaatggttggattaattttcaggtgccaaacagttatagacatattggtgaaacatgcctttgagaacgtgtctaggttcacatcacagcagagacaagcagtggagaaactctgggcttctgttcgagaacaacatctccgtaggaagcagggcanatcagtcacaggaaaact

SEQ ID NO: 140350 - DNA, 647 bp, Arabidopsis thaliana landsberg
aaagtcggagaccattggaaggaaacattgggaaggagatggtatttgagaaattcttatcttttttacgccatagctgtttgtttgcttctaacgtgctaacttttggatgtgataaatatccatttgtcatcgaatattatcatgaactcgcacatttcgctcatgtttatcattcctcaacttttattttattttaggatcaaacgaagataacaaagaagaaacagacacaattggtccctaaatctgagggtattacttatcccgacaaggcttcaggtgttgaagttaaagcaagtgttgtcctaactgcaaccaccacgtccttagtggactgtcaacctgcagcagactcgtcctttgaaaggtcaaagcagcaacatgagaaattaaagcgaacttcgagcttaagcaatcctgcagcagaaggaaagaaagtcagaagaaagacagaaccagctctagaagaaactcacctgcccgcagagaaacccctcgttctggccctgaagcggcagacacatctaaaatccaagacacataagcaggtacaggtacatccacagtccaaggcacataaacaggcacaggtacatccaaaggccaagacacagactcctccagacctgaacctgccaagttag

SEQ ID NO: 140351 - DNA, 2719 bp, Arabidopsis thaliana landsberg
aagggtttcgagcaaaatttctgagcagcggcgacgatgggagacaccgccttggagaagacagcggaagagctacggcatgagatcgatgagcttcaccgtcaacagcgtgaggtactatctccacctcaatctcattctcactttacaaatctctgttgacggcgattgtttaattctctatcctgttcagattacggagaggcttcgtgaccctcgtggactccgccgtggaggcttctcaaacgtcgctcctcgcaaccaaggccgtagagcctttcctcgacctgtaagtcttctctatctctcctttgagatgaaacagattgcggtaattgattattggatattgtgtgtttttgaaggcggagaggaatgacgtagaagacgagcctcctgctaaaaggagattgtcatccgccgttgttaaggtaatttgtgttcggaaagtaattgcattctcattgatagatcgaacgaagtggttacttaactttaacgggatactttaggtcgacggtgaagatgttagtaaagatggagaatttccagttgatggtaatggaacccaggttaaagttggtgagaatgggacttctgatcaaagtgacaagaagcaatctggtcttcatcgtggaagttggtcccagagagatgcagaacaacgacggaccaataaggtaaatcaaattcctcccataaatcctttttatgagaacgaagcgactgtttactcagtggttgttgttattttgctcttatcagcgttacgaagcttttgcattgccggagcctgcaccaagggttttacctaagaatgaggatcctaaactggttaataggaacagaagaatgctagggaatcttctagggactttggaggtatttgctgagattcacatgaacctcttgtctcatggattagcttgattcatgttcagttagatttttcattctttattcaatttattggattctcacttctcactctttatttttgcagaagttcagaaaagaagataagcagcgttctggaacagatgcatacgcccgacgaactgcagctctacaaagggtaagcacacaccatattcacttggagatattttatgaagcttgttactgtttttttaagggaaacgccatatttttgtacgtgaattgataatcttcatcttccttcagtttcttttgtacatttttgtactttaaactaagacagcatcttccttcagtttcttttcgcttaagtagcgttgtagggaagcctaaatctctctagatatgggtgtctatattggaattgggtataggtataggtatcattatatgtccagttaggagtgcgtttattccttagcatcatctttagtactacaatgcattagcagtgtttgttcattgtatccctcctactcttataggcggaggaaaaggctcgtgaagaaagtgaacgactgaggctgcaggagcgtgaaaatttgactgaaaagaggagaagagatcttgtaagtggccagcttaagtttttttctctttgcataccattccaaatggcagtcttgtgtagtaaagatctgatatactcaatttaactggtcaatcagactcttcgggctcgtgttgctgctaaagcagaacaaaagaaattggaattgcttttccttcaatggagtgagcaccaaaagaaacttagcaattttataaggtagtgttgacatgctgttactgcgtgtgatttagttctatagcgtacccttacttactctgcatgatgagtctcagtgatgagattgctaactgctatgtatttcatttgcaggttattttttatttcggtccaaaaagtgtgcatattgacaattttatagaggcaaagataagtttccattcacgtgcatacaaaggcaatgtttggtgctataggtagaaattggtagctgatataaaggtttctgtcaaaacttatttaatttgatttgcatgtggacgggtgtttcaggactaaagcagagccacggatatactatgcaccagtgaagcctttggaagaagatacaagtgaggtagaacaacagaaagagcgggtaaggtgttgtagtttgtaaatgaagaaagttttgacatgcatgctatgggatatttgatgtgactggttttgtgttgatgcagacattcttagaatggaaggcagcaaggagacaagaagtgagtgagtatcaaaaggagatagaagagcagtgtctgggtaatgttgagaaagagctggagaggtggcaaaacgcaaggaaggctaggaaagcaaacaacgagggtatgaatttgcaggaaacgatggacaaggaattagagactcataggatggagcatgggccaaagaagagaaagatacctggaggaggagtaggagatgaagatgaagaagatgaagtagaggatatcaatggtggagaggatgaaatgataatggatgatttactggaggagggagggagatggaaccatcaaggaggaagtggcaactgatacagttaaagcagaagcagtggaggaagatattaaacatgaggttctctaagtcatatagtttgtttgttcttgaaatttggtgggagttgcgagttagaaaactggtcaaatctattttggagcgttgtaacgtgaattatggcaatttctaggaaagatttgcctttgtgctatataatttgttttgttt

SEQ ID NO: 140352 - DNA, 769 bp, Arabidopsis thaliana landsberg
aaacctagagaagcaaaacatccgtataagaaaaatggcacaagctacgcgtcagtcttctctacaaggggaacttgaggtagatattgagatcaaagcatcggcaaagaagttccatcacatgctctctggaagaccacaagatgttgcgaaagccactcctgacatccagggatgtgctttgcatgagggagagtttggcaaagttggcagtgtcatattctggaactatgctattggtaaacacaaacgtttatttataatataattttgcaacaacatacaagatttgataggttaacccttcgttttgggtgcagatgggcagcccaaggtggcgagggagaggatcgaggcagtggatcaggagaagaatctgttagtgctcagggtaatagatggagatctgacgaaagagttcaagagcttcttggtcactatccaggcaaccccaaagctaagaggaccgggaagtgtggttaagtgtcacttaaaatatgagaggattgacgagaaggtggctcctccggagaagctgctcgagttgtttgccaagctaacccaatcaatggacgaaatgcttttgtccgaagtctagaggattccttggatatccatctatctatctatctatctatgtttgtgggtgttttgtaagatatctcaaattttcaataatgtgctctctctatgaagagatctgaactgcaagtattgcagagtttgtgttacgtatgtttgaagtttttaattagttgcaaattataac

SEQ ID NO: 140353 - DNA, 518 bp, Arabidopsis thaliana landsberg
atcatcaacctatgagccaaggagggccgtagaacagcctaagagagcagcggcgacggtggagaaatttccggcgaggaagccagtggtgaaggaacgtgacatcaacgaaagagcagaggcatttatacaaagattccgaaagcagcttcttctccaacgttaggaataatcaactgtcaaataacagcaatgtccaaatctttaactgttagaatcacctatcgttaaaatcttgggattgtatgtgtataaatcatctatgtacgattaaaaaaaaataccataatgtttttatatataagaaaaagcatacagaataaaagagtcttaaagaagaactttcatacaagcaaaagacaaatacaaatatgaatgaagtttcattatctaaaagcatacacaaggcacagtgtcataactcaaaaccagctcgaatttggttttactgaagcttcttgatcccagggaaggatggaaggatggagatgagagcatcattgtatcctacaggctct

SEQ ID NO: 140354 - DNA, 1006 bp, Arabidopsis thaliana landsberg
tcggcgtctctccggactcacacctcatcgaaatttggccatctcatctggcttcttcccctccggcgttggataaccatcattacttctcgcgccggcttcgagtggaacaatatggatcctcgtcaattcgaacacaccgtaagtttttctctccttgaaatgttttatgacttctctctcgagatttcagaattggaataacgatcctgctcaaagatgatcgcacctatttcatttgattggattatggatcattctaggttttcatgagtggatatgcattagttatcgtcttgtgtattggtggtggttcttagtatgaaatagatcttgaggctttttatccagaattgcaagctgtactaatcttccttagtactgcagtgttatattaagttattggaatctggaaactgtgtataatgtgttattctctaaagcacttttcttttgttaaccaggatgttgctgataatgatattcacagcattgatatgtcatatcttatgcacgactgcttcatcgaaactgcggactcacttgcttcttccactggagttaagcagcctgcaattgatcgtgataacatggagagaagaaaacgtgagttgtacaagtcatcttttgttctgctgttaaatgagtgcttatgcaattatgtgattatatgttttgattgattgttcacttattcagaaataatacattttatactggagaggaaggcgttgaaggcttttgaactaactgaacaactagcacaagacttgcttgagaaaaacaaggatttgcaattcgatcttctatgccttcattttgtggagctaatctgtgctgggaactggtgagattttatgattggtcttccattagaaactctggttttatctgtgcctgtaatcttaaaatgattctctgcgtgtgcagcaccgaagctctcaaatttggtaagacaagattggctccttttgggaaggtcaaaaaatatgtagaaaagcttgaa

SEQ ID NO: 140355 - DNA, 2220 bp, Arabidopsis thaliana landsberg
ctaaccaaagaaaactcattctctaattatctcctctcatctttgatcttctcaatattgtctcatttagctaactttagttcctctcaatttctcttattaccatacaaaatttactaattactgtacaaaaattaccaaataaaaggccacaaatatcttaggaagaaatgaagcaaggcacaagtgccaatacgagattagagagcatgaattaaggagaaaagtcggtttcggttcagtaagacagacagacaaaatccatcgttggggtccagtcacattacctctttctacgtgatttcctctctctccactcgcttttaatcctttcacttgtataaagtcgtagcatctcgagatcgtcttcctctcacaatctcaaattcttcggaccttttctctctcccctgaagctcccctcactcactcttctccgaggaagaacaacagagacaatggcggttcccaaagccattattctacctatcttgctactcatctgtggtgctgctctcggagctcctgcttctgaaggtaaatcgcgcgcacacacacacacactcactgtctatggtttgcactggtttgctctgttttgcttttgacaagttttcgattctggaagatgggtcttctctacttgtgattctaaagcaagatttggtgtttttggaagaaaaagattcaatcttagtctctagatctaagatttatctctctgtttacttcttcaggttatcttcgtaatggaaacttcgaagagtcaccaaagaaaaccgacatgaagaaaacagttctactaggcaaaaacgccttgcccgaatgggaaaccaccggtttcgtcgagtacatcgccggcggtcctcagccaggaggcatgtacttcccagtggctcatggagtccacgccgtgaggctcggaaacgaagctacaatctctcagaagttagaagtgaagccaggttctctctacgcactcacgtttggtgcgtcgagaacttgtgcacaagacgaagttcttagagtctctgtaccttctcagtccggtgacttgccacttcaaacactttacaacagtttcggaggtgacgtgtacgcttgggccttcgtcgccaagacttctcaagttactgtgactttccacaatcctggagttcaagaagatcctgcttgtggtcctttgttggacgctgtcgccattaaagagcttgttcatccaatctacaccagaggtaattattggaagctttggtttggttctggttcaatttcctagggttttagtttccggtttaaccgaactcaattaaaataccatggttcagttttgcttttggtttagattcggttcgattttagataaatatttgaaaaatcatacatattatatacacgacgatattgttaatcctatagaaataattcgtatgtaatgaattgtccaattttggttcaatccaatcctgtttttggttcactttggttcggtttggtataatgcttattaccagtcccggttttatctgttgaagaatttggtttcataattcgatttttctgacatgtagggaacttggtgaagaatggagggttcgaagaaggtcctcaccgtctagtgaactccacacaaggagtcctactcccacctaaacaagaagatctcacatcacctttacctggttggatcatagagtcactcaaggcagtgaaattcatagactctaagtactttaatgtcccctttggacatgctgcgatcgagctagttgcaggcaaagaaagtgccattgcacaagtcattagaacctctcctggtcaaacttacaccctctccttcgtcgttggagatgctaagaatgactgccatggttccatgatggttgaagcttttgcagccagagatacactcaaagtaccacacacttccgttggtggaggtcatgtcaagaccgcgagtttcaagttcaaggcggttgaggcaagaactagaattactttcttcagtggtttttaccataccaagaagactgatactgtatctttatgtggtcctgtcattgacgagattgtggtttctcatgtcgcttagattaagttttctctttatgacaactgcacttgtgttcttagactggtcatggacttggtgccttgctttgtatgtcttggctccttttggaattgagttattgtcatcaagttaaaatgaatgatata

SEQ ID NO: 140356 - DNA, 625 bp, Arabidopsis thaliana landsberg
atgccattagacttttttacggattttgttcgtgttgctcaggacgaaggtcgtcacttcactttgcttgcagctcggcttgaggaaattggttctagttacggtgcattgcctgctcatgacggtctttgggactctgctactgccacatctcacgatcttttggctcgtttggctatagagcattgcgttcacgaggtgagaaaccatttcaacttcttgtaacttactctgttttgattgcctcttagtcactaaaatagtatatttgcaggctagagggcttgatgtactgcccacaacgatatctcggtttaggaatggaggcgataacgagacagcagatttactagagaaagttgtgtaccctgaagaaatcactcactgtgcagctggagtaaaatggtttaagtatctatgtgaacggtccaaggatcctgaattcaccatcagcagcaaagaatcagatgatagcaatgaagagataatcaacaagtttcattcggttgtaagggagcatttcagaggaccgttgaaaccgccttttaatgctgaagcaagaaaagctgctggctttggtcctcaatggtatgaacctcttgctgtcaaagagagcaatgcctag

SEQ ID NO: 140357 - DNA, 1234 bp, Arabidopsis thaliana landsberg
tttatgaacaaagtcctctatgccagagaaggtgcaaggagtataatggacagaacattcgaagatttcccttggcaagttcgagttgaggtggatggtgttgacatcgaggttcctgaggtgagtcacagataccttacagatacgacccgcatgataattaatgctctaacttctctatgctaaatctctgaaggatgcggaaggaatactggttgcaaacattggaagttacatgggaggggtggatttatggcagaatgaagatgaaacatatgaaaactttgatccgcaatcgatgcacgacaagatagttgaagttgtgagtatatctgggacatggcaccttgggaaacttcaggttatatttgtactcttatgtcttatttgtatacatttgactggtaacctaaaaactaacataaattgatttttgttttgttttcacatcttcaggtcgggttgtctcgtgcgagaaggctagctcaagggtcagcagtcaagatacaactttgtgcgcctttaccagtgcaaattgatggagagccttggaatcagcaaccatgtaccttaaccatatcgcaccatggccaggttcttctctccatttccctaacttagattctggattcaaatcaagttttctactgagaaaaagttgcactagattgtaaaagtttgtggtcttctgttttttcttaactcctctaaaagctcgaaccattttttgtgaaactgtttttagttttctcacttaccttcacttgcaccaggctttcatgctaaagagagccgcggaagagccactgggtcacgcagcagctataatcacagatgttctagagaatgcagaaaccaatcaagtgataaacgcttctcagaaacgaacgctgcttcaagaaatggctctacggctaacttaaaacaggggaaaaaaaaagaaaagacagaagacaaaaccttccctcttcaacaaccaatcaatcatcactggttagttacaaatatttacaaatgcgtgtattttacatatcttgtacctctgcctaatgaagggaatgttaaatagtcttgaagatcgaaatccgctgattgacaaagcgggttctgtgtggaagtaggaaaaaggaaccaaaaattggaatctggttcctagatttttggctgttctcatagtgaatgaaagcaaaacgtgtttaattatctctgtctttctcatattttattattatgg

SEQ ID NO: 140358 - DNA, 537 bp, Arabidopsis thaliana landsberg
  unsure (1)..(537): unsure at all n locations
atttttccaattgcttctctcttctctnncttctataggccccattgtcgtgggttcccactagcagctttcttgtcttcctcattttcttttccttcattctactaaaacagaggtttttgcctcttcctctcttgtttcactctttagggtacacacaaattcactcttttttcttctttgtttgggaggggaaaagttacagttttttcctctgttttggatcaaaatttcgtttttttggttgtgttaagaaagcaacagagagagagagaaagattgaaactttggatgtgaatttagggttttgtgaattggggaaaaagcaatccagagatggctcaacagagacaatttcagatggaaggtggtaataataatacaacagataccaagttgacgaaaatctttgttggaggattagcttgggagactcagagagatacaatgagacgttactttgaacagtttggtgaaatcgttgaagctgttgtcattactgataagaacactggaagatctaaaggatatggattt

SEQ ID NO: 140359 - DNA, 1678 bp, Arabidopsis thaliana landsberg
ctaatctatcacaaacccttccacattgcttttgtcagtctgtaaaattctctttgaatcagtgaatcactcacttaaatccaaaacagtttttttttctttctttctttatttgcttgttgtggaatcaatagctgtctccgggaaaattcgttttttttctccttcgggatctcttttttttttttttggttttatttaataattatcccggagccaacatttattgtcgattcggtttatttcgtctccttcgtcttccactcttcctagtgcatgctctgaatctgtatgtaatgggagctcaacagtctggatccattatcctagccgggtcgggtcaaggtctttgagtaagagagacaattcgttttgattcggtgtagaagacatcatgaatactggtggtcggctcattgctggctctcacaacaggaatgaattcgttctcattaacgccgatgagagtgccagagtaagaataacttttgtatgaatttgtgacgaaaaaagtttaattttttctctttctttgggatctagattatgagaatctagatggaatattttgatctgaaattggaaatttctagggagtaatgccgcaacccacatgttctgttttttcttttttcttttcttcaagtagtgttgcatgattcatacgtgtcggcagagatgtcctgagaaccgaattcaatgttgtagcagtagcaataagttcaaagaaagtccatttttttatattactaattctgttcttggtttatttgagctggtctttattgcatttcacctggattcagatactaataactgtctcaattatgtaaaaatgacaactttatgaaattcagtttcacaattatgtaattcataatcgatgaatgttttcttgagtctttatcatctttaggatttgattaagatgcaatttgatgaaaatactaaaaagactcatgtgttctcatttctctatgtagatacgatcagtacaagaactgagtgggcaaacatgtcaaatctgtggagatgaaatcgaattaacggttagcagtgagctctttgttgcttgcaacgaatgcgcattcccggtttgtagaccatgctatgagtatgaacgtagagaaggaaatcaagcttgtcctcagtgcaaaactcgatacaaaaggattaaaggtagtccacgggttgatggagatgatgaagaagaagaagacattgatgatcttgagtatgagtttgatcatgggatggaccctgaacatgccgctgaagccgcactctcttcacgccttaacaccggtcgtggtggattggattcagctccacctggctctcagattcctcttttgacttattgtgatgaagtgaggaatccaaattgtttgttctctctgacaatgttgttgcttagatgattctttttcttattagtctatgtgttttcaggatgctgatatgtattctgatcgtcatgctcttatcgtgcctccttcaacgggatatgggaatcgcgtctatcctgcaccgtttacagattcttctgcacctcgtatgtgtttacttttatgattcctacaatttttcttcttatatgatttggtcaccttctaatgagttatgaaatggttttgtttgttgttttcagcacaggcgagatcaatggttcctcaga

SEQ ID NO: 140360 - DNA, 1062 bp, Arabidopsis thaliana landsberg
gttgagcggtactgatttgtctgccacagattcttatcctttaaagaaacagaagctggggagcgaagttgctggacgaaaaaagactttgtttaggagtcaaagtgctcaaagtcgttcatttagagtccctcagagtgaaaaagaggatgagtcacttgagggagttaatataaaccgattaaagaagagcgttgcttcatttcaagaagataagtatccacctggaaagaagttttgctcagatgcatctcctcgtggaactagcatgagaaagttttccccaccttttgtaccaaatgcctggagacgactatctatgcctgtggagctaaagaaagctcggttggatttctctgaggaaaaagatgatgaagaaacagggaaatgggaatctgaaatgactcatgaacgtgagctgcgagatgatgattatgtttctggtgatgatggggaaaataatgaggtcttactgagatcaaatccttcatctagtggttacgatgattataatgatgatgacgaagaaagtagtgaagaggaaggagataataacaaaagagctcatgtgttggaccaaaccgattatacaggtgctgagttctaccagtcagagtcagacagtccaacatctattgaaatcttacccagcgagcgagcaatgtattactccgaagctgggaatatgatttacgggcaaacctcttgcaaggaggatgaaaggtttgattctgaagtaggacaaggaagcttatttgtagaggttgataccattcctattccaggacctccaggatcatttttaccaagtcctagagatatgggttttgatgaaaatcttgggaactagtcggttattacaagccaggttcaatcttccatggatcagcttgacagaaactcatctgaatcacctgtttccgctgtttcaaactttgcagctggtagattgaattttcctgctgagttatcttctttccgagaaaatttcaccccggatattgccatgtcctactcaacaaccccgatgagcttttgtgttccatctcatcatgggacaat

SEQ ID NO: 140361 - DNA, 1026 bp, Arabidopsis thaliana landsberg
aaagactcataaatctagggctttcttctagagatcgaagaagaagagttcacatagagagattttgttcgtttcgagattttcttcagtcccaatggcgtcaaacaccagcaacgacaatttccagcatagaccacggcaaagaaacggaccacctcctccgcggcgacagggaagaaatccgccgcctccgtcttcgtcaacgcgaacttctcagaatcagccaccacagcatacgccgcaggagaagaagaaaccggtgtttgtcaaagtggatcagcttaaacctggaacgagcggccacactttgactgttaaagtcgtcgatcagaattccgtacctcagaaaccgggagctgcttcttcttctcatctccgacctgctaggatctctgagtgtcttgttggagatgagactgcttgcatcctcttcactgctcgcaacgatcaaggtgagataatccgattctgtgttctaagattctatttttgaatcatcctctcgaatagccttaacgatcctgtggagtatcttagtctgttggaatctgtattttcatctctcaatagctgataaaccatttgatcgcattccaaatttgttcacacattgaagatttggtgcttttaaatcagtgtagatatacttgtagtttcactcctataacaggcattgatgctatatacaatgctacaattaaagattctgttgatttaggactctctagtaataggatttgttctgctctggtactcaattggtgattcatagtgggtcacttagctttttgggggctaatacaagtctttcttggtttttattgtgtgggtgcagtggaattgatgaaaccaggagctactgtgaatcttcggaatgcaaagatagatatgttcaagggatcaatgaggcttgctgttgataaatggggtcgcatcgaggccactgaaccagctgacattactgttaaagaagacaacaatctgtcccttgtggagtacgagctcgtcaatgtcgttgaggaatga

SEQ ID NO: 140362 - DNA, 1025 bp, Arabidopsis thaliana landsberg
tttgacgaattgtcagtggagcttaatagatctgtttttgaagctatggaagaccttttcgagttgcctattccgaccaaacagagaaacgtgtcttcaaaacccttccatggatatctttgtcataatctttacgagagtttggggatcgatgatgctaatgttttggagaaagtcaacgactttactcaacaattatggcctgatcatgggaacaagagtattaggtacgaacatgaagtcaatccatttaggccttttaatgtgcattacaaaatttttggttttcacttgattatacgcattacatgttgattatagaacacaagaattttgtgtttgaaacatttttgcatttgaaacagtgagacgatacacctgttttcggagcaattagtggaattggatttgatggtgagaagaatgataatggagagttttgggatagaaaattacattgatgaacatctgaattctacatattaccttacgcgattgatgaaatatacatcacctcctgatgatgatgatgatgatgaggaaactaagttaggtttacgctctcataccgataagaacatcatcacgatccttcatcagtatcaagttgatggtttggaagtgaagactaaagacgataaatggatcaaagtgaaaccatctcaagattctgtccttgtcatggttggagattctctttgtgtaagtcctagataacatttcttacacactttttaagtaaaaggatactcaaatcatacttgttgatgttgcaggcacttttgaatggtcgattgcattctccatatcaccgggtcataatgacaggaaaaaagacaaggtattcgactggactgttctcaattccaaaaacaggagttatcattgattcaccagaagaacttgtcgacaaagaacatccacgtatattcaaaccctttgaatataccgattttcttcacttctttcagacagaagctggacgtatagctcaatcagctctccatgctttcgctgccttctga

SEQ ID NO: 140363 - DNA, 1393 bp, Arabidopsis thaliana landsberg
atgcccagcagaaaatctgacaaagaagctgtgcattctctctcattcgaaacaccacagccctctgattttagtaagaagggaaagcaagaattagaaccgctgaacaataggatcataacagttctaagtgggagcagttctggactgtcagagaaacagaatttgatcagatacctcgagacattgagtaccaatgctgatgcagccaacatcctgactaacggaccaataatgcttgtgcttgttaaagttctgagattatccaagaccccagcatttcgtgtacaaattgcttcactaattggtttgttaattcggcattctacttcaatcgaagatgacttggcaaattctggtattttagactctcttactaatggcctcagagacaagcatgagaaagtgagaagattctctatggcagctctaggtgaattgctattctacatctcaactcaaaatgagcataaggatttcaaaccaccagaatccccatcaaaagaaacccggtctgcatcgggttggcaggtcagcatctctaaattattacttttaaatggggatcatttggcttttaatgtttatggtgtatttctagcggaccaaagtccattgcttattctgaatgttccatttttccattgtttcctatctaaacagattcttgctttctttaaactaggtttcaaatgccttgatctctcttgtatcatctgtcttacggaagggagaagatgacctgactcaggtttatgcgttgaggacaatagaaaacatctgcagtcaaggagcttactgggccacccgtttctccagccaggatttgattagcaacctctgctatatctacaaggcaacggggaaacaggagagcatgaggcaaactgctggatcctgtttagtccgtcttgctcgctttaaccctccttgcattcagacggtcgtggaaaagctttcattgaaggaaatagcttcatcttttgtcaaaggcagcgcaagagagcagcaagtctgcttaaatcttctgaacatggctatgattggaagtcatcatacattcacaagctttggaaggcatctcgtgacattgacagaggagaaaaatcttttccctagtttactctccatcgtacagcaaggaacagaatttctgagggggaaagctcttctctttgttgcatttctctgcaaaaacagtaggcgttggctgacaaatttcttctgcaatgcaagatttcttcctgtggtggacagattagctaaagagaaagacagttacctgcaacaatgtcttgaggcatttgtgaatgtaatcacctccataataccggggttgctggatacaataaccaatgatatccaacagctgatgactggaagacgacaatga

SEQ ID NO: 140364 - DNA, 804 bp, Arabidopsis thaliana landsberg
tcaaaattttcccattaaatcgcaaagttaattttgcgattttttttctctttttttctggttgggttatttattttccccttttaaaaaaattctgcaacttgtcttgaaatctggggtaaaatatttcttcattggtttctggaaatctcggggaacgatttgttgggttttcttctttgtactctctcctcacattagcttttgttggtgggattttttgaggatggtgattgctgcagctgtcatcgtgcctttgggccttctcttcttcatatctggtctcgctgtcaatctctttcaggtttggttgctgattcgtttctggtgttactctttttagattccgttgttgttctacattgtagatcctttcttcttttgttttgattcactgcttttagggtttccttctccagaaactttgattctttcgtttttgtcggtgattgtgtcttaattctgagtgtgcatatgagagtataagctcgaaattgactcgtggagctcatgcactgagctatagagtgttgtttgattctgcgattaagtatcactttcttcagatttatcttgatttctatgttgattgaatcgaggaaggaatctttttttctctcaacttcgtttgcttcagttttgatgtttactactacatattgttgtttcaggcagtttgctatgtactcattcgaccactgtctaagaacacatacagaaaaattaaccgggtggttgcagaaaccttgtggttggagcttgtatggatagttgactggtgggctggagttaaggtatccacct

SEQ ID NO: 140365 - DNA, 1420 bp, Arabidopsis thaliana landsberg
ttaatgctgaattagtgagtttaagggttggaaatgataacatgactacagagacagaaactcctttgctcgattttcctacaaggcctctgtggtcaaacatctatgtagataataatgcaaaagttttggtcccgctgctgtggaccagaatgcaggtcagtaaatttccggaatgtctttttttgttcttcttttgatatagtcttgaatcgtattttctactctgattcttttgtgttccttgtaaacctttataatatgaatggctttctatatttttctttttctttttaagagttgaccttgcaattttcagtactttttcttatcaaaggagcttctatgagcttaatagaagatccttggtctctcttcctttgaatacttagtatgttggcactaccccctatggttgttacttgttatttatttttctgattctgaaggtcggaggtcaaatcagtctttatcggggaagcagcattgttttcgggttatcaaaatatccaatttcagaatttgagcttgttgctgaagaacttttaatgagtaactccgttataaaggcaggttattgttcctaaccagtcagtaagaatcttgtttgtcttgtaccgtcctgtttttcctgtatgttatgttaagttatatgtcctttaatgaaggtttttggtgcattacgacttgttacgaagatgctgctcatgttgaattctgtgattcaaattgatggtgaaggaaaccctgcagtgccttcctctgttcttgaagttcgcaaccttgcagttctaaaggtatacttgaaaattttatcatgtctctttttcttaattggttggattggaagacagattttgactttttcttcttgtagggaaaatccgtcattacttctaatacgaacttgggtgtatatggtcaaggaatgttgacgctatctggtcctggggatgcaattaaaggccaaagactttccttatctcaattttacaacataactgtaagaagttattgtcttaaaatgttaataacttccaacttctgttgacttgtatacctctatgttattatgagatcatgtttccgtctgtttgttaacaaacatttacttagacatagtcatcggtggaatgcaaaactctctttaacagttcataaattttgcaggttggaccaggctctatacttcaagcaccacttgatgattatgaaagcaaaaacgcgtgagtaatacttcctatacgtttacataattttttttgtgaggatgattagtacttgactcaataattaaaaacgtttgacagggttactcagaccctttgtgagagcaaaacatgcccaatagatttaatcagtccgccggatgattgccatgtcaattatacactatccttttcccttcaggtatatttga

SEQ ID NO: 140366 - DNA, 2339 bp, Arabidopsis thaliana landsberg
atggcgaaactcctcgagacctttccttgtgttccctccaccgaacgaggccgcggcattttgatctccggcgattccaaatccgacaccattctctactgcaacggccgctctgtcttcatccggagcctccgccaactccaagacgtccaagtttacggcgaacatggctatgctgttaccgttgctcgctactctcccaacggcgaatggatcgcttccgctgatgtctctggtactgttcgcgtttggggaacgcacaacggcttcgtgctgaagaacgagttcagagtccttgctggtcgtgtcgatgatctccaatggtctttcgatggacttcgaattgttgcttccggcgatggaaaaggcaaatctcttgttcgatccttcgcgtgagtttctcctccacttcttcttcttcttctttcctgattttgagattcaatttcgagtccttggtaattaggcaaacaatttaggttttaatgatgactttgtagaatggaatgatctctagggcttgatcaatttgtgtttgttttatatatgtagatgggactctggcaatacaatgggggattttgatggccattctcgtagggttttgagttgtgccttcaagccaacgagacctttccgaattgccacatgcggtgaagacttcttggttaacttttatgatggaccaccttttaagtttcactcttctcacaggcatctttcttcttctcaattcatatatgtctcttagatattaacagtttgttttcttgactaatagtaccatctgctacacagggagcattccaacttcgtcaactgcatcagatattcacctgatggtactaaattcattaccgtaagctctgacaaaaagggtatgatttacgatggcaagactggagataaagttggagaattggcctcagaagatggtcacaaaggcagtatctacgctgttagctggagtcctgacagcaaacgggtaattgttgttaggatatcaatgtgtggccaagctatgcaatgtttagtactgatatttgatgagtttttaggtgcttactgtgtctgctgataagtctgccaaagtatgggaggtagctgaagatggaactattggctctgtaattaagacattgtcgtttatggaatctggtggagcagaagacatgcttgtgggatgtctttggcagaatgatcatctcattaccgtgtctcttggcggtactatgtccttgttctctgcagatgatatggataagcctcccttgctgttatctggacatattaagaacgtcacttctttggctgttcttggggaaaaccagaagacgattctgtcttgtagctatgatggtctcattgtcaaatggctaaaaggggttgggtacagttgcaagttacaaatgaaagacaccaaaatcaagcgattagcggctactgaatctagcattttcatatctggatatgataatatggtacaagttctgctaacaaaacaattgttcaatgagatatgggtttggactgtgttaaagtcaatgttacatcgcatatgacatcttcacttcttgacaggtttggagaattcctttaaccgacaacggatatggagctgcagaacatgtcgatataggccatcagcctctggacataagcatagccgttgattctcccgaagccacagcactagtctcgtttgattccggagttgtattgctcaatggtctgaacattttgagcaagatcgatttgggttttgctgtggcagcctctgtgatctcacctgacgggaaagaagcgattgtaggagggcaagacgggaagttacacatatactcagtctcaggggacaacaacctcaaagaggaagcagtcctggagaaacacagaggtgctttgacagtgatacgttactctcctgacttaacaatgtttgcttctggtgatgccaaccgcgaagctgtagtctgggatcgcgagaccaaacaggtgacgtgattagagttgttcttgtatgtcttatatgttcaatcatgcttaaacgctaacctggaagtgcggtttttgttttgcaggtgaagctaaacaacatgttgttccacacggctcgtataaacagcttggcatggtcaccaaacaacaagatggtagccacagggtccatagacacttgcgtcattgtatatgaagtggacaagccagcttcaagtcgcataaccgcaagaaacgctcatctcggtggagtgaacgcagtcgccttcattgatgattgcaccgtagcaagttccggagaagacgcttccgttcgtttgtggcatatcgaacctcagtga

SEQ ID NO: 140367 - DNA, 858 bp, Arabidopsis thaliana landsberg
agagagacttattttcgttctcgcaatcatattgttctcacaattgaccaaggaaagagaaatgcgagagattctctgaatttagagagaagcaaaagagtttttttttttttcgagaaccaaaaatggagaatcaagaggaagatgaggtggtgctggcgaaggtgacgtcggaggttgaggataattttgaggatgaagggttggtttcaaattcaacattggagaaagttgctgcagcgaagaagtatattgaaaaccattacaatagacgcatgagacacattcaacaacgtaaagaaaggtaccgtttttgtttgcacattatctgtttgtttctattcctaaaagaagaatacaatttgatctgttgcagaatttcacgaaatttctcgttcatcttcttctgttatctgaatggtgttgtttttagggagctgtaatgtttttgttaaacactgagaggtctttctctaaagtattaatggaaatagggttcttttgatttgcaggcgttgggtgctagaacaaaagattgcatctttagatgtatcagaaaaagaacaactcgagttgctggaggatttgcagaggaaagagacagagtatactagattaatgaggaacaggctttgcgttgacgattttgatcttctgagtattatcgggagaggagcttttggtgaggttagtctttttgggtattaccatctttgaacatttgttgttataagaacgccactttaactattcgtaaatgggtatctttcttaggtaagactctgccgtgagaaaaagacaggcaacatttatgctatgaagaagcttaagaagtctgaaatgcttagtagggggcaa

SEQ ID NO: 140368 - DNA, 2395 bp, Arabidopsis thaliana landsberg
gttttatgaaattgaagaacgaaattgaagtgaaaagtgaaatcgtgcaattttcatcttcctcttctccttaaaccctgattcggattctcacaatcgaacttggctgcagagaaggatggggactaacgaagtaacaaggattgtgactgatgaagaaaagagagaagcgaagaacttcaacatatttgatctccctgacgttcctaccggacttcctccgcatcttgagctccagcgaactcgcgttgtctgtaagaaggattctaatattcatgtaagtactattctcgatcaaaatttacactctttttaagctatgtataagttcagctaactagaaatttattggcttttctcagtgtatcccatgtgggtttgctatgttcatcgatttcgtgtagatttacagagtaaagtttaaaacttgcttgtagaaagctgtgaatttactgagtttggtcttagcaatttaagaagattacactgtgggtttgtcgaaatccgaatgatattgagtgatgattgtttgaaatttgaagtctttaatgttcttccctttctttttgtgttttattgtagcctacggctatcactttctcgggtgcctattcctctatgggagtggacaacagtgtgagactagaaaacttctctgaggatttcaaagttgatgtgattagtctcacagagacagatatggtattcgatatgatcggtgtccatgcaggaatcgctaatgctttccgaagaatcctcttagctgaggtctgcccactgtctcactacctctgatgaatctctgattattagaatctttggttaatagtgtttctttgattacagcttccttcaatggctattgaaaaagtgtatgtagcaaacaacacatcggttattcaagacgaagttcttgctcacaggttgggtcttattccaattgccgcagatccgagactctttgaatatttatctggtaagaaatattctgtggaatgtgatccatctcattaagcatataaactctttgtgtcacgcttagttttgttgctgtttatctttgtgtcatagaaaacgatcagccaaatgaaaagaacaccattgttttcaaactccatgtgaaatgtctaaaaggtgacccgcgtcgtaaaggtaatatatgttctttggtttgctcaagaagagtctttgttttattgttagctcgagatctcatgagaggtatcatttttttatttcttgaagtcttaacaagcgaattgaaatggttaccaaatggaagtgagcttatcaaagaatctggaggttcaaccacaacgccaaaaacttacacttcattcaaccatagccaagattccttccctgaatttgctgaaaatcctatcaggccaaccttaaaagatatcttgatagcaaaacttggccctggccaggtactgattctatttatactcttccccttaattgtgacatttgagaggacttaattcccgtgagagatgaaagacttgcatcttcttcttgcaggaaatcgagcttgaggctcatgccgttaagggcattggtaaaacacatgcaaagtggtccccagtagcaacggcttggtatcgaatgcttcctgaggtgagaagttcaccataagccttctgggaaaaggacttaattaatttcttcttgactcgtcctaggcttttccggtaatgctttttgtttataatatcttaggtggttctactaaaggaattcgagggtaaacatgccgaagaactcgtaaaagtctgccccaagaaagtttttgacattgaagacatgggccaaggtgaagtaaaagccttcccaagtttccttcaaatgtctttacttgcttttgagtaacaataagagattctgatgaaacctgagaactttggcggcacattaatttgactcgcaaaccctggaaaacaggtaggaagagggcaacagtagctcggccgcgtgatttttcgttgtgtagagaatgcataatagatggagtggaatgggaggaccaagtggatctgcgccgtgtcaagaaccattttatatgtaagaaaagaaaaagaaatacacagttccttcaacctggcaattccatggtactgaaagagattctaattgagtttcttatcatctttcgcagttacaattgagtccaccggatcacagcctccggaggttcttttcaacgaagcagtgaagatattggaagataaatgtgaaagagtaatctctgaactctcctgaaaagagatttaattggtttagctctaccggcttggttccggtttagttcagttttgggttttgtatcgaagttaatacaaagaacattgaaatttatatatacttggttttcgtctcggttcaaatttag

SEQ ID NO: 140369 - DNA, 1339 bp, Arabidopsis thaliana landsberg
ttcttctttcattttatcacattcatttcctttgtcttcaatccaaagctttactcttcttggaaccaatctgctcccttttttattctgagtttgacaatggcggttggtgaggtcatgaggatggagattcccgccggtggagatttgactgttactactccggagttgcatgttcttgccgtcgatgatagtattgtggatcgtaaagtcatcgagaggttgcttagaatctcttcttgtaaaggtaaaaactcaaaaccaatctttttctgctctgtttttgttggttttaactctcctctgtttttcttcttcattaacaaactctcctctgttttttagttacaagtgtctttttttttttgttatttcagtgacgactgtagagagtggaactagggctttgcagtatcttggcttagatggaggcaaaggggcttctaatcttaaggtaattaagaacaaatttttcctcttctgctatctactgagaagaaatcttgtacattaaggaaagaccgaaagagtgaaacctttgcaactttggctattgcttcttcttgtctttatgatcaaatgagatttagaaaagaactagtctagttagtgatttatgtgttttggtattaagatttgattttgttagtgattttcatcataacaggatttgaaggtgaatttgatagtgacggattactcaatgccaggactttcaggatatgatctccttaaaaagattaaggtaataacaataataatggatttaccaatctgagaaagacttaaacaaagcttttttaatgctgcttatacaaaactccattgatatgtgcaggaatcttcagcattcagagaagtaccagtagtgattatgtcatctgagaacatcttacctcgtatacaagagtaagtactgattgtgtaatgtgtagtgatacagattggatcatatttgtgtctacactgtgatctaaacttatcgacttcttcttcttgtttttagatgtctcaaagaaggagcagaggaattcttgttgaaaccggtgaagctagcagatgtaaagcgaatcaaacaacttataatgaggaatgaagctgaggaatgcaaaatcttaagccattctaacaagagaaagcttcaagaagacagtgatacatcatcatcaagtcatgatgatacttctgtcaaggactcttcatgttcaaaacgaatgaaatcagaatctgaaaaccttttttctctactttgaattatatgtatagaggccaagaccttagcaaaaccattctgttaatattcctcaagaaagacaatgtttgagagagtcatcacact

SEQ ID NO: 140370 - DNA, 1713 bp, Arabidopsis thaliana landsberg
ctgcttcgactccatatctgaggtttctgacgtctgattaggtaactcccgcttttgttttttttggggggttttatccatttttaatgtctttgttgtctacttgtttcaatcgtatgaacttgagacgcgagaagctcagattcaggatccctaaatttttctctattttttttttagttttgtttcgttgattacaactagtcctaggttaaagaacaacgtttacaacttattttgcttttttcagttgtgcctaggtcacttgtccgaatctgtataattcacgtgtgtcttcctggatttgattacatttcatttacttagtgttgggttttacgttagtttaagctgctgagtactttgatgttttttgtttgtagaaaatgtctcgagctgagtcatcttgggagaggctggtgaatgctgctttacggagagatagaacaggaggagttgctggtggtaatcaaagcagtattgttggttatgtcccttcctcactatccaacaatagggacatcgatgcaattcttagagctgccgatgagattcaggatgaggatcccaacattgcaagaatctgtaagctcttcttacttgggttttgttccttagcgggtttagcttttcttttctctgtgcaatgacactgttgtgatcttcttgacaattgttttactgcagtatgtgagcatggttactcacttgcacaaaatctcgatcctaatagtgaaggcagaggtgttttacagttcaaaactggattgatgtctgttattaaggtatttttctcttatgtatgttagatacagtcatccatatgtttgttaccgaccacttcattgaatatgttatttatgccattggaagctgcatgaatcctgtgatgtcgttgatatatataatagatgatcaatgtgtggcagataattttgaattccgaatctgtttttcggaaactgaaatgcgttgcttgtaaattatacgatcagcttcattgaattttatttatgtgatttttgcccatggttttgcattcaaatgctttgttatcacttgttaattgtagcaaaaattagcaaaaagagaggttgggaccatagacagaagtcaggatattcttcgactacaagaattttacaggctatacagagaaaagaacaatgttgacacgttgaaggaggaggagaaacagctccgtgagtcgggggctttcactgacgagtatgtatataaactatgcgcttattacttttccctttgcacataatctgtgaattttatgttcttgaacgccaaacataactcagatagcttaattgttgtccatacggtttgatattggcttccaggctggaacggaaaacagtaaaaaggaaaagagtttttgccaccctgaaagttctgggaagtgtgttggagcagttggcaaaagagattcctgaagaggttgtgtagatttcttttagcacatcttgtttcattcttacattttttgaacttaagaaagggaatcatgaggatgaaaagttactccaaaaaagttgatgcaattaaactcctattcagctaataattgcttgttttgtacctctacagcttaagcatgttattgattcagacgctgcaatgagtgaagacacaattgcttataacattattccttttgatgctcctgtcacgacaaatgccactacaactttccctgag

SEQ ID NO: 140371 - DNA, 1379 bp, Arabidopsis thaliana landsberg
ggaagaacatgaggagattaggaggcggtggtctttctctccaaacttttgccaacatgaaatcggaaaataatcgctataacccttctttgatcagtaagagattcttctctctacccaacttgaaaaaaagtttcctttttgattgtaacttgtcatcctcttgcttcgaacttaagctagtactcgaggattaggaggaactatatcaagatttaagattaggctgatgttaagaatgctacgatgtgattattgactatgtttaccctgcttctctctacccaacttgaaaaaaagtttcctttttgattgtaacttctcatcctcttgcttcgaacgtaagctagtactcgatgattaggaggaactatattaagatttaagattaggctgatgttaagaataagaatgcttcgatgtggttattgattatgtttcctttggtgttaggcatcagaagagaactatttggagttcctttaatggtgtatagtttcacagtttgtgttttctaatcagattaggcttaagctagtactcgaggattaggaggaactataataagattaggctgatgttgaggatgctacgatgtggttattgactatgttaccctgcttctcaccacccaacatgaaaaaaagtttcctttttgattgtaacttctcatcctcttgcttcaaacttaagctagtactcgatatttagaaggagctatcttgagatatatgattagactgatgttaaccataaggatgcttcgatgtggtcattgatgatgtttccgttggcgttaggcatcagaagagaactatttggagttcctttaatggtgtatagtttcacagtttgtgttttctaatcagattaggcttgaagtatagattgaatgagtgttcttttgtgctcactttcagaaaagcaaaaagagttctacaagaatgcaaagtatgtgagcaagtttaggaagtcgttgaagcagcagaacattcctgataagaatgagactggagagactagtaaggtaggtgatgatgatgatgatgataagcggaagggtaaatctaataagagaattggtgtagaggatttgtacaagcagacaagagaagagatggagagagtaaggaaggagagagaggcaatgtttcaggcgaagaaggaagcgaaagaagaggctgaatctaggaggaaagaagcaaaggggaaaatgttgaggaagactcgacatggtcagcctgtaatgaaatacagaattgagcatcttcttgaatccatcaagaaatctgccggaatcaacgaaatcgcctaccttgtgcgggttgatacagtgcagatgaagaacccagtgaggagaagttgctggtgttgcggag

SEQ ID NO: 140372 - DNA, 871 bp, Arabidopsis thaliana landsberg
aagtaatcaatcaaaagatggaaggcaaaactgtgatctcaagtctgctcataatgagtcttgtcttagcacagattcaagtaaaagcaaaaatctgctgtcctaccaaggatgatagatctgtgtattttgtatgcatgctttccgtgtcatcccaattttattgtctattaaagagtaaatgcaaaaatacatctcagtcgatatgtcctccgggatatactaatgacattctcgaaaattatggtataaatctattttttctattaagttatatttgttataagatggatggaaatttcatttgtgtatgcaactaattgcatgtatcttgatttttgccttaggtgatgctgtcaatgaatattgcaagctagggtgtgcatcctctgtgtgtggtgccttgaccactctccaaaactttggtaaaacaagttcactatacattattatttttttctttttttttgttattattattaacattttttaagataaaggaataattcaaagtaatattgttttgtttccatgactagacgcaagtaaagtattgagtgaagcggttgaacaatgcaccaaggcatgttcttctgtctgcaccggaggatctaccgccgcagttaaaagtgcctaaacaagtatatttaaaagtgaagggtggtcatcattcagagtggcgtgactgttttcatggaataattgtcgtctatcgatgtatgttgtaaaaaaaaatgctagactatggtgctagtactgtttaataagttgtttccggtttgccaatgtgtcatgagagtttttgatcctagattgtatatcccttctacttgtctttctctaaataaataataatgtgtccttctcgact

SEQ ID NO: 140373 - DNA, 919 bp, Arabidopsis thaliana landsberg
ctcgaaatcaaaaagcacgtcggtgacttgtactcttcaatctcttcttcctctctttcacatctccttctctcgaacccatcgacctgcgctaattcatcatcgaccttgctcaaattcatcaaccatgtcttacgattatctcttcaagtacataatcatcggagacacaggtgagagaccgatctttcacctttcttaattcccaattgttttatttttctgggttaaatccatttcgagccgattttcatgtgttttcgttgttgttttttttgtcgcttcaggtgtgggaaaatcgtgtctgcttctgcaatttactgataagaggttccaaccagtccacgatctcaccattggtgttgagttcggtgctcggatggtcaccgtcgatggacgccccatcaaactccaaatttgggacaccgtacgcttcctctctcttctcttggtcgtaattaggtcatcagggaactaatcacgttttatcgattaggattgttttttttttctccctaaggcaggatgtgattaagaagattaattgtcataatcaattcaatttcttcgtttttatataaacaatgcctcattagaattgccaataccaaaaattatgtttgaaaatcatgtccagagactcaaagtggggtaaaatttcaaaaaagttaatcattgcacggttcttgattaagtttcataggcttattgtaatagaagctgagttcaccagtgcattccttgttgtgatttcttctggtcaatagttcttccattggatgatgtatgtgttggagttgtgctttctgattaaagtttcgtatgatattttttaagctggacaaaaatcttttagatccatcaccagatcatactacagaggagcagccggagctttattggtttatgacatcaccag

SEQ ID NO: 140374 - DNA, 1341 bp, Arabidopsis thaliana landsberg
tagggttctaggatctctgctcttaaaactcttatcgccgctaaaactctctacccatcgcagagcctctctaaaggttatcttcatgatctcactcaatacatatgtttcgttactatatgtttttgcttctgattgtcgttattctgtaatcgtttagagtcgtttatggtttcccccattttgtctgtaatgtccatgctctgtttctttacagtttcctctccggcttgttagatatcagtttagttcctgatttactgagaaaccaagcttttgagcttaagtatgttagggttctgacgttgattgagaaatattataaactggttttcaagtttatttctttctggaatttcttttgtagtctgattataaggtacactgctagatatactggataggttacagtctcttactacttatccttgtctctgttctttggaatctatctgtaggattctctctttcttgttagatttatgagcctagtttctcactcagttaaatgaaacctgatatatacaatcgtcttctagcttcttaactcatcaggtgttgcaaatttgtaagtgctgtttggttctgcattttgcaattgatcattaattgagaagttgttaaaaatcattagatgatgtgatctttaagtttttttgcttttactgattagtgtttttgtagtgttttctctgctttgtttgcatctgttgttctccagagctgtgattggtttataaaggttatacagtcttgattcaaatgtgaacaattctctttttctaaggattttcacttcttttgtaaaatttggtctctgaatgtttttgttttgttgaatcagaatggattctcagatcaagcacgctgttgtagtgaaagtgatgggaaggactggatcaaggggtcaagtgactcaggttagagtgaagttcactgactcggaccgttacatcatgaggaacgttaaaggacctgtcagagagggagatattctcaccttgctggagtccgagagagaagctagaagacttcgttgattctctttgcaaattgtttttggttgctttgaagaacaaatgttatatcgtttggataattaaattcttattatgatgttaaaaaatttaattatcaaagattgatgctttagactctaaatctatattatattaaaaatcatttctttatcttcactttgttatatcaaagaaataagtcatgtttcacactctgcctaaacctttaccaccgaaaaaatgatgttcatgtgcctctctaatcatgccttggagataacaaaaagcttaagcaacaaattcatcattttgaatatcatgg

SEQ ID NO: 140375 - DNA, 905 bp, Arabidopsis thaliana landsberg
attaggttcaccgagtgcttgttgacatagtttcagcttctgcgaatgccacacctggtcttgggagatatcctccttttaagagagaggtaataatgcttttactgctctttcagttgtatttttcgtcttactaataactgttccttttcttaaataatcgtcaaccaggttgtagctattgcaagtgccgcacttgatggattcaagaatgaagctaagaagatggtagttgcattagttgatatggagcgtgcatttgtaccacctcagcacttcatccgcctcgtacaaagaaggtaacatcagcttccctttctttgcttttttgctgtcatttcgagtggcattatcatactcaaacttatagattattatcttaaaatttccatcttttaatataaaacggttttaaacatgtacaaatggatttactttcttgtgtgtcctgctattttttttatgtctgcctgtgaaatgaacatttatgtttctgaatactttcattacatcacaaatttgacctttttaattgtcccatagcggcagcattttgtcgcataagtcatgatatttacagttataagttcttatggtgacgcatataatctaactatattttcgttttttggctgtacggtttactatctttatcagaatggaaaggcagcgtcgtgaggaggagctgaaaggtcgttcctctaaaaagggacaagatgcagagcagtctctcttaaacagggtttgcttttatctcagaatcaatctggattcatttagtggacagtgcttctactatttttttatatggaagtacataatgaaacaattcttgtttttgcttgtaaatcaggcaactagtcctcagccagatgggccatcatcaactggtggtagcttaaaat

SEQ ID NO: 140376 - DNA, 656 bp, Arabidopsis thaliana landsberg
tcgaaaaaaaaaactctccgactcggaagaagagggagagagatgaagaagccggtcggagccgagaagaagagggttaaacgatcatcgggatctgcatctacttccgttagagattctggttctgattctcaacctagggtttgctctcctctctcatttctctctaatctcttttataaaaatttgttcttaggttacgtttccttttgtttgatctgttttggtctctgatggagcatttgacctgcgattgcatgattatataggcctttttcatagttaagttttgctaaattgtatgttaatgctcgtaaattttactgttttggttgtgtgacttgtgaattataatctctggaatgttaattgaatcacttgtgtggcgagaatttgaatttttttgttttggccttggtactgttaaatgatgatcctttgcatttagtgattgatatgctcaaatgcttattgttgtctttactttactagaagcaagctgtgaagaaggatagttttcagttgtttgctgagaaagttagagaccacaagggattagaatccagatgggctgttatggagcaagcacgagttgaatactttagagggaaagattttgtgagctttatgaagaataaccctgactttaaagatat

SEQ ID NO: 140377 - DNA, 1424 bp, Arabidopsis thaliana landsberg
gtcaataggaaaggcggcttgggaatgggatgaaagccaggtattgagtggtcgttgcgcagagaccgatgggacgtggttaggtatttctattcgaggccgagtcgcttttcttgtggaggcagggcccgttaacagagacagaatcatcggcgccgagtgtcgtactcttgatttcttaaaggttcgattaatgatttctttttgttgattttttggttaaactatctggattctcacgggattgcgttgattacagagcaacttgagtccagaggactttgcagattcattggctttagattccggacgtaacacggggatagcctatcatctaattgtggccgacatagtttcaaactcaatgttttatatctacaaaccgtctttgtctgaagatggcatggtctatacagagcctgttggtcctggtgttcataccctatcttcagctggactcgattccgaagttggacacagggtaatttagtacaagaatcttgtaacagagtatttatttgcaaatcttttcatatggaaatgtatagcttaaaagccccctttttttttttggtctcatgcaggacttacgtctgaaacgctatttttctgagcggattaacagagaactaccagaaccaatctcggggcttgctgaggaggttatgtatgatacagtcgaagctataaacggagacccactgagctctatctttgtcgtcgacactttggtaagaaactcaaaacattataattgagccaccttttttatgatcatcacctagcctgcgttatattattataatctctcttcttcttttttacctttttgattcagattgaaaacgaacactatggaacaagatgtacgacagcattggttgtgagacgcaccatgcaagtgaggttctttgagaggtacagggcgagatttaatgatgactggaacgtgcacgacttccggttcatcatctagctacaaggagcatcccgcagcatccgaatattattatctatactaaataatcttgttgatgctgtaattaattaatagatcataatcttctcggttcagggaaacctattacattggtcacagtatttatctctagtctatgaaacaatatgctctaaataaataaaaagtagttgtttttctggaactttcctatgtcgacatttcactttatattttccatctattcagttcttgagttattttttcatagttggaaaccctgattgagcaattttcaagcaaagtcgtcaagagcccttgtcgtattttctttagtacttactaaaaattaaaaacataaggtggtaatgaacaagaacaatgaaatcaggaacatatatagagagattaagaaacatcaagaagacaagaacgtaggaacatatagaaaataagaaaaagcaag

SEQ ID NO: 140378 - DNA, 642 bp, Arabidopsis thaliana landsberg
gctttgtttggtttttgggtgttggtgaacaggaacttggtctttacaaggctcaggttgtgattcctttcaacgcttttgggacaatggcaatggcaagagaagtgagtcctttcttcttcttcttcttctttttcatagtttatattattatgtcttatgaaacatatacttattgagtaacatataaacaggagtttgagaatgactcaggatcaagccaagtgttttggctgctaaaagagagtgagctgacaccaagcaattccaacatcttggatggtcgttacgctgtctttggttacgttactgataacgaagattttctagctgatcttaaagttggtgatgttatcgaatccattcaagttgtctccggtttagagaacctcgctaacccgagttacaaaatcgccggttaactcctcttatctttttccttttcttggttcgtaattaatactctgtttattttaattttgtgagagtatattaaaggtgcatgtctttttcctacaaatatagtatataattatgaaatgtttgaattttcatgatggaatgctttatatttatcagaaatgttgaatgcattaaacaaataaatcattggaaaattataaaacaagcgaagatcaagaa

SEQ ID NO: 140379 - DNA, 4920 bp, Arabidopsis thaliana landsberg
ctttagcaatgcaggcatgaaagaaaagaattccactaccgcctctacacttggacggattttagctacttgttctaaacaggttggtttgacagctccaattactttttttttttttttaggtttcgtaatgaatttgtgatagttttgctagttgttatattacgacatcaattttaaagaatgtgtgaaattatattatgtcaattgtgaagcgataattcttttacgtgtgcattgtgtcttgaagatccagtccttgttattgactagaaagtaaacttgttacaggccaaagactacgggagctgtgttgcatctaaagttcatgaggttgaaagagatatatgtttgaaagagtttcttgcgctgaagagttgtatgcagcatacggtatattgaactatattgttagagtcttgtcttgatcattttatcctcatctttgtagactaatctgttctattatcatgtttttttttcttatagatccgaggaaaggcttgaatcacaattatattctccttttcgttagaggcatttatcagcactgcttgaagttttaacatgtacgcctttcttttttattttcaaatctttgtgaaacatttctgagttagtctgtggttttttataaaaactttaattgactcagtcccatcataaagtgggacatccatttcataacatttcattttggactaaagtttggttcctttgaaatttgggaaactgaaatgtatgaatatgtctagcaggaattcaagtgcacaggcaggtgttggttctggtgctttatcacatgtctatatacatcatccatccctacgttgcaatattcctgaatccaatgggttattctatgatgatgccaacagattgctaatatgtaccacatctagtcaggtgttttattcttttcctttgaaatgtttgatttgattttgttttacccataactgatatcttccattagcctgatgattcatatcctttgattatttcccaattttttcatttaggtcttttcatgggaaacatcccccttcaatccagacgtacctccttcagttgattctataagtgaagggcctattctatcaatcagattttctcttgataaaaaagcgatagctgtccaaagatctgactgtgaaatacagttgtttaatcgagagaccaagcagatacttaaccacaaatgcaaggcaggatcagagagcattctcggattcttttggagtgactctccattatgtgatcttgcaattgtaaagaccaggtaaacttgctttgttttctgcatagtttgacaacagagaaatatttccaattctgagattgtttgcaaccttttcagttgaattttaaagactgattggttgtagttgagaattctaataacttgtttaaacgggaatttattggcttgtaagctttgattttagaatagttgtaccatttgacttggtatttctaaggcaaataaccctttcagtatcgggtaattgggtctggacattcctttcacaatagagcaacctatacatagttgtttctgtcttcagctcgtctattttactataactttcaacatttcgcttatcatttgtctttctcttattcttttcccctctaatgaaatctttttttttggtctcagtggtatggacttgttcgcttgtgattctatgttgaattcactacgtttggtggaaaccaaaaaggcgaatgtgaattggtacatctatacacatgaaactcgattggttcttcttgcatcaggactgcaatgcaagacatttaatggatttcaggtgaactcctagaaaagtacaaaaagatgaattttgctatgtgaaagagcttttccaactttgttacgtataggttgcatccagttaatttgatgttcatggccttaagatatatatgctacagttttcattcagcttttatggtcgagttaacaattaaataacttaaaatatgatccacttttccagctttccactgcaggagttgttcgtttaccgagatttgagatgacaatggctagatctgaatcaaacagtaaacctattctctctgctggagatctccacttagtcactgtgtatgattcttctatgtgttcctcttttcctcctattttttgtcattatcgcactacgtaccttgagagtaaatctgtatcattctctttcagctatggccgaatatattgcttacaagtggacagggaggcaatgctactgcatctatacaggttctaccgtgatgcagtcgtccaacaagttagtttacttttccttagttcctgatatctggttattcagatgccatttaggcaagtctactatatgttcaataaagatcatgtgtgcatttagatcagcaaacttctaaaatttaaaagttgcaagttcataggaaaatcattacacatgaattactctaattgcaactgcaagaggagggtaacctatacgaagttgatgctaatattactttttctttagttatgttactaatttggcattgcaaaacaacttatcttgtgttctggacatgagatcattttgcaaagttctgctctttatttggtcattggattggctcttatttacagggttctttaccaatatactcaagcaagttgtcggtgaatgtggtcgacaatttattgcttgtgcaccaaatcgatgcaaaggttgtcatcatctacgacttatttgtggattctcgagctcctgtatctgcgcctcttcctttactgtggaggggttaccaagtctctgagacatcgtctcaagctgttaacaaagaaattgagagctcagaatcatctacaagcaatgaaaacatagtcatgtatgaagatggctggacctttctggttccagaccttattctggatcagacaaacaaggttttatggaagatacatttggatcttgaggcaagttggctttcattagtttatccagatgacagttaattcttagatatgtcgtaaatgttcagtatttaatactatgtgctgcaggcaatttccgctagcagctcagacaggacgtctcttctagaattcctgcagcgaaggaagttggaagcaaataaggtccaaactttctgttaatctgtgttttagataggagtttaaaattttgcccaaaaaacaaaatatgagtctaaaataaacatgatgaagcacctgttttgtagcagcaaaccgtttgaggaataaatcatagacaattgataaagaatcttggaacttcagttatggtttttgcgcagttagtgaagttatatgcaagtctaacttaggaaataactagtgctcgtttccatatttaatggtttgtagcggttgatgactctttttctatgattacgtgaatttatagtgtctccaggaaaagtggttcacgaaaagtgttcggtgtttgtagtaatcttggttggatcttttgatggtgttgattacgttattgcaggccaaacaattgtgcttggggatagcaagggctattattttggaacgtcgaccagcaacccaggtaactcaggcaatcgatgtactagtcacagcatattcctactcggttaaagccggtacatacaaggaaataaagaacgaaaacgccactgcatctactccaacccctggtgcatctcctggtaaaacctttgaacctgaaaatgttattttatgcatgaatatgctaaatgagtgacaatctcttaacacatcttctcaacttatcaacctttggattctgaagatagcgaaagacataggcagtctggaagcaatattgatgaagaagttgagatgaacctatcatctggttctcaggagaacatgttttgtgctgatgaacagcaagaatctcaactctcttcaccggcaatttcacccgatgagctctacaagtttgtatttacttctgtggaggaaatgatggttgaggaatcagagtacctagttgctatcatcaccgagttccttcgcaggtaaactaactttttcttccgtctgtttgtgtttccagagactaaagaaacttggtttttgctttagatctagtctcagtttaccaattctgcagtttcttactttgatcctttgttgcagtataagtgcagaaaaactcaaagtggatttgaacatctatgtgatgaccatcaaacttttagcttacagtaagcgatttgcagaactgtcgctattcaccacaaacaaggtttgttattcttctttatctgtgaagacaaaacctcctctaaggtttcttgttcttagagtttaggctacatttatgtgcagataatcgaaccatcaaaggaagtcgcgttccaacttctggatagtggtcgtcaaaatatccgggtaagaaaacttgggcttgatatgttgagacagctctccttgcaccatgattacatctcctcccttgtgcaagatggatactatcttgaagctctgcgatatgctcagaagcataaggtataatatcttaacagatgaaagtacactatatctggttttggttttgattaattccgtgtatgcaaatttgcaggtgacgagtgtgcgatcgtcgatgttcctagaagcagcattcgcgtcgaatgatatgcagcatttggctgcaattttgagggtcttgtcggaattgattcccgggtttaaagaaacttctgaatattacaccttttatggtcttctcaatgacaccagttcctcagttgctgtctgaagagaatctcataccacattttatgttcaagaaagtaaaatgatctctggttcttcgactggatcttgataaataaatgctgttgaacattttctggttcctatataagaataactataagaattggttttaagacatctctaatgacgag

SEQ ID NO: 140380 - DNA, 1183 bp, Arabidopsis thaliana landsberg
gttccgttcagactgacaagagacatcattgatggaatgggtatcacaggagtggaaggcgtcttcaggagatgttgcgaagaaaccctgtctgtgatgcgaacaaataaagaggcgctgcttacaattgtcgaagtaaccagatctgaaagttttaacttttgattttcttaaaatacaaaagtttttttgaatgcgtaatcaagatcgcttgttttgcaggtttttatacatgatcctctgtacaaatgggccttgtcccccttaaaggctttgcaaagacagaaggtacctcgtacccttatagttaaactgtaaatgtacaatgtaatgacctttgcaaaaaggttatgaaatggacttaactacggatttttgtttaaacaaatgcttccggtgctctttatttggatctatttcttcacgctaattattttgtgttccacttcattgtcttgatccagacgagattccaattcaatattaggatagtttatcctgttgaatacgttttgtttctcacacaaaggtcttgatccaggaaactgaagattatgatggcatgaacttggaagggttacaagaggagttcgagggaaacaaggatgcaacacgtgccttgatgcgtgtcaagcaaaaacttgatggctacgagggtggtgagatgagaagcatacatggccaggtaaagtttttgacatattaattaaagagtataacatttaaagcttgcattgttcttgccttcttggtgttactgagtgtatttgctcaacacttaattgttttgtaggcacagcaactaatacaagacgcaattgacacagatcgtttgtcccatatgttccctggctggggagcttggatgtaaccaaccttctatatgcttccaattttttgtctatgaatagagaaatctttatgtaaagttgaaaaatactcggctgccaaattttgtctagcttaggatgggaggagcaatctaaaaacggcttttgcgtggaacagaacaaatatgtgaagtaacaagctcaagcctataatatattactgcttttgtgcattttgcgtattggctcatgaagtaaaataatttcactagactcgtattttattatctttcaacaagaaaaaggttaaagaagctatgtttaaacaagctgtgggcggtacattacagaag

SEQ ID NO: 140381 - DNA, 827 bp, Arabidopsis thaliana landsberg
caggattaaaggaggttggggatggaggttatcgttaggtttggcgggaattcccgcgcttcttctaacggtcggagctttattggtgacagagacaccaaacagtttagtcgaaagaggtcgtctcgatgaaggtaaagctgttcttcgtcgtattcgagggaccgataatgttgaaccagagttcgctgatctccttgaagctagtcgacttgctaaagaagttaaacacccttttagaaaccttcttcaacgtagaaaccgtcctcagctcgtcatcgccgtcgctttacaggttagtactaccacttctctgttctctcgtaattggtaatcggaaaagtttatctccgatttggagagtttgactgaagtgattttgtttttcgtttaggatctagaaaccctaaaatttgattccattgtggtcattttaggagcaataaccctaattgtttgtcaagtttccataattttaattccattgtgttcattttaggagcaataaccctaaattgtttgtcaagtttccataattttgattccattgtgttcattttaggagcaataaccctaaattgtttgtcaagtttccataaattttgattccatagagttcagtttcaaagtttaaagctaatctttttttttttggtgtgcaatttgcagattttccagcaatgtactggaatcaacgcgattatgttctacgcgcctgttctgttcagcacattagggtttggtagtgacgcttcactttactcagcagtggtgaccggagcagtcaacgtcctctcaactttagtctcaatctactccgttgacaa

SEQ ID NO: 140382 - DNA, 319 bp, Arabidopsis thaliana landsberg
tgaacttctgcttataccagtttgattaactttgtctactatcagagatgaaatgaataagatctatgagaataagatcgacggaagaacaactcatgatcggagatttgatcggagatgctctgataccatatcaggaatcttcaaactctagagagagagagagtgaaggaagaagaagaagacaacagaaacaaaataatcgtctattctcgttaagttgttaatgtgtacaatgtgctgtatatatactctattacattttatactatagagtaaaatatactcattatatctactgtatatagtgttataacgt

SEQ ID NO: 140383 - DNA, 1190 bp, Arabidopsis thaliana landsberg
gagttggcagcgaggatgaaatggcagattttattgtagatgaagatgatgagcatggtcctcctaagaggtattttttttctgtcttttttgtgccctaacatatcacttatgtcatgtacattttctgattctaatcaacttacttttcaggggcaactcgaagaaaaagaaatataggcagggatcagatattactgctatgcgagatgctaatgaaatatttggtgatgttgacgaattattaacaattcgcaaaaagggtttggcatctaatgaaaggatggaaagaaggctcgaagatgagtttgaaccaactgttctttctgagaaatatatgacagggaatgatgatgaaatccgccagcttgatattcctgagagaatgcaggtgcattatcttctttagttttctctatgtatacttgtggtctatgttttatttggtgttcaaggatagatgtaaagatatcttgtaaactttgacagatatctgaagaaagcaccggaagccctcctgtagatgaaattagcattgaagaagaaagcaattggatatatgctcaacttgcttcccaacttacagaatctgatggaacttttgatgggcagagtttctcggataataacgatgacatataaaaactttcggagctacatcatgtgcagaaattagaggtttttgattcattctctcgttggattttctttgattcattgattagcttgctaatgttttctgtctcttctagataccgtttatagctatgtaccgaaaggagcaatgccggagcttgttggacactggtgattttgatggcgccaatcaaggcaagaaacctgagaccaagtggcataaggtaagcaattatcttggataaacaacaagtgctcaggttaacatttattgtcagaggaaatttggtggattctatactattttccaatgcaggtcttctggatgattcatgacttggataagaagtggctccttcttcgaaaaaggaaaatggcgttgcatggttactatacaaaacgttacgaagaagagtctaggagggtctatgatgaaacaagacttaatctaaatcagtatctttttgaatcagtcattaagtctcttaaagttgcagaaacagaaagagaagttgatgatgtagattccaagttcaacttgcattttcctccgg

SEQ ID NO: 140384 - DNA, 1999 bp, Arabidopsis thaliana landsberg
ctcaaagctcagtgtttaataattgtatagcttttttggtgaacgaagagtcagatcggcgagcctgagatgggttggggttcggtgttgctattactggcggtggctcttctttgtcagagggcaagttcaatcggagctaactggggcacacaggcgtcgcacccacttccaccggacatagttgtgcggatgctaagagagaatggtattcagaaagtaaagctctttgacgccgaatacgacactctcagagctttgggcaaatccggaatcgaagtcatggttggtattcccaatgagatgcttgcgactctcgcctctagcctgaaagctgctgagaaatgggttgctaaaaatgtctctactcacatctccaccgacaacgtcaacatcaggtacttcctctgtttctttcctttattagggtttcacatttgtactgtactagctggttaattggaatcagtgactttgagtttggattccctaaacagttactagccatgcctgaaattacgggctactgtctttttctgagataattctacacaaatctctagagtaggtgctaaattgatgctgtgatttggttgttggacagatatgtggctgttgggaatgaacctttcttgtctacttataatgggagctatctgagtactactttccctgcgttgaggaacatccaaattgcaattataaaggctggccttcagaaccaagtgaaggtcacttgtcccttgaacgctgatgtctatgacagctccaccacttttccttctggaggggacttcagggccaatatccgtgacctcatgatcactatcgtcaagttcttgagcgaaaatggcggtcctttcactgttaacatctacccttacatcagtctttacaccaaccccgatttcccagttgattacgccttctttgacggcaatgcacagcccctgaacgatggtgggactttttattacaacatgtttgatgcaaattacgacaccctagtccacgcgttggagaagaatgggtttggtaacatgcctatcattattggggaaattggttggcctactgatggggacagtaatgcgaatttggactacgctaagaagttcaaccaaggctttatggctcacatctcaggggggaaagggactccgaggagacctggccctatcgatgcatacctgttcagcttgatagacgaggacgccaagagtgttcagccaggatactttgagcgacactgggggatattcacatttgacggcttaccaaaatatgccttgagcctagggacaacgaacacaggagctctgatccaggccaaaggggtacgctacctagagaggaagtggtgtgtgatgaagccaaatgtgaggttggatgatccgcaggtagctccagccgtgagctacgcgtgtagccttggggactgtactagtcttggggttgggacgtcctgtgctaatcttgacgggaaacaaaacatatcgtatgcattcaacagttattatcagatacaggatcagcttgatacagcttgtaagttcccaaacatatcagaggtgaccaagacagatccatctactggaacttgcagatttccgattatgatagaaccttactacggtggggcagcccgggaacacgggttctttttcccactactgatggtggcagccatcgcagtctctattttttgatggtttcttcttgtcaatttgtaattctgtgtgatggcttgaactatttttttttcttcttgaattctgatttctcttccttagaccaagtgattattagagctgttttctgggaccaaactgaccttaaaacaatgccatattgccatgttcaataaatcaggcccaaatgagcatttgaatttgtactatagtagttgggaaagtctattgcgctctctttctccctgaagctctgtttcataaatgctggagagactgtccttttgttgttttagacatctatagta

SEQ ID NO: 140385 - DNA, 932 bp, Arabidopsis thaliana landsberg
atggctttggtgtgttataaagaatggaattagtaaggctaacggcatattatgtgtttttcaaaggtgggtgatggcataaacgatgctccctcgttggctcaagctgatgttggaataactctaaagatcgaggcacaagaaaacgctgcatcaaatgcagcatcagtcatacttgtccgcaacaaactttcacatgtaaatgcttcaggagccactcaacttcaaaatctaagctatataataagctcatcacttgtggtttttttttttttttgtgtggttataggttgtggatgcactgagtcttgcacaagcaactatgtcgaaagtatatcagaatctagcgtgggcaattgcgtataatgtcatctcaatccctatagctgcaggtgtcttgcttcctcagtatgatttcgccatgacaccttcgttatctggtaagcggcccctatacgattccagttaattagttacaaaacagtttgttccacttccattctagtagattcatacaatccgatcatatatcatatatcatatggttacttaccattaatttgatttcaggtggactaatggcattgagctcgatctttgtcgtttcaaattcattacttctgcagctccataagtctgaaacaagtaaaaatagcttgtgatcggctccacatctattttggagtccaagcagaagaatgaaggttttgtatattctgctcttttggagtttgtttgttatttagcagtatagcgattatgaaccttgtattgttattcatgaatctgaggttatatcataattatacgtaaatatagataatcttaacttaagcatatactattgccttctaggtttctttgaaactccacgacaacatctcaccagcaaaattcacttccagtctggtggtaacaaatcagttccataa

SEQ ID NO: 140386 - DNA, 859 bp, Arabidopsis thaliana landsberg
gaacttgaaaaactttctcataagttttctgagaatgttttggacgctacaaagaagtttgaaaagttgataacagacaagaaagagattgaggggttgccaccatctgcactaggattgttcgcacaagcagctgtttccaaggtataatatctgaaagatttataaagtttcatgttgatttacattgggtttttaagttgttgattcgtcttaatatatatgacccaagggccatgaaactgcaactgctgacactggaccatggctcattacactcgatgctcctagttatcttcccgttatgcaacatgccaaaaaccgagctctgcgcgaggaagtctaccgtgcttacttatcccgtgcctcttcgggtgatttagataatacagcaattatcgaccaaatcttgaagcttcgactggaaaaggctaagcttcttggttacagaaattatgctgaggtattatagtctactaagtcaacttactctcctttactcatgggcttaaatttaatatcattctccttgtccaggtaagcatggccacgaaaatggctactgtggagaaagcagatgagctactagaaaagcttcgcagtgcttcatgggatccggctgttcaaggtaacttctagtgagaaaaatacttaaatcaacatatagttctttaactagtgagctgttactgcatttctctatccaataaagtatgtaacggtttccctcatagcttttttgtatcggcctttcaaaccaaaatcatgattataattaattttacatgtgttatggacttagacatagaagaccttaagagttttgcgaagaaccaaggtgctgcagaggctgacagtt

SEQ ID NO: 140387 - DNA, 970 bp, Arabidopsis thaliana landsberg; identical to SEQ ID NO: 6885

SEQ ID NO: 140388 - DNA, 590 bp, Arabidopsis thaliana landsberg
tctgttgggctaccaaaacgaagcagtacttccattaggaagcaggaggttcattcaaatggtcctgttcttgatgatactctacttcaggatccagaggtaacacattatgcagcttatgcaaaaatctgaaaaaacccttctttactcgtttaagtactcttctacatatgcaactatgcaagtaagactcttaatacttactttttggttatttcccagataatggatgcaattgagaatgaaaagacggttcacaaaaccatgagtatatacaatgtagatcgttctgtttgcggtcggattgctggggtgattgcgaagaaatacggagacactggttttgctggacaactgaacctaacgtaagacaatgttatgagacagtaaacacgtaacaaactttaaatatatatgtaatgagaacatgttttaaacttacacgttccactctgtacctctataggttcactggaagtgctggccaatcttttgcatgtttcctaactcctggaatgaatatacgtcttgtgggtgaagccaacgactatgtgggaaaggtatgtctcaaaatcacagttttctttcaa

SEQ ID NO: 140389 - DNA, 479 bp, Arabidopsis thaliana landsberg
ggtatgattcatctgtgggatgtggactcaggactttcccaactcgacaaatatttccatagtaatgataatcctatcattgctggagcactgctgggagttgggattgtaaattgtggcattaagaacgattgtgatcctgtgagttgctgtcgtgtttgattttgctggaaccatttgtgctaatatttgcagccactcttccatcttactcagccttatttctcaggcattggcacttcttggagactatatagacaaagaggattcatctgtcagaatcggtgctatcatgggtcttggaatttcatacgcaggttcccaaaatgaccaggtacttgttatattctttcccatattactacttgaatgtttcgggtgttcacaaaacgttaacacgtacactgtttcaacagatttgaaacaaattgttcccgatactgaatgatgcaaaagcgcctcttgatgtgattgcattt

SEQ ID NO: 140390 - DNA, 1203 bp, Arabidopsis thaliana landsberg
gatgaagaagaagaaacaagaacacaaacttatctctttatgttatcttttgtctgaattaaaaaaaaaatggattctacttcgaatgatcatcaagagttggaacaattcgaagccattgatgatctcctcgaagatttctggttctttgataacttacttgacagaagatcaaggatcttgaggtactgtcattcagatccttacccttttacttcttcttcttcttcaacttgtcccaaacccgaattaccgaaaattggagattcggattcggagattaagcttctagaagcttctactgggggagactttgttccgccgccgtgtatagagaaaaaagaaggcggaggcgagcctgagaagataaataaggtgatgagaaggcagttctctgagaagactagggttcaagaacgaagaacttacttgcaaaagaaggaacctgtagttcgagagaagggaattaaagaaggttcgaggaagaagaacagaacaagaattagttgtagtaacaataatagtgtccagagttgctcgatgggagggagtttgcagagaactcagactttgcctagttacttaggaagagaagacgatgtaaatgagtttcaagatcaagagattgatgattcaagaatgggatttttgatccgtgaagccatcgctaactcttcttcttcttcttcttctggatttactccaacgaaacagaacattccaaaggtgatgatctctctttgtttacattagtcttttcaattcttggatgatttgattgaatcattgctgttgttgagactctgaatttgaccagaaagtttttaaaactttgtataggtttcatgcattccaaggcatagaccacctagaaactcaagatcagaagacgctattcaagaattggtcgtcaaatcacaaaaaagcccaaaccgcaaaacgctgcgtaaaacgttaagcagcatcgagacgaaagatattcaaatgttgaaggattttcacattgaaacagagaagaagcaagaagaagacgaagaaaaacagaggaaggtcccatgcaccaccactgggaaaaaccggtctacagcggtggtgggacagccgattccggtttgggttccaaaggattcgagaaaagacatgaaagctcagataaagttttgggctcgaaccgtcgcaagtaatgttcgacaagaatgctga

SEQ ID NO: 140391 - DNA, 1290 bp, Arabidopsis thaliana landsberg
cttgcaacacctgtcctttctaaaaccctaatttcaaaatcgactgatgttagcgattcgatcgtcgaattacctccgatgcataccttctctctgtactaaaacccaaatctctcaattctcctccgtgttaatctcttttagccgccaaatttcccacttgcgtcttagctcgtgccatagagccatgtcttcttcccgcccttctgcatttgatgctctcatgtccaatgctcgtgcagccgccaagaagaagactccccagacaactaatttgtctcgctcgccgaacaaaaggaaaattggagaaacccaagatgctaatttgggcaaaactattgtttccgaaggtacacttccaaaaacggaggatctgctggagcctgtttctgattctgcaaatcccagatcggatacatcgtcaattgcggaggattcaaagacgggagcgaaaaaggctaagactttgagcaagacggacgaaatgaagagcaaaattggattgctgaagaagaagccgaatgatttcgatcctgaaaaaatgtcttgctgggagaaaggggagagagttccgtttctgtttgtcgcattggcttttgatctgatctcaaatgaaagtggccggattgtgattactgatattctgtgtaacatgttgagaactgttattgccactactcctgaggatttggtcgctactgtttatctttcggcgaatgagattgccccggctcatgaaggtgtagaattgggaattggtgagagtacaattatcaaggctatctctgaggcttttggtagaactgaggatcatgttaagaagcagaatacggtatgttgactttttaaaacttttgttgccttgtaattcaatgagcttgtctggtgtggaattgctataaggtttttgaataagaaaattagcagttctgaaattgaacttgatttataggaactgggagacttgggacttgtagcaaaaggaagccgttcgactcagactatgatgttcaagcccgaaccattgactgttgtcaaggttttcgatacgtttcgacaaattgctaaggtatttataaccttgtggcttttgaatgcttgaaattttgtttatgctttcaattgagattcagtcaaccgtctttttgtctgactgcatagaagatgagtgggactattgcatgttaactattacaggaaagtggaaaagatagtaatgaaaagaagaagaatcgaatgaaggcacttcttgtggcgacaacagactgtgaacctctttacttaacacga

SEQ ID NO: 140392 - DNA, 1598 bp, Arabidopsis thaliana landsberg
gcaagccatcagactatggacttcctgaagacaaattcatatttgcatgcttcaaccaactgtacaaaatggatcctgagatcgttaatacttggtaaacgtttttccttagctttgcaagtttgtttggaaatttacgtatgacaccttacaccatcatgataccataaataacactctgtatagatgtaaatttatacatgcacaaactgatttgtttttatttttttataggtgcaacattcttaaacgagtacccaacagtgctctttggcttctccgttttccagcagccggagagatgaggtttcgcacatgtacgtttggttccattcaatcgcctagcatttccttgttctttctgctttctctatcgtttataaccttatttttttgaccttatatccagatgctgctgcccaaggtgtacagcctgatcaaattatcttcactgatgttgccatgaagagtgaacatatcaggcgaagtgtccttgccgatgtaatcctcgacacgtgagttcttttgcctctcaactcgatttatctctacttcaagatatatttaaaaaacaacacaaaaactcaattctgccacaagtttaccttcccctaccctgtcctgtgtcattaggcccctgtgcaatggacacacaacaggaacagatgtactgtgggctggtgtaccaatgataacgttaccacttgagaaaatggcaactcgagtggctggatcactctgccttgcaactggtctgggccatgggatgattgttaacaggtacgtctcagcaaaaaccaactggtacatgtgttcagtatcctctgttttcatgtatgttgatgagatatctctataacaattgtgaaccagcttggaggagtacgaagagaaggctgtctctttggcactgaacaagccaaaacttcaggcactgactaaggaattgagggctagccgcttaacctgtcctctattcgacaccatgcgttgggttagtcttccgcactttctgactctatatctctcttctgcgttttatttcctaaccaatgagttctcttggtttacaggtgaagaatctggagaggtcatacttcaaaatgtggaacctccattgctctgggcagcagccacaacacttcaaggtgttggaaaacgacctagaattcccacatgacagataaacaaggagggaaagacaactgaaacacatgagggcccggcattgtaaataaaaaaccgaagagaattagtagcagaaatattgataaattatcagagctagagaagattattattgtttgagctgtgtactatatatataaaacaaagctggctgtgttatctctgttttccattaccggagcatgtgcaatatcccaatgtaacattacatgaaaacatatatatatatatattgatcatttgaaccaaaacggatcgtttagctcccaatttctttataaagcttccctgctggtgcacttatcaattcctatcgattgttaaccagatgcaaacaaggaaagtgtttttccatctaatcgaaattgacgaaacccgttggttaaccagaaatctagccggttaatcta

SEQ ID NO: 140393 - DNA, 1521 bp, Arabidopsis thaliana landsberg
ctttagtgatggcggcgcttatccggtgttgctcctccttctctcatacttccggtggccaaccaccgccgcgtgacaagtctcgagctccaggttagctcatagctcattcgctgaatcagatttccaattcagagtcactgttgctatatgagtgatcctcttttggtaatgaggcatcagaacttctagatcgaaattgtttgaggcatcaatagtttgttggttcatttcaataacattagccaattctttgtcgcttctgaagtcatctttctccataacgttttctcagagattggaaaatttgctacatctattggctactcagtagtcagaaaacctggggatcatcctcctttctccaaaattatacattcgtcttcacagcctaaggagcgacaaggaaagggaatcttacaaacgccatttgccagtgtgggatctcttgacaagttttcagcttttgaggtagtttggtgatgaattccgggatgtctagctatatccaggtaaaacacattatattgtttgactcggtttattttttgttgtcaagttttttcttagtgatagtaagcttttagatatggatgtggcagggaattgggaggctcaaattaccggtgatggcagtgttgttgacaaactcccttcagatggctacacctcttgaagctttggctgctgagatatgtgagcctgagagctccatgttcagcatgcctattttgttgcttgttgctcttattggagccaccgttggaggtagtgactagtcttttcttcaatctatgcttctatgaactgtactcattggggtttgacaacactttttttgtggtgtaccaaatcagggttgcttgctcggcagaggaaaggggagttacagaggttgaatgaacaactacgacagattaacgcagctcttaggagacaagccaaaatcgagtcttatgcaccaagcttgagttatgctccagtgggagcaagaatcccagatagtgaaatcattgtggaaccaaagaaacaagagttgatttccaagttgaaaacaggaaaaacctttcttaggaaccaagaaccagagaaagcttatacagagttcaagatagctttggaacttgcccagagtctcaaagaccccaccgaagaaaagaaggctgcaagaggcctaggcgcctcgctgcagcgccaagggaagtatagggaagccatacagtatcactccatggttctagccatctcaaagagggaaagtgaagattctggaatcactgaagcatatggagctattgcagactgttataccgagctgggagatctcgagaaagctggaaagttctatgatacgtacattgctcggttagagactgactgatccttccgcaatgttttttttctttgttgtctgtttatgttcatgtaaaatcacatagaatggatatccaaatcccttttattgaatgtaattcgcttgtcttacaatccatgggaatacataactaatcatacaactgc

SEQ ID NO: 140394 - DNA, 4162 bp, Arabidopsis thaliana landsberg
atgttcgctctttccaaggttttacgaaggtaaggatctctgattttgttcgaaaaactgttagggatgtagctatgtatgtgtcttcaatggcagtgaaacagatttcgagtaaaatttgaaattttgagcatggttttgatttgccattaacatatctgtgttgagttggtattagcacacttttccaacttttgtttttgtgtgtgaattttacagaacgcagagactccgactgggagcttgttctgctgtgttttcaaaagatatacaattaggaggagaaaggagctttgattccaattcgattgcttctactaaacgtgaagctgtgccaagattttacgagatctcctctttgagtaatcgtgctctttcctccagtgctggcactaaaagtgatcaagaggaagacgacctcgaagacggtttctcagaactggaaggttcaaagtctggccaaggttcaactagtagtgatgaagatgagggaaagctctccgctgatgaagaagaagaagaagaactagacctcattgaaaccgacgttagtagaaaaacagttgaaaagaaacaatctgagctatttaagaccattgtctccgcacccggtctgtctataggtagtgctcttgataaatgggtggaagaaggaaatgagatcactcgagttgagattgctaaggcaatgctccagctgcgcaggcgtcgcatgtatggaagagcgttacaggtagttctcttcttactcgtgatttaactttctgtatctgaactggttcaagtgcttaccttcgtttcttttttctgtttgtgtagatgtcagaatggttggaagcaaataagaaaattgaaatgactgagagagattatgcttctcggttagatctgacagttaagattcgtggtttagaaaagggagaagcttgtatgcagaagatcccaaaatcttttaaaggggaagtgctttaccgtaccctcttggcgaattgtgttgctgctggcaatgtgaagaaatccgaactggtgtttaacaaaatgaaggacttgggattccctctctctggatttacttgtgatcagatgcttctgctccacaagaggatcgacaggaagaaaattgctgatgtactattgctcatggagaaagaaaatatcaagccaagtcttctcacttacaaaatcctgattgatgtcaaaggtgcaacaaatgacataagtggtatggagcaaattctggagacaatgaaagatgaaggtgttgaactggacttccagacgcaagctctcactgctagacactattcgggagctggccttaaagataaagccgagaaagtcttgaaagagatggaaggtgaaagcttagaggcaaatcgccgggcattcaaagatttgctctccatctatgcctctcttgggagagaagatgaagtgaaaagaatatggaagatctgtgaatcaaagccctactttgaggaatcccttgctgcaatccaagcttttggaaagctcaataaagtgcaagaagcagaggcgatttttgagaagattgtgaagatggacagaagagcttcttctagtacttactccgttctcttgagggtttacgtagatcacaagatgctctcaaagggtaaggatctggttaaacgaatggctgagagcggttgcaggatcgaggcaacgacatgggatgcactcatcaagctctatgtggaagctggagaagttgaaaaggctgattctttgctggacaaggcatcaaaacagagccatacaaaactgatgatgaactccttcatgtatatcatggacgagtactcaaaacggggagatgttcataacacagagaagatattcctaaaaatgagggaagctgggtatacatctcggcttaggcagttccaagccctcatgcaggcttacataaacgccaaatcccctgcatatggaatgcgagatagattgaaggcggataatatctttccaaacaaatccatggctgcacagttggctcaaggtgatccatttaagaagacagctatctctgatattctggattgagtggtctctctccctacacttttcttctttctgcttgcaagaagtatctcatttgtcgtcctaacgtttagtttgagagagtaacgttaagtttaagaacctgcttagttgctgtgtttttaatgtttctattcggttctttggtgatcacacttcagagaccttcaagtttcatgacatttaggagtacacgaagaaaataacgttttcaaactgcgcggattctataccgcaaaattttacaaagatttagccactcttcttttaagtggaaaataaacagaattattccaaaccattaaaaactctgatgagaaaaacagagaatgttacaataactctgcttataatgaatacagacttactaagacctcaatcaccccaacttctttccttttggggcagacaaaaaaaactcgcaaacactaatcgattgtgagctaagaagacaactagaagtgatcactcagtcactcactcctcactaagtacagtgatcactcagtcactcagtcctcactaaatacaagtctgcttatgaatgggcacatggctgcaagaagtgccttgggacactcctcatgtggcagatgtccgcatcctgagattgctactagcctctgtttgttgacatgtataatgttagttacgtatcaacagagtttaggtgtttgattagatatagagagggaggacttacagagttttcgagttttgaagccatgacttgggaggacttgaggggaacaagtgcgtcttcggctccagcaacgactaatactggtaagttttccactgccttgagaagtgacaatgcattttgagttggaagcaccatctcggatgagagtctgcctatctcgtgaagtgcctcatcccagccttccacatgaagtggtgccttgtatagccttaagacatcggttgtcatcttggcaggatcataccaagctctgcgattcaccacctgagctatttcagtgcgtaaaagcggacgaacaaggtgtttctttcctagtgatgtgtgcagaagtattcttgcaaaagctggcactacttccctcgtcaagcttacattaagcaaaaccactcctttgactttgatgggatcttttgtttctagcaatctttgtgcagccttgagagcaagcaaacctccatcatcatggccaaccaagactacagaagcaaatcccatttcgtggcaaaaggcaagaagcatgtctacctgaaagcatcaacagatccttgagttttaacatttctttctaagagcaaagacaaaaagctctcataagtaataaacatagtccggaattgaacagaacttcacctgattatccagagtgtaagggtttggcatctctctttcttccaaatcctttttatgaggtctggcggttaatccccaaccaggcctatcaaatgcagtgacaacacagccaagttgatgggcaagagaactcatcacatgtctccaagaaaacactcctccgccaaatccatggaccaacactacaccaaattggccgtttccaccaacatcttgctgttccgtggcaccaaaattggacacattgatgccatcctctcggcacgattcttcctgaatatctttgaaaagacgaggagaagtaggaagaccatcaaggagagggtcgtgcaaggaagaagaattgttaaacagactgctgtagctcctatggtggtgatggttgagcttgtttctcgtgaccatgctcaatatattcctgtcaagcttcaaccttcccaccatcgcctctggcatattaagcatagagttggcttcaactgaggaggagatagagtggcgaggagaagcaggtgtgcaaattcttgtaatgcacagtgagccctctgactgtaatgaataagctgtcaagatcagcaagcaatctcgcaggtagctctccgtcatcgttggatactgaaggatgcagctttcgtcttgcctcgccatcaaccttggaggcctttcctaccaaaggaattggagaacgtgggactttctggtaaccagagaagacacttttgcaagaaagaacctgcaacacaatcaataagttaaacaaag

SEQ ID NO: 140395 - DNA, 5168 bp, Arabidopsis thaliana landsberg
ccaaaatcaaaagctgagagctctcttacattgaagctactttcgaagatagcattcactgattggtaaagagttctagaagcgacgagcatcttctttagttcccgaggtacatatccttttctcgtctctacgaattgggaacaaaactagggttttacattagctcatttttgtcgggtttctgcttttgtttcggttgtggtttagatttttgtcctattgtagaaacttcgtatcatgctttcctggttgtgattcataggaagatagagtgaattttgctttacgctaatcttatttgcttgcatttaatgaaatccttcgatgagtttagtatcagtcttctgtgtctttaaactgattctgttcttatgtgaatgtagttttctgcgtttgagaagtctgttctagaaagtaatgggtgacagcgaggccatggtttccgagggttatacttctgctccatatggagactataatgcttctgctgctactgtggaatcgaccgggcaagagactgcaccaattgttgatgcatcacactcggtcaacaatgattctttggtcaatggtactgcgccagttgagaacggaagtgcaacagataatgtggctgtgactgctccagcagcggagcatggagacaatactggtaatttcttcttctttttgaaagcttgtatgagcacatattgattctaagaggcgtcactagaacctgatcttaacttcgatgatgataatcctttacttattccttctctcttgttacaggctctacactctcaacggaagaggagcgcttgtggaatattgtaagggcaaattctttagagtttaatgcttggactgccttgattgatgagacggagaggatagcgcaggtatgtgtggagttacataatgaatcttatttttccggttttccctatgtactctgctctgagtcctctgaccttcgtggtgacgtaaatgtttgtcatctggattatgtttccaaaacttgtttgctatttgaatcttaagaatgagtattccgtttttatttgtacaccataagtcgctgtcatctttcggtatattttttctaacttttactgtcagctacttgattaatttgctctagattgttaatgttttccttgctgccctgattacaggacaatatagcaaaaatccggaaggtctatgatgctttcttagctgaatttcctctgtgttatggctattggaaaaagtttgccgatcatgaggctcgggtgggggcaatggacaaagtcgtggaggtttatgaaagagcagtgctgggagtgacatattcagtggatatctggttgcattattgcacttttgccatcaatacatatggagatccagaaacgatcagaaggtaatgaatgcttattcttctatttgtatgtgtattaacaacttggtgattttccaattacctagacaaaatggttttaccatctaaccctttttttagattgctacagcaagtcctctcgtttgtggcggaaagatctgatggaattaattttaaaatacttcgtttctctatgttcgacacactagcttttagcctccttccattgctatctgatatctttatctaaaactgttcccttttttggtgctcgttacttctctggtttaaaaattttgatgttaaaatatatctgttttaactgtcaccctcccccgaagttcaaaatgctgctggaaagatgtcaaccagttttgggcttaggtagcccttgactgctcgattttggccatagtatgcttttactaggaaggtaaatgcagtgtttggcagtatcatgcattcaaagagtgaatccttttctccatagaactcgtgtttgtctctattgattggatatgtctgtttctttcagctcatatgacattctttttactataatgctgttgcaggctttttgaacgagctttggtttacgttggaactgattttctttcctctccgttgtgggacaaatacattgagtatgagtacatgcagcaggactggagccgagttgccttgatttacaccagaatattggagaatccaattcaaaatctggatagatatttcagcaggtaatttttactgattgcattaatcattattgtctgtgctgaattggatagagtctatttatgtggattgtcatggttatggagagaaaacatcatttgatgcactatgttgatttagcacttaatcgagttcagctatctggcaggtgtgctgtatcatacatttgatatatgcttaatctaattttatatttcatctgtcatagcgagggtttttatgttttgctcataatctttagtttctttctgatgtgtatgttgcttcgtttttggtattttttctgttgttgataagttcttgtcttgctatagttttaaggagctagctgaaacacggcctctgtcggaactaaggagtgctgaggaatccgcagctgctgctgttgctgttgctggtgatgcttctgaaagtgcagcatctgagtccggtgaaaaggcagatgaaggacgatctcaagttgatggttccaccgaacaatcccctaaattggaaagtgctagttcaactgaacctgaggagttgaagaagtatgtaggcatcagggaagccatgtacataaaatcgaaagagtttgaatctaaaatcattggttatgaaatggctataaggaggccctatttccatgtgcgtcctctgaatgtcgcagaactggagaattggcacaactatctggatttcattgagagggatggagacttcaataaggtactggggtttaactctcttatacgtgaacgtacaagtgttttgtagattaagttgtacctctgtcatattattgacctacagttaagtagtatctggtgcatcatatgcttgattgggtttccattggatcaagcaacttttaaatgggaaataactgagaccaaagcatgtgcctcgatttggtaactttaaggctaagtatttcgaactctcaatttgtcaatggatattttaggcacatgaattatcctgttgttgaagttccaatgttattaatgcaggtgtcttcctaacattctgtctgtcaggcaaggagggtccctctgtatgtgagggcccctctgttggacttgtagagtatttcttgtggatttctccttttgtgttttctatgtttacatggtttttttccgtagtcatcatcatatatgttttacattcgattgtcttttccaataggtggtcaagctgtatgaaagatgtgtggttacctgtgcaaattacccagaatactggattcgttatgtgacaaacatggaagcaagtggaagtgcggaccttgcagaaaatgcccttgctcgagcaactcaagtctttgtcaaggtatgaattgtgtttctccaacctttctgggtagttaaatttcattattttcgagtggctttgcagaataattctaaatagtcagctttgagtctcatggttatttatctgctttcttttctttcatagaaacaaccagagattcacctatttgctgctcgattaaaagagcagaatggagatatagctggtgctagagctgcataccaattagtgcactctgaaatttctcctggacttcttgaagcagtaatcaagcatgcaaatatggaataccgactagtaagcttcaatggtgattaaagaactagtataagattattatcactggttgtttcccttacatgtctcctaatcttatctgtagggtaatctggatgatgctttctctttgtatgagcaagtgattgctgttgaaaaggggaaagaacattccacaatactgccactgctgtatgcgcagtattcaaggttttcatacttggtacgtcacatggtctctacactactaagactttatagtactgatttttgaactcgttttgttttgctttcgtgatggagtatgtagcgatactttatagtactgatttttgaactcattttgtttttgttttcgagatggagtatgtagtgatttggcttcttacttttcttaatattactttcaggtctccagggatgctgagaaagctaggaggattattgtcgaagcacttgaccatgtacaaccgtcaaaacctctcatggaagcactgattcattttgaggcgattcagccaccaccaagagagattgattaccttgagccacttgtagagaaagttataaagccagatgcagatgcccaaaacattgcaagttccactgagagggaagagctatccttaatatatatagaggtaatggaaaagaaagaagacaattcttgtttgaacatgatgtatctatattattggttttaacacccaaatgtgcatggcctttgcagttcctgggtatttttggagatgtgaagtccattaaaaaagcggaagatcaacatgttaaactgttttatcctcatcggagcacgtcggagctgaaaaagcgtagcgcagatgattttctcgcatcagataggacgaaaatggcaaaaacttacaacggcactccacctgctcagccagtatccaatgcatatccaaatgctcaggctcaatggtctggtggttatgctgcgcagcctcagacttggccaccagcacaagctgctcctgctcaaccacagcaatggaaccctgcctacggtcaacaggtaagataccaaagatagaaccatatccatttccttccttctatacttttactcttataatagtatcgaatatacctttgtaggctgcttatggtgcatatgggggatatcctgctggctataccgctccacaagcaccaacacctgtgccacaggccgcagcttatggagcgtatcctgctcaggtaaccaaaattcttaattagtgttaaactcaggagtatttaggaggattacagggattagccaccagtttgaattgggaatcactcttggagataagtctttgatcatctaacttggatcttatctttgtgaaattttttgcagacatacccaacgcagagttatgcacctccagttgcagcagcagcaccagcggctgcaccggtgcagcaaccggctgctgctgttgctcctcaagcgtactacaacacgtactactga

SEQ ID NO: 140396 - DNA, 892 bp, Arabidopsis thaliana landsberg
atggtgacaggaaaaatccattgcacatacattttcacaaactgcaacaaattggatcaagttgcagaaagtaacatcatatctttcacttggaggaaaagccagatgatgtcagatgctctgaatcgctacaatggggtatgtactattctatctcctaaaaagattcaaattatgctgcggaaatatgcagtttaataatcttgttttggtgtaacttgttttatagggatttgttttggaatctttggtcagcacttgctttcctggatgtgaagtacctgcatcattcgatcaccaagcctatggagcattgttacagacgaaattacctcggcactggtgtgatagtaggcttactgggatagctttatgcgctgttatattgtttccggactaccaacatcaaagcaatcgtttcttggtgaaatgcacttgtgagttcggaactgaagatgggccatgtatcagctttagttccattgttggaggttggagcgaaccaggctatgagccacgtactcttaagtctgatcatgtttcccctggctatacaagttggctagacattaacaaacgtcacgtggaaaagcatgggaatggatgtattccttctaaggcttcactcagatttcaagtcacagatggtgcgagtgaggtaggaaattgccatgtcctgaaatgtggctttactttagtgtatacaccaaacgatagtgatgatatctctccggtgagagtagttgatatcgctacacgggataaggaggatggcctagaaaatgcaacttctaacaaactttcaagaaacgattatgaattctcgcatcagtcaaactgtggagtgacttcgagaagggatgaatgtttcctttctgaagagcttccataa

SEQ ID NO: 140397 - DNA, 214 bp, Arabidopsis thaliana landsberg
agctgaaattgatcgtctcatagagatgataagttcgagggctattgatctacctgatgtcaagagagacgagagaaatttggagattcctttgagagagggagccaagaaaaatatgagtttatttgataaggcaaaagagcccattggtggcaaggatgctaatagtgaaatatgggctacaccaaccccacttgcaaagtcaatagtgagt

SEQ ID NO: 140398 - DNA, 1044 bp, Arabidopsis thaliana landsberg
aaacaagcatctcattctctgattcggtccatcgatctcaaaggctcaaagcttaatcgtttcctttcttcttattctagccatggctcaggtaattttgtgactttgatattcttcttctttttttctccatttcttggccatgaaacgatggaataatgtttttgagagacattgatctggaagcaggaatgtctttttgtgtccatctccaaaaaagatgctagcaattgtctatatatatcggttatgagagtccgattaatcagtttttatgataataaatattttggaatgaattaatatcaaatttcaagagggaagaaaagagattgattggtctaggtctaggttctatctataagtactataatgtccgattagcaccactttgaaatattcatcaaaaaaggtaaatattattaagctagagcacaaaagataacagttaataattgtgataaaattagctgttgatatatttggaccgaattggtcctatgtatatggatatggttcttacattttcggattaaattgtctaattaatgcagaccgttgtcctcaaagttggtatgtcatgccaaggctgcgttggtgccgtcaatagagttttaggcaaaatggaaggtatttctctctaatctttttttcatgtctttcaaatactttctactaatcattgtttccctttattttaagccttataatttattgactctataatttattatataatctcaggggttgagtcatttgacattgatatcaaggagcaaaaggtgacagtgaaaggtaatgttgagcctgaagcagttttccaaacagtttcaaagaccggaaagaagacttcttactggccagtggaggctgaagctgagccaaaagccgaggctgatcctaaggtcgaaactgtgactgagactaaaaccgaggctgagactaagactgaggctaaggttgatgcaaaagctgatgttgaaccaaaagccgcagaagccgagactaagccatcacaagtttaagtatactaacgatgaaaag

SEQ ID NO: 140399 - DNA, 761 bp, Arabidopsis thaliana landsberg
aatttcagaaaggaatctacatcgtgtgaagtagaggaacattactttcgagctttgattcatcgtcgtcgtcttcggagacgaagccaaacacacaagctctctctttctctcaacaacttcaaaagccggcaggtatgaccgagacctccgaagaaaaacagaacatttctagggtttaactctgatccaccacattaccaaaactttcttcaactaggtgatcaaaaaggagtcctttttcattttgagcttctgggtctttggcttctgatttcgctataaggaagagaaaagtcaacggccatggcgggtcgtagagatagaagccaacaactccgtggatctcgaattgcgatcgccatcctcatcggtatctttatcggttgcgtgtgcgccgttctgttcccttacgggttcttcaactcaagctcatctctcaaagcaagcgaacatctttcgaaatcaagcaaccaggtactacataaacctctaaagctctaatttttgtggttctgtgatcgagttttacatagattgatgtttgactctgccattataggtgttattaagtggttagtgtctaaacatagaaattcttcttggtgatgtgttagttggagattagggtgaagtttatcatgatactggtttggttgattactggattttgtatcttaatttgaatttagttgagtggtttataaattccacacttgctttgtctaggttggatcatcagcttgtgaatagccagaacg

SEQ ID NO: 140400 - DNA, 1339 bp, Arabidopsis thaliana landsberg
gaaaatgcattttgggaagtaggagacttctacaatgctgttaattatgtcgatcatcatcaagacatgcgcttagacatagaagatatgtcatatgaggttagtcctagacgacaaatattctttactctttcaccatataggtaggtatttaatgagttcacattggtttgtcttatcttataacattcaaaacctgggtggcgcaggagcttcttgctttgagcgaccagattggaactgtgaagacaggcttgtcatcagaagatgttaaagaacttctgaaaagaagaacctcgaccagaattaacctggaagaaggtccatctactgatctagagactgattcttgcacgatatgccaggtaaagccagtaaaatcttgagactacatcctccaagcttatgtaaacattcactcactcatcttagtagtaaaaagtttttttttttttatataatggggatctgacaggaaaactacaagaacgaagataagatcgcaacgctggattgcatgcacaaataccatgcagaatgcttgaagaagtggttggttatcaagaacgtttgcccaatctgtaaatcagaggcattggtcatagagaagaagaagaagctaaggttaagtagtagatgagaagaggttgctgctacaacctaaaagaggttatcgctgatggtttttaagacgctttttatctattggttttataagagagaaacagagtcagggtatgtttcagcccccaaattctgtaaatttgtacttttgtgcacattaaagtgacagtctaaagctaagattggcttagtgactataaaaactgtataggctttttttggttccttgtacattctggttactcctagagttaaactttcttcatctaaaacatctcttttgttcatagattatcgcatacgaatgattgtgtaaaaaataatatttaaaacaggatctgagaaacttacaccaaaagaagcaactaaaggaaaaacacaagaaagaatcatctgcatgtcttccatagattaatcaaactatattcttgcctaagaaacagacaaaatggcttgatcaagatcaacttgagcagcatccaaccttcttaacctcagaaacatcatccttagacccaacattaatactttgtcctttaggaagagtagtgtgatcatcaccaatatccaacgccttcttgcttgcaacacggtatatttgagaaagcacttcagtgaaagcattctcaacgttcaaagcttcaagtgcagatgtctccataaagaatgtgttctctctctctgcaaaggctttagcatcttcagttgaaacagc

SEQ ID NO: 140401 - DNA, 1254 bp, Arabidopsis thaliana landsberg
caagtgagagccttttctttcggagttttcaacgcaattcttcaggtaaaaatccgatcttttggtctttcaagtctatggatttgtcgattttccttagatctaagttcgtcagcttgtcgttgttcttctgattgtctgattgagtgattagttcatgttttaaggttttgtttttgtctgttgtcagagaagcagaagagatgttgtacattatagggttaggtctaggagatgaaaaagatataacctgagaggactcgaggctgttaagaaatcacagaaagtatacatggaagcttacacttctcttttgtcctttggtctctctgctgatggactttccaatcttgtaagactctcaaagcctcgttgatttagtagattcattactttcccacccagttttctgattaaagttctttgattggtttctcaggaaaagttctatgggaaaccaattatacttgctgatagagaaatggtggaagaaaaggctggtgatatgattgatgaagccattgataatgatgtcgcttttctcgttgttggtgatcctttcgggtacatacacctttctcatcctatcttggtattcgattttatacctaatgtagttagttagataatagatacaatacagtttagattgggattgatgtttgaaatggttttgttggaaatgcaatttgcagagctacaacgcatagtgatcttgttgttcgagctaagacactcggtgtaaaagtagaggtagtgcacaatgcatcggtgatgaatgctgttgggatttgtggattgcagctttatcattatggagagactgtttcgatcccattctttaccgagacttggagacctgatagtttttatgagaagatcaagaagaaccgctctcttggacttcacactctctgtttgctagatatccgagtgaaggagcctacttttgaatctctatgcagaggagggaagaaacagtatgaaccgccgaggtatatgagtgttaatacagcaatcgagcagcttctggaagttgagcaaaagcatggagattctgtttatggtgaagacacacagtgtgtgggctttgcccggcttggctctgaggaccagacgatagttgcagggacgatgaagcaactcgaaagcgttgattttggagcaccgttgcattgtcttgtgatagtaggcgagactcatcccgtggaagaagagatgttagagttttacaaatacaaaagtggaaactaa

SEQ ID NO: 140402 - DNA, 1011 bp, Arabidopsis thaliana landsberg
atggagaaatcgacctctccggcgactcgagtcaccgaacctcctcctcctgctacttcatctcttccagcactagctcctccgcttcctacatctgcagatcagagatcagctgagttaccttcgcctgctcagccagctcagatgactgcgcctccgtcgacagttaccacagatccgtcgtccaggggaagaaagcgagcgctggaagcgaatcttcagatcgagagctccaactactacaagatgcgtctccttgtcaaagatcttcgccctcacgttctcgaggttggaccataatgtgataaaaacattcaaactctttgtttgggaaagggtttatacataacaacttggattttgtggtgtgctacaggttttacgaactccagacttgaggaactctaaggcagctatcgagattcaagagagtgagaagctcttacactctcttcttttgttatctcaattttcacttagctcaacaaaaggcccaacttgtttgattctgtgtcccttgaaatgatgatgtttgcagagatgaagcttatgcttcaactgtacgaagagatgattggagagtctcccaaacgtgagaaaacagctaagagcgactctttatccaacggaaaggcgactactactactactactactactactagtgtactgagatcatctgaaactgagaagcacagctctgatggagatggcgacaaggtggttggagggtcggcatttggctggaacttcataacctctggagggccaggcactgaacctgtttattctggaatgtcaaaggaagaatacagaagctctcacccaattatgcaagtggaggcagagcttgagttgcccaacacattctaagctttgttagtggtgtttgtataatattattcactttggtatccgttcatcccaatgttttatatgtatcaactgaaacaatggattagcttctacccatgaagccttaattagtacacaatatgcttaacatctaaa

SEQ ID NO: 140403 - DNA, 727 bp, Arabidopsis thaliana landsberg
ctttagcggttttctcatcttctctactcttctttctcttttctgagaaacccaaaagacaaaaacgaagaagaagattaggaaatcatcttgagaaacaggtttctacatctctgtgtttcaacattttctctgttttttttaagttgttgagctttctggtggtgttttaatggagaattttttctgataatttgtatggtttttaattgtactaggaggtagcaggagaatatgggggacaaggaagaagtccttgaggctgttttgaaagaaactgtggatctggtaacagatctactctaaagttttaatttttatttgtttctctgatgttggagagaaagaatctgaagaaatttgttttcttgggttttttcaggagaatgtacctattgaagaagtttttgagagtctgagatgtagcagagaaggtctcactacagaagctgctgatgaaaggctggctctttttgggcataacaagctcgaagagaagaaggttttgttcctttctctatgttgtattcatgtgtttttctggaattttgggttttggtctatagctccaaacgattataatttttatgtcctgaagcaaagttccttttttttttttttgttgcaggaaagcaaattcctgaaatttcttggtttcatgtggaaccctctttcttgggttatggaagctgctgctatcatggctattgctcttgctaatggagga

SEQ ID NO: 140404 - DNA, 2128 bp, Arabidopsis thaliana landsberg
atgaattccgttcagcttccgacggcgcaatcctctctccgtagccacattcaccgtccatcaaaaccagtggtcggattcactcacttctcctcccgttctcggatcgcagtggcggttctgtcccgagatgaaacatctatgactccaccgcctccaaagcttcctttaccacgtcttaaggtctctccgaattcgttgcaataccctgccggttacctcggtgctgtaccagaacgtacgaacgaggctgagaacggaagcatcgcggaagctatggagtatttgacgaatatactgtccactaaggtttacgacatcgccattgagtcaccactccaattggctaagaagctatctaagagattaggtgttcgtatgtatcttaaaagagaagacttgcaacctgtaagtaatgaagcttctccctttatacattttggttgattttttaggtgaattatgtatggaattgagactacatctgaggttttatgtgttgttgtactgagtggtgactggaattgttttaggtattctcgtttaagcttcgtggagcttacaatatgatggtgaaacttccagcagatcaattggcaaaaggagttatctgctcttcagctggaaaccatgctcaaggagttgctttatctgctagtaaactcggctgcactgctgtgattgttatgcctgttacaactcctgagataaaggtattttccatttttaagctttctcatgtcttgaagttagtatctgatggtgttctgggattgaaaacagtggcaagctgtagagaatttgggtgcaacggttgttcttttcggagattcgtatgatcaagcacaagcacatgctaagatacgagctgaagaagagggtctgacgtttatacctccttttgatcaccctgatgttattgctggacaagggactgttgggatggagatcactcgtcaggctaagggtccattgcatgctatatttgtgccagttggtggtggtggtttaatagctggtattgctgcttatgtgaagagggtttctcccgaggtactctttttgctgtgactgctttggcaatgtcaccttctgttctgttgttgttaataacagctacttgtgacaaaatccagaattttaattaagaaatgagttccttcagcttctgtttcttattgtgacttttgggttatgcaggtgaagatcattggtgtagaaccagctgacgcaaatgcaatggctttgtcgctgcatcacggtgagagggtgatattggaccaggttgggggatttgcagatggtgtagcagttaaagaagttggtgaagagacttttcgtataagcagaaatctaatggatggtgttgttcttgtcactcgtgatgctatttgtgcatcaataaaggtatggtactatccttgatacgttatcccttgtcagacggtgtttggcatatgcatactgaattgtagataatcagatacttgtctctacaggatatgtttgaggagaaacggaacatattggaaccagcaggggctcttgcactcgctggagctgaggcatactgtaaatattatggcctaaaggacgtgaatgtcgtagccataaccagtggcgctaacatgaactttgacaagctaaggattgtgacagaactcgccaatgtcggtaggcaacaggaagctgttcttgctactctcatgccggaaaaacctggaagctttaagcaattttgtgagctggtgtgtgtttggtattatagcatatagtagttaatcacattacagagtgtatgtaagacaaaacattaatgggtgcaggttggaccaatgaacataagcgagttcaaatatagatgtagctcggaaaaggaggctgttgtactatacaggtaaggccattcctgaaaaattccttccttcccgagtagtttattcatcctctaatctgcaaaattttgtaaattgttgtatagtgtcggagttcacacagctggagagctcaaagcactacagaagagaatggaatcttctcaactcaaaactgtcaatctcactaccagtgacttagtgaaagatcacctgcgttacttggtgcgtccttgattgatttctctctgtgc

SEQ ID NO: 140405 - DNA, 1296 bp, Arabidopsis thaliana landsberg
acgtgtcaagcttaagacactcaagtctcacatctgtcccttttactttggacttcgcttcttttggcttcttttaaactctctctatctctctctttcttcttcacactttgttgttaatttcaagtgtttgatcataatggcaacatcagctcgtagagcatacggtttcggtagagccgatgaggctacacaccctgactccattagagcaactttagctgagtttctctccacttttgtcttcgtctttgcagctgaaggctctatcctctctctcggttcgtacaagcaccgttctgactctaatacttgagtctttgcatatgtgatatgacttcagacttctgactttttttttcttctccttagataagttgtattgggaacatgcggctcatgcggggacaaacacaccaggagggctgattttagtagcgttggctcatgcgtttgctctgtttgctgctgtttcagcagccattaatgtctccggcggacacgttaacccggcagtcacttttggtgctcttgttggaggcagagttacagcgatccgcgccatctactactggatcgctcagcttcttggagccatcctcgcttgtctcttgttaaggctcacaacaaacggcatggtaacactagtcaacttcatatatatctagctagtacttagtgttgcaatgctttttaagatggaacctaccatattaatatagggtatatgacttaaaaagagtttgtgttcatgcagagaccagttggtttccgtctagcatcaggtgttggagcggttaatggacttgtattagagatcattttaacatttggcttagtctacgtagtgtattccactttgattgatccaaaacgtggaagcctcgggatcatagcaccgcttgcaatcggactcatagttggggcaaacatcttagtaggtggaccattttctggtgcttcgatgaatccagctagagcttttggtccagcgttggtgggatggagatggcatgaccactggatctattgggtcggaccattcatcggtagtgctttagccgcccttatatatgagtacatggtcatacccaccgaaccacctacccaccacgcacatggtgtacaccagcccttggcccctgaagattactagatggaactttcctcatgtcaccactgcttttgttcgttgttcaagctctctttgtctgtatgatgagatcacttgcatagatactttttttcttatgctactcttatgttgtaataataaaaaataaagaacgatttcgc

SEQ ID NO: 140406 - DNA, 1957 bp, Arabidopsis thaliana landsberg
ctaggaggatttgatctctccgattcggatatcttagctctggccgatagattctccggcgattcatcttctttatccgccgtaattttcgtatataggatcggtggtggcttttcaagatgccgtcgaacggagatctggaccgtcagatcgagcagctgatggagtgtaaaccgttatcggaggcggatgtgaggacgctttgcgatcaagcgagagcgatccttgtcgaggaatataatgttcagccggtgaagtgtcctgttaccgtttgcggcgatattcacggccagttttatgaccttattgagctctttcgtatcggtggcaacgctcctgatactaactacctcttcatgggagactatgtaggtctgtctttcttcttctttcgattttatttttggggtttttacttttttttctcattttagatctgtgtttttggatcattccaaaatggtgaattcttggaaaagtatccacctttttatttatctagagtgagttacttgtgggttctgtttttttttggaatggtaggtactgaaacttcccaatatagagacttgttgatgctcactttcattattgcacttcccttgaattctagtctttagatccttggaactttaaccattcgttggtgtaccataagatggtgacagctagatttagtttaaaaggagtgttgttggtttctcattgtcttgctttgttctttgcagatcgtggctactattcagtagagacagtttctctattggtggcactaaaagtgcgatacagggatagacttacaatcttacgagggaatcacgagagtcggcagattactcaagtgtaagcttttgttttgaaataagcttatatttgagcgaatcgtacttttcttcattggtttctggctgatcagcaaagtactatcctgttttgatgcatgttttgcttctctgtttcagctatggtttttatgacgaatgcttgaggaagtacggaaatgctaacgtctggaagtattttacagaccttttcgattatcttcctcttaccgccctcatagagagtcaggttagagctgttctttctcagttggtgtttgatacatctttttctaagtacagctttttgacttcatcaaattttgtaggttttctgtttgcatggagggctttcaccttctctggatactcttgataatatccgaagcttggatcggatacaggaggtaaccttcttgttctctgctaaaggccttagtgtggacttagttggaagagttatgagtccttcctgggtctcagtgtcttgtctctacttaagatacaattacaaagagcacaaacgtttggaattttttatgacatcttattgttcagctctttgaactatgtatgatgtgtgatctgtaggttccacacgaaggacctatgtgtgatttattatggtctgatcctgatgatcgatgtggatggggaatatctccacgaggtgctggttatacatttggacaggatatcgcagctcaatttaatcacaacaatggactaagtctcatatcaagagcgcatcaacttgtcatggaaggttttaactggtgtcaggtatgaacattcttacggcatgattagtctctctctcagattgaatcgttgatctctcctttgtatggtaacaggataagaatgtggtgactgtgtttagtgcaccaaactattgctaccggtgtggaaacatggctgccattctagagataggagagaacatggagcaaaacttcctccagttcgatccagctcctcgacaagttgaacctgatactactcggaagacccctgattattttttgtgatttctctgtttttttttgtggtcccgaccatatataaatttttgaagttccagttttattgcctatgtatcattgtagatgtgcccttttctcttcttaatctaa

SEQ ID NO: 140407 - DNA, 1736 bp, Arabidopsis thaliana landsberg
atgatgagagatgttttcaggccgactaaatcagccccatgttctcctgcaaagccacttggtatctctcgcactcaatctgaatcatttcatgctattcacaaagttcctgtcggagacagtccttatgtcagagcaaagaatgttcaggtgatttgattatatcccttctatagatctgaatttgtgtttgatttgatttttgttctgtctctgattgttgttttatggatcagttagtggagaaggatccagagagagcaattcctctgttttggaaggctattaatgctggagatagagtggacagtgctttgaaagacatggctattgtgatgaagcaacaaaaccgcgctgaagaagccattgaagctattaaatcactcagagttagatgttcagatcaagctcaggaatctctcgacaatatcctcttagatctctacaaggtccgtcctttatacataaccctgtttcctctgtttcgtttttgcatttggtttgattctgtattgaaatggatttgttactgcagagatgtgggagattagatgaccagattggacttttgaaacataagctcttcttgatacagaaaggactcgctttcaatggtaaacgaaccaaaacagctagatctcaaggcaagaagtttcaagtctttgtggagcaagaagctactcggttactggtaagcagcaatttcaaaatgtgcattatgtttagcaattaccaagtttgtgttaattcttaattggatgatgattgttttgaaacagggaaacttgggatgggctctgatgcaacgagacaactttgtggaagctgaagatgcatacagaagagctttatcaatagcaccagacaacaacaaaatgtgtaaccttggtatctgccttatgaagcaaggaaggatcgatgaggccaaagagactttacgacgtgtgaaacccgcggttgttgatggccctagaggcgtggattcacatctaaaagcttacgagagagcgcaacagatgctgaatgatcttggatctgagatgatgagaagaggaggagatgataaggttgaacaaagaaggctctttgatgcaatctttggatcttcctctatatggcaacctcagccttgtagtgagcagactgtgaaggctaaaccaaagcctggtttaagcaatggtgatggatacggtgatgagaacgtgaagatgagtgtgaatccagtagtagtaaacccattaagggttgatgcaaaaccgttcttctcttcgaagttggtcatcagtaacaacgagaagctgaagagaacgagatcgtcgagccaagagatggggatgttgagtggtattggtggtgatcatgagggagagacaaacacaagcacgagaaggagattgtcaatggagaagaaagcaacggagtgtggattaccagacaataaagactttgaagatgcgatcatggctgctgttttaggaacagaaaccaaagtggacaagaagaggctcaaggtgttccaggatatcactttgtgtctcaatcagagtctctaaccactcttatcattttatcattctaatttataatttagtcaaggaatcaaaaaaggagatgagcttaattcttcttggtaattttattaatgtttttgtcagctttaagttgctgccatttttttcacaattattgtcttcattgaccagtaataaaagctgaagttattattttccttgcca

SEQ ID NO: 140408 - DNA, 1333 bp, Arabidopsis thaliana landsberg
atgtgttgtcagattgttagggttttcaaacgcccagacgatttgaaagagaatgagattgattcagctggagatggtaagaagcgtaattaattatcacttctctgttggtaggatacacatataatacttgctttctttcatgatgcaggtgatgttttggtgattctggatctacgagcagatgattctttggttgaagcaggttttgcccgtgaggtaaagatatataacttctctaatagtgtactagtcctagatgaaaccaaagcaatacattttcttataacttgtatatcttctgtggggttcttcttcagtatcttaatattttatttgcatataaagcgatgttgtgcttatgagcttagtttccctgtgttaaagattgtaaacaggatccagaaactaaggaaaaagtcaggtctggaaccaacagactatgtggaagtgtacttccaatcattggacgaggatgaatctgtttctaaacaagttctagtctctcaggtaactagtttttgtttgttactcaatttatctgaacttaaattctacttgaaatttacgaatgtttcattgcttgtacgtaattatttgttcagctatggatcaaacgaaaatttatgtttccaacatgaatgtcttcaaccacatgccttaattctgtctcatcactgttgtttgttgaacaggaacaaaacatcaaggattcaattggctccactttacttttgtctactttaatgccatcacatgcagtaagtcatcaacactcccatatctgcttatttatttgcacggcagaagcttaatgtttatcctcctatcttttatgtaacaggtcataatagccgatgagacattcaccccaaaagaaacatccgatgagagtgtcaaaaaggttccaaagttgtcgtataagataagtttggctagaccggctttgaagttcaatgaagaggctgttcttgctttatactcaggtgagtcaccatctcatcacaatagattcccactgtcaattctctctcgctttctgtttaacgtgtatatttatggttccaggagatgtgaaatctgcaaccgggcttcaaacatacttgttatcaagggatcattcgaatttgaagtcagagttccaagccagagatgggaaggttcgttagttaagcttttgttaacccaaatcgtttactttatcattttaatgtatcttgtatggcagataactgtaagctgcattgaaaatgtgcctgttgcgactgtggttcttggcgaacatctccatttgagtgtcggcgatgacttattgagcaagaggaacgcatga

SEQ ID NO: 140409 - DNA, 1386 bp, Arabidopsis thaliana landsberg
cccccaaattacatatccgccattgtttccggcaacgaaaactaccaaaaaaaataatggagtcgaaagagtccaagacatttcatcttcttctctactaacagaagcaatcccgttggagttcatcagatcagagaaagaacaaccagcgatcacaacattccgaggtccaacgccggcgattcccgtcgtcgatctaagcgatcccgacgaagaaagcgtgaggcgtgcggtggtgaaagcgagtgaagaatgggggctattccaagtggttaaccacgggattccgacggagctgatacgacgtttacaagacgtcggaagaaaattcttcgagcttccttcgtcggagaaagaatccgtcgctaaaccggaagattcgaaagacattgaaggatacggaacaaagcttcagaaagatccagaaggtaaaaaagcttgggtcgatcatctcttccatcgaatctggccaccgtcatgcgtcaattacagattctggcctaagaatccacctgaatacaggtaaaccaaaacagaatcatcaaaaattcaaattttgtaaaccgaagttaaccgttggtttaatgtattagggaggtgaatgaagagtatgcagtgcatgtgaagaagctatcggagacgttattagggattctctcggatggattagggttaaagcgtgatgcgttgaaagaaggtctcggcggagagatggcggagtatatgatgaagattaactattatccgccgtgtcctcggccggatttagctttaggtgtaccggctcatacagatctcagtggaatcactcttcttgttcctaacgaagttcctggacttcaagttttcaaagatgatcactggttcgatgcagagtatattccctccgccgtcattgttcacatcggcgatcagattctggtctgaactttattatgattcttttataaaaatgtagattaatttataaaatgtttttaatggattggttttgtgaattttgcagaggttgagtaatgggaggtataaaaatgtgttgcataggacgacggtggataaagagaagacgaggatgtcgtggccggttttcttggagcctccccgtgaaaagattgttggacctttaccggaactaaccggagatgataatcctccaaagtttaaaccgtttgctttcaaggattacagttaccgcaagctcaataaacttcctctggattgagaaaaatcaatacgagaagaataatttgtggttgtggaataggaagtggttcgttattgagttgttgttttcccgcggttgtgtctcttgcttattgttattttatgtttaaaataaagattaaaacatctacctacattgtgtgtgatgttgacatgttttta

SEQ ID NO: 140410 - DNA, 878 bp, Arabidopsis thaliana landsberg
ccacttttttttcttttgtaattttcctttcttttttttttcttttgaattttcgggaagcagcatttccactggagctgcaaaatcttcctatcaaaattatagatcgatccaagttttagattcgagaattattttctccaaattagatttatatatcaaaaggaatcgaaaatagacagcaatttttgttttgtcggatcgtattgaatcagctgtgaattttagcgccaatttaaccactgaatcgtttgattagaagctaagatttggtcttacgatcgatctaagtagggttcttcttcttaagtgtgtgttttgttaaaattagtaaagagagatggagaagaagaaagtcgcgactccgctagtgtgccatggccattcgagacctgttgtggatttgttctacagtccaatcactcctgatggtttcttcctcatcagcgcaagtaaaggtaaaaatatgatcttctagatttgttattgtaagatccaaatttggggaatctgttctgttcactattgttgttgattggctttgtatactatgaaacatgttttgctgcaaactctcttcatattatttcatggcttcttgatgattagattctcaaccaatgttgagaaatggggaaactggagattggattggtacatttgaaggtcataaaggtgctgtgtggagttcttgtcttgataacaatgctttacgtgcagcttctgcatctgctgatttttcagcgtaagtgattgagaaataggaatgaaagcatctgttcttgttgattttggttctggtttatgctcgaatcggtttgattgatgtcctgctacatttataatctttttaggaagctttgggatgctttgactgg

SEQ ID NO: 140411 - DNA, 1832 bp, Arabidopsis thaliana landsberg
tcaccaaaggctgcttttccgacccaagtatttgcaccactttttgtagtttctgaaaagtttcttcatcactatggtcaaggcacgatcatccaactagagaagatattgtacacaatcccttagcacaagtacaactgcctaggcagagagagaaaaaagaaagaaatcatcacattcaagtccaacaaaatgcatacctttggttgttggtcaggttttggaaattgtcggatgtggacattagcaagtaacaagatcaagtgctctctttgattcaaaacattatctttctgaaattcaaaggttgaataacattcagtacagacaaaaactctttaagtcaaataatcaaaacaggatatttgctttacatcacctgaaaaccaaacatagactgaagccagtctagaatgtcttcatcgagtttcttcttgtgacctgctgaacatggtaatccccttgtatttctaagagcggctacagcagcttgtatctacagaacagtattcaaacatattatgtggactgaaagacaataaaacagaaaaatagaagacaagctgagaatctggataacctcaggcaatctcattattgcctgattctgactatcagggtcaaggggaagtatattgtaaggcacgtaaatctgggtcttctcttccaccttattgtgcgtttccaaaatctacagcaaaagagaggatgatcagaaacaattttggttaactagatcatgagagtttcaagatgtttggccaaagcatttgtaacgactcgcacaagaatgagactataagatcaatatctactatgagacttcacctcatcagccacttccacatcttctgtttgattaacagccttcaagacttcaaagagaacggcagcagtttgataggcctttgtaagttgagcactaaaggtaaaatattgtaaatgagtggaaaacacagtaagaggtcaagttgcaagaaaaaaaacagcacatttgaaggaaaacatttagtgaaacacaaaccggtcagctttatccgcagcattcagcaaagcttggatgtatttcttgtagtagtgttgatagaaactctgcatttcacgtgcatcactcttttgccttcctgccaaagttgtttcattctcctgaagaagtaatcagaaacgtaaacggcatgagttcaacacttaaacacaacatgttagtcaaatcaataaagtgtatacattcatatttaccctttctaatcgttgaagaagcgcggtcttaaactggcgaacaccacgaccacttgaagttggatcaagcctatgcgccttctcaaatgcgtagaaacgacctggtaattttgttattcaaagctaatttaagctgagaaaagaagttattttatgattcacaatcaagttaatgaaattgttacaactcacataggtaagcaactcgtggattactagcttcaacttcattagccacacgtagaatcggagcaatctcaactaaagaagagggaacaacttcactatcaagcatagcctctccgagactaccaacagtctgagtccgcagaatccgcctctgcggtggaggcggatcaggttcccttctttgagccatattttccgacaatcaaactcagctaccaaattaaaatacttgttaaaaccttgagagacttgtgaactcaaacataagcgatagagagagactaggatccaagataatatccagaacagtaagatttactttcacagagaagcgaatttcggattcatccacagaaaagcaaacatcactgtacgcgcaataaacgcgaaaagctgttttcttt

SEQ ID NO: 140412 - DNA, 2133 bp, Arabidopsis thaliana landsberg
ctgaagagatgaaggaaaaaaaaagtgaagatccatcacctgtaaagcagaagcagaagttgtggcaaaggcggttgactgttctgatacgctccgacgagcaaaatcggagttgatagaaggtgaaggactattcccaatctgaggatgagcagagaaagcttcaagccaatctgtcacattaacttggttgaaccagatgtctcttgcagtatatattgcttcttgagaagttaacggtccagacgtagacatctgcttcgcgaattcggagcttccacagcaaaccttccattcatcttctccgatctccatcgccattttttctctcttttctccaatcctcacttctgttgactggtgtaagatcaaaagtcatctaattgggccttttcataaacgggcttttcaaaaatgggccttttctttatcttcttcctttttttattcatcatcttctatatgtgaattattcagaaacagaagcgagaagtttcttacaatttgtaaagagatctgttttagggttttgccttgttcttgtggcgggaataacaaagacatcgccgatatggggaaagacgaagaggaaatgcgaggtgagatcgaggagcgactaatcaatgaagagtacaagatctggaagaagaacactcctttcctctacgatctcgttattactcacgctctcgagtggccttcacttactgttgaatggcttcctgaccgtgaagaaccttccggtaaagactactccgttcagaagatgattctcggtacccatacctccgagagcgagcccaattacttgatgctagcccaagttcagcttcctcttgacgataccgagagtgaagctcgtcagtacgatgatgaccgctctgaatttggtggctttggctgtgcaactggaaaggtgcgattttttatttttgtttctcatttccaactttctagatttgattctagggttataacgaggtaaaggatgataaatgttagtttgattgcttgtgtaggtacaaattatccagcagataaatcatgatggtgaggttaatcgagctcgctatatgcctcaaaaccctttcataattgctaccaagacagttaatgcggaggtctatgttttcgattacagtaagcatccatctaagcctcctcttgatggggcttgtaatcctgatttaaagcttagaggtcacagctctgagggatatggtctctcttggagtaagttcaagcagggtcatttgcttagtggctctgatgatgctcagatctgcttgtgggatattaacgctactcctaaaaacaaatctctggacgctcagcagatttttaaggtaatgctttggatttctattcgtttttagttttgttttgtatcatctagaaaggaaggaattgcacccacttaacggaatcagttacacttatgaaagctcatagatagatattcaggttggtttctgtgttttccttgctgatgattattttctgaacttaaggctcatgaaggggttgtggaagatgttgcatggcatctgagacatgagtacctgtttggatcagttggagatgaccaataccttctcatatgggatctgcgttctccatctgccagtaaaccagtacagtctgtggttgctcattcgatggaggtgagtttgcaatatattagctttagatacagataatacttctggtttttaagcttgctttccttaacactaaaaaccattgaatcatattgcctcgtatgtatttgctaattgttgagttgtttgaaatgccttaggttaactgcttagccttcaatccatttaatgagtgggttgtggcaacaggatcaactgacaagactgttaaattattcgatctacggaagctaagcaccgctcttcacacatttgatagccacaagtaagaatgatacgccataaatattgccgctttgagatggattttgtgttactaagaagtatttacaagttacagcaacatcactaaccttaattatgtgcttgatctccagagaggaggtttttcaagttggttggaacccaaagaacgagactattttagcttcatgttgccttggtagaagacttatggttaattaccttacca

SEQ ID NO: 140413 - DNA, 843 bp, Arabidopsis thaliana landsberg
atgtcgacaaggtgagttataaccgaaccggtttataccgttttacacgcgtcatttacgcgtaacatccacgtcttcccaaatctgacagatacagagatacttaacttggtccctttccttcttcttcttcaaatataaatatctttaatcaattcagaaccaaaccaagtcaatcattcttcattgatcgtctccgatttgaatcgccggcgaaaatggaatcctccggcgacaagcaaacttcttctctttaccctactgttgacacatccaatcccgaagctcctataaaccctagctcatcatcttctactaacaatctctatccttctctcgatatgaatgatctcgctcgtaatctcttccctgaacaaccagagacgagttctattccggtttcagctcctcccgctgcgacggaggaagtaattttgaaaatctccggcgcgattcttcatttaatcgacaaatcttacagcgtcgagctcgcttgcggcgatcttgagatcatccgtattgttcaaggagagaatgttgtcgctgttctcgctagtgtctccgatgagattcaatggccgttgacaaaggatgagaactctgtcaaggtcgatgagtctcattacttcttcacgcttcgtcctaccaaagagatctcacatgattcaagcgacgaagaagacggagatggagggaaaaacactaacgagatgttgaactacggacttacaattgcttctaaaggtcaagagcatttactggtggagcttgagaagatcttggaggattatagtagtttctctgtgcaggaggtgtcagaggaagcgaaggaagcaggtgaaa

SEQ ID NO: 140414 - DNA, 1713 bp, Arabidopsis thaliana landsberg
agacagtttgagaaggacaaagcccttgcgaggatattttagcctgtgttgtttaacgagccaagcgaggtttcttttcaaaccagtgttttctatcttattaaccaaccgacacctgttttcttatctagtatattcatctcaacgacattttaggaagatgcggtgaagattttgttgggccttcgtgaaaaatatgaagcccatcacaattgcaaatatactatggaagccatagatgctgcagtgtacctttcatcacgatatatcgctgatagatttcttccagataaagctattgatctcattgacgaggcaggaagcagagctcgtattgaagcttttaggaagaaaaaggaggatgcaatctgtatcctatcgaagccacctaatgattactggcaagagatcaaaacagttcaggccatgcacgaagtggtaaagaaactagacattagtcctgcagtgttcttgcatgttgatcatttttacctattaacagtttcaataattgttctgtacataggttctctcaagcaggcaaaagcaggatgacggtgatgccatttcagatgagtctggtgaactagttgaagagtcttctttgccacctgcagcaggcgacgatgagtatgacttccttcttttacatatttaggtctttaaggggaaactttcaaaaaagttctaagaacaacatgaaggaacctccataattttaatttgattgtgctttcaggcctatactggtgggacctgatgatattgcagccgttgcatcggtttggtctggaattccagttcagcagatcactgcagatgaaagaatgcttcttatgagtctagaagatcagcttagaggcagagttgttggtcaagatgaggcggtagctgccatatctagagctgtgaagaggtcccgggttggcttaaaagatcccgaccgtccaattgctgctatgcttttctgtggaccaacaggggttggaaaaacggagcttacaaaagctctggcagcaaattattttggctcggtacagcttcattaacaatatagtgctgataaatgattgtggtcattgaaccgattccttcatcccccgtttttcattggttattgcaggaagaatccatgctgagattggacatgagtgaatacatggagcgtcatactgtgagcaagctgataggctctcctcctggttatgttggctttgaagaaggtggaatgcttacagaagctatcaggagacgtccttttacagtggttttgttcgatgaaatagagaaagcacatccggatatcttcaatattcttctccagctgttcgaagatggccatctaactgattcacaggttcgatgtcctgtattcacttaaaaacatttactgcttcttcaagagacctatagagttgaaactcgtctgtgcatataattgatatgtttgcttgcttcttcaatctttgtttacagggaaggagagtatcttttaagaacgcattgatcataatgacctctaatgtcggatcattggccattgcaaagggaagacatggttcaatagggtttatcctcgatgatgatgaagaggcagcatcttataccggaatgaaagctttggtagtcgaagaactcaagaactatttccgtccagagttgttgaaccgaatagacgaaatcgtcattttccgacagctagagaaggctcag

SEQ ID NO: 140415 - DNA, 2447 bp, Arabidopsis thaliana landsberg
atggcaaaacgggtcaatacttgcaaatgtgttgctacgccgcaagagaagatcggtaatgttcctactccatgttgtttttgctgtaatgattagtaacatagttaatgatttatcgtcttttagctgtttatctgtttcttacaatacatgattttgttttctgtatgtagagtataagaccaaagtgtcacggaattcaaacatgtccaaacttcaggctggatacctattcccggaggtttgttacctgttactctcttggtactactatttaagatttcaaatacctaaaggagtggcatttcaagttaacatttttgaaagcttctagtgatctgaaatattataactatctgtgtaataagttaatatatcctcattgattctgtatataatgctcctctctcttatttttttgtgtggatgcaaacagattgcaagaagaaggtctgcacacttgttgaaatatccagatgcacaagttataagtcttggaataggcgacacaactgagccaattcctgaagtgatcacttctgctatggcaaaggtacctccttatcttaacttagcttcatgtgctctttgcccttctctgggctctagcatattttaaactgattttactaacactgccctaacatgtattatttcgttcattttgacaaaaatgtataacatattttctgttttggcgtatttggattattaaacgagaacttctctgtaatctaacaatgaaaattattctggtagcatagtttttttgtttgctatactattcacacaggcatgtaatctctagagattaatcatgttttttttctctgacagaaagctcatgagttgtcaacaatagagggatatagtggttatggtgctgaacaaggtgcaaaggtcagtgcacccttcatttccaccttattgcgttgttatcatttctttattatctgcctttgcacgtcacttcaattttattatggatagtcttgaactgctgctaaattcaagagaagatggatttaaacctgtttcttacatgtaaaatcttaaagcttaatctgttaagtttttatccaaactaaccttgatttcacatatgtgaaaagccactgagagctgctattgcgaaaacattctacggtggccttggcataggggatgatgacgtttttgtttctgatggagctaaatgtgatatctcacgtctccaggtttgttttattgctgactattcatctgtaattgatacaagattaagaaatatgaacagctgtttcttgattccacttcttgcaggttatgtttggttccaatgttacaattgctgttcaggatccttcatatccggtaattgggcatatagaaaccaaattgcagttgtagtcttctctacttttgctccattttaacgtggaactatgctgtctcgttttttttggattatacaggcttatgtggactccagtgttattatgggtcagactgggcaatttaacactgatgtgcaaaagtatggaaacatcgagtacatgagatgcactccagagaatggcttctttcccgacttgtccaccgttggcaggacagatataattttcttctgttccccaaataaccctacgggtgctgctgccacgagagagcaactaacgcagttagttgagtttgcaaagaagaacggttctataatagtgtatgattccgcctatgcaatgtacatgtctgatgataacccacgatccatcttcgaaatccctggagcagaggaggtaatagactgattgattataacattaaaaggtccatttttcaacatctttcttcatgtgtacaaccgcttacaggtcgctatggagacagcttcgttcagcaaatatgctggtttcactggagttcgacttggttggactgtcatcccgaaaaagctactctattcagacggtttccctgttgccaaagacttcaatcggattatctgcacttgtttcaatggtgcatctaatatctctcaagctggtgctcttgcttgccttacacccgaaggacttgaggttagcttagctaaagagagatctcaaatcataaccagttcccactagttcagatatgcaaaatgatttattttgttgtcttttgaatcattgcaggcaatgcataaggtgattggattctataaagaaaacacaaacataatcattgacacattcacatctctcgggtatgatgtatatggaggaaagaatgcgccttacgtatgggttcacttcccgaaccaaagctcatgggatgtgtttgctgagattctggagaagactcatgtggttacaactccaggaagtgggtttggaccagggggtgaagggttcgttcgtgtcagtgcctttggtcacagagagaacatcttagaggcatgtcgaagattcaagcagctttacaaatga

SEQ ID NO: 140416 - DNA, 2808 bp, Arabidopsis thaliana landsberg
cttctccttagggtctatctctcttatcttaagcagcagcagcagtagctagaacaaaaacgtcaccgatggcgtctcaagctgcgaatctctgggttcttctaggtttaggtctcgctgggattcttatgcttaccaaaaagctgaagaagaccgtccgtgaagatttcggcgcttttatcgataaactcatgcttcttccccctccgcaacctgctcctcccaaagctcctcatcctctcaccggtctaacctttgccgtttccgacgtgtgagtctccgttgacttgtttccccctttcttctcccatatgtttatcatatctatatttgggggtttagctgaatgattttttccttgggtagagtcaaaattttgtttgacaaatgttggaatctgcgttgactcgactcgtaatcttctccggcgcactacatgtctgattctgagctttcgaaagtatggttgattgattttgagccgtttcactgaaaattgtgtttgttgtagattcaaatgtgtgtgtgtgtgtgtgtctgctagttttgtcaaactcatttcaaatcgatacttgttgaatctgttcattggaaggctctactgtttgatctctgttgctaggtgtttgtatgttttagattcgtcaccaagtttgacctcgacttattcatggagtcctacttataactgtctcaacatgttgattgactatttatctaatctgtgtatatctctcattctcttctatgatcttttgacttttgaagttcttgaaaagctaatttactctttctttccttttcatttgttttccagattcgatattacagggtatgtgactggatttggtcatccagactgggtcaggacccatgaagctgcttcgtcaacatctcctgtggtttcaactctcgttgaaggtggagccacttgtgttggaaaaactgtagttgatgagtttgcgtttaggtttgtctctgtttcataatgttaaattgttacctgtatcaggattcagattgtgattccagtgttgaaatttttattttatcaggatgttagtatattaattcctttgtttggctgttttcattttcttcagtatcagtggagaaaacaagcattacgattcacctacaaatcctgcagctcctactcgtattcctggtggcgcttgcagtggagctgctgtagccgtagcaactaatgctgtggattttgctctaggtgagttcagtagctacttttttccttgtttggacaatttggtatgagatgaccgtatgtttgagacacaaaacattgcataaactttcaaaacatggtcaataatcttcctttaggaaatttctgaaacgattgatagtttattcatactgcagaaacttatttggcatctaatagaattgcttgatttagactcttatggctatatggtaagatagttccatgcggatttataatttatatggtagtctgtcattggctcctcctatcagtatctaaaatttcaactgcatactggttggttcggtttcaattgttttcagaatatagttttgattacttgcatctttgcaggcatcgacacagttggcggggtaaaagtgcctgctggatactgtgccgttcttggattcaaatcttcttatggggctatttcaaacaccggaatcataccagtatcttcaagtcttgactctgttggtatggatatataaatctttgaattatactgtttgtggtggaatggtttggatcttatataggctaggtttcaattgttgtataatcacattgcaagatttagatgccttcgttcgtatgactaatttatatttaggaccaaaaaatgagaattacgttgattctgatcaatagatcttggcttcaggatggtttgcccgcgatccaaacaccctacgtcgtgttggccatgtactcttgcaacttccatttgccactcaacggaatccaaggcaaatcatactagctgatgactgttttcagctgttaaagatccctgtggatcggattacccaggtggtgatccaatcagctgaaaagctttttggaagtatgcccccctttactctccctgaagatcctccagtctctgttagaaattctgattataatatcattatcttgttttatatttaggacaattgctaaagcatcagaacttggagacctattttgaaactaaagttcctagcttgaaagagttcgctaggacaaaagccattgctaacacgaaggtctcaccatcgagactactggcgaatgtgatgcagcttcttcaaaggtgtgcctattgtttattcacttacagaggatgaaagaatcttagttttgaacactctaaaacaatattggcattgtaggcacgagtttcttcaaaatcatggggattggatcaacacagtgaagccagccattgatcctgtgatttcatcacaagtgtgtgagaacccagaactaaccaatgaagagattgagaacctgaatgcaattagaaacgagactcgagtggctattggttcacttctcaaggtattcctgctcttccatgacatgtccacaacttgagctagttagtttatgtctcttaactaatctctaattgttcccaactctgtcacgttatgtatcaaggatgatggcattctggttattccaacaatgccagctgttcctccaaaacttggtagcaaggagataacatctcaagactatcaaaaccgagcttcaagtccacttagcattgctagcatttcaggatgttgaaaggttaatgtcttctt

SEQ ID NO: 140417 - DNA, 575 bp, Arabidopsis thaliana landsberg
ttgttcaagtagtttgggagagagaagagaagaagaagacaccctttaagcaaaacagaggattttcattctctgttctgtttgaattattactaatctatcatcttgttgttctcttcgtcgacaatgtcgggaaacaaagaagaagaggatcctcgtatccatggaatcaaaactaagatccgtgtcgttccagattttcccaagaaaggtaactttttttcttccttcttctggaattgtcattatggaagtgctttttttttgtgtgttcttcgttacatactctgtttcgtcacgtagaaaatgttgtttgtctaaagaacaagtactttctaagaaaatgctgattttttcatctgaatctttttttgccgacaataatatttcggttaaaggatttttttttacagttttgtcttggtcttgaatctgtgttggtttgctatgaagtgggaatttgaccattcagagatttttcttgaaaaaaacaagaattgttagtttgttacatagaagagggtgctaaaaacaaggttaaaattgcagggaataatgttttaagaacataacaa

SEQ ID NO: 140418 - DNA, 1163 bp, Arabidopsis thaliana landsberg
gcgtttcgcaagtatcaccgggaattgcaaagaagcagaggaccatgtacggagacgctacaaactggaatgaagatgagtatagagaatcaattttgaaggagcgagagatagagacacgcaccgtcttcagaaccgcctgggctctcacggcgagaatctctaatccagacgcatttgttgtagcctccagcgatggaactttagctttccattcactgaactcgcttgtgtctcaatcggcgagttttggctactcgaaaggtcaagatgttatggtggctgaacctgagagagtggttagggcacacgaaggtcctgcttatgatgttaagttctatggtgaagacgaagatgctttgctacttaggtagagacttaaatctctctttgttgattgatgagtctttgatgaattgtaattgagagtttgaaattttgatctggttatgtgtagttgtggtgatgatggtagagttaggggatggaaatggagagaatttgctgaatcagatgtgtctcttcatttgaaaggtgtgtgtgtgccatttttgtggtttttgatatgaatgatgctttttggagcttagtggttgtttttcttatgatctacagagaatcatctgaagccattgcttgaactgattaatccacaacacaagtgagtatgagttttgttcattttttattctacttgataactctgttactgaaaatgctataattgtgggttcaaatgtcagtgttcgtaatagttgtgtgtataatcaccattctttttcttatagaggtccttggggtgcgctttcaccgatgcctgagatcaatgccatgtctgttgatcctcaggttggaattgtatttaaatttcattgcttggttagacagtctcacaggataactgttttcaccctctctcacttctttcgttttgatagtcaggaagtgtatttacagcagctggtgattcttgcgcatattgttgggacgtggtatgtatttgaccatgatagatgtatgtcctatgtgaatccagatatcttaactttctaaaatcatttatgtgtatccaacaatttcaggagagtggtaagattaaaatgacctttaaaggtcattcagactatttgcatactgtagtttctcgtagttctgcaagtcag

SEQ ID NO: 140419 - DNA, 4846 bp, Arabidopsis thaliana landsberg
  unsure (1)..(4846): unsure at all n locations
catgagaatcctgatgcttttgaagctgtgaaggatacttaaaggcttttccacaaccaatttctttgcagacaacctgcttctgaccagttgaacactccgcaggctgagaatcgccattaccattattgtccttaccacttccgccattcccttcattttccttctcacaaccgccactaccagatttttccttatcatcatcccccttacaagtattgtccttatcaccatcgcccaaaccagtattgtccttatcacggttgtcattactatgatatttcttaacatgcctaccaacatttccctgtactgagaattcactcttgcagttctccttcggacacttaaagagcttccctttatgtgtaagaagatgcctattgagatgatccttcctcctatagctagcagcacaatcatccacatagcaagtaaaagatctctacacaccaaaagagtgaaaaccatcagaaacatagctcattgacgaaaagaaagtccaaagcaaagtgaaacaaaacaagctattgaacatcagacctcaaacattttgcgtgatcgaggcttacttgctggagcttctcaggaggtctcccaacctgatactagtccataacatgtagcctcgcattttggagttctctctttgggatccaatgcctcacgcaataacataagtaagaccacttgatttaaacaaaaggctatttatttcctgcaaatgtataaacttttagttcacaaccagaacaaaactcaacactaagcaaaacccacgagtatctctatgtatctccatctgtagctgcaacacacagaatgggaacaattcgacttctcatgacaagaggatgcataaatctacctcgagcgaatgactctgcatatgctgcttcaagtgagcaggtttcttaaactcagcaccacattcttgacaagaatgattacttgaagactcctcatcaacctcacaagcttcatcatctctttcctcttcaagttccatctaaacaaacgaatcatagaaactctcaattcaacaaaccatcgccgattctacagactcaactctcaatttcattgaaaacaaatcaagatgccacggatgagaaattggaatcgaattggaggaagatctcaaacctgatgatgagattggatgtgtttagtgatgagatagtttttagatctgctgattccgcaatactggcatagataattgcgtatatccttcttcgccgaagtcttcacatcaactttagcttcttccgccatgtctctcttattgtctacacaagaactagggcttatctcctccatcaagacgccgcacagtagaagctgaagtaacaatggccatttatatatcagcttctttttnnnnnnnnnnnnnnnnnnnaacctagaacacttgggcttctaattgtataatgggcctttcaagcccatataacaaatttaaattagaattacaacaaatttgcaaaatcgagttaagagaatagacaagggatctttgcaaaacgaaaagttagacttgtgccaggaaaaaagggaacaaatttgaaacgtcacaatcggtccattaaatctaatgggccctgcatctgtaacatttttgaaaaatttacagtcgataagctcaattaggtcatcgttttaacaaagggtaggcccaaataaaagaccagtccaattcaaaaacaagcgttttaaaacaattaaaaaatgattatgtaacttatttgttatccgcacgtgtcatgtgtgctacacaaattcgtaaagatgacaaataacacctcacagacaggacacatcaccatttttaacatttcttccccataacgattgattaaaaaacgtattaatcccataatcatatcttctaatgaattaaataattaaccacacacaaaatttattttaatgattttaatcaataaaattaaaaaccctaaaacgcaactttctctcttcttcttcctctgtctttgcgccaaaccaaaacccacacaaaagccctctttttttgttatccccttctctctctgaaactagggtttctatttttctgagtgatgtgaaatgctcgtgtaacggaaacgatgcagaagattctgtgcaaaagtaccacttcttcaacccctgttctctctactccggtgaactctctcgccgccggttttatctctgtagggtttaagacccccgtcaaaaatctccctccttgttccactactaaacctctctccacttgtttcttctcgacttccgctatgccgaccacaacggcttctgtgtcttcaggcggtgttggtttctctgcttatctacagaggactgttcataaaccagcaccggcgtcggttcggttctcaacagctggttaccggacttgccggtgttcaattgacggtacgaaccgggcttgggttggtcgaaccgggtcttggcgtgcgttgttttgttcagactctactggtgctttaaccccggttaatgctactgctggagcagtggttgaaagcgaggaagagtctgacggagaagatgaagacgaggagaaagatgagaagcctgtgaggatgaaccgtagaaaccggagctctaatggaaatggtgagtttgttggtaatccagatttgctgaagattcccggagttggtttaaggaatcagagaaagcttgttgataatggaattggagatgttgcagagctcaagaagctttataaggataaggtacttttgaatcttcaattttaacttgcgggttttgagataagtattgaaagtttcaatctttatttttggttggttgatttgtaatctcagttttggaaggctagtcagaagatggttgattatcttaggagctctgttgggattatacatagaaaccatgcggagagtataacaacgtttattaaagagagtgtggatgatgagcttaaggattctggccctgaacataatctaaatgtgaagaaacgtttgacgttttgtgttgaagggaacattagtgttggtaaatcaacttttcttcagaggatagcgaatgagactgttgagttacaagaccttgttgagattgttcctgagccagttgataagtggcaagatgttggacctgaccatttcaatatattggatgctttctactctgagcctcagaggtatgcttatactttccagaactatgtgtttgtcactcggctgatgcaggagaaagagtctgcttctggggttaaacctctcaggttaatggaaaggagtgtcttcagtgacagaatggtaaatttaaagcaaatgttatttaaattgatagtttgaaatgtgtgattgcaaacttaatatgttgtggaacttggtgtttaggtgtttgtgcgtgcggttcatgaagcaaaatggatgaatgagatggagatcagcatctacgactcttggtttgatccggttgtctcttctttacctggacttgtttctgatgggtttatatacttaagggcgagtccagacacttgccacaagcggatgatgctcaggaaacgagcagaagaaggtggagtctctctgaaatacctccaagatttgcacgagaagcacgagagctggctgctttcgtttgagagcggaaaccatggtgtattgtctgttagtaggccatctttacacatggacaactctctgcatcctgatataaaagaccgtgtcttttacttggaaggaaatcatatgcattctagtatccagaaggtaagcttatctccttttttcctttctttgtactaaaagtcttaagatagattttgcttagactgtttcatttgtttcaacaggtccctgctctggttttggactgtgaacccaatatcgacttcagccgggatattgaagcaaaaacgcagtaagctctcattctcacactaccgtaatgtcaccataccttatttgaaatcttaaacataacagcaattttcttgattgatgttgttaaaaggtatgcacgccaggttgctgagttctttgaatttgtgaagaagaagcaagaaacatctacagaggagagcaacagtcagtcgccggtactactaccgcatcagaatggaggtctctggatgggaccagcaggcaatcatgtcccaggattagaacttccgcctctagatctcaagtcactcctcactagaccgtctgcgtgactgtccattcactgactctgtttttgttcgctccaagggagcgtgtcaggttatccaatgtcaatagtttcgatcggcttttatatcgtttgtttaggaaaaaaacattatctgccgcttttgttcatcttagatgtagaaacaaaacatggtctcgcagccgtttagtttaacccttttgtataaaagtttggtctcctggataatttgtttcttgaaatcttgttggtcgtctaaaatttcagttcagttcatgtttctgatatggttgcacatttactctgtatccaattagatggtagtgtgtttattgttttaaccaaaatgtacatgaagaaaacgcctaagaaaagcgtttagtcataagaacgcgacgttttctgcctatccaagtagaggtccacacgggggaggctcgaccacactgtagccggcattcgagtaaagatttctagcagctgcatcgtcttcataagctcttagagcaagaagcttgaaaccccacaagtgacacaaaacatcacatgcctttaacaaagtacttgccatcttctttctcctttgagcttttgagacagctaaacccgagacatagagatattcgtcgacgcccggaaaatagcgaagtactgaactttc

SEQ ID NO: 140420 - DNA, 755 bp, Arabidopsis thaliana landsberg
ctcattaccaaacctgaaacggattagatttgaaaaggtttcagtcactttgctggacattcctcaattgcaactcggcagtctcaagaagctatcatttttcatgtgtagtttcggtgaggttttctacgacacagaagatatagatgtctctaaagctctatcgaatttacaagagattgacatagactactgctatgatcttgatgagttaccatattggatccccgaagttgtttcattgaagacacttagcatcacaaactgtaacaagctctctcaacttccagaagctatagggaacttgagtagactagaagtgttgaggatgtgttcttgtatgaatctctctgagctgcctgaagcaactgagagactcagcaacttgcggtctctggatatttctcattgcttaggattgagaaagttgcctcaagagattggcaaactacagaaactggagaatatctcgatgaggaagtgttcgggatgcgagttgccggattcagtgaggtatctagagaatctggaggtcaaatgcgatgaagtaactggattgttgtgggaaaggttgatgccagaaatgagaaatttgagagttcacacggaggaaacagagcataacctgaagttgcttctaacgttttaagttttgagtgaaaaaaaaaacattttcgtagcttgtgtattcttattgactctttaatgatcacaatctagactaaacgagtaataatattacaagagtcaacatg

SEQ ID NO: 140421 - DNA, 2069 bp, Arabidopsis thaliana landsberg
ttgctgaacggtgatgagcgttttgttgagccgacacctaagtcactacagagcttgaatctagaatctgtgaaagatgcggtcatgagtcattttgttggggacaatatggaggtgagatctccaacttaaaagctgatgtttgcttgacttatattaattttatttgattttcataaaagtttctctggtttccttcaggtaagcattgtgggggacttttcagaggaggaaatcgagcgttgcatccttgattaccttggtacagttaaagctagccatgattctgcaaaaccaccaggatctgagcctatcgtgtttcgccaacctacagcaggcttgcaatttcaacaggttcggaacaaagcagtaaatgcatggaatttcttgttcctctctttggtttccccatccccttagatatgtgattcaagcaggatatattgacatctttatctctggataggtattcttgaaggatactgatgagagagcatgtgcatacattgcgggaccagcgccaaatcgatggggctttacagttgacggggatgacctttttcagtctgttagcaaacttcctgttgctcatggtaagttacaccttaacggaacggacttaaaattaggagtcatatgatgtcgtggttttcaacctcgtggaaactgtgtataggtctggttctgagcttgtctcataaaccagatatttatcttcagtagtagtaatgaagtttagtggttagctctgacataaagtagcttataacatttcatgcatgcacactgaaattgcagatggacttttgaaatcggaggaacaattgctagagggaggagacagggagttgcaaaagaagcttcgtgcccaccctcttttctttggagttacaatgggtcttctggccgaaatcataaactcaaggtacacttactgtgtactggtgtcatattattcgaaagcagagttcttttttctgctgctatagtactctctggtttggttcatgtccagaatttgttgaggaactaactgccagaatgaagcactgcttagaaaatgaacgtcatcgtgtgtcaacaaacgtttgaattttaagagaatgcctttttagacctctgattgtatttttgcttcagaccggagcctgtctacttgctatctacctattattttacatgtatatatatatatattctgccacccatggctgaatttatttttttgcgtcattgcaggcttttcacgacagtaagagattctcttggactgacatatgacgtatcatttgagctaaacctatttgataggctgaatctcgggtggtatgtgatatctgtgacttcaactcccggcaaggtatgcagtctttgtattttgcttatagcaaatgtgctgctctttcattaacagttttcttcaccaagtttctcaatactctttccaggtatacaaagcggttgatgcctgtaagagtgttcttagaggtttgcatagcaaccaaattgcccctagggagttggatagggttagttgtctcttttgcctctcagcttagctctttttagctcgttctctttgttaatggaaagtagtgttgtttgtaaaatcgacaggcaaagcgaactcttctaatgagacatgaagctgaactcaagtccaatgcctattggcttaatctattagctcacttgcaggcctcctctgttccgaggaaggtaatactcacttgtgtattcctaaatgtttcatttctgacttgacttcttctgatggggtggttttggttgttttaggaactgtcatgcattaaagaacttgtttcattgtatgaagctgcttcgatcgaggacatatacctagcttataatcaattaagagtggacgaggactctctgtactcctgcattggtattgctggggcacaggcgggtgaagagattactggtaagtgtgacgtcttttgagcaaaaacagtttgagatcagttgggtatataaattacaaaacctgtgtgatgcagttctctcagaagaggaagaaccagaagatgttttctcaggagttc

SEQ ID NO: 140422 - DNA, 910 bp, Arabidopsis thaliana landsberg
ctgaaattcaacttctagtcttctcctccaactacaggcaaattagggtttctgagttcgagaaaattcgtagcagagtgtgaaaatggaaggaagcaaaagcgaggcagtgttcgattccatgaatctaaatcctcagattttcatcaacgaagcaatcaactccgtcgaagattatgtcgaccaagcttttgacttctatgcccggttcgtctctctcgctattgttgcaaagcttattctaacaaagggttttatttggttcttacttacatttttgcagtgatgcatccaaatctctcaaaatcaaaggatctgataaacaaaagtcacaagctttatcaaatgtgagttttggtgattttggttaattctttgttcagcttcttactcttgttacatttttagggtattgctcgtgttcgtggtttgctactatctgtaatcgacaatcgtttgaaattgtgggaaagctattctcttcgattctgtttcgcagttcctgatggatttgtgttaccaaagagtgtgagtctcttctatgtccttcattgtctcgtctctcactgttatactgtgatttgctgagttgtttctgttcgtcaggaggagtcttcgtctgtgcatcaggatgggttatatgatctagaattagatgcagaattggattctttaagggataagcttaatgtggtgagaaaaagactgatactttttgatctttggtctgttacgttttcgtttctttaaggtgaggtacttttgtttcaggtgggaaagaggtctgttgagcttgactctgagctccaggctttagaaagaagctcggtttcgagggaacggtctttgagactcgttaatgaagctttggagctttatgatgagtcttctatggatgaaatattcaaag

SEQ ID NO: 140423 - DNA, 2444 bp, Arabidopsis thaliana landsberg
cggtttctcacatacacaagaagaaaataaccgttttgagttaaagtaaagcttttgaaccaatggaggaggagaagtcgttctcggcgtggtcttggtctgttgagcaatgtttgaaagagtacaagacaagattagacaagggtttaactagcgaagatgtccaaatccgccgtcaaaagtacggttttaacgagcttgctaaggagaaaggcaagcctttatggcatcttgtattggaacaattcgacgatacgcttgtgaagattcttctcggtgctgcgtttatctctttcgttttagcctttttaggtgaaagcgaggaacatggctcaggttcagggttcgaggcctttgttgagccttttgtgattgttttgattttgattttaaacgctgtggttggtgtgtggcaagagagtaatgctgagaaagcacttgaggctcttaaagagatgcaatgtgaatctgcaaaggttttgagagatgggaatgtgttgcctaatttgcctgctagagagcttgttccaggggatatagtggagttaaatgtaggagataaagtccctgctgatatgagagtttccggtttgaaaacatccactttaagagtcgagcaaagctcgttaaccggtgaagcaatgccggttttgaaaggagcgaatcttgtagttctggatgattgtgaactgcaagggaaagaaaatatggttttcgcgggaacaacggttgttaacggaagctgcgtttgcattgtgacgagtatcggtatggatacggagatcgggaaaatccagagacagattcacgaggcgtcgcttgaagagagcgagactccgttaaagaagaagctagacgagtttgggagtagattgactacagctatttgcattgtctgtgttcttgtgtggatgataaactacaagaactttgtttcttgggatgttgtggatggctataaacctgtgaatatcaagttttcattcgagaaatgtacttactacttcaaaatcgctgttgctctcgcagtggcagcgatacccgagggtttacccgctgtgatcacgacatgtttagctttagggacgaggaaaatggcgcagaagaacgcgatagtgaggaagctcccgagtgtagagacactcggttgcacaactgtgatctgttcagataaaaccgggactttaacaacaaaccagatgtctgcaaccgaattcttcacattaggcggtaaaacaacgactactcgagtgttttcagtcagtggtacgacttatgatcctaaagatggtggaattgtggattggggctgcaacaatatggatgctaacttgcaagctgttgctgagatatgttcaatttgtaatgatgctggagtgttctatgaagggaagttgtttagagcaacaggtttgcctacagaagcagcattgaaagttcttgttgagaagatgggtatcccggagaagaagaacagtgagaacatcgaggaagttgcaaacttttcagacaatggtagctcagtgaagctaggtaagttttagaatgttttcacaccattacattagcacaatttcattcatctgctatgttgttgattgattgatcttttctccattcttgctgcactagcttgttgcgattggtggaacaaaagatcgaaaaaggtagcgacattagagtttgatcgcgttcgtaagtccatgagtgttattgtgagcgaaccaaatggacaaaaccggcttctcgttaaggtaaacactaaacaccattattacttctcttctcttgtttttggtgaagaacgttttgtgaatctcccctttctttttctttgcagggtgctgctgagagtatacttgagagaagttcttttgcacagcttgctgatggatctcttgtagctttagatgaatctagcagagaagtaatcctcaagaaacattctgaaatgacttcaaaaggattaagatgtttaggattagcttacaaagactaattaggagagttttcggattactcttccgaagaacatccttcacacaagaagcttttggacccttctagctattcaaacatcgaaacgaatcttatcttcgttggagttgttggtctaagagatcctccgcgtgaagaagttggaagagcaattgaagattgcagagacgctgggattagagtaatggttataactggagataacaaatcaacagctgaagctatttgttgtgagattagattgttttcggagaatgaagatctttcgcagagtagcttcaccggtaaagagtttatgtctcttccggcttcacggagaaccgagattctgtcaaaatctggagggaaagtgttctctcgagctgagccaaggcataagcaagaaatcgttaggatgcttaaggaaatgggagaaatagtttcaatgacaggtgatggtgtgaatg

SEQ ID NO: 140424 - DNA, 746 bp, Arabidopsis thaliana landsberg
ccaaaacttctctttgatgggccattcagaatcatactcagagttcagaagctagctactactaataggccaagcgttttacatcatcaagaacaagaacaagaacaagaacaagaacaagaacaagaacaagaagagaagactatggttgataaagataagaactcggaattgatggatagagttaggttgttggaagtagctgttgaggaagagaaagtagctaaagctgctttaatggttgaattggaacaagaaagagcagcttcagcatcagcagctgatgaagctatggctatgattttaaggctacaagcggataaagcttcgcttgagatggaagggaagcaatatgagagaatgattgatgagaaatttgcttatgatgaggaagagatgaatattctcaaggagattctttttaaaagggagagagaaaagcattttcttgagaaagaacttgagacttacaagcacattgatgatgatcaagagacggaatacaacgagaagagagaatgcgatgaggatggagaaccgattgtgtatgatgttcatgtcattgaggataatagtcagactaaagtgagggatgatgatgtagcagaacacaaagagatgaaggaagaagagatagtcaaggatcatgattcagtatcatcacctacttcatcttcaacacatctcccataagtttctaattctgattgttgaactctgtttttattaatgtgtgtgtgtagatt

SEQ ID NO: 140425 - DNA, 1167 bp, Arabidopsis thaliana landsberg
gtaatgttgatagaaacagggaacaacaggagaatcatggttcaggttatcagcaggatcagagagtacaaccctgtcatctgagttcttccatctattacggtggtcctgatgtttatttccagcctcaaaattccaccagcaactctacggtaatcattaagtctagaaacttggtatatgtagctacctgatagtcttgtggagcttttgatggtcttaaaggttttgaaaccaatgttattgtgcttcttcatcgactattgtctctaaagaatctggctgaagaatctgaagacgaattacttagggaaatagctagaaacttttatctatagctgttttttttataaagttagtcttgtggaacttttgatgagttttaagggttttagaaccgaagttatcacgcttgttcatagattattgtttctaaagaatattgtttggttatgttttatcgttttgaagaacaagaaagatggaggcgaagatgattccggaagtgcctcaagaggaaattggtggcaaggtatccgattcccatcttttgatcattttgttctgctttgtggaaaatcttgttccatttctctaaccgttcttcaaaactttccagggtctctgtattactaagtagagatcttactacttaagcaaatgttataactacaaaatcaaggtataatgaacccaaacattcattgaaatgattcaagttcggttcttagacacgcaatactgattatggttttggtttgggattttgcaggtacataggaacaaaaagagaatagagtagctgtggatccgtcgtttttagtaacttctcatcttattattacaaaaagtatggaagaagtttgaatgtagcttagctgcagaaagcaggggagttgtttttgtcccttgtcgtggtttagtgattgacccgaccggttcagatttaattttcccttaattttatagttaaaccgttgatggttttgtacaaactctttaaaattccagtttccacgcatataaataaataaataacccttcctgtaatcctgttctagctctttgaaactctttgttatgtttgaatgttcaaatcggtctggttattatcggtgttgggttgtgaaaggttccttgtctggtttagatgggaatctcttttga

SEQ ID NO: 140426 - DNA, 677 bp, Arabidopsis thaliana landsberg
catgcctagagtccctcttcaatgccaaggtaaataaaaccaaatcattcccctctaatcattacatttaataaacttgcttgaatctattatctaacaaatgttttgatcttccatctttttacagccaatattgctccagctgctgctcctggtaaacaatcaatgacattattatctcaattaatcacataattggtttcttggaagataaactgatataaaaaattctgttttggtaataggacctgctgctacatttggaccatcgatgtctccaggaccagagacggatccaattgttccagagccaactccggcagctcagacaccacagtctgatacaacccgaccatttacaccatccgtcgacggtggagctccaacatcagacgacggaggaagcaccagtcgaccttctgagactccttcatccgcctacgcactctcaccatctcttctcttcttcagcatcgccctcgtagctctcaaattctactgatgattccttttgtttctttgcattccttatgtgagttgatttatgcatcgttgattatagaaagaaaccatttatttggtcattgctttgtggaataagcttttgtgtatactgttctctgtttcgagtgagatttattttgtcttgttgaagtaatacatcatcattttaatgg

SEQ ID NO: 140427 - DNA, 1031 bp, Arabidopsis thaliana landsberg
aaactgattttgcctgtttggttttggatccgagatgattccttcgagcgagacagcgaccgtacgagtcctttgccaaaagctgcttctctcaccgaaccaacctggaactctccaatggctcattggttccccatttttcccgcctttcaccgtcgtctccactttccgatgtatccatcactctcctgatttccagcaagaatctggtaaggagaaacccgtttctacacttagattatgtcaattaacagaatcagaatgttcaattgcatgaatcctgttctttatttacgaaagttgaattttttatttatggatcaaattgttttgtaactgttgttatagagtgaggaattaagaaaaaaacaaagtagccatctttaaacttgtcttttaatgattattattaggccattgattgttcacaaagatagctcttttgggatttgtatgcagatgatctccggaagttgttaccaaaaggttttgaagtcattggaggtctgataattggagattctgatgctgagaaaagcgcatttgaggcggttcgagctgctcgtagattgcgaaagcatttatctgaaggtggagagttagatgatgaaaagatagttggggctagttgcgatgtaggcactggtaccattcactttttcatctctaaaagtgaaaacacaacgaaacttgagcctgttggttctgttgtgtatgaggataagtctggtaagtatttatgggagaacggttgtttgcttcactgtgagcttccaatcaagttgccattttattatcctgcaagctcgccctctggtatgattttaaatttctgttatttgtcttcagtttttggttgcatgtgttctttttctcaagtttattggtatcctttttctagattcgaaggagaagttttcagatgcaattgatgcagttattactcagtttaaagaaccatatgttgtatacatagctgagaccttaaagaaagcttctgggaggcgttccaaagccagtcgtcctccgtg

SEQ ID NO: 140428 - DNA, 1289 bp, Arabidopsis thaliana landsberg
tctttacatctttagctttaccaatgaatccaatcctatcttctttgtttgctctctctttgctttcttcactatcaccatcaacacatgcccatcaatgccatttcccagcaatctttaactttggtgactctaactccgataccggcggtctctccgctgcttttggccaagctggtcctcctcacggctcttccttcttcggctcacccgcgggacgatactgcgatggtcgcctcgtcattgacttcataggtacactaactcttccctatccaaaacgtttgcgttttttgtttttgctgattttgcttctgttttgaacatagcggagagtcttggattaccatatctaagcgcgtttctagactccgttggttcaaacttcagccacggagctaacttcgctaccgcgggatctccgataagagctcttaactctactctacgtcaaagtggattcagcccattttcactcgatgtacagttcgtacaattctataacttccacaacagatctcaaactgttcgtagtcgtggaggagtctacaagacgatgttgcctgaatccgacagcttctcaaaagctttatacacttttgacattggtcagaacgatctcacagcaggttacttcgctaataaaaccgtagaacaagttgaaaccgaagttcctgagatcataagtcagttcatgaatgctatcaaggttggtctctctgtttctgactctgattttgtttaaagggaaatcataaaaatgtgttttttcttttggtgatagaatatttatggacaaggagggagatacttctggattcacaacactggacctattggttgtttagcttatgtgattgaacggtttccgaataaagcatcagactttgattcacatggatgtgtttctcctttgaaccacttagctcaacaattcaatcacgctttgaaacaagctgtgatcgagctaagaagttctctatctgaagcagccatcacttatgtagatgtctactctctcaagcatgagttgtttgttcacgctcagggtcacgggtttaagagatcgttggtttcgtgttgtggacatggagggaagtataactacaacaagggtatcggatgtgggatgaagaagattgtggaaggtaaagaggtttacattggtaagccgtgcgatgagcctgataaggctgttgtgtgggtcggtgtacacttcacgcaggctgctatacaaattcattttcgataagattgctccagggttaagcaaggcctgtaaaaggcag

SEQ ID NO: 140429 - DNA, 1246 bp, Arabidopsis thaliana landsberg
ctgatatttcgaaaccacgggttgggctctcatcagttgccacttttgtcacaactggggaacattcattctcttaacatggatgccaacttattaccatcaagtccgttatattactgtcttttaatcaagaggcttgatgttttatttgttttcttatcattaatcatatggacggttgtgaggcaggtgctgaagttcaaccttatggagtcaggacttctctctgtatttccatggatgacaatggcaatatctgcaaatgccggtggatggattgccgatacacttgtcagccgaggtttctctgtcacgaatgtccgcaaggtactttgtatatcacttcttctgttcttcagttccattttgatgcaatctagtaaaagtgatacattcgataatcagtttctatgatgaaattcagataatgcaaacaatagggtttcttggaccagcgttcttcctaacacagctgaaacacatagattctcctacaatggctgttttgtgcatggcttgtagtcaggggactgatgcgttttcacagtctggtctatactctaaccatcaagacatcgctccaagatactctgtaagtttagtcaattactcccaagtcttaatgaatcatgctactcaaaagaaaatggattagcacattgatgttgttggtcttctcagggagtgttacttggtttgtctaatactgctggagtacttgccggagttcttggcacagctgcgactggtcacatactacaacacggtcagtactctcaaaacacttcgtaattctgacaatgctttgcttaatctttataaaatctcttctaagtttcattttttttgtgttttctcaatggaattaacaatgacatgaaatgcctcaggttcttgggatgacgttttcacgatttcggtcggtctttacctcgttgggaccgtcatttggaacctattttcaaccggagagaagataatcgattgatccattccgagaatagtaaatagttcggctccaagacctctcatcaggtgcaacttcacctcacgccagtctctgattatacaagtatcattgcagtctgagagctagtcggaatattccttttttgccagaaaattcttcaggatctttctgctcgttgatttaggccaaacgcatatgaataatactttgtagatgaaagatatacagatgattttttgtaaataaacaaagctcacactttctcaagattactca

SEQ ID NO: 140430 - DNA, 2207 bp, Arabidopsis thaliana landsberg
atggacagagctatcaaggagattgtgtctggtattgttcagcgaagtgtttgtattgcatgccaaacaacaaaggagcttgtgctaaaggttggccaatctaaacctttctgctttttttttttgttcttttcctttattacttttacgtaacttgttttttagtttcgtgcctcaaaattttccttaacccccattcgatttccattgcttttgactccacaactaaatttttttatttccatttatcacaaacatcttcagggttttgatcttatttatttatcgttaattgttgtttcttttttgactccaggattacgccctggaacccgatgagtcacgtatttataatgcagctcacttgatggttgcgagtttagctgggagtttggctcatgtgacttgcaaggtttttccttcttataaggccttggattctgaagattctttagctttttgtttacacatttacaataatgctattatatctcggccctgttaccctaaaccaacaagatctattttttctctggtttttaatgctcttgtatttttaggaacccctgcgcacttcaatatccggtcatctacggaattcgcttcagggtctgaatatttcaaatgatgctcttgaacaaattgtgcaacttgtcaccaatgacaacctggatttgggttgtgctgctattgaacaggctgctacagaaaaggtttgtgtcagatattagatctcggactttatttctgtttcagctgattgaatcaaataaccgaagtaggtttccctggagtgtaggcacttccgtttaccagagggttaatttcttctagttactaatttttatgtccgtgtcactacaggcaatacaaacaattgatgcggacattgctcaacaattgttgttacggagaaagcatagagatggtgctggatcctcctttttcgatccaaacattctatcacagaattccgtcagttttatacccgaatccctccgtccaaaacctggacacctctccctgtctcagcagagagtttatgaggtactgtttttaacaggtagcctctggtatgttctgtgtttgtatgactaaacaagatgtgtgcattttcaggactttgttcaacatccttggcaaaagcagtcgacccaaacttcacacggtttatctgctgcatcaagctcatctggtgatgttgcgcttggtagtggttatggtccagtatcaggaaaagttgcttctgaatttttgtctaatgctggaaacgctcggatggacatggtctcccggccatcagatatttctgtggatggttttgaatcttctccagtctcacttttgaggtgcttagttgtaaagcagatcgataaaactgctctcatttctattcgtatatttcacagctgaatgttgacatatcattttacctgtcttaaagctcacaagtcgatccagctggtgactcatccagtcttcaatttactaagtcactaccaacctctgaattgaatctggctgaatcctctgacgctgctacgaaagtgagatatactgtgttttcaaatgattactcgcttaggtttataatgaattactaagctgtgcttatttatatacaaggaaactggaacatcactgcagacattgacttcagctgctaccatggaacgacttggtgctagtaatattacacagccttcactgtccacgagagatgcactggataaatgtcaaattgttactcagaaggttactaaagtggttatcctgtgttttccttgctgcattttttttttgctgctttatatgtgagaaacttcttgaaactgtttcagatggaggaattagtggctaataatgcaggagatgatgaaatccaggtatttgatttcctagtgcctaggtggttatagtgcagaattgttatccatttacgtgcacctagaataaatgaaattagaagttaattttgaaaaccttctctaacttttggaaatggtttctgtgttttccaattgatgcctattttcttctatccagtatgaattcaataactaatgcagatctcattgatttttcaggccgtaatttctgaagttcctgaaatcatcctcagatgtataagcagagatgaagccgcttttgctgtcgctcaaaaagctttcaaggctctttacgagaatgcatcaagtaaccttcac

SEQ ID NO: 140431 - DNA, 2183 bp, Arabidopsis thaliana landsberg
  unsure (1)..(2183): unsure at all n locations
gatatgacaagggtggttacttgcttttaccttcctatatcatgcgtactcatggatccaaaaagcagcaagatgcactgaaagatattagtcacaagactgctcatagagtatttgaggtacattggtattttcgctcttgtaatatatattttgttgttnnnnnnnnnnnnnnnnnnntattaatattccgaaattgaacttgaataggcattggatacacttgggaataccaagtggagggtgaataggaatatacttgatgtggtagaaaggctctgggctgatggaggcaacattgcaggcttagttaatcgtgaagatgtaagtcactagaaatgttatgagatttctgaacttttacctttcattgtttcatttcaagagttaattaatctgcatagttataggttttaatggtatgtgtctgacgtatttttgttctctttcctattttttttttgtttaggttcccatacccgaaaaaccatcctctgaggatcctgaagaactccagtcctggaaatggagtgctcgaaaggccaacaagattaacagagagaggcattctctaagatgtgatgttgagctcaaactttctgtaagaaatacattcttactgcttaagacttttcgttccgtcttcacttaactaggaaaagatatagactaaaggttatcattgcaggtggctagaaaaatgaaggacgaagaaggattctactaccctcacaatcttgactttagaggccgcgcatacccaatgcatcctcatctgaatcatctgagttctgatctttgccgtggaaccctggagtttgctgaaggacgaccacttggaaagtcaggcttgcattggctgaaaatacatttagcaaacctctatgcaggtggtgttgaaaagctctcacatgatgcccgtctggctttcgtggaaaaccatttggatgatataatggattcagctgaaaatcctatacatggaaaacgatggtggttaaaggctgaagatccgtttcagtgtttagctgcatgtgttattctgacacaagccttgaaaagcccttcaccttattcagtaatttcccacttgcctattcatcaggtaagcaccgtaaacttatatccaaagttatcctactcttttttgttacttgacacttgctttctgtagaagattctaggttggggaattcagtagactgtttgcttttcccttttgttaagtttttaattggtttcaccagatatggtctttccattgggatctgaatcaactgtgctatactcttttcaaagaatctttgaattcttaaacaacactttttccttgaatcatttctatgtgcaggatgggtcgtgcaatggtctacagcattatgcagctttaggaagagatagtgtaggctctcttgtgaacatttataatatgcttttttctcttagtaattttcaatctcatatagttctcttcttgtaaactggcttctctcagtttgaagctgcggcagttaatctagttgcaggagaaaaaccagctgatgtctactctgaaatttcacggaggtatcatatcaattttgaatggagtagctgtcaatttcatttattcgagttggaatcatgtcaagtgtagcttcttatggtttttctctctgtctctctttctcactcctctcttctttgcttgtgctgagatagagttcatgaaataatgaagaaggacagcagtaaggatcctgagtcaaacccaaccgccgcactggcaaagatccttatcactcaagtgagtatcaacggtttttgattgaacattatgccacagcaaaagttcttcccagtgatgcaatgttttcttctaatttcaggtcgacaggaagctggtaaagcagacggtaatgacgtcagtatatggtgtcacctatgtaggggctcgtgaacaaataaaaagaagattagaagagaaaggtgttatcactgacgagagaatgttatttgctgctgcttgctattctgcaaaagtaagaagaatagtggcattcacgcggataaatgttattttgtttttagttatgtactaatgttatacttgaaacatttctcctcaggtgacgctagctgcccttggagagatatttgaagcggcacgtgccattatgagttggcttggtgattgtgcaaag

SEQ ID NO: 140432 - DNA, 968 bp, Arabidopsis thaliana landsberg
aggtactggattttctgatgccatgcttgacgagcggtcgtccagtcttcgctctcaagtgattgctactccaaaagtaggatattttcttcttccttatcatatatgtctctagcatgaattcttatttaattgtaatgattcaaatatccagcaatactaccgagttggagacagcctcaatccagatgtttggtttgagcccactgaggtgggattatgtttgcttgtactcaaaatgttatcttatatttattagtttcgccattctatcgtatgggttgaaatgaaaggtaaaaaatatgtttgcttaaaggtctgggaagtgaaagcagctgacttaacaattagccctgtgcaccgtgcagctactggcatagtggatcctgataaggtttaactttctccgacttattttcttctttttcctttttggtttgaatatctctgctgatatattgttacgtattggttttcaattttgtttcgttaaaaggggatttctcttcgttttcctcgtctacttcgtgtacgggaagacaagaagcccgaggaagcaacatcatctgagcaggtgaagtttcattctaattacactcatatgttttcaatactggaaagacaagaccagactggttttgaaactcttttcctttttctaattctcaattttccctgcacattttcagattgctgatttgtaccaagctcagaaacacaatcatccaagtaatgaagtcaaaggtgacgatgattgaacaacagtaatctggcctcagagcacatttcctcgtatgtacgacattgctcgtaacttgctaatgatgcacattgcgtgtttgagttttcaactgtaactgcttatgtaaaactgcttttaggaaaagtgaatgaaaggttctggaaaaaaattggtacactcatcaactgactctggaatgaataaaaacactgccctgattgacatc

SEQ ID NO: 140433 - DNA, 7878 bp, Arabidopsis thaliana landsberg
atgcaaaggtatcatgctgccaactgcactagtgcagtcaacaatagtgctataggtggtgcatccgcgagggactcaggacgagctgattcctcttcgattggaaactattcactaaactccaggcatgtcgatagaaagaagtacttacatagttattttatatgttaatacatttgaagacgtttgaatactttctttactgcaggagaccaccaccgttgacaccctacaagttgaagtgtgaaaaggacggtctgaattcccggtaattcctctttcaccttatccctagtttaggtattcgataaacacaatatagatgattttaaattttgctgttttagatttgtagcttgggatttcattcttttatctccgataggctaagtccttggagtacttgttaatggatgaagttggcactcttttccatttttgatttacttccctagatgatttatactttttctctattgcagattagggccgcctgattttcatcctccaacatcaaattctcccgaagagaatctgaccaaagagtatgttcaatttggatacaaggaaactgttgatggacttaaggtgcgatcaactgaatttagcagctatgcttttaaattttttgtagtatcgtagttaattatcattgacatgtttgcaattaaaataaatatcttagatcttattttggaccatgcctatagtattttcctatagatgctcagcagtaaaataagaatagtttcttactgaggctgaatgttcattgtagcttgataggttgtaatgatgatttcttcaatgtagtcatataagatgcttacaactcagaaagtctacattattataagtttcatcttttccgatgttagagtttttaattccttattccactagttttcgcgcattatcttgtaattgaggttctgaacctttggcctttacaggaatccgaagaaattatattgtcccaggtccatactttctcaaagcctgttgtccataagtgcaaagaggtacggtactagaaattatagacaatgttgtctcccttatttgtgatctctattggagttcatttgtgtttcacatgaagttaaattcaatttctatcccgcaggcagtcagaaagtgtcttagagctatcaatgaatctcgtgcactgaagcgcaaggtaatcaagagactctcagactccaatccttttcaatttatcttttgtgcagagttcagggtttcggtcccaatcatattgcttataattgataatctccctattcaattaactggcaggctggtcaggtttatggggtgcctctctctggttcgcttctatgtaagcctggatttccagaacaaaggtcatgtggggaggagacaaagaaaagatggatcgaggtacctggcctattattatgcttatctaaacttcttaacaattctcctctgatccatgtttgttgctgactcgtggcataactgccatatattcttaaagaagaatacttaactcattcttgctctcattttttcacagagtttatcacaacagcacaaacgattgcgctctatggctgataacttttttggatataggagaaaaaccttatttgaagtccttataaggaacaatgtcccactattgagagctacttggtttataaaagtgacttatctcaatcaggtacattgttgggcaataaattggtatctctaattgatttctctaggtgttggaggatatcaagttttgcttataatttgcaggtgcgacctagtcctgctgctatttcttcaggaacacctgaaaagacacaagcttctcggtgtgagcaatggacaaaagatgttattgaatatttgcaatacctcttggatgaacttttgtcacggaatagctcatttcctgctcagcaaactagagataggtcaccacagatgctttatacaggatcaatgcaaaagaatagtccagcatcaacaagcctttacggcgaggaaacatctctacattttaaatggtggtatatggtgcgtcttctacagtggcaccatgctgaagggcttctttttcctaatctcattgttgattgggttctcaagctcttacaggtatgctgttagattaattgacttattcaagatgaattttcatttcttcagctttgtgaatttccattttgctttactgcaggaaaaggaggtctttgaaattttgcagctgctactccccattgtgtatggtgttttagagagtattgttctctctcagacatatgtacagagtcttgtagctattgctgtccgtttcattcaggaacctgctcctggtggatctgatcttgttgataactctcgaagagcttatactctatctgctctaattgagatggttcgctacttggtacttgctgcacccgacacatttgttgcttcagatttctttcctcttcctccttccgtagcagcatgtggacctaatgatgtgagctatacgtcatttgtttatgagaatctggaaaagctgagaagtaactctgcggagatttctgcccagtttcaaggaagaggagttctttcccggtttgagttcctttcttttgattataccatttcaaccattcaaagaagtgcagatgatttggcaaagatagctagcgctggttaccctcaacataacgtggctaaagctgttcaggccttggataaagctttgtcggatggagatatcagagctgcttacagttatctctttgaagacctttgcaatggagccgttgatgaggcctggattactgacgtcagtccatgtttaagatcatcccttagatggattggcgctattagcacatcctttgtttgctccgtttttttccttatagaatgggctacatgtgattttagagatttccgtgctggtgtgcctaaagatatcaagttctctggcagaaaagattgttctcaggtgtatttagtcattcagcttctgaagcaaaagattctgggtggagaattcacagctcgcaaaggaaagaattgtcgcaacaattttcttggtgtttctaaacctagcggttcgatggatgcatttgaaagcccgggcccattacatgatatcatagtctgttggattgatcagcatgaggtacacaagggaggagcaaagcgcttgcaattactcgtttttgaacttatacgttctggaatctttaatcccatagcatatgtgaggcaactcatagttagcgggatgatcgatgtgattcaacctgctgttgatcctgaaaggagaatgaggcaccatcgcatattgaaacagctacctgggtgttttgtacatgaaaccttagaggaagctcaactctttggaggggataagctttccgaggctgtgagaacttattctaatgaacggcgccttcttcttcgagaactgcttgttgagaaaggtaaatactggaataatttagttctctcagatcagaagtcaaagaaaatttccacttccctttcgtctgttatttttccaagggcgtgtaatgccaagagcaatagtaagggacctcgcaaacataccaagagtagtgtggatattagagaactaaaggagcgcatatcagctctactgcagtttccaggtatgtcatgtggtgtggaaaccccagtgcgagatgaattccaaaatagtgttaagagatcaagtggatctgtgtatagcaagatggatcaaccagaagctacaccagggtgtgaagactgtagaagagcaaaaagaccaaaaatgaatgatgaaaagagctcttgctatcaagggaattcaccaattgcatcagatgaagaagataactggtggatcaagaaaggatcgaaaactgtggagtcttctctgaaggttgatcctcagatagagataactaaacaagtaccacgaggtaggcagaagatggcgcgtaagacacagtcgctggctcaactacaagctgctagaattgaaggtagccagggcgcttcaacgagtcatgtttgtgataataacgtaagctgtcctcatcatggccctggagtggaaggagaaaatcagaaggtggttgatgtgtttagaacttccacccctgtggatatggtatctgttggaaactctttgaagcagctacagtttgttgataagcgatctattgcagtttggcttactactgcagttcggcaacttgttgaagagccccaaaagagcagtgtgagagttgggcagttcaatagaggtgctccagttgaggagaagagcacaattaggtggaagcttggggcagacgagctatactccatattatttctcttggatatctctcttgacttggtttcagcggttaaatttcttctttggttattgccaaaggccaacagtaccccaagttttgccgtacagggtggaagaaaccttgtaactgtaccaaggaatgttgaaaacaacatgtgtgaaataggcgaggcgattctagtatcatcactgagaaggtggtttttacttccttcaataagtaaacactattcatatatattttttattgtatttctagaaatttaatcggtttgtatcattaatttctttcaggtatgaaaacattctactttcagctgatcttgttcctgaggccatgacagctttgatgaaccgtgctgcatcacttatgtctagtaatggaaaaatttctggatcagcagccttagtttatactcgctatattttgaaaagatatggaagtctccccagtgttgtggaatggcataacaatttcaaagcaacatccgaaaagaagctactttctgaactagatcatacgcgatcaggaaatggtgagtatgggaaccccctcggggttccagcaggagtagataatccagatgactatttacgtaaaaaaatcagcattggcggtgcacgtccttcaagagtgggtttgagtatgcgagatgttttgcaacgacatgttgaagaggcgactcattatctcaaaaaactcattgggactggtactatgaaagcctctctcgctgagaaaaatgatgacgggtatcaggtggctcaacaaattgtagttggactaatggactgcattagacagactggcggtgcagctcaagagggtgatccctctttggtttcttctgcggtttctgcgattataaacagtgtaggcctttcagtggcaaggattacagatttctctttgggaaacatttatcagaatcatccttctggcgttgattcatctaatattgcacgatacattttacgaatccatataacctgtctgtgccttcttaaggaagctcttggagagcgtcaaagccgagtgtttgaaatagcacttgcaacagaaagttccactgcgcttactggagtttttgctcctgtgaagggatcacgaggtcagcatcagctatctcctgaatcctatgattcaaatgcaaacaattcaacaatcgatatgtcgaatggtactggaaaaatggcgctgagcagagcgacaaaaattactgcagctgtatctgcacttgttataggttctatcacacatggtgttataacccttgagaggattgttggtctactgagactaaaggattacttagatttcgttcagtttgtaaggcgtacaaaatcgagttctaatggcagtgctagatccatgggagcctctaaagtggaaagccctattgaagtgtatgtacattggttcagactccttgttggtaactgtaaaactgtttcggaagggctggttttggagcttgtgggagaatcttccgtggtggctatatcacgcatgcagcgtatgcttccgctgaaattggtcttcccaccagcctattcaattattgcgtttgttctgtggaggccttttgtttcaaatagtaactctaactccagcgtccatgaagacactcaccgcctttatcagtctttgacaatggccttccatgatgttattaagcatcttcctttccgagacgtgtgcttcagagacacccagggactttatgaactgatagttgctgattccacagatgctgaatttgcgtcggtgtttgaatcgcatggattggatatgcacttgaaatctgtggcctttgctcctcttcgagcgcgtcttttcttaaattccctaattgattgtaaggtgccatcctctggttattcccatgaaggagttagtgaagcaaaaaaccgacatcagggaaatggaacaaagcttgtggacaagcttgtatctgtattagattgcctgcagcctgcaaaatttcactggcagtgggttgaactcaggctgcttctaaacgagcaagcacttgctgagaaactcgaaaatcatgatatgcctttgacagatgcaatacgatcttcctgtcctacctctgagaagcctgatgcctctgagaatgagaaaaatttcattcaaatcctcctcacaaggttattggttagacctgatgcggtccctcttttctcagaagtggttcatctcttcggtagatcggttgaggattcaatgttgaagcaagctgaatggtttctagcaggccaagatgttctttttggacgaaaaacaatcagacaaaaactgattattgtaggtgaaagcaaaggactccccacgaaacctcagttttggaaaccttggggttggtgcaacagctctagttccgatcatattacagcaaacaaggcagggaagaaaaggaagtttgaaattacttctatcgaagaaggggaagtgattgaggaaggttcaggttcaagaaaggtattattaccccgggtattggatgagaatagtcccagtgttggctatgggattacaactgagagggcttttgttcagctagtgcttccatgcatagaccaaagctctgatgagtctcgaagtacctttgtgaatgagttggtaagacagtttagcaatattgagcagcaattaagttcagttaccaaccgcagtacaacaagcaacaagcaaatgggaactgcttcttctgggtctgagatttcatcaaataaaggaagtacccggaagggccttcgcggtggtagccctagtttggcaagaagatcctcagccaatactactgacacttcgccgccgccttcccctgctgctttgagagcttctatgtctttgcggttgcaatttcttctaagattactgcctgtcatctgcgggtactgattctcttccatcttctttttccccattccgtttaacaggatttgttgaaaagtcaaatgaaatggctcttccatgcagtattatcgaatgaaactattaaagcctgagttatctttttgtatggcaatttatttttcagggaaccttcatttaagaacaccagacatgcacttgcgtctacaatagttcgtctacttggaagcagagtagtttatgaagattatgctgtatgttctcctcgtagtgagctatcaaaggcagaaacagaatcaacaatagatccttcttccatggcagatctctctagtgaagtcttatttgaccggttactgtttgtactccatgggctgttaagcaatcaccagccaaaatggctaaagccaaggccttcctctaatgaatcatccaaagactttaccttgtttgatcgcgatgcagcagagagcttacaggtttgtcaacaaagtttaaaaaatccttaaaagtctgtcttcttggctgcaaagtacgattcttgaagtttttttgttttttttggttgtcaattaatgcagaatgagctttcgcggatgcagttaccagaccccattagatggcggatccaaacagaaatgccaatcctccttccttctctacgctgttctct

SEQ ID NO: 140434 - DNA, 996 bp, Arabidopsis thaliana landsberg
gctctttcgattaaaaaaaaaaaagaacacttcaagagattacttatggcggaagaggcgatactagggttccttcagaacaatgaacagatcactgattcgggtcaattctctgccgagttcaacatcgaccacaacgaactcgtcaatgtcatcaaaagtctccatggttttcgttacatcgatgttcaggtactcgtgctggaatttcgataaaagggtttggattattggtctagggtgttagagtaagacgttttgatatctggttgaaagttttgtactttttccatgaatgccactgatgaatctcacagtttgccataagtctctatcattaacaaggtttagtggactagatttgcattgtcagtcacatgggttgactattctctgcaggacattaaaaaggagacatggattctgactgatgaagggaagaaatatgcggcagaagggtcaccagaggttcaacttttcttagctgttcctgaagaaggcagcatatcaaaagatgagctccaggttattgattgcaatggatatgtagatgtatatagtgtgggatttgtttagtcatatgctaaaacaactactgtaaaattcgtgctatttcagaaaaagttagctcctgcagtcttcaagatcggctgttcacaagctggaaaaaacaagtgggtggaaatgggaaagcaagtctcgaggaaggtaacgctagattgtttttactttctgtttgctacctccgtttttggatgatgtttggtagtgtatgaatcatttcaattgtttagtctgcatcaatctgaaccatttttttgtaggttaaagatgtagaagataaagtgaaaggccagcttttacaaatacaacaagggaaggtttgtgctatgttatttcagtagagagttcctctgttgtatttaccttaatgattcatattaatttggagcatcactctctcttccccttcaggaatttgacaaagaaagtatc

SEQ ID NO: 140435 - DNA, 2023 bp, Arabidopsis thaliana landsberg
atggcgggtttggtctgcgcattgaacctggaagctcgtggcgtccagtccacagttttcgatacggttcgtcaatttagataatttcgaatctgaattaaagtttcttagaatgggttctgtgaaatttgtggtctttgggtgtttttgcctttgtatattcacagttcacttcaaagtcaagttttttgggctcaaatgtggctaattgaatcgtattagtccattttcatggacagagcaatcaagtaatactcttttgtgttgcgttcatgtcctttggaaactttcttttattcttttctagtctgaattagaatttggtagaacgggtgctgtaaaatttgtgattttttggggtgtttttgctgttgtaatttcacttcaaactccaagctttagtaagaatatcttgtgtcacttctgcaggggatacatgggttaggaggaagacttggaacaagaattattgaaccacagggactaattttcgatcacgctgctcaattcttcaccgcggatgattctcggtttatcaaattggtcgatgggtggttagagaaaggacttgttcgagagtggaaaggtgccgtgggagagcttgaaattggaggtagcttctcacagtttccctcatcatcacctccaagatacattgctgctaatggcatgcgatctctcgctgattctttgctattagaggtgtgatatgttatctctgtgcagcgaaaagtttgagtcttttttgaaatttttatgagttgaagtaagtatactggaatttgttgcagagtcaaatggtgaatctggtaaggccttgttggatcagtaagttggaaccacttaatggtatgtggcatttaagtgagaatggaacacctcgtggtcagtttgatgtcatagttattgctcataatggtaagaaagtgtatatatcggtttctctattaatctctttagatgctttgttatgtcttctttatagaaatggtttgcgttttgttcaggtaaatgcgccaatcgcttgctttcagcatcaggcttgcccctagtggctaaacagatgaaggtagagaatatctagtgaaacagatatttttttaagccctatgatatcttctgatacaatcctcttgatttgttctagaaactggatttgagttcaatatgggcgctattagcagcttttgatgatcctcttcccacagtgaactttgagggagcgtttgtgaaaggagttgaatcactgtcttggatgggaaataactctgcaaagcttggaaatggcagaactccaccacattgttggacttttttcagtactgcggcatatgggaaacagaacaaagttcctcaggttagtttcttcaaagctatacaaataatgtaatgcagaaatgaaatggttttccacccttttttgctcataggaaaacatcccaacggtcacggcagagaaagttaaagccgggatgcttcaaggtgtggaaatcgcattggggttgcctgaaggctcacttcctaaaccggtttatacacgtctccagctatggtaagtaatagttgtatcaacggtgctaaaatgtttgaagatttgtggagtgattcaatactttccacacaggggagcagctttgccgaagaacactcctgcagttccatgtatatttgatccacaaggccgtgctggtatatgcggtgattggcttctcggttctaacttagaatctgcagctataagcggtgcagccttaggaaaccatgtaagaagcttcctgtgactctccttaacaaaaatttgcggatttcagaataaaagatgacaagtgttttggtattttgctcctctttttttcctctgtagattgcggaattcttacagagcggtgaagctaatccagaagaatttgcaatcggtttacatgataggttaagtcctcttgctggccatgatattggtcagtttcctggtttaacatcagtgggagaaaaggaagaagctaatgcatatcagctgctgtga

SEQ ID NO: 140436 - DNA, 4145 bp, Arabidopsis thaliana landsberg
atggggttttcggattccggtgtaagtgagttgggaggcagtgtcggaggtaagggagttcaagattctgggaactgaagatttggggttttgcttttgaatgtttgtgtttttgtatgatgcctctgtttgtgaactttgatgtattttatctttgtgtgaaaaagagattgggttaataaaatatttgcttttttggataagaaactcttttagcggcccattaataaaggttacaaatgcaaaatcatgttagcgtcagatatttaattattcgaagatgattgtgatagatttaaaattatcctagtcaaaaagaaagagtaggttgagcagaaacagtgacatctgttgtttgtaccatacaaattagtttagattattggttaacatgttaaatggctatgcatgtgacatttagaccttatcggaattaatttgtagaattattaattaagatgttgattagttcaaacaaaaattttatattaaaaaatgtaaacgaatattttgtatgttcagtgaaagtaaaacaaattaaattaacaagaaacttatagaagaaaatttttactatttagagaaagaaaaaaatctatcatttaatctgagtcctaaaaactgttatacttaacagttaacgcatgatttgatggaggagccatagatgcaattcaatcaaactgaaatttctgcaagaatctcaaacacggagatctcaaagtttgaaagaaaatttatttcttcgactcaaaacaaacttacgaaatttaggtagaacttatatacattatatgtgtaattttttgtaacaaaatgtttttattattattatagaattttactggttaaattaaaaatgaatagaaaaggtgaattaagaggagagaggaggtaaacattttcttctattttttcatattttcaggataaattattgtagaagtttaaaagatttccatttgactagtgtaaatgaggaatattctctagtaagatcattatttcatctacttcttttatcttctaccagtagaggaataaacaatatttagctcctttgtaaatacaaattaattttcgttcttgacatcattcaattttaattttacgtataaaataaaagatcatacctattagaacgattaaggagaaatacaattcgaatgagaaggatgtgccgtttgttataataaacagccacacgacgtaaacgtaaaatgaccacatgatgggccaatagacatggaccgactactaataatagtaagttacattttaggatggaataaatatcataccgacatcagtttgaaagaaaagggaaaaaaagaaaaaataaataaaagatatactaccgacatgagttccaaaaagcaaaaaaaaagatcaagccgacacagacacgcgtagaagagcaaaatgactttgacgtcacaccacgaaaacagacgcttcatacgtgtccctttatctctctcagtctctctataaacttagtgagaccctcctctgttttactcacaaatatgcaaactagaaaacaatcatcaggaataaagggttcgattacttctattggaaagaaaaaaatctttggaaaatggatcaaacagaggaaccaccactcaacacacaccagcagcacccaggtagattctaatttcagaaacttattttttttttaagtgacaatcctctgaatttacttaaacttattgtgatttatggatacagaagaagttgaacatcatgagaatggtgcgactaagatgtttaggaaagtaaaggctagagctaagaagttcaagaacagtctcactaaacatggacaaagcaatgagcatgagcaagatcatgatttggttgaagaagatgatgatgatgacgagctagaacctgaagtgatcgatgcaccaggttactttcttttgtagtttcattcaacttatgatctaaaaactattggttattcaattttgcgtgacattaacggtttggtatctgtatatgcaggcgtaacaggtaaacctagagaaactaatgttccagcatcggaggaaattattccaccagggacaaaggtgtttcctgtcgtgtcttccgattacaccaaacccactgaatctgtaccattacaagaggcctcttacggacacgatgcaccggctcattctgtaaggacgacgtttacatcggacaaggaagagaaaagggatgtaccgattcatcatcctctgtccgaattgtcagacagagaagagagtagagagactcatcatgagtcattgaacactccggtctctctgctttctggaacagaggatgtaacgagtacgtttgctccaagtggtgatgatgaatatcttgatggtcaacggaaggtcaacgtcgagaccccgataacgttggaggaagagtcggctgtttcagactatcttagtggtgtatctaattatcagtccaaagttactgatcccaccaaagaaggtaagaactttgaccttttaagattgtgtttttctttagtgattatgaatatgtaataactctgttacgttgtgtttggtttagaaactggaggagtaccggagattgctgagtcttttggtaatatggaagtgactgatgagtctcctgatcagaagccaggacaatttgaaagagacttgtcgacgagaagcaaagaattcaaagagtttgatcaggactttgactctgttctcggtaaggattcgccggcgaaatttccaggtgaatcaggagttgttttcccggtgggctttggtgacgagtcaggagctgagctggaaaaagattttccgacgagaagtcatgattttgatatgaagactgaaactggaatggacacgaattctccatcaagaagccatgaatttgatctgaagactgaatctggaaacgacaagaattctccgatgggctttggtagtgaatcaggagctgagctggaaaaagaatttgatcagaagaacgattctggaagaaacgagtattcgccggaatctgacggcggtttaggagctccgttgggaggaaattttccggtgagaagtcatgagttggatctgaagaacgaatctgatatcgacaaggatgtgccgacgggatttgacggagaaccagattttctggcgaagggaagacctggatacggtgaggcatcagaagaggataaatttccggcgagaagtgatgatgtggaagtagagactgagctgggaagagacccaaagacggagactcttgatcaattctcaccggaactttctcatcctaaagaaagagatgagtttaaggagtccagagatgattttgaggagacgagagatgagaaaacagaggagccaaaacagagcacttacacagagaagtttgcttcaatgctaggttactccggagaaattccggtgggagatcaaactcaagtggcgggaactgttgatgagaagttgactccggtcaatgagaaggatcaagaaacagagtctgccgtgacgacgaagttacctatctccggaggtggaagtggagtagaggagcaacgaggggaagataaaagtgtgtcgggtagagattatgtggcggagaaactgacaactgaagaagaagacaaagccttttctgatatggttgccgagaaacttcagattggaggagaagaagagaagaaggaaacgacgacaaaggaagtggagaagatctctaccgagaaggcagcatcggaggagggtgaggcggtggaagaggaagtgaaaggaggaggaggaatggttgggaggattaaaggatggttcggtggtggtgcgactgatgaggtgaagccagaatcgccacattctgttgaagaggctccaaaatcatctggctggtttggtggtggtgcgacggaggaggtgaagccaaaatcgcctcattccgttgaagagtctccacaatcacttggctccactgttgttccggtgcagaaggagctttaagaatatgagaactgaaattttcaagtttcactttggatgtttatgtgtgttttgtttgacgtctttgatgtattatggtataattccttgtttgtgtgaaaaaaggacatttggttaataaattgttcggctttggattaagaa

SEQ ID NO: 140437 - DNA, 3444 bp, Arabidopsis thaliana landsberg
tcagttgtggcttcaccggataataaggaattcagtaagagataagttcatcctgacaacatggagaccaagaatgagaattctgatgtttcacgggcagaggagtttaaaagtcaggccaacgaagcttttaaaggtgtgtaatttatcataaacctttacataatcttgtggcatcagtttatttcaactcttttagtgaggtactcctatctttttgcttaatgttgtttgttgcttacaggtcacaaatactccagtgctattgatctatatacaaaagctattgaactcaacagcaacaacgctgtgtattgggcaaatcgtgcatttgctcacacaaaactggaggaatatggcagtgcaatacaggatgcatcgaaggccattgaagttgattcaagatactctaaggtatcatcctgtgacaagatgttcctgtttcttcgtgtattcagccatattcactgattatctactgaatcacagggctattacaggcgtggtgctgcgtatcttgccatgggaaaatttaaggatgccttgaaggacttccaacaggttagtgtttcttgcacgagcattgtgccatttaagttgttgtctctttcgtttatatttgttagctgctgatctgatagtcctctttctagtttactctaaactttttgagtgaggatcagctcagttgagaaatgtcaaaatactatagatgaaatgttgtaggcttgtatagcttgaacccacccaaatggtcataacttgattgttttggtctgatcaagtgattagatcctggaaacttgatagagtgatagttatctgtcaaaatctggtttggtggtcgactgtcttgatcttttaagcaagactagcgtgtatggtattgctgacttggtcttctatatatattttaggtaaaaaggctttctcctaatgaccctgatgccacaagaaagctaaaggaatgtgagaaagcagtgatgaaactcaaatttgaagaagcaatctctgtgccagtatctgaaaggccgttcagtagctgagtccattgacttccatacaataggtatccttcatctgtttgcttattttttggttgtcttatagcttgcagtttgttgtgtcacctggttctttcgtctcttgttatgccatgcctttgattcagtagttgaaaaatggttgaatgtagctttagactagtaatcattcttctacctattgtcacataatagggaacaaacccagatcatcatccatgcccaccaaaacggctttagcagcagttgttgcagcagtaatggtggtggcggtccggggatttgccacaactgagatactcatggtgttggtttcggtggtattagggacattttggtggggtagcttcagtggtagtagtgtcttttctctggttaaaccctcatcctaggatcaatgtggattgttttcatgcatatcaaaacctggatagtttcctttcttggagtctcagttgagaattgacaaagctcaatgatattgatgtcaaaaacatctcaacaggagtggaacatttcatagatttactaatatctctatttttgttttgttatgatagcatacctcttttactacattgtaaaaaatgtgtatccatgacttgtagcttttaatattcattgataaatggtgttcactgttacagagttcttaaccttttgtcaatttacttattcttttcaattttattgtagaggttgagccacaatattctggtgctagaattgagggagaggaagttaccttagattttgtgaaaacgatgatggaggattttaagaaccaaaaaacattgcataaacggtatgtattgttttgggggtactcaacttaatttacacagttaccatatgttcatgctttgcgggcactttatttgtaggtatgcctatcaaatcgtcttacagactaggcaaatcttgctagcactgccttctcttgttgatataagtgttccacatggcaaacatatcactgtttgcggtgacgttcatggtcaggtatgctttggtttcacctactctccgaacataatattttaatgtctcaaatgaatctgcgaggatccaccatctcctgttctcttgtttatatatgtagaagttttcaataaaccggttcccatactatatttctggaattggattttattatgaatcattctacttttcatatcttgaatttattggctaaccttctactccctcttgcactattaagggctgtattgtgttgtattgggtgtatgtttgacacattgtttgcttttgcagttctacgatcttctcaatatctttgagcttaatggcctcccttcggaggagaacccatacctatttaatggcgactttgtggacagaggctcattctccgttgagatcatcctcactttgtttgctttcaagtgcatgtgcccatcatgtaagttctctaaaactttgttgtaataattctttgatgttcatgttttaattgcttttgctatcactggcaaggattaaattatttactattgtctgatggggttaaaagtttccattttaattgtaaatcgccatttacacacctttgtactgcagccatatatctagccagaggaaaccatgaaagcaagagcatgaacaaaatttatggttttaagggtaaggttcggtccaagttgagtgaaaaattcgggatcctctttgctgaagttttctgttacctcccgttggctcatgttataaatgggaaggtcttcgtggtacatggaggtcttttcagtgttgacggcgtgaaactctcagacatcagagccattgacagattctgtgagccaccagaggaaggtatgtttcatcatatacatcttctgtaagattacttctcatgtaattgtgttctgtttaatcatcttatcttgctaatggtttatgcaggactaatgtgtgaactattgtggagtgatcctcaacctctccctggaagaggcccaagcaagcgaggagttggtctatcatttggtggagatgtgacaaagaggtttttgcaagataacaatttaggttagttcactgtcttgttattatcggggtttggtttcgcaaactaatatttacttgagatagctattaacttgcattttcatgattgtggcagatttgttggtccggtcacatgaagtaaaagatgaaggttatgaggttgaacatgacggtaaactcataactgtcttctctgcgccaaattactgtgatcaggtaactcagacactcctgtcttcttatttcaaaacagcacccagttacttgattctttacttaacatggactggtattgttgtagatgggtaataagggagccttcattcgttttgaagctcctgatatgaagccaaacattgttacattctcagcagtg

SEQ ID NO: 140438 - DNA, 848 bp, Arabidopsis thaliana landsberg
  unsure (1)..(848): unsure at all n locations
gaatccttctaatcgcgaaaaaacaagagaatcgagtaatgcaacaacaaggtgaaccatcggttttgagtttgagacccggcggtggcggcggcaaaagcaggcttttcgtccctcgctttagctcctcttcctcatttgatcttaccaatggcggctccgaagaaaccccttttcccgtcaaggtaaatacattgaaaaatcctctgtttctcttcaatttggtttcgcaattcgagtttaaacgaggattggattcgtttccgtgcttttgaatcgaattttgtacaaagtttgaatttttagggttgttgaatttgaatatggacaaagattgatactttatgttatgtaattgaatcctaagctcttgacattttatgtttttgtagagagaaaattctggtgaacgtgtgaggttttcccgagaagagatacttcagcacagagaggtatttaacttaattttctgattctgtttttgactttgtgaaccaaatgattcacctttgtgttttcttgatcgcagtctgttcaagtctctgatgaaattcttagacgctgtaaggaaatcgcagttgagctttttggcgaagagcagagttgggggaatcatgcagccgagagtaaagtaagtgtgtgtctgtgtgtgtgtgtaatcctcctgttttggaatctgtcttttaaactttcattcttggttttggtcttatcagataacaaatcatactcagnnnnnnnnnnnnnnnnnnnnnnnnnnnnnnnnnnnnnnncgttctcagattccaacctctggtaaagagtggttaagggacgaccctcgtgaagccaaaagtacatggcaaggg

SEQ ID NO: 140439 - DNA, 605 bp, Arabidopsis thaliana landsberg
gaagcaaggattgatctcggaaagaacataatcgacaaagaactagtcgagaaggtgtggaacagaatagctcctggcctagcttcgaagtttgattcaccgtactcattaccagtgattgctccacggcctctttacatccttaacggtgagcacaatcaatatatatgtatgatctcactaactaccaacaaacttacaagttttctcggatttcatatgcaggcgcaaatgatcctcgatgtcctcttggcggactagaacttgcgttaaagagagctgaaaaggcgtataaggaaacagcttctcctggaaacttcaaggtaaatcactgatctaacctttaaacactattgcaaccagatagagaattgaaaaagaaaaacttttgatgtttcgagagagcagttcaaagcagaagatggagttggacacgaagcgacgagtttcatgatcaaagaatcatcagactggtttgacaaattccttaaacaagaagatatgacaacttgacagattgtaatattgtgaactaataaagaagaatcatcttcttctcgttaataatgtattcactctcgcaaatcaatatcattacaaatttc

SEQ ID NO: 140440 - DNA, 693 bp, Arabidopsis thaliana landsberg
atctcgtttgcatttcacttgaaagagagttttctggagaggtgttgtttaggaacttctatggttcataagcggttcaaccaatgcaaaggtaagaaaacagatcatttatcatcattttcatgccttaagcaccgtgattgatcaagatgtggagcatatgtagatgaactagattttttttttctttctgagaagtttgtgtaagtggcaggtacttcaagaaaagggtatccgtatatgggatgggaatgcgtcgagagcatatcttgatgggtaaactttaattcagcatttttctttcacaacttgaagctttgtggccattacactgataaattgaaagtttttaattttcagtattggactgactgagagagaggaaggtgaccttggacccgtttatggatttcagtggagacactttggtgctaagtcagtagcttctctcttatctcttgacactttctgagttttggcaaaacagatttctgtgtcgagacattttgttcatctctctctacaggtacacagatatgcatgctgattatactggccaaggatttgatcagctcttagatgtaattaacaagatcaagaacaatcctgatgatcgacggattataatgtcagcttggaatccttctgatcttaagctgatggcacttcatccatgccacatgctcgctcaga

SEQ ID NO: 140441 - DNA, 1728 bp, Arabidopsis thaliana landsberg
cactcacacatcattatcgaccgacgtatcatcgccgttatcaacgacggtaaacacagcgcaacgccgttaactcatccgtctcgttccgataaacaaaacagttactataataaacttgacgacgtcaggtattataacgcttgtcggttttgtaaattgacgtaaatacccctacggccaaagtggcgcgtcaatcacagattgattaaaaacaatactccgtcatcttaatctctcatcatcactgactgtgattgaatttttttttttttttacaatctgagatctgaaagatatttctaaattctcattaaattcccccataaattttcaatctttgctgattttcccccaaatttctggagatagataaccttcgtttttcaggagtttctttctatatttcttcatcgatttcgttcagagtctttaaagagattcgtcgacgtattatcgtcggaaaaaagctatgagaatctatttctcatagctccagtaatgtgaaatcgagacaacgctttatcttcagaatttgctaatccatgggagattcaatcacattccggtagatttttttccagtttctggggaagtcaaaaatttctagggtttccgatttttgttttccttttccaaatgttctcgaatcagtttgttctcttcttctctcttctcctatgtctcccatttgttttcttctttgtagcgccacatgtgtttccttctcctcctggtgaatctttaatcccaatctccgatgagattgatgaccggagtttattcatcgccgctgctggatcaacctctctttctcatctctcatctggaaaccctaaccctaagctcaagattgcttttctattcctcaccaactccgatctccatttcgcgccaatctgggatcgattcttctctggtcattcgaaatctctctacaacgtctatgtccacgcagatccttttgtcaatgtcacaagacctgggaatggctctgtgtttgagaatgccttcattgcaaacgcgaaacgcaccgcaagagcttctccgactcttatctccgccacgcggcgcctcctcgctaccgctttccttgatgaccctgcgaacacttacttcgctgtgctctctcagtattgtattcctctccactcgttcaactatgtttatagctctctctttgaatcttcaatttttgataaatctgatccggatccgaatccgaatccgagaggtattagaatcttgtatcggagttttatggaactgatatctgatgagcctaggctttggaaacggtacactgctagaggaaggtatgctatgatgcctgaggttccgtttgagaaattcagagttggttcgcagttctttgttatgactagaagacatgctttgttaacaatcaaagatcggatcttgtggcgtaaattcaagctcccgtgttatcgttctgatgagtgttacccggaggagcattatttcccgacgctgttgaacatgaaggatccggatggttgcactgggtatacgttgacgcgagttaactggactgggactgtgaaaggacatccttatacttacaaaccaaaggaagttgtgccagagttgatccagagactccggcgatcgaatcactctagctcctactttttcgcccgcaaatttactccggattgcttgaagccgcttttggccattgcagattctgtgattttcagagattaa

SEQ ID NO: 140442 - DNA, 1457 bp, Arabidopsis thaliana landsberg
cttttgttctttgagagacttatttctctctcggtttcttactcttttcggatcagaaatttaaaagcttttaacttttgtcttgctctgtttcatggacactgatttctcaattggtctctgtttttgttgagtggggtgagaagagagatggcgagaagtagatcgattagtggttatgggatatggaaatatttgaatcctgcgtattatcttagaagaccgagacgtttggctttgcttttcattgtcttcgtctctgtttctatgcttgtctgggatcgtattaatcttgcccgagaacatgaggtatgttttgtctaatgaaatctggttagactctgcctaggagtaggagatagttcttgtatcatagcttattggtaggccaattcgaattttggtgaagtaggttatatggtttaggcctggaatggtttgattgccttcatagctcaaggtctataagtaagacagttggtgttttatttactagaaaagagctgtaattaatatcttctggactcaattcatgtattcgtttataagaagctatgtaaccaaaataagaaaaatgtcaaggaagtgaacaatttctcttgtgatcattctctcacttgtcctgcttttttttgtcttgcaggttgaagtttttaagctaaatgaagaagtttcacggttggagcagatggtaagattaatattttcccctcactctaggctcagatagtctttctaatgttttagctaactaactatattttccgctagttagaagagcttaatggtggtgttggcaataagcctttgaagactctgaaggatgccccagaagatccagttgataaacagcgaaggcagaaagtaaaagaggcaatgatccatgcttggagctcttatgaaaagtatgcatgggggaaagatgagcttcaggtatacaattattttccaaaatacatttcacccttgtgaatacgaaatctagtttacgacggactctatgaatcaaattttattttgacgtttagtgcctgctcttccagtatcctgttgagccttttattatgagcttatctgaagttaccaggcctacaaagattttgttaagaactaagattattttcttcctgaactctgcaaaaaaaatattggtctgaagctattcttgtttctttcctttttttattgtcagcctcggacaaaagatggcactgatagctttggtggccttggagcaactatggtagattctttagatacactctatataatgggtctagatgagcagtttcaaaaagccagagagtgagtaattgcaggctcttcatttattcatatgtaactgttttcgtcccagttgcaaatccaactttttacttcttcatctttgctaatcttcatttgcttattgtcttttatttgcaggtgggttgcaagctcattggatttcgagaagg

SEQ ID NO: 140443 - DNA, 296 bp, Arabidopsis thaliana landsberg
gtaacttatatgcatctggctgatcaaataaagtaatggtggacgatacatcacctgtaggtttccttaactcgttgatttttgtttatactagtgttgtttttggtaactaaaacattgttgattgtggtatactagtttctggaggttttttgtgaagtttctggtaaagactaccgattcacaacagggacaaaggcggagtttgctgtctctgtgatcaacaggaaacttggttcgttgaaacctcgagtgatttacatcgaagcagcaaaggaaggtgaagagcctattag

SEQ ID NO: 140444 - DNA, 1388 bp, Arabidopsis thaliana landsberg; identical to SEQ ID NO: 64157

SEQ ID NO: 140445 - DNA, 1370 bp, Arabidopsis thaliana landsberg
cattgtattcctcaaatctctttacttgatcgttggttctctcaaaaatcagatttttatttctgggttttgttcgattttgtgatcatggcggtcattgagagcgtcggagctaatactactgtggaagctggtggtttgatctcgccgtcgccgccgtcttccgtcaccagtcaagaatcaggagcttcttctaacaacgatcacggtggaaatggaatccatgatgagatcggagtccacgtggcgagatccgacggtggtgagagttttaagcgtgatatgagagagcttcacgagctcttgtctaagcttaatcctatggctaaagagtttgttcctccttcacttactaagccagttgttaatggttttaacggcggtttcttcgccgttaataatggctttgttgctgccggaaatttccccgtcaacgaagacggtagctttcgtcgggtaagaacatctctcttctctcttctctgtgattttggggttttgaatcaaattgttctttagggtttttgatgattcttcattttggtttctctgtttcttcttgtgtgtgtttgtgagttttaaaaatctcacctttatgtgtcaaaatgatttgatttgaaacagaagaagtcgttcggacaacaagggaaacggagaatgaatcctaggacaagtttggctcagcgtgaagagatcataagaagaactgtctatgtgtctgatattgaccaacaggttttaaaaagtttccacctttcttcaattgttcattctcagcctttagtgtataatcacttaatagtaatcttattcttggggttaaggtcactgaggagcagcttgctggtttgtttctcggctttggacaggtttaagcaacttctttagttcatctttgtttgtgttgtgttatggtgttgactgtatttggttgtttaggttgttgactgtcgtatatgtggtgatcccaactcagtacttaggtttgctttcatcgagttcactgatgaaggtatcattagtttctctatgtaatctgtttattggataatgcctgtaagtgcttggtttatggtttgtcattttgggacttgtagtgggtgcaaggactgctctgaatttgtctgggacgatgcttggattctatcctgtgaaggttatgccgtctaagacagctattgcaccggttaacccaaccttcttgccaagggtaaggttgtttcttgtgtttcatcacattctgactgcaaagttatggttttttagactcaagaggtttgattttagtcctgtcttttgtcttagactgaaaatgagcgtgagatgtgtgcatgaactatctactgcactaacattgacatgaaggtgac

SEQ ID NO: 140446 - DNA, 1295 bp, Arabidopsis thaliana landsberg
catagtaaatccagagaacgtctcttcttcttcttcacttgccggagaagatggatttgttgttctgtttccgaccgaatcagacttgtcggggaatttcagttttgcctgcttttagcataagcaatctttccgccgtcaatcgtttccgttcgacgacgagtcttcgttttggatttccggcgacgccgtttcgtcggactccaaactttaccttcaaaactcacgcgaagaggaagaataaaacgagtactttcgaaccgaaaccgaataaagtcgaagagttgatcattgaagaagaagaagaagaagaagaagaggagatagttcttcccgaagagattcaagagaatcaagacggtgtgttttggttccctttttgtttgtttgaatgtaatctgataattctctgcagcttgagtttgaattcaaccacttttctggtgatgtttggttctacagagttgctactggatgatgaatatgacgaagacgatgacgatgactttgagttcgatgagagcgaggaggagctctatgtaagtctacttatgttaaataacttaaatttgagagatttggaaagataaaacattttgcattctctcatctatggattaattctctctgaaggctggagatggtggtggtggaggaggcatcaaacttgctggaacattatgggacaaagtagcattagcattagctgtgaaagtttgtgagtcttttgatggtgatttaggcatttatgccttcaagactctgccaaattcaaccatacaagtgagaatcgagcggctcactaacaagtttggttcaccaacaatggaagacattgaagcattttcaacaatctaccgagcaaaattggctgaagcagaactcgccaagtcaataccggacaatatctctctagaggttagttaattagttagccttttattattcctgtggattttggttcattgactcaacaaagattgaacctttgtgtacaggtttcatctcctggtgtcgaaagggtagtacgaattccgcaggatcttgatcggtataaggatagaccgatgtacgtgaggtacactaacgaggacactgagaccgaaggtgatggtattttcaggctggtttctttcgatgtggaagctaaaatctgcatttggggcatagcagatataagagtaaaccgagaaaaggccggcaaaggaagacctttgagcaagaagcaaagagaatggcgactcgaaacggctttcgagtcactacggttagtccgtttgcattctgaatgttga

SEQ ID NO: 140447 - DNA, 1862 bp, Arabidopsis thaliana landsberg
caaatatacgcattcgtcatttggtccctccacttagagagaagcagacagaacataactaaaatcgagaaaaatggcaaacagtggtgaaggtaaagtggtgtgtgtaacaggagcctccggttacatcgcctcatggctcgtcaagttcctacttagccgtggctacactgttaaggcctccgtccgtgatcccagttccgtaccctctcttctctatcacattcatttgctttagggttcatatactattccaattaagtctgtgttactgtagtttaagatttgggtttctactggtaaactctgtgtgcttggatcctgattctattagtgaatcgaaggctacatcttaaaaactgatactttggaattggataccaattttgatcttaagaacaatctaaacacacaaacaatgatcctttgatgttcttgtctctgcttgtacacaggtgatccgaaaaagacacaacacttagtttcactagaaggtgcaaaggaaagacttcacttgttcaaagcagaccttttggaacaaggttctttcgactctgctattgatggttgccatggagttttccacactgcttctccattttttaatgatgccaaagacccacaggtttggttttttattccctcaaaaaattgctttttattttgtggattgatttgatcttaactatgtatccacatctccaggctgaacttattgatcctgcggtcaaggggacgcttaacgttttgaattcgtgcgccaaagcctcttcggttaagagggttgttgtaacctcctccatggctgccgttggttacaatggaaaaccacgcacacctgatgttaccgtcgatgaaacttggttctctgatcctgagctttgcgaggcctccaaggtgtgttttgaatattgagccatgattcatttcgattattttgttgtcatctactagcaactagtcgtcttattgtgctgtaatgttctcttcaaactaaaatgttatgctttgttacttggctcagatgtggtatgttctatccaagactttggcggaagatgcagcttggaaactcgctaaagagaaaggcttagacattgttactattaacccggctatggtgatcggtcctctcctacagccaactctgaacacgagtgctgctgctatattaaacttaatcaatggtaagagaaaaacttttacttctttcatgatacttaggaccggtttgtcaaatgctagctagagaaacccttttcaacttggtgtcttttatttatttccgatatgtaggtgcaaagactttcccaaacttgagtttcggatgggttaatgtaaaagacgtagccaatgcgcacatccaagcatttgaggtcccttcagctaatgggcgttattgtttggtcgagcgtgtcgttcaccactccgagattgttaacattctacgtgagctttacccaaatctcccactacctgaaaggtaaaacatgaactaaatatattacaccggttgttttgttcatgtcctgtgtcaataacttttgcctcatacgcaggtgtgtggacgagaatccctacgtgccaacgtatcaagtgtccaaggataaaacgaggagccttggcatagactacatacccttgaaggttagcatcaaggagaccgtcgagtccttgaaggaaaaaggtttcgcacagttctgagaaagcatttgagccaatggatttaatccagattagataaagtatttggaagactatttcaaaaataatatttggaacatgtcaatgttctcaaggagatattagtatgttcttgtgtactttattgttgttccatcaaatgagttacttttcctttt

SEQ ID NO: 140448 - DNA, 575 bp, Arabidopsis thaliana landsberg
gtggctgtgcctccaagggctaaagctttgttctggttttgctctcaaccaacgacttccgatgtgtttcctgtgtttttcctctccaaggatactgttgagccttcttataaatcactttatgtaaaggaacctcatggggtttttgggattgggaatgcattcgcttttgttcattcatcttcagttgactccaatggacatagcatgatcaaaacgtaagcttttcgttgcttagtatcaattggttgcagatgttctgaagttctgcatttcacttgaagcagttaagctaactaacttctgcagattcctctcagatgaatcagctatggtgacggcctatggttttccagatattgaattcaacaaatactctactgtaaatagcaaagatggctcttcttactttttcgttcctcaggtgaagtggcatttgactttatcatctagctgttgaatctatgaaatgtgtgtaaccagcgttcttacattgtacatggttttcaataccgaaatttcaacagattgagttagatgagcacgaggaggtctctatattagcagttacattg

SEQ ID NO: 140449 - DNA, 1785 bp, Arabidopsis thaliana landsberg
aaaccgcatccagagctagcgatccagcacatccttccttgtgtgaaggtaagactccttaaattctatataaacgagttgtttgatgtcccctgtctcgtaatattctgatacatactgatgtctggcaggaattatcatcggattcttctcaacatgtccgctctgctctagcttcagtaataatggggatggctcctatccttgggaaggtatgaactgaagatagccaacattttcgcatcttgtgacaatgttctgagatttaatttgttttatggttttcatcaacaaaatcagccataccttgtgttatggcgtggttataccagccccaactggtgttgcagaccttatcaaaaaattattaacatactaaaatctttcaatacaggactcaaccattgagcatctgttaccaatttttctttcccttttgaaagatgaatttcctgatgtgcgccttaacatcataagcaagttagatcaagtcaaccaggtttgttgcatctctcttgtgtgctttagatactacttttattgcttccttatttagttggtgactgaattatcttttacggcaggttattggaattgatctactatctcaatccttgttaccggccattgtagaacttgctgaggatcggcactggagagtccgacttgcaataatagagtatgttccactgttggccagccagttaggtataggatttttcgatgacaagctcggagccctttgcatgcaatggctgcaagacaaggtttaccttgaatctttgatgtttgcataaatttctcattcacttgtgattgtagatattgacactgttctcctccttcaggtctactctatccgcgaagctgcagcaaacaacctaaagcgcctcgcagaggagtttggtcctgaatgggcaatgcagcacttagttccccaggtattctttgagcattttatactaaaaccatctgtctgtttatcttattgttgatctatgtcaagtacctcacctataacatctaatctccagctttggtcctttttctttggatatcactaaagctgcaaatattgagatctccagattgacctttatcatataaacaggtattggacatggtcaacaatccgcactacctacacaggatgatggttctacgcgcaatatctctcatggcgcctgtaatgggatcagaaatcacatgctctaagtttcttcctgtggttgttgaagcatcaaaagacaggtacaatagatagattagagggtatgaataagccaaactagtttaagaacacttcttagtttttaatgtgttgttgttgcacacctcttatctctgcagagttccaaacatcaagttcaacgttgccaaacttctgcaatccctcatccccatagtcgaccaatcagtacgatcataacaaacataactcagttatatcgaaaactaatggaaattgttgaattttaatgtttttgccgtgtcaaaaatttgtaggtggtggacaaaacaatccgtcagtgtttggtggacctgagcgaagaccctgatgttgatgttcgttattttgcaaatcaagcacttaattccatcgatggttccacagcagcacaatcctgaattgtttttttttcatatgtatgatcgttaagttaagtttctattattcgtgttctctgcaatttatttggtttgtttgtgtaaaacgccattttggttgctggctatgaactgcaactatttttgttagtaaaattgtattaccttttttacact

SEQ ID NO: 140450 - DNA, 1177 bp, Arabidopsis thaliana landsberg
ggctgcagctgtcatgctcggatcaattttctggaaagttggcacaaaaaggtttgtttaattacttgaatcgaatacagaggcctcaaatctagtatcagagtccttacttatatctaaactctatacaactgttttcaaaaacagggaaaacgctaatgatcttacaaaggttattggagcaatgtatgctgctgttttattcgtgggcgtaaacaactcttcatctgtccaaccgctaatagccgtggaaagatctgtattctatagagaaagagctgctgaaatgtactctgctttaccttatgccctagcacaggtgagattaaactagaaacgttttagttacttgacaaacaagaaaccttaatgggtcgtaaagcagtctttaactaaaactttcccatggtttcaggtggtatgcgaaataccgtatgtgctgatccaaactacatattatacactaattatatacgccatgatgtgtttcgaatggacattggccaaattcttttggttttacttcgtatcatttatgtccttcctctacttcacatactatgggatgatgacagttgccctcaccccaaatcagcaagttgcagctgtttttgctggagctttctacggacttttcaacctcttttctggttttgtcattcctagaccggttagtgttggttacttttctggcaagaaagctgaaaccctaaatgattctctattgattctatcataagctggttttactttcctcttgcagagaattccgaaatggtggatatggtattactggatctgtccagtggcttggactgtgtatggattgattgtttcgcagtacggtgacgtggaggatacgattaaagttccgggtatggcaaatgatccgacgataaagtggtacattgaaaaccactatggatacgacgcagattttatgataccgattgctactgtgttagtgggctttactctcttttttgcgtttatgtttgcttttggcataagaacgctcaacttccaacaacgatagagtgtagttgcctgccggatatgtttggcgtgaagtagaaaaaaatgaaaaatgagggtttatgccatatagtttgtgattgatgctttattgattgtaagtaaagtgtacaatatatacaacacaatagattgtggggag

SEQ ID NO: 140451 - DNA, 2302 bp, Arabidopsis thaliana landsberg
tcttctttctcgtgaagacaccgctctctactcgattcctatgattactctctagatccttttcaatttccccccgaaaggtttctcgattttgatcccccaaatcggagcttggagctaccggatcttatggagtgaagcccgatcatccgtttctttgttacaagttgtcgttttgtagctgcgaagattcctcggagaaggagatttggagacatcaacggcgccattctcatgctcggcgatcacacggacgttctcgttccttgaatctgcaggaacttttccaggattcgttgatttggattgattttgctacacgcgtggagtttccttctgtgaagtcgaatcagcgaagtaaaaattgaatctttagggttttcttagtttgtatttacctttttgttttggaaatcaaatctctggcctcgtttttttttttttaataatccggaggccttgattagggttttcaaaatctagtagctttgtgtcatgatctttataagataagtaatagatatatgtatttttttgctttttatatcagatacaaattttcaatggcaatttattacaagtttaagagtgcaagggattatgataccattgccatggatggtccttttatatccgtcggtattctcaaagacaaaattttcgaaactaagcatttgggcactggtaaagaccttgatattgtcgtctccaatgcccaaactaacgaaggtttgtcttctatgtcaaatgttgtgctgcgcttttcgtattattagactgtttgcttgcagctgtgatacaatgaactttattttatgttatgattgtttactagctgagctttgtcttattttttttttacttttgtgaactattaggaaatggtttgttggaatatgattcttgaatttctcaggaagctttagtgtactgtgtctcgtgccaatatgattgcaatctgtggcctttatatgttctctgttttgaattttcagagtatctggatgaagcaatgttaatcccaaagaatacatctgtccttattcgtcgggttcctggacgtcctcgcatcacagttattaccacacaagagtactttctcagatctttagtttctatattctttgtctacttatttagctattaaacttaaatagacatgatattaaaagcattgcattttactggtgcatcgttttagctaaacataagttaattgtctgactatcggatttaagaaacttcgggatcctcaatgatgcaaatatcttaactttgcaggcctagaatccagaataaagtggaagacgttcaggctgaaaccaccaattttcctgttgctgatccatctgctgctgaatttgtaagttgattatagtgaacttttctcggcttctgttggcattgactgcacctaatttttttctactacaaaagtactaatgtcatccgtattcacctcttagcctgaagatgagtatgacgagtttgggactgatctttattccattcctgatacccaagatgcccagcatattattccacgtcctcatcttgcaaccgcagacgacaaagtagatgaagaaagcaaaattcaggcgctgattgacactccagcacttgactggcaacaacggtaagcaatcttccagaaatggtgcaggtgaaactgttggattttgtgagaaggtttaacagacctcttatatttattcaatgtaacagacaaggtcaagatacttttggagctggtagaggttacgggaggggtatgcctggaaggatgaatggacgtggttttggtaacttatacttacttttattctttgattttggttgaattctggaatgtcaaaatacagtatacaaaacatttacttctgtcaaaatattttatatttttgttctatttgctcaagttgtaagatacttagtttggttttgctggctggataggaatggaaaggaaaacgccacctccaggttatgtgtgccatcgttgcaatatccctggtatgtcagctctgaaaatctttatttttctctcacttttgtagatggatatataatagataagaagtgttgagagcattttctttgctgtctcaggacattttattcagcattgccccacaaatggagaccctaactatgatgttaagagagttaagccacctactggtatccccaagtccatgttgatggcgaccccagatggttcttattccttgccaagtggcgcagttgcagttctgaaaccaaatgagtaagttgtactgaattagtttgggaatgtcgctat

SEQ ID NO: 140452 - DNA, 1489 bp, Arabidopsis thaliana landsberg
atgtgtatcctcatttttgttgggaacaacggggagacctacttcaacaccgctgcattagtttctggtgttcagaactttcccaagagccgtggtcctgtcgtcggtatcctcaaggggtttgctggcctcggcggtgccatcctctcccaggtatacacaatgatccactcctctgaccgtgcatccctcatcttcatggttgctgttgccccttcagttgttgttgttcctctcatgttcttcatcagacccgtcggtggtcacagacagatccgttcttctgatgccaccagcttcaccgtcatctatgccgtctgcattctacttgctgcctatctcatggcagtgatgcttgttgaagatttcattgatcttagccattcaatcatcattgctttcaccgttgtcttgtttgccattcttcttgtacccatcttcataccaatcgcaacgagttgcttcacagcatcaaccgacccctgtgacacgctcgaagaacctctccttggcgatcagcaaggtcaggatccgggacagtccaccacccctgaccatggtcctgagcttatatttagtgaagtggaagacgagaaaccaaaagaagtagatttgcttcctgcagtggagagacataagagaattgctcagttgcaagcaaagctgatgcaagcagctgcagagggtgctgttcgggtcaagagacggaggggccctcacagaggcgaggattttactttaactcaagcactcgttaaagccgatttctggctcatcttcttctccctcttgctcggatctggttcgggtctaacggtcatagataaccttgggcagatgagtcagtctctcggttacgataacactcacgtctttgtgtccatgattagcatttggaacttccttggacgcattggaggcggttatttctccgaactcatcgtcaggtatgatactgtcccagaagaatgacaatgacatttggctgtggaattgattgtggttcgaaatgatttgcagggactatgcgtacccaagaccggttgctatagcagtggctcagcttgtaatgtcagtaggacacatcttctttgcatacggatggcctggagctatgcacatcggcacactattgattggacttggctatggtgctcactgggccatcgtcccagccactgcctctgagctctttggtctaaagaagtttggagctttatacaatttcctgacgctggccaacccagcgggatccttagtcttttcggggctgatcgcaagttccatttatgaccgcgaagcagagaggcaagcacaaggatccttgttcaatcctgacgatgtcctgagatgccgaggttccatctgttacttcttgacgtcactcataatgtctggattctgcctcattgcggccgccttgagtatgatccttgtgcaacgtacgaagccggtttacacaaatctctacggcaaaacccgcaactga

SEQ ID NO: 140453 - DNA, 2854 bp, Arabidopsis thaliana landsberg
cacacacacacgtttgcgaatctccgacgtccgtttctcctcgccgtagaatcgccgttcattctttcgccgccttcagtcttccctccattgactctttttttggtaattcgtcttctttttgctctctcgttctctctttttcgatttctgggtacagaaatcgatggctctcgtttttctttctctgttgctgttctattactttctcttatatatatatgattgttactctagtgatgaattttgatacattggttgtttgaaattgatctctgttgtgcttttataattccggggtcaagattggctgtttaaatctagtaaagtttgcatttttcttttctgtttgcagagattaacttgattatacttttgtttttaagaagaagaagagcaattacaagcgcaagtgtgtataatgacttaaagagagctcctgttactccgagtgatagatagtctacaattatatcttactctgagtgaaagcaatggcgtacggtggtccgtccatgaatccaccggctttgagtggagctgttcccgggtctgctaatctgaagcaagtgaaattggagagagaaagcgagctcaggatcgaagtctctgaagagcctctcagactccgtgtggttaacgggaccgctgagatttttggctctgaactgcctcctgaaatatggcgtaccttccctcctcgcatgaaatttgcggtatgtgttttcttaatccttggtttttagagcgatcgtaagcattatgctttatggcttatagataaaatgtagcttgttggtaacatatttggtgttgggtttgttggtagaaaataactagccattcttgatttagtttcttttagtggttatctttcttaaagtgggttcttgagttactattgaattcaccctctggccttttggggttggaaaggtacatcctttgccagtgaagtttgagggtttttgggtttgagttggatgaaagacttatgatttaggttgtaaatgaagattatgctgtctaggtaagaattgttaagtgggttgtataaaaagattgatgatagatgtgattttcccccccaatttctttcttttctatttttccttctgctaatgatttatgtaaagttcataatcggagctctgaaacaccgtgcttaccatcttgtgccttttgattattgtcaggttttcacttggtatggagcgacaattgagatggatggtgtcacggaaactgactatacagcagatgaggttggattacttgtttcattcctacgcttgctttaaatatgtagagcaaattttgtttactaactacatctctgtttccagacgccgatggtcagctacattaatgtgcatgccatactagatgcaaggagacgttttgccaaagcttccacatctaatgacccagaatcttctcaggtacttttcttcgatattcaatattattgtattgcaatatcagcatagttaaaacacttggttcttaagaattcacttaatgcagggacctcgggttattgtagtagggcctacggattccgggaagagcacattgacaaagatgctccttagttgggcagctaaacagggatggagacctacatttgtagaccttgatgttggccaaggctcgattacaataccaggatctattgctgctgcccctattgaaatgccactggatccagttgaagggtttcctcttgatatggcccttgtttactactacggccacgcatcaccaaagtaagtgattctcaaatttctcctacccatcatacgttattcccctcgatgaggaatttaaatatgtctactttggctctctcagtatgaacgttgcactgtacaaagctctggtgaaagagcttgctcaagttctgaagaaacagtttgtcggaaaccctgaatcgcgagctgctggaatggtgatcaacacaatgggatggatcgaggggattggttatgaggtaaaagttagatcctttttagcgtattttttggtatagttagctccttcttagtggatttcattatgcaaatgcctgataaagaactgtatctgcttcgtcttgcagctgcttctccacgcaatagacacattcaatgcctcggttgtacttgtattgggtcaggaaaaactcttcagcaggcttaaagatgtgctgagaagtaagagtaatgtcgacgtcgtgaagcttcacaagtctggtggagttgtagccagggtcaaagaggtccgtaaaagatcaaggaactttaagattcaggtaaaattttcaatctcaaatcttttaatatcccttttttcatgcctttggaggtgtaactcagaactcaaaaactgaattttccaggaatatttttacggtttatcgaaagaactctctccgtatgccaatacatcgagtttcagtgatctgcaagtgttccgaattggtggtggaccacaagcgccaaaatcggctcttccagccgggtctacctcggtttcaaatccgttgcgggtgacgcctgtaaatatcgatgatcgggatctgctgcattctgttcttgctgtctcatacgcagaagaaccagaccagatcatctcaaggtaatctctaaaagttcttgctgtttccagaatcaaaggctttcgtgtatgttttcttcgtgattttgatatttctttctctctgttttttctttgatacagcaatgtttctgggtttgtgtatgtgacggaagttaatgtgcagaagaagaagataacgtatttagcaccatcgcctgggacattacctagcaagttgttggtcgctggatcattggcatggcttgagtcagta

SEQ ID NO: 140454 - DNA, 2108 bp, Arabidopsis thaliana landsberg
catcacaacatcacaagtcacaaagaagccatggatcttagcttagatagtttattctacaacaccactcatgagctcaacacgactacaaactttcaagagttctttagcttccctcaaaccagaaaccatgaggaagaaactagaaattacgggaatgaccctagtttgacacatggagggtcttttaatgtaggggtatatggggaatttcaacagtcactgagcttatccatgagccctgggtcacaatctagctgcatcactggctctcaccaccaccaacaaaaccaaaaccaaaaccaccaaagccaaaaccaccagcagatctctgaagctcttgtggagacaagcgttgggtttgagacgacgacaatggcggctgcgaagaagaagaggggacaagaggatgttgtagttgttggtcagaaacagattgttcatagaaaatctatcgatacttttggacaacgaacttctcaataccgaggcgttacaaggttgtttttttattttataatattaaactttgtttgactttcgttagtaatgttacatatacttacttaaaaggttatgtgaaacagacatagatggactggtagatatgaagctcatctatgggacaatagtttcaagaaggaaggtcacagtagaaaaggaagacaaggtctagtgcttttttatttaattatcattaagctaaacatagaaactttttaagtagtttattatttaacgtattactgacatttgagttttattttcttgttttctctatgtgtgataatgatttgatgatcttcttctcagtttatctgggtaagtacacacttcaatcttcatggattcatgatttccccctcaaatttctcgggaaaataatgatggattttgacttctttatttttgtttgattaaatctttattaggaggttatgatatggaggagaaagctgctcgagcatatgatcttgctgcactcaagtactgggtccctctactcacaccaatttctctgtaaatcatcttttctaaactttatgtctctttgaccttgttgtatgatttatttatataatatgataatggatatttgaaggcggagaattatcagaaagagattgaagacatgaagaacatgactagacaagaatatgttgcacatttgagaaggaagagcagtggtttctctaggggtgcttccatctatagaggagtcacaaggtccttttaaattacatttatataactttatataatacatagtttaataatgtgaatattgactttgtgtgagttttttgtactagacatcaccagcatggaaggtggcaagcacggattggtagagtcgctggaaacaaagatctctaccttggaacttttggtaattcatcatgccgatgattttgattgttaaaacttaacattttcaattgcttgtgtcttacgaaatcttttgacactatcataggaacccaagaagaagctgcagaagcttacgatgtagcagcaattaagttccgtggcacaaatgctgtgactaactttgatatcacgaggtacgatgttgatcgtatcatgtctagtaacacactcttgtctggagagttagcgcgaaggaacaacaacagcattgtcgtcaggaatactgaagaccaaaccgctataaatgctgttgtggaaggtggttccaacaaagaagtcagtactcccgagagactcttgagttttccggcgattttcgcgttgcctcaagttaatcaaaagatgttcggatcaaatatgggcggaaatatgagtccttggacatcaaaccctaatgctgagcttaagaccgtcgctcttactttgcctcagatgccggttttcgctgcttgggctgattcttgatcaacttcaatgactaactctggttttcttggtttagttgctaagtgttttggtttatctccggttttatccggtttgaactacaattcggtttagtttcgtcggtataaatagtatttgcttaggagcggtatatgtttcttttgagtagtattcatgtgaaacagaatgaatctctctataacatattattttaatgaatctcctttgct

SEQ ID NO: 140455 - DNA, 778 bp, Arabidopsis thaliana landsberg
ggtgtctttatctcaagctctggagaccaagcccattctaccgctggagatggtgagttagctgaatcataattcataaccatttattgatgatgtggttgaaaattttagctttgttggttataaagtagagcaagcactagtttggttgatggtgtcgatcactttcttgtgagataattttttatgaatgcttctcttttacaggggcaatggcatttgatgtagaatacagacgatggcaggaagataaaaacagacagatgaaggagctgagttctgctatagaatctcacgcgactgattctgagcttcggataattgtagatggagtaatagctcactatgaggagctttacaggataaaaggcaacgcagctaagagtgatgtcttccatttattatcagggatgtggaaaaccccagctgagagatgtttcttgtggctcggcggtttccgttcatcagaacttctcaaggtaaaaaacacacgaccaggttcggtttatttggtctcttcactagcaagtttccaaactttttacttctctactacagcttatagcgagtcagttggagcccttgacagaacaacaatcgctagacataaataacttgcaacagtcttctcagcaagcagaagatgctttgtctcaagggatggacaacttacagcaatcactcgctgatactttatcgagtgggactctcggttcaagttcatcagggaatgtagctagctacatgggtcagatggccatggcgatggggaagttag

SEQ ID NO: 140456 - DNA, 1607 bp, Arabidopsis thaliana landsberg
atggatggatcaacggctgcgatcatccttaccctcatcgtaacctacattatatggttcgtttctttacgtcgttcatataaaggtccacgtgtctggcccttagtgggcagtcttccagcactcataacaaatgctcaccgcatgcacgacttcatcgccgataacctccgcatgtgcggcggtacgtaccaaacgtgcatattcccgatcccgttcttggctaagaaacaaggtcacgtgactgtcacgtgtgacccgaagaatctggagcatatcttgaagacccggttcgataattaccccaaaggtcctagctggcaatcggtttttcacgatctgttaggagacggaatctttaattcagatggtgacacatggcggtttcagcgtaagaccgctgcattggaattcacaacacgtacacttcgccaagccatggctcgttgggttgatcgagccatcaagaaccgtctggtgccgattcttgaatcagctatgagtcgagccgagccaattgatcttcaagatgttcttttacggctcactttcgataacatttgcggcttaacatttggtaaagatccacggacactatcgccggagtttcctgagaacggatttgcggtggctttcgatggagccaccgaagccactcttcaacggtttatcatgccagagtttatttggaagatcagaaaatggcttcggctcggcttagaagatgatatgagccgaagcatcagccacgtggataattacttagcagagatcataaatacacgtaagctcgaattgctaggtcagcaacaagatggatcccgccatgatgatctattgtcacggttcatgaagaaaaaagaatcctactcggataaatatcttaaatacgtggcgttaaatttcatcctagctggacgtgacacgtcatcggttgctatgagttggttcttctggttggttagtcttaacccacgagtcgaagaaaaaatcataaacgagatctgcaccattctgatcaagacacgtgacaccaatgtgtcgaagtggaccgacgagccgttgactttcgatgaaattgaccagttggtctacttaaaagcggcattgtccgaaacattgagctatatccatcggtaccagaagattcaaaatttgttgttgccaacgatgttttactgacgggacatttgttccatcgggatcaaaccttacatattcgatatattcggttgggcgtatgaaattcatttggggtgaagattgtctcgagtttaaaccggaaagatggttagaggaaagccgggacgaaaaatgtaaccaatacaaatttgtagcgttcaatgccggtccacggatttgtctaggcaaagacttggcttatttgcagatgaaatcaattactgcttcgattttgctccggcatcggcttacggtggctccgggacatcgagtggagcagaagatgtcattgacgttgttcatgaagtttggtcttaaaatggatgtgcataaaagggatttgacgttgccggtggagaaagtggttaatgagatgaggaaaaagtgagattattgggactaatgatggtaactatgatgaagtt

SEQ ID NO: 140457 - DNA, 1072 bp, Arabidopsis thaliana landsberg
aatgagaataagatagaagagagggaagcagtggagtcggatgaaggttcaacgaatggttcattccaaggaagtaaccaagtgaggcaaggtggaggccacagcactgcatccactgaaggatttcttgtacctagtaaaaagaaagacacaattgacacgacagaacgtcgagctggttttgatgagaatatcatcaagaaggttaaactcaaacttggtggttcgtcaaaaactataaatataatatcagcatccgatggtgcttctgatatcggattgtgttcgacaaagtcgtcccatgcatctgatgatgccttggggattgggcagacttaccaggtagttaatcctttcttaaatgctaaatgtttctcatttcttcaacggagtatgtgttggtgattgcctgagttttttcagtctttctgatgaaattaggctacagcatttgtaatttgttattgtctacttatttactcgcaggaaatttcaaacgagcgatcgactaaactaagagggacaccgttggacactgcaagcaaatcagattcatgtaatgatacccgagatagcaaagcgaacacaaatcctattcgtaaaagcaaccggatttctaaacgacgtgttctggatgaagaactcgatagtcttgatgatgatgacgaagaaattcagtttctcagaaggatgaaaatggctaaagttgtggctgtagaagaagatgttgatgacgatgaagacaggaccagaaaacataaaaagctttccaaggtaatgaaacaaaatgtcgaattcccacgtggtgtaggtacatcagaaaaatcagccaagaaggataagatgggaaaagcatttgacgatgctgattatgtcaaggatgatgatgaggaagaagaagaggctgtttcagatgttgagctcgaaaataagagcgcgagaactagaagaggagctgaagaaggtcagagtgaagttaagacagaaatgactgtgactactcgtcgacgttctggacatagtggaaaccttatcgagtttcctcgtggcctacctcctgctccacctagaa

SEQ ID NO: 140458 - DNA, 1710 bp, Arabidopsis thaliana landsberg
ttcctggttattaaagcaatcaggtgattcaaatctttaatcttttaatcccggcaggcctatctgaaacaacaacctccgtttgaggttttgccgggaaaatataaagttcacaggctttggtctctgcatttgcaatatatttaaaatggcagcagctttcttgaatcttggcggctatgttttcgttttcttctcttcgttcttagctatagtggccccacaggttcgaggcaatgttgctgtctttgatagctactggacgcaacgacaaagtgatgcattgaaacaaaccatcggctcttacgatcctcatccacttaacgtcaccaaccattttaattaccatgtcaatatgtgagtttttgtctttgttaggtcaaatgtttaacctaacttcctaaacaagtactaattaaacacttttttttttttttaacagagcagtggatgcatcggaatcaaggaacgatacaaggagagagcttactcaggtgagaagtggtcgtaaaacgcacaaaagcagcggaaaatgcctagcttataacccgatagacaactgctggcgatgcgatcgtaactgggctaataaccggaagaaactagccgactgtgtgctcggattcggccggagaaccaccggaggaaaagacggaccgatatacgtcgtcaaagacgcgtctgacaacgatcttatcaaccctaaaccaggaacgttaaggcatgcagtgactcgagacggaccgctttggatcatattcgcaagaagcatgatcataaaactgcaacaagaactgatgataacgagcgacaaaacaatcgatggaagaggagctagggtttacatcatggaaggtgctggattaacgttgcaatttgtgaataatgtgatcattcacaatatttatgtcaagcacattgttcctgggaacggtgggttgatcagagactctgaggctcacatagggcttaggacaaaaagtgatggtgatggaatcagtttgattggagcaaccaatatttggatcgaccatgtctcaatgacaagatgtgcagatggtatgatcgatgctattgacggctccactgctgtaactatttccaacagtcatttcaccgaccaccaagaggtaaaaagattcctttgttttcgctcatgtgaagttgcatatgaaacaatcaagacctctaatttagagtcttgttttaaattttgtgagagaacaggtgatgttgtttggggcgagggacgaacacgtgatcgacaagaaaatgcagataacggttgcgtttaaccacttcggtaagcgattggaacagagaatgcctcgttgcagatacggaacgatacatgtggtgaacaatgactacacacattgggaaatgtatgcaattggtgggaacatgaaccctacaattattagtcaaggcaatcgtttcattgctcctcctaatgaagaagccaaacagattacaaaaagagagtacacaccatacggtgaatggaaatcttggaattggcaatcagaaggagattactttctcaacggagcttattttgtgcaatccggaaaagcaaatgcgtggagctctaaaccgaaaaccccgctcccaaacaagtttacaattcgacctaaaccgggaacgatggtccggaaacttaccatggatgcaggagtacttggctgcaaacttggtgaagcttgctga

SEQ ID NO: 140459 - DNA, 927 bp, Arabidopsis thaliana landsberg
gagtggtgtggatttcttaggccctcttcttcctgctgttgcagaaatatgttcagattttgatcctactatggatgtggaaccttcacttttgaagttgtttcgcaatctctggttttatatagccctctttggcttagcacctcctattgtgaaaactccgacaccaccactgaagtcaacctccaattcagtgaacagtgtgggaagtatgagtgcaactgctttgcaagctgtgggcggtccttacatgtgggacaatcagtgggctctagctgttcagcgaattgctcaaggcactcctccccttgtaagtcaatctggtcgtcttcagagtttaatttgtggttcaccgtattattagcctactaaaactgaatctcacatctcccaggagataattgttcggtagtttaattttatctaattgagcattgctctttgtaggtcgtcagttctgtaaaatggcttgaagacgaattttaactcaacgcacttcacaatcctggtagccgccgaggaaatggaaatgagaaagtagcttcaacccagagacttgctctttcaactgccttaggtggcagagttgacgttgcagcaatgaacactatctcaggttaacagatggggagttatttacaatatctgctagatggacttcgatgtgatattttagatacttaggaatcactttcttcaattcttttaggggtgaaggctacctatttgcttgctgtggcttttttggagatcatacgttttattagcaacgggggtatccttaatggtgaatcaagcgtttctgcctctagaagtgccttcagttgtgtgttcgaatatctgaaaactccaaatcttactcctgctgtttcccagtgtttgacggcaattgtgcatagagcctttgaaacagcagtctcatggctg

SEQ ID NO: 140460 - DNA, 711 bp, Arabidopsis thaliana landsberg
tgaacgaactgttccgtttctggccaaagaaagacgaggaagaaccgcccaagtggacatctcgacttttctacacagtagtggctattgttgttgtcatgctgcttaggcgtcatgcccctgatgaagctgctcgggccaggtatacactgccttctcgtccacctttaaatatcgcttaaactaattgtactctactcatttgaatttagtgcagtagaggttgaattgtgatgagttttgttcatacaggtaccaaagaaggatgtccaacatcattgatgatgtccttgagtggtcaccaaagctagcactttctggtttgatggagaatcagcaacctgtaaacatcacagatgcggcaaacaactcctcagattcagcaggaggtcccgaccagactgaagaggtcgacctagatgaaactcaaggcgaggacctagaggaaacgcaaggcaaggaggaagctgaaggttggactgactctgatcttaaaacataaaaaaaccaaaatatagaaacgaaagttcattgtaacaataagtcaacttaagtgaccaagacgaggtgagttctttataagaaagtcttgaaagattttgtggtactccattactcctttacattttgacacaatctggaatttagctctcaatcacagttttgtattccaaacttcaattcaagctaagaaatgtttggttaagatag

SEQ ID NO: 140461 - DNA, 782 bp, Arabidopsis thaliana landsberg
aagatactgtaatgaaggaaaacgtggaatctaaagacaataactatgccaaagatgatgaaaaagagaccaaagagacagatattactgaggcagaccacaaaaaagctgggaaggagaacatacaacatgaagctgacaaagcaaatggaacaaaagatggcaatacaggagacatcaaagaggaagggacactggtagatgaagacaaagggacagatatggatgaaaaagtggagaatggggatggaaataaacaagtggagaatgttgaaggaaaagaaaaggaagataaggaagaaaataaaacaaaggaagttgaggcggcaaaggctgaggtggatgagtcaaaggtagaagatgaaaaagaagggagtgaggatgagaacgacaatgaaaaagtggagagcaaagatgcaaaggaagatgagaaagaggagacaaatgatgataaagaagatgaaaaagaagagagcaagggttctaaaaagcgtgggaaaggcacgagttctggaggaaaggttcgcgagaagaataaaaccgaggaagtaaaaaaggatgcagagcctaggactcctttctctgatcgccctgtgcgtgagcggaaatctgttgagaggcttgttgcattgattgataaagactcctcgaaagaattccgtgttgaaaaggtttgccaaaactttcctgagctgagtagaactttattgctagatatgtttataataatcctttggatattacaggggcgaggtgcatatctcaaagatattcccaatggt

SEQ ID NO: 140462 - DNA, 356 bp, Arabidopsis thaliana landsberg
ctaaactcgaaccctaaagaaaaacaaaaatggctgccatagcttctactctctctctttcttcaaccaaacctcagagacttttcgattcttccttccatggctcagccatctccgcagctcctatctccatcggtctcaaaccacgatctttctccgttcgcgccacaaccgctggttacgacttgaacgctttcacgttcgacccgatcaaggaatcgatcgtgtcacgtgagatgacgagaaagtacatgacggatatgatcacttacgctgagactgaagtcgtcgtcgttggtgctggatctgctggtttatctgctgcttatgagatcagtaagaaccctaatgttcaa

SEQ ID NO: 140463 - DNA, 1273 bp, Arabidopsis thaliana landsberg
atttagaactaaagaagagagagagatccagtttctcgtcccagttaagctatggccatgttcaaaaccttatcttttttgttccttttgtgctttcagatacatggaacggtggctgcagatgaaaattccttgttttcattcaatggttttgtaaaatctccgagctttgacaagagggttgctctgtttggagattcgaagctggtcaatgacagttctttgattcagctgactgactcagtgactcgaagcgttggtcgagtcgtttacaagaaacccatcaatcttttcaaaggtaaacagaggaattcgagatctttctctactcacttctcgttttcttccatgtccaacgagattggtgatgatgtcttggcttttgtaatggttccatctagtttggatcttagtctgtttggtaagaaggacaacagttcctctgctttaggttttttatcacaatatgcaaagaacgagacagttgttgctgtcgagtttggtatctccaggacaggaaacagtgcaagaattttagttggtagacctgaatctgctgaaattagaaacctttcgtttgtgggtgacttgatgatggacaatggaaggactctgagctgtatgattgagtatgaggcaagttctaagagaatgatggttcgattcagaaaatctggttcggtaaagctgtttgatccgttcttctctttctcggtagacttggccaagttatggaaaggtggtgaagtcatggtgggtttaagctctgctaatgggaactcttccaagccacattttctccattcatggagctttgaaatatggcatcttgatccgatatgggtgcaaccagcgccattaggaccaaatgaaggtttgaagccggacgtttccacggaaatggaagagggccgagaaaatagtgagtgtatatggagaatgcttggtgctctggtcttggctgcagtatgtggagccataggggcaatgtcagctatgtatctttggactatttgcagtgttaggcggtcaatggccgtggttccagaggaatgtgcagtgagcattgtggtcgttgcagttaaagatggcaagaagtaatgagaagtttgtttggctttggctttggtttaagaaggttgtcttgttgtagtgtaaatgtagtaccttcttccacttcctctggtgttatctttatttagtgttttcttttatttgcttcgttagttgcaggtttcacatgtacaatctctatgaaagaagccgtaagctt

SEQ ID NO: 140464 - DNA, 483 bp, Arabidopsis thaliana landsberg
agatgaagatgaagggagagagatcgcaaaatcgatgattaaagattcgaagaagaactcgacgttgctcggtacttcaggctttgttagctccgaaagttctaagaggtttacctctatttgttctaatagaggtgagaaaggaatcaaccaagatcgtgcaattgtttgggaggtacactttatataaatactagctatatgttaggtaattcgtctttccatgaaacgtattatgatatctacaaattattgacgaacttatatgttagaaatggaatcatcacatgcatgtagttactaattaattgtgtttataagatttgttgtgaaatttaaactgtttttatgtatttatattacataatatatagggatttgggtgccaagaagacataacattttgtgggatgtttgatggacatggaccatggggacatgtgatagccaaaagagtaaaaaaatcatttccatcttctctgc

SEQ ID NO: 140465 - DNA, 1140 bp, Arabidopsis thaliana landsberg
tgacattagtaggacacagaagaacttatataggaagcatgccagggcgcctcattgatggcctaaaggtgagtcttgttttctaagaatacgtaactagcttatgctgatgaggaacttggggagttgttttagaacaggaactaagttgtagcagataagtttctgtctgtccttgacaagtataagtgacagaaagtgttatagatcatcaaaatgattgctacttagcttttctgaacaggaattggcaaaactgcctagtagaagctcttatgatatgtgattgtccagtttgattacagtcatgttggatggtttgttatatgatatattttatcactgggtttcactcttatgttttggattttagagggttggtgtttgcaatccagttatgctgttggatgagattgacaaaacaggctcagacgttcggggtgatccagcttctgcactgctcgaggttttggatccagagcagaacaaatcttttaatgatcagtatcctatcatgtttccttattcaatataaatattagattcagcgtccagacattgttaggcttgctgaaagtttcttgcatgagttttaaatcttgaaattgtgcttttcacctactcttaggcaacaactatattcgttcatagatgtccagtgatgcttgatttagttggtcactcttttgtctgtattgactgttacccttaacggaaaaatagctatctgaatgttccatatgacttatcaaaggtggtttttgttgccactgctaatagggttcaacctattccacctcctcttctagacaggatggagctaattgagttgcctggttatacgcaagaggaaaaacttaagatagctatgcgccatctgattcctcgagttctagatcagcatgggcttagttccgagttcctcaagattccagaggtaggtttttatctttgaaatttttgatgtaatgccaataattgtctctcgtgtggtgcacttatgcagtttcttcgtatgctcgccataggctatggtaaagaatataattcagaggtatacaagggaagccggtgttcgtagtctagagaggaacttggctgctttagctcgtgcagctgctgtgatggtggcagagcctg

SEQ ID NO: 140466 - DNA, 1034 bp, Arabidopsis thaliana landsberg
tgcaaagggttgcattaactctgtgcctcggaaaggtaattattttgtttcagacgtctatatgacgtagttgctttctttctctcagtgatctcatgcatccacaatgtgaattcttacagcctgcggatatatacctgatcgatgagccaagtgcatatctcgattctgagcaacgtattgttgcttctaaagtcataaagcgatttattctccacgcaaagaaaactgcatttgtagtcgagcatgactttataatggcgacctatttggcagaccgggtcattgtgtatgaaggacaaccatccattgattgtactgcaaattgtcctcaatcactgctcagtggaatgaatctcttcttatctgtaagtctcctattatatctcttagttacaccgtatgggcaagagaagagggcataaaggtttggtgctaatgattcctattttatgtttttcgttaccatgcagcatctgaacatcacattcagacgggatcccaccaatttcagaccaagaatcaacaaattggagtcgaccaaagacagggaacagaagtctgcaggctcatactactacttggatgattaggacaactaccaagaggttcttgatcactaaaatccaatcatgttttctcaatcatacaacgttttatggaatcaacatctaaaatgtttgttttctcttaatgtccttcaatggattcacagaatatagggcattgttcgaattccagaagggtcttttgctcagaggaagttgatctatgagctcggaatattttacgcagccatctgttttccgagtgcataagcacagatgtttctttctggtcaagctcttaattgttgtttcatcagttttgcttctacattttctctctcacagcttttattaactgagcaataaaagtttaagaatctgtaacctttttttctttttggctttgtacttcctgagttgatgatttcaacatttactgtgatgttactactttggattttacaatctattgcctatttttacatt

SEQ ID NO: 140467 - DNA, 635 bp, Arabidopsis thaliana landsberg
gagccgttgccgacttctgggagcgacgccgacgacgaaagggtaaacacgccgccgttgattcagccggagaatcaatggaaagtgaagcaattcaagaggagcttcagaatttagacgtcgagttaaaggatgttcaaggttaaagcatttagactcttcgttttgtttttgttcttcgaatttgtgtttcggttgcttttggtgtatatataactttagaaaataattcaaagtctccattttttctgctttatgtaatatacattgaggttttaggttaattttagacttcatagccatagataattgtctctgatccttgatggtgttaggaaccagaatgggttaagtgaaagttttagtttttttgaattcgtgttgaatctgttgattgaaatctctttgcaggtcagataagtgctttgattgagcatcaagataggttatacgagagaaagtctgagttaaagacattgttaaaagcattagcagcatcaggaagtcctgttgcatcatctggtggctctagtgctatagagaattggtctgagacatttgagtgggattctcgtgctgacgatgttaggtttaacgtttttggtatatccaagtatagggctaaccagaaggaa

SEQ ID NO: 140468 - DNA, 343 bp, Arabidopsis thaliana landsberg
atggcagcgagaaacaaacaaaagaaacgcgctgagccagagtcagatctgtgcttcgctggcaaaccaatgtctgttgtggagtcgacgattcgatggcctcatcgctaccaatccaagaaaacaaagctccaagctccgaccaaaaaacctgcaaataaggggtataactttacggggtttgtctcttttatgattttgttgcttagcttctgtttgctgattttgttttacagtggcaaaaaagaagatgaagagataataaagcaagctaaatgccactttgacaaagctttggttgatggagttctcatcaacctaaacgacgatgtctatgtcacgg

SEQ ID NO: 140469 - DNA, 719 bp, Arabidopsis thaliana landsberg
gacaaatagataatcagtataaataagattagttcttcttacattgtcttattcaatgcacacaaacatttacccaaaatggcatcggcggttcagaaatcagcgttgctcttatgtggagactacatggaagcctatgaaacgattgttcctctctatgttctccaatcgtttggggttagcgttcattgcgtttcacccaaccgcaacgccggcgatcgctgcgttatgtctgcccacgatttcttgggcctcgaggttccaattttgccactaaaacgaatttcgaactttctttttctttgtgataattcgcttaattttgtttttctgttctaaaaaagctatacaccgagcttgtcgttgaccagttgactttaaacgcaaacttcgatgacgtcactccggagaattacgacgtcatcatcatcccaggaggccgattcacggagcttctcagcgccgacgagaaatgcgttgacctcgtggcgcgattcgccgaatccaagaagctgatcttcactagctgtcatagccaggttatgctgatggcggccggaatcctcgccggtggtgtgaaatgcacggcgtttgaaagcataaagcctttgatcgaactctccggcggtgagtggtggcaacagcctgggattcagagcatgttcgagatcaccgattgcgttaaagacgggaatttcatgagtacggtcggttcccca

SEQ ID NO: 140470 - DNA, 1316 bp, Arabidopsis thaliana landsberg
atggtgaaaactgttctacatgaacttgttaagctccgcggagccgcaattaagggccacttgtctcttgtccctattgacatgaggccacaacccatcattctcgcttacatcgatctaaaccttgaggtgagacctccttagtcgtctaacttcatgtccagaaattttgacaaatttgctgaagctgagggtttggtcaaagagcgcatccaaactatttgctgttttactatgttttgagaaatttagacgccattggtagtaactatttaaatacctgcagactttagctgcagcaagaatgttaactgcaacaggtcctgtgggccaaacccattggacagattcaacagccaacaatccttcacctcctgcaaattctgccgatgttcagttgaagcaagagcttggggctatttttaagaaaataggtgacaaacaaacttccacaattggtctttacgacctctaccacatcacaaagtcatatccaaaggtaatagatatgactatgtatttcaagtctcaatgtttcctgttcttcatgaacaaacgagccaaattgtatgtacttacaacctcatcttaatgcttgtaggttgatatattttcccaacttcaaaatgctagtgaagcgtttcgtacttacatcagagatggtctggcacaggtctgtaactagtctcctagctttttactatgatttcgataaaactcaagttttttgtcttgaagttttgcaatcggttctgtaggttgagaagaatgcagctgcgggaagaacaccttcaagcctaccgttgtcaactcctcccccttcgtccttagctcttccatctcctgatattccttccttgtcctctttagatgtgaagcctttgatgaaccctagatctgatttatacacagacgacatccgagccagtaacatgaatcctggaggtagtttcctagatccttatccttctttgtccttccttgcggtgtttatatatatctgttaaaaacaaacatctttggcagtgatgacagggacgctagatgcaatcagagaaaggatgaagaacatgcaactggcttcatcagagccagtaagcaaaccgctgatgccaacaaacgataacttatcaatgaaccaacagagcgttcccccgagccaaatgggacaagagacagtccacacacacccagtggttctcccaatggatgagaaagcattgtccggtcttcaagcccgaatggagaggctcaaaggtggatcactggaacatatgtagaactagagaccccaagctttggagtctgaagttaca

SEQ ID NO: 140471 - DNA, 1260 bp, Arabidopsis thaliana landsberg
gacagatgattaatgatggagtaagtccatctattctggttagtggagaaagtggtgctggtaaaactgaaagcacaaagttgcttatgagatatcttgcttacatgggagggagagctgctgctgagggaagaagtgttgaacagaaagtgttggaggtgaaaaaaaaacatcatatttagtcaaatcaagtttttagataattgaacaaatatctaaaacttcagacttcagaggatggtcgaatattcatttcggctgtgtttacttttcaagagcaactgtagagtgaacaaataacttaaacttcagaaaatcaatgctagtagtcatttacattaaggcaaactgaatagtcagcagctatttgctcacttccatatgcatatgatgttgattttcccttttcttgctttgatatggttcttataagcttcttcattgtgtcttttattcagtcgaatcctgttttagaagcatttggaaatgcaaagactgtcaggaacaataattccaggtaacctttttttgaaaaagcttttcaatatcaccactttgggtgtttctgaactgtttatttgtgtactttatagtcgctttggtaagttcgtggagattcagtttgacgaaaagggaagaatatcaggagctgccataagaacttatttgttggaaagatcacgagtttgtcaagtctctgatcctgaaagaaactatcactgtttctacatgctttgtgctgctccacaagaagtaagttttgtagttcacttcggagtagtaacaccgaataacttaccatacatgtccagtatctgagcctcgtttggcatacaaactcacatcttgttatctgaaatgtttttttgtactatcaggatgtgaagaaattcaagctggaggaaccaaagaaatatcactatctcaatcagtctaaatgtctagagctggatagtataaatgatgcggaggaatatcatgccacaagacgggcaatggatgtcgtcgggatcagtacggaggagcaggtagttatcacagaactccatcagtcagattttagccaaagctgcaatattgccactgtaaacggattctatgctttgctgatatcttgtttcaggatgctattttcagcgtcgtggcagccattctccatatcgggaatatcgaatttgctaagggggaagagattgattcatcgatacccaaagatgataaatccttgtttcatctgaaaactgcagctgagcttctcag

SEQ ID NO: 140472 - DNA, 937 bp, Arabidopsis thaliana landsberg
aagtctctctaacttggagaggagatagaagacatctcatcatcaatctccggatccaatccaattctgcatcgactcttcagaggtatttccgatgaaccattattttccccttgtagaaattattctcctttctcaattgatgattgtccacttagctagattttgtgtaaagagatattttgtattatagattgcatctactgctattgtttcccgattgattgaagcaagtagacaagaaaaggattcggttttgtctggttctgaaatttccattggttccaaattgtcatccttgatgaagaagatactttgctatctattagaaaccagaatggctcgtgtattgcctgattctttgtttaccttttggtgattagagtgattttgcaattggagatgttagatgttctctgtttgttttgtggctactaacccaagaaggtttcttttcagttttattgggtcattggagatttttttcggttgaggatggctaacaatgaggagcatcctcctcgagggaatgaatgggaagtcgtctcgctcacttcatcagcttatgctgctgctcctggtccgtataacgttgaatcaagcgatgtgcgcaagtatgatgcttactatggagcggaaacttcacgtgatctgtacatgtctgaacactttgtattcccacctagtgagcatgagaatttacccattgatgaatctttattcgtggcggagcaaagaaaggatggccgagacttgatgctggaaggtcagggattgtctgatcagtttcattatgaagctggaaacaaccaacagagtatctatggtgaatctgcgcttggttcttctagacacatggaatcattcggaagcgaatcagccgtgtatgaacacggattagttgatgcagagggaaacttagatctccattctgatg

SEQ ID NO: 140473 - DNA, 751 bp, Arabidopsis thaliana landsberg
  unsure (1)..(751): unsure at all n locations
agagagcagagaggaaacgtttctcttgttcgttggaatctccgtccctttttgttgatcgacggtggtgaatcttagacatggcggctgcgaagctcgtcgctttgttacttcttgccttgcttttcaccaccagcgtcttcgccgatgctgatgagccggaggtttctgaggctgccggatccgatggctcttccaagatccacctggatcagcttaatgccaagatccgtgccctaggttagttaccgacttgcattgttcagactcttccatctgatcgaatgattgcgaagttttgatttttattcgactttgattcgtatttgaaatcggaatctgcagagttcgcatnnnnnnnnnnnnnnnnnnnnnnnattaccgtttcagctacttgatgtgtttctctgttcttatagcattgacttaaattagtagcttttggatcgatttcagatatgaatcgtattaacttgttcccaatgtcgaattgcttgctatggttttgtggaatttgtgaaatgccttatccgttctgattcgagcttgttatagcttgattatttggtgaatgcaaattttggggtttgagctttatgttttgtttttgttttgttttgaagaatctcaaatcgatgagaaaacccgggaagttcagggcaaagacgaggtagtagcagagaaggagaaactactcaaagaaagggaagacaagattgcttccttgcagactgaagtctcatcactacag

SEQ ID NO: 140474 - DNA, 4038 bp, Arabidopsis thaliana landsberg
ctgacttatggatttgtgaagaagcttgaaggcgaatcgaagagatgggtcggagaataaagaggaaaggtctgataaacacggaagctgcaagagaatttatcaatcatctagttgctgagaggcattcgctgttgttgctggttcctttggtcttagctttctgggcaattgaaagatgggtctttgctttctccaattgggttcctctcgttgtcgccgtctgggcttctcttcaggttagttcttttgtcaaaataacttctttagttttttattccattgatttctgatattcaaagtcctattgtgcctttgataattgattggttcttgctaaactacttgttaattttgtctggatccgtttaatctgatactttagaatcctccgataaagtttggaagctttatcctttttgtgtgtggacctaacatttatatacagaaacagtttgatctttccactcatgaggatagttatggtaaattgcttttcatgaaagagttacaatcttaggtaattgatatttaagagtcatatgttggggtgttttgttatgttaacttgataagttttcaagagccttgataaatgtgttcctatgcacaaatctgaacataaagttgagagatatataagttgaagtcttgctgtgtttttttgactatgttcatttgtttttatttgtagtatggaagttaccaaagggcactacttgcagaagatctaaccaagaagtggaggcaaaccgttttcaatgcgtcggtgagaatttatgttaccttttgttttggtttcgtttaacttttgttgtatcgctcgacgttataagaataccgcgttgtttcttttctccagacgataactccattggaacattgtcaatggctgaacaagttactgtctgaaatttggctaaactatatgaacaagaaactctctcttaggttttcttctatggtggaggtgagtcagattcattcttagtcatgctctttctacctaacacatttcgtgatccttgggtcttaaaaggcaatgaaccattaacttttgatcgttttatctaactcgcagaaacgattgaggcaacgaagatcaagattaatcgtaagcactaagcaatctctcccttttacatgagacctctttttaaagacattggacatagtgatgctaatttgtattgtattggttttcgataggaaaatatacaattgttggagttttctcttggctcatgccctcctttgctaggactacatggaacttgttggtcaaaatcaggggaacaggtttagttactatgacttttaaacttcaaatattttcagaaggttggattttgatgtttgacattttgttttccttttctttagaaaatcatgcgattggatttcaactgggacacaacggatctaagtattttgttgcaagccaagttatccatgccgtttaatcgaacagcacgaatcgttgtcaacagtctctgcatcaagggagatgtaagcaaaaattttgttttcctaaaagataaatgagttctctacataggatttcgtttatttactgaatcatcttgcagattctgatcagaccgattcttgaaggaagagcattgctttattcctttgtatcgaatcctgaagttagaatcggagttgctttcggtggtggcggtggccaatctctccccgctacagagcttcctggtgtctcctcttggctggttcgtttccatttcatttctcccaaactttaccgccaaaaatacttacagttacgaagggcaaaaccgtaattctctcccgtttcaggtaaagattctaacggaaactttgaacaagaagatggtagagccacgccggggatgtttctcgttacccgcaacagatcttcacaaaacagccatcgggggaattatctacgtaaccgttgtatctggtaacaatcttaaccgcagaattcttcggggaagcccctcgaaaagttctgagatcggagaaggtagcagcggaaatagcagcagcaaacctgttcaaacatttgtggaggtcgaactcgagcaactttctcgacgaaccgagatgaagtcaggaccgaatccagcttatcagtcgacatttaacatgatcttacacgacaatacagggacactcaagtttaacctctatgaaaataatcctgggagtgtcagatatgacagtctcgctagctgtgaagttaaggtaaattaatgaataataaagcagttaactagttgcttaactggctgttacatgttcttcatctttttctctgtacagatgaaatatgtaggtgatgattcaacgatgttttgggccgttggatctgataacggtgtgattgcaaaacacgctgagttctgtggtcaagaaatcgagatggttgttccgtttgaaggagttagctccggagaggtagataatacagtttcttgtaatgtattactctccaaatttcttactcttttatgattttgagtttttgaccacttttatgtgtgtgtttttggtcttttagttgactgtccggctacttctaaaagaatggcacttctctgatggctcacatagcttgaatagcgttaattcgagttcattacactccctcgacagctcgtctgccctcctctcgaaaaccggccggaaaattatcgtgacggttttggctggaaagaaccttgtttctaaagataagtccggaaaatgtgatgcctctgtcaagttacagtacggaaaagtaagtactctcttcatgattttgcttcaaaatggctattgcacgatcttaaaatcttaagaggttggcatgtgcttgaatggtttgtagattatacaaaaaagtaatatagtggtctcaacagagtgtgtgtggagccagtaatttgagttagtagagttagcggcagcagcttatttataggtagtatgctataaaaaatacatgcttggcacggacaacatcggtacagctacattgagtctttaaggaatcaataacagcgaaatgcatatatgggttccgcttgaagatgttaattctggagaaatagagcttttgatcgaagctttggatcccgagtacagcgaagtaagtgttttgaggaaaacaaacatcactctgtttctttgtttttcctcattgatgtttttttctggcttgatcgcaggcggattctagtaaaggcttgattgaattggttctcgttgaagcgcgggatcttgtggccgcagatattagaggaaccagtgatccttatgttagggttcaatatggagagaagaaacagaggacaaaggtattatagaaactgttttggaccaaaaagacttcataaagaaaacaaaacttacagatggcttttttctcgtgtgattgttgttttcaggtgatttataagacgttgcaaccaaaatggaaccagacaatggagtttccagatgatgggagctccttggagctacatgtgaaagactataacactctgcttccgacttcaagcatcggtaactgcgttgtggagtaccaagggttaaagccaaatgagactgccgataagtggataattctccaaggagtgaaacacggggaggtccatgtcagagtcacgaggaaagtcacggagattcagagacgcgccagcgcaggtcctggcacaccgtttaacaaagctctgttactgtccaaccagatgaagcaggtgatgataaagtttcagaatttgattgacgatggagatcttgaaggtcttgctgaagctttagaagagctggaaagtttggaggacgaacaagaacagtatttgctccagcttcagacagagcaatcgctgcttatcaacaagatcaaagaccttggtaaggagattcttaactcatccccagctcaagccccgtctcgagattcttaactcgtccccagttcaagccccgtctcattccccatctcgatcaggctcgggttcggggacaggatcctcctataaccggagattacccgcaccaatgtag

SEQ ID NO: 140475 - DNA, 3643 bp, Arabidopsis thaliana landsberg
cggcttggattcagtctggtaacattgaagaaaacattctatttggcagtccaatggagaaaacaaagtacaagaatgtgatacaagcatgttccctaaagaaagatatagagcttttctcacatggggaccaaactattatcggggagagaggtataaatctcagtggaggtcagaaacagcgtgtacaacttgcaagggcattatatcaagatgctgacatttatttactagacgacccttttagtgctcttgatgcacacactggctctgatttgtttagggtaagaagctattcaagtcatgttttcatattttgagtttgaacgtttacgtaacacggttattaatggctatacaggattatattctatctgcattggctgagaaaactgtggtttttgtaacgcatcaagttgagtttctccctgcagctgatctaatattggtaagaaactcttttttctcggttttactacacattaattctggctactgttggtccttttagaattgctaaagggtctcttttaggtgtttagcttaccagcctgtgatgaacttatctctattgttgcagaaaggtaaaattattgaaggagtttccaaactgtttccgttatgataagctctgaaatatttatttgtgttgtttcaaaggttctgaaggaaggcaggattattcaatcgggtaaatatgatgatctgctgcaagcaggtactgattttaaggccttagtgtctgcccaccatgaagcaatcgaggcaatggacatcccaagtccctcctcagaagactctgatgaaaatcctattcgcgatagtttggtcttgcataatccaaagtctgatgtttttgaaaatgacatcgagactttggcaaaggaagtacaagagggaggatctgcttcagatctaaaggcaatcaaagagaagaagaagaaagctaagcgttcccgcaaaaagcagcttgttcaagaagaggaacgagtaaagggaaaagtcagcatgaaggtgtacttgtcatacatgggtgctgcatataaaggggctctgattcctcttattatactcgcacaagctgctttccaatttcttcagattgctagtaattggtggatggcttgggcaaatcctcaaactgaaggtgacgaatctaaagtggatcctactctgcttctcatcgtttatacggctttagctttcgggagctctgtgttcatatttgttcgagctgctctggttgcaacttttggtcttgcagctgcacagaaactgttcttaaatatgctcagaagtgtgttccgagcgccaatgtcattctttgattccactcctgcaggaagaattttgaatcgggtatgtagatgtggtattataaccaaattccacagtttctgtgttacttttctgattttggggattttattgatgtgcaggtttctattgatcaaagtgttgtagatcttgacattccttttagactcggtgggtttgcttcaacaacaatacaactctgtggcattgtcgctgtaatgaccaatgttacctggcaagttttccttcttgttgttccggtagctgttgcttgcttttggatgcaggtaaatctattttcgatttttcctctgaataactgtgaaagattgttttcgtaatttagtttatattgaaataaaatgcagaaatattacatggcttcttcaagagaattggttcggatagttagtatccagaagtctccaataattcatctttttggagaatcaattgctggtgctgccacaataagaggatttggccaggaaaaaagatttatcaaaaggaatctttatcttctagattgttttgttcgacctttcttctgcagtatcgctgctatcgaatggctttgtttacgcatggaattactttccacacttgtatttgctttctgtatggttttactcgtcagttttccacatggaaccattgatccaagtaagtatctctagttactataacaaaaaaaaagcatcaacgagcagccggtttttctaatattgatgttcctgttgtaataggcatggcaggtcttgctgtgacatatggacttaacttgaatggacgtctatcacgatggatacttagcttttgtaagcttgaaaacaaaataatctcaatcgaaaggatttatcagtacagtcagattgtaggagaggccccagcaattatagaagatttccgcccgccttcctcgtggcctgcaacgggaacaattgagctagttgatgttaaggtactattcaaaaatactatttttattacctctctgcacttcctttccctgctttcttattgcttcgttcttttcgaaggttcgttatgctgagaatcttccaacagtactccatggggtgagctgtgtgtttccgggtggaaaaaagattgggattgttgggcgaacgggaagcggaaagtcgactttgattcaagctttgtttcgattgattgagccaactgctggaaaaattactattgacaacattgacatttctcaaattggtcttcatgatcttcgtagtcgccttgggattatacctcaagatcctacattatttgaaggaacaatccgagcaaatcttgacccacttgaagaacattcagatgataaaatctgggaggtatctataaatatgttatttgatactcttatcttgtttatgttttagacactaaactctgagatttggagtttgattctagagatttacccaactttgctgacaggcgcttgataaatcccagcttggagacgttgttagaggaaaagacctaaaacttgactctccaggtaactatttacatcaaaagtcctctctttttcccgggtctttttcgcttctttctactgatttttttggctcaaaaccgagtagtactggaaaatggagataactggagtgtagggcagagacagcttgtgtcacttggacgagcattactgaaacaagccaaaatacttgttcttgatgaagcaacagcatcggttgacacagcaacagacaatctgatccagaagataatcagaacagagtttgaagactgcacggtctgcaccattgctcaccggataccaactgttatagacagtgacctagttttggttctcagcgacggttagtctcatacaaatcaaaaacatggatctttcttcatattactcgtcgtcttttgggagaattcaatgtttatgtttatggtttgttgcaggtagagtagcagagtttgatactcctgcacggctattagaagacaaatcatcgatgttcttgaaattggtaacagaatactcctcaagatctactggaatccctgaattatgatcctccatgttaaaaattcagtttagggggtttcttttctcaagaggatataaaagaactgatatgtgacaaaagcttaaggtctaaagtaagagagagttttccacagggtttaagaaaagaaaaagcatgaaaggatgccaaaatctccgcgcttaaaaaactttgggtttaaatctcttctgtcgaacattgggagaaactttttttgtatggaacagttagtttctttggttttcatgtttatcaataaactgcaaaaacaaacaaagattaga

SEQ ID NO: 140476 - DNA, 692 bp, Arabidopsis thaliana landsberg
gcatcaatgcatggagtgtcatccagacatatagaactacgagatggaacagagtttagctttccaacgaacaaaaagaaaccttcatatctcgataggtatccaggtacgttaccaggtggagtgctttgcttagcttatcttcttgaaacgatatcataaaattaataaattgatatgctaaattgaaaaggcttgtttctgattccatacacgaagaaacttcgaattggatctcttagaatgttagggaaagtgttgtttcatattaagttgtggtttggtttgattccacagacttcaaaaagcagtaccttgactctttgcgtgaaaaggatgagcgtaaagctctgaacctgttgcgcgggtttatcttttatataacggtaaatgatctggtttatctggtcttttcaattgttctaaagagtagagatactttgttatatatgatgcaactgatgttgttgtttctcagaatgtggttcgtgatgatgcattcaaaccgtggctcgatcaagaatgtttgaagatcagatgtgtctgacaaaagagtatcagcacttggagttctgacagaagactactaattaggagatgtaagacctttgtttcatgaaataagtttggacaagatttgcatttgtgtaaaattagcctcaccattgtgtagtagttcatgactcaagact

SEQ ID NO: 140477 - DNA, 878 bp, Arabidopsis thaliana landsberg
caaacgcggatctccttctcttctctctctcgctaagaactatagaagatgggattgttctcccacaagatctccagagatgatctgaaaccaggcgatcacatctattcttggcgtaacgcttatatctactctcatcacggttccatctcttaacgtttgatcttagttatttctgggtttatcaacaaagatcacaaaatttgggttattccataacacgaatatttccctgttttgcaatttttcaggagtctacgtaggagatgagaaagtcattcatttcactcgtggaggtggtctagaattcggaacaggaacagttttggacaagatcatcgatatttcaataccaaatcatggaagaagagacaaaaagtgtattgattgtggagatcaatccaatctcggtggtgtaatctcttcttgtcttgattgttttctcgccggaggaaatctacatctcttcgaatacagtgcctctccgtctatctttctagccaaaagaggtggtacatgcacgatagcatcttcagatccttgtgatgaagtcatttctcgtgctaaatttctccttttgcaaaatggatttggtgagtacgatcttttagacaacaattgtgaagattttgcgatttattgcaaaactggtttgtttgtgttgtcggttgctaccaagtttggatgtagtggtcaagccaattctgtatctgcagctggtggtgttgttgctttgacgcttaaggttttaggtgtgaaaaagaagagtagtagtggtcatgaagatgactctgtggtttctgttgtaaaccagtttatttcttcgacagttaaatatgtagttcctggtattggtggtttggctttggctgaatatg

SEQ ID NO: 140478 - DNA, 1186 bp, Arabidopsis thaliana landsberg; identical to SEQ ID NO: 61066

SEQ ID NO: 140479 - DNA, 1711 bp, Arabidopsis thaliana landsberg
tttccttcctctgcgctgtcttcttaaaaaaaaacaaaatattttgttttttgttctattagtttcttttctttctccacaattcaaagctaatttagttctattcatttttccctctcttttgcaaagatttggtagaaggagaaaaataaaaagagttataatcaatcagatcttgttttaagtgcagactctttatttctcttcctcacctaagcttcagcatcgtaaatttaaaactaaaatcgcatcaaatcccggagataggaaagaaaataattgattgtttctagtgaagaacaaaaaaaaaaagtcgaagactttacatctgggttcatcgatttgagataagatcttctttatttgttatcttcaagtttctgcaatgggtatggcagcagaatcgcagtttcatgttttagctgttgatgatagtttatttgatcggaaacttattgagagattgcttcaaaagtcttcgtgtcaaggtataaatgtgtgttacaagaaaaaagtctcaatctttgtttgataatggtcgaagaaagatctaagcttttttctgtgtgtttggtatttatagtaacaactgttgattctggctcaaaggctttggagtttctgggtttaagacaaagtattgatagtaacgacccaaatgcgttttctaaggctcctgttaatcaccaggtttgctcttttatttttgtaaatcactttttcttctgtttttgttgttgttgttgttgttgttgttgttgctgttgttattgaagttgttgtgtttgattggttgctttcaacaggtagttgaagtgaatcttataattacagattattgtatgcctggcatgactggttatgatttgctcaagaaagtcaaggtgcttttttttcctaatttaagaggaaagttttcatattttcagtcaagaaagtgagagaatgtcaataggagatgagaatatatgctatttgatgtgtataaataaaatcttttgattaatctgggaattatcttgttctacaattttgcaggaatcatcagcttttagagatataccagtagttatcatgtcctcagagaacgttcctgcaagaatcagcaggtaaagaaagattgaacctatgaagtttgagtttgttcccctttagattgtggtttgaatctctcatttccccgggaattaattgaaaaatttcttgtgtcttgatcatgaacagatgtttagaagaaggagctgaagagtttttcttgaaaccagtaagattggctgatcttaacaagttgaaacctcatatgatgaaaacaaagttgaagaaccagaagctggaggagattgagacaacttcaaaagtcgaaaatggagtccccactgcagtagctgatccagagattaaagattcaacaaacattgaaattgaaatcttgcctctgcaacaagatctgctattagttcaacaagaggagcaaacattgagtatcaacaacaagaggaagtcagtggaagaagggatttcaactgatagagcacgtcctagattcgacggtatcgcaaccgctgtctgatctaccagctatgatacttcttttttcggtttctgatttagatttttgtagattttcttaggaatgcttctactggtacagtacatggtttcaggagggaatgcagagaggggaatatgatgatgatgttgtatgtgggga

SEQ ID NO: 140480 - DNA, 956 bp, Arabidopsis thaliana landsberg
aaatattttcccggaaaaattctctcattttctcgggaaaaatgttgtctctgcgtttacaaaattttcctctaaaaaagtagtgagagattccataagaccataaccagtagacaacaaattcttcatcattttgtgtctcttgtttgagatcccggtgaaatttagcggcgacgagaaaattttcaggtagagtgtgttaaaaaatgtctagagtgagttttgaagtgtcaggaggctatcactctgatgcagaagccggaaacagcggaccaatgagcggtggtcaattaccaccgatctataaaaaaccggggaactccagattcactgctgagaacagtcagagaacacgtacggcaccatacgtggacctcacggtagatgtacaagacgatacagtctctgtacatagcttgaaaatggaaggtggatctagcgttgaagagagtccggagcttactttgctgaaacgaaaccgtcttgagaagaaaacaacggtggtgaaacgtttggcgtctgtttctcacgagcttaagcgtttgacatctgtttctggtggtattggtagaagaaagccgcctcgaccggctaagttagaccggactaaatccgccgcgagtcaagcgttgaagggacttaagttcattagtaaaaccgactttgtcgccggttggtctgccgtggagaagcggtttaatcagattaccgcgactaccggtggactacttcttcggacaaagttcggtgaatgcataggtaaagactaatgttataatcttgaaaagtgattagaatgttttttttttgtactgattgaatgaaaatttggtattgtaggaatgacttcaaaggattttgctttggaactgtttgatgcattggctagaagaaggaatataacaggggaagtgattgatggacgatcaactaaaggagttttgggaacaaattaa

SEQ ID NO: 140481 - DNA, 939 bp, Arabidopsis thaliana landsberg
gttaatgaacttttgattcttaaccctctgattcttgacaagtttattgtttgtagcttttgcttgatctgtaagttattcttcatcctgtgatcagaatttctaactcttggattcttatgttttcttgcagctaattgcaagatctctgttccagcgtgggagaaggatttttgtgctgtgattggttcagttccatggtggaaagttgtagaggccaagcggtttatgcacatatacgatagagtggtccaatgggacgactcagctggtgaagacgcattcaagaacgctaaatctcgtttctgggcagagataaatggtttaacttgtgacttatctttgcctgatcctgatgtttacattgatgatgttgattgggatgctgaagttgacaatgagttgatacttgaccttgaacgtggtccagaccctttaacagaagaacaagagcatgttgtgatactcgatgctttggttttatctggacagtatggcgggcttggttggggaactcgttggggtgacgctgaagggattaacgaggagaatgttggaaagggtaaaccagaaaactcatggggtgatcagaaatatgatggatggaatgaagattcttgggggataaaggagaaaactgaaacttgggatcataacaacaacaacaccaacactgattcttgggatcataacaacaacttcaaagctgaaacttgggatcagaagaactgcaacaacaacagcttcaactacaagaaggttgagaattggaatggtagggatcaaggaagagagagcagagggtggagaaagagaggagaagggcgacatggaggagaacgagtggaggattgtcgatggaggaatgggagagggagaagcagaggcgggtttcagcaacattcggcgaatgcatggggttggactgaatccttctga

SEQ ID NO: 140482 - DNA, 826 bp, Arabidopsis thaliana landsberg
tgattcatgagtccaccaagaaaccagagtaccaacctgactggccaatgagactgtccatagctgttggagcagcagaaggtttagcatttctccaccaagtcgccatcattcacctcgacgtttcctctagcaacgtcttgctagactctggttacaaagccgtgcttggggaaatcgaaatatcgaaacttctagatccctctagaggcaccgcgagtattagctcagttgcaggctcttttggctacattccaccaggtataaagtcttaattttgttaccagtaactttatacaaaatccaacactttcccttggtttatttctgcagagtatgcatacacaatgcaagttacagctccggggaatgtttacagttatggagttgtgttgcttgagattctaacctcaagagcgccggtggaggaagagtttggtgaaggagtagatttggtgaaatgggtccatggagcttcagcgagaggagaaacaccggaacagatactcgatgccaagcttagcaccgtgtcttttgcttggaggagagagatgcttgcagctctgaaagttgcattgctttgcacagacatcacacctgcaaaaaggccaaagatgaagaaagtagttgaaatgcttcaagaggttaagcaaatcaaatgagcaaatgaatatatagtttcctcttgtgacattcatatacaaaagaaaacgcattcctatatatgcgagcttctcctctgtgtattatataggtttttatgataaaattgatccgcttatggttgatttacttatccaatgacacaaattataaattagatcat

SEQ ID NO: 140483 - DNA, 1425 bp, Arabidopsis thaliana landsberg
gcttctttttcatctatcgtaattgtgcttgtttcgcctagaatctctcggcccccaaatatctcactcgccgtcgcaggcttcgccgccggcaatttcttaccctatttcatcttccctctcctctgatatacccataaaaacacaaaaaaaacgaaaagataaaaactttggctttagttttgttgattttgtcattcgattcgatttctttttcttctttcaaattctagggttttcgatttggtttcagtctaataacgagaggggagggaagagtaactaaaaccccaaaaaaagtcaaaaaagtttcgaaaatccaaaaaaagataatggcgcaggttcaacttcagggtcagactccgaatggttcgaccgcggcggtcacttctgctccggcgacgtcaggtggagcaacggcgacccaagtttggtaacacgtcgctttatgtgggggatctcgatttcaatgtgacggactcgcagcttttcgatgcgtttggccaaatgggtactgtggtcaccgttcgtgtctgtagggatttggtcactcgccgatctcttggctatggatacgttaacttcaccaatccccaagacggttagtctccttaattttatttggacttcttcttacaatttccaatttttagggtttgctcgatagtaccagtactggatttgaatgaggtgtgttttaaatgttgatactttatggtgtttgtatgtatgcaatgtggttggtgctgttggaaagcttatcccctgcttaatcaatctttttaatgctacttctgtcttctaatggtactttatctcgtgtctttgttgcagctgcaagagcgatccaagaactgaattacatacctctttatggaaaacctattagggttatgtattctcatcgtgatcctagtgttcgccgaagtggcgctggcaacatttttatcaaggtacgcttgtctctatccttctgacatttgagttgctgtaagacgagatgattgttgcgaaaaaatttgtatcttgtattattcattgaaaagtctggcaaaagtagttgatttctttagttatgtacgtttttttattgggtgttctttctctctttctgatgctaaacctggctataatatgcagaatttggacgagtccatcgaccacaaagcactgcatgatactttttcatcgtttggaaacattgtgtcgtgcaaggtagctgtcgattcttcaggccagtcaaaaggctatgggtttgtgcaatacgccaatgaagaatctgcccagaaagctatagagaaactgaacggcatgttgctcaatgacaagcaagtgtatgtgggtcctttcctgaggagacaagaaagagactccactgctaacaaaacgaaattcaccaatgtgtatgtaagaatctcaggaaag

SEQ ID NO: 140484 - DNA, 1940 bp, Arabidopsis thaliana landsberg
atgttagaggaagatattggattggagaaatgtgatttggatgtgtataagagctttgttaaagagcatttggttaaggtatctttgtgttttcatggtgaagcaagataataattcttctggtatgtttcctttttgaaagcaccgttgtttcctttttgatgtcagtgtttagaagaagctgggaataatgatacttcggagaattctcaagaaactgagagggaagacgatgagattccaactaaagaagtagcagaacaatctgaagagcacgagccaatgaacgatgctggtgaagagaacacatcgaaaagggtagctaaagatgtgaagggcaagggaaataaagaaaccctgcagagggatataaagagagcccttcggaagagagcttcatatattaaggctaattcagagtaagttaataaatgaagttctgaagtttcctctttcatgacttgagaaataaacttttctgtttagtaatggcttgctttatttttcaggacaattacaatggcttcacttcgtcgacttctagaggaagatcttatattagagaaggagtctcttgatctatttaagaagttcattaacaaagaattggatgaagtgagtactttaagttggttatgtaatctcttgagtataagtgagattcaagttttttttgatacttttattggctaattaggtactacaacttcctgatgctcctaaatgttcgactgagtctattgtgaaaaatgtgaagaaaaaggtcaagagcacaccatctaagatggtaagcagtgaatacaattctgattcagatactgaggggaatgtggacaacgaggaggtagctgtaaagaagacaatggcccgaaaaggtaaattatcaaaaccagagatgatgggaaaacggaaaagtgaaaatggtaaacaagtatctggaagaaagaaagcaaaacatacagaaatagattcagagaatgacagtgattcaggggatagtgaaaaatctttgaaggtataacatcttggttgtgatttttatctcaatttccattaaaactaatgtgtttctgcttttatgttatacaacagcagactaaggagactgcaactgatgtgtatggaaagcgtgttgagcatctcaaatcagtcatcaaatcttgtgggatgaggtttctaccaaacttggtatatctttaagaagttctgtatttgttcatattccatgcattttattgttttattattttttcgtggcagtgttcctccaaacatttacaagaaagccaaacaggctcctcaagagaaacgtgaggctatgctaatagaagaacttgagcagatacttgccaaagaagggctgtcttcagatccttcagcgctaggtagtgtttcgctcagaattgatttcttttgcttggagagaaacttatatcttccatctttagagttcagtagtttttttctgaatgattcttaattcaacttgtgaatatgttaacccgaataagcatgctgatgtttgttttctatctggtaaatgtgtgaacatactatgaacaaactatctggctttactctgacagagatcaaagaagtaaaaaagaggaagaatatatcaagagagcttgagggtattgatacaaacaacattgtatggaactcaaggagaagatcctccacaagtttcgcgcctcctccaaaaccgaaagtaacagcggaaagcgagagcgagagtgatgaaccggaagattctgagaatgaagaggaaagtaatgaaaaagctgagagaggaagccaaagcgaagaagtagaagaagaatcaaacagcggtgagaatctatatctcacatctaaatgaccaacgggtcaaattttgaaactgatgatccttgactttctttgcagaagaggatgatggtggagaagaaagcaattga

SEQ ID NO: 140485 - DNA, 3041 bp, Arabidopsis thaliana landsberg
tgtttcaagtaaattaatttttgatcttttcattttatctctctctctttttcttctatccaaaacaccatttttgaggtatttttctctctccttcgaatcgaattttcaggtttctctttccgtttgtttgaagaagcttttaagtagaattcataaaatcttgcttagcttctgggtttgatttgtttgtggtaaagttttgattttttttttagtttgagagctggatttgtgattctttctctgggttggtgaagttttttacttgcttcgatcttatagatcagagcttctagcagcgtaaaaaatgcagacgaggtatatggagaggactaatagtatgagagagaagagaaaattggaggaagatgataatcagcagcagcagcaacagcctgagcgtaaaaggccagctcttgcaaggtaatttgtgttgatgcttgtaatttttctgattattgattatggcgttgttgaatctgtaattgatttgtagttgtatgaatgaaaaaagggttgttatgtatattgattgtctgtggatttgagaaagttgtgtatgtgttattgcagtgtaattgtggaagccttgaagatggatagtttacagaggctttgttcttctttggaaccgattcttcgccgagtggttagcttaataagaattgtttacatgtcttttggtgctttgtgttgtttctttggcttactgatttgttttgtgagcattgtcaaacaggtaagtgaagaggtggagcgggcattggcaaagcttggccctgcaagacttagtgaaaggtaacatatgactgttttaaaaagagataaaattaatggttggagtatttgtggttttcttctaatgcttgagttcacaggtcgtctccaaaacgaattgaaggtatcggtggaaggaatttgcagctacaattcaggtctagattgtctgttcctttgtttactggagggaagatagaaggggagcaaggtgctgcaatccatgttgtactgttggatatgacaactggacatgttttgacagtaggacctgaagcttctgcaaagcttgatgttgttgtgcttgatggtgattttaacactgaagatgatgatggttggagtggagaagagtttgagggtcatttggtgaaagaacgtcaagggaagaggcctctcttgactggtgatgtgcaggtcacgttgaaagaaggtgtgggaacattaggggaacttatctttacggacaactcaagttggattagatgcagaaaattcaggctgggtttaagggtctcttcgggttactgtgagggaatgcgtgtacgcgaggcaaaaacagaagcttttaccgtgaaggaccatcgtggagagtgtaagttcttgctttcctttgatattagtcattgatgtatctgaatctttgtttttcttttgcctaatgtttttttttcctacagtgtacaagaaacattacccacctgctttggatgatgaggtctggaggttggaaaagattggaaaggacggggctttccataagaaactcaataaagcaggaatctacaatgttaaagaattcctgcgtcttatggtcaaagactctcagaaactaaggactgtgagtgcacgatttaactatccagtatcttaccaagatgttcaaatattattattcatcatgatgactcttactctgattttcagattcttggaagtggcatgtcaaacaggatgtgggagacacttgcagagcattccaagacatgtgtattgagtgaaatgctttacgtctactatcccgaggactcagttggtgttgttttcaacaatatatacgagtttagtggtcttatatcaggaaagcagtattatcctgctgattctctttctgacaatcaaaaggtatgtttgttgggtcttcttgcttcttatagatacagatttgattcttctatcatatactcggaaaatagtaaaaggttatatatatgatgcagggttacgtcgatggactggtgaggaaagcctatgaaaactgggaacaggttattgagtatgacagcaagtcacttatgaacttcaatcaagttagcaaaacagatgatattgattactctatgccagtttcagttccaagccaaccatctacatcttattcagacgtaactgttgaaggtagaggttcagtccacaaatgtcgaatctttttaagttttggtgtgaaccgaatttaacagtcattcattgggtttttcagcatacaaccagagtccggcttcaagtttcccgggtcaatctcagctagctgatactacatacatgcactttggaaactcttcatttgcaccgcaagaccagctagttaacaacactcatgaatcacaaagcatgatcaatagcaacggtggtgtgagattggcactgggtccagcaacaggatctcaaaaccaagaacaacttgttcatcctcctcctgagattaactcttacaatgattggtcaaatacatgcaacagaggagttgatgggtttttatcagaggaagagattagggctagaagtaacgaaatgctcgagaacgacgatatgcagcaactgttgagactgtttagcatgaatggtggtgaccagcaaactccattgaacatgggagaagatagttttgggttccattcttttggtcagacgtcaatggctgattacgaagaagaccgttcaaactcgggcaaggctgttgtaggatggctaaagatcaaagcagccatgagatggggcttcttcatcagaaggaaagctgctcagagacgggctcagattgttcaacttgatgaagatgacgaataggttgaagaagaaggaagaaacagagaatctgagggttttcattgtgatgatgggtttttaacagtttcccagaaaaagaagtcttttgttttggtttcttcttctcgtggagctttgtatttcttgtacagggagctttcttcttctcttcttgtttgtttgtgcgtattatatgtaatcgctctacttgacta

SEQ ID NO: 140486 - DNA, 2517 bp, Arabidopsis thaliana landsberg
gttaaatattttctcctgagatttttttcttcaattccaattcagtgagcatttttattgtttctccgatctgaattccggcgatcaaattacgacagcgactaattcaacgttttaaattactctgtgtgagagaaatttgcggttagtttattagctacattacttccactttttttaatatatttttctgttacttttcccaccttttttagttatcttctggagatagatcccccccaaattgaagataactagggtttcgaatttcggaatcttattatccctctaattagattcgaaattcaatcgcaattctctcgctgttcataatctgggtttctgaatttcagctctggatatgcatttttctaatcctttatgcaaagcagtgtgtatcgtgataaagctagctcgatcgcaatgatcttagaaactcagaggaatgttgaattccctcatcggatcgttgataagcgtcccaggaaacgtccccgattgacttgggatgctgctccgcctcttcttcctcctcctcctccacccacggtaacgaattgtccacatattgtattggtatcaatggactgttcttttgttgttttcataagatactgcgaattgtgttaactagtaagaaattaagatttttatttgtgtgcttgagctaagtttcagctgatgtgtttttttctttcaggtatttcaacctccgttgtactatggtccggagtttgcgagtggtttagttcccaattttgtttacccaaacatgttctataatggcctccctcgtcagggctctcctccctggagaccagatgataaagacggccattatgtctttgttgttggggatactttgactccacgatgtgagtcttatgttacagagtctttcgacatcttatctgttacgtttcacagactttatcatggaggtttacattgacatgcctcttctattgtgcgtgcagatcaaattctcagcaaaatgggtgaaggttagtcatctcttgcgaaaatgtttatataatcattatgattagattattctgtttttcaaagtgtaggagaaatatgtttatttggtcgccagttatcttaatcaattggattgtattttggcaggtacatttggacaagtattggaatgctttgataataaaaacaaagaagtcgtggcaatcaaagttatacggtccataaacaagtatcgtgaagctgccatgatcgaaattgacgtgctgcagaggcttacaaggcatgatgtcggtggttctcggtaagaatattctttcctctactatttcttcgctagttttaattttattacatttggtataagcttttcaattccttgcagttgtgtgcaaatacggaattggtttgactatcgtaatcatatttgtattgtaagtgctgttacctttatttgacaagtttgaggggaaaatgcaatttcttcacgcccaaatgttatgtgagttaaaagaacttgcgcatgggtttaaatggtttcaacaggtatttgagaagcttggaccaagcttatatgattttctccgcaaaaacagctaccgttcatttcccattgatcttgttcgggagcttggcagacaacttttggagtctgttgcatgtgtgtggaatattcttgacccattcttctatatagtagtccattagtgccacaaatcatttttcttaactttttgatacaagacttaggcgttaatagttattacttaatgttctttcgataatgcaatttccatggaatccatattgctcagacagttatttctggagacttttgttgactagtgtactcagactttgctcattccattctgacagatatgcatgatttacggctgatccacacggatttgaagccggagaacattcttttggtatcgtctgaatatatcaaaatacctgattataaggtgagcaatcaatcatctccaagctggactcatttattttcatggctaatatgatatccatccatgaaggaacttgtataactcttgacccttgtcctgtgtgtggtcatgaaaatctagtttctatcccgacccacaaaagatgggtcatacttcaagaatctgcccaagtcaagtgccatcaagctcattgatttcggaagtacaacatttgaacatcaagaccataactacattgtatccacaagacattaccgcgcaccagaagttatcctaggtaaacgtttatgactctgacacatctacgtagatgattatttttttgtgtagtcatggtatttaagagtttggaacgtttattgcaggggttggatggaactatccatgtgatctgtggagtattggttgcatacttgttgaactttgttcggtgagtaactttatgtttgcatatcttccggtacaccaccctattcatctcaccatgtctgcatcaacgttttctctggattaaaccttgcagggagaggcgcttttccaaacgcatgagaacttggaacatttg

SEQ ID NO: 140487 - DNA, 2676 bp, Arabidopsis thaliana landsberg
attaactcgctcttattgttcatcccccagatcatcctgggactatacctcccgagggaggccaaggtggtgatcatgaggtacacctcctccctccttctctctctcttggaagtttatatcactcttctttctttgcgttgtgattggactatccatgacagattggaaaagatgtagctgcacagtatgtgcaaggttgggactggatttgtccaataaggttatttttttgttacaagatttagcttatcgtatagtttaaggcatttctctctgacaacattttttcttctagggaccggaatactggcatatgggatgaagtgtcaatatctgtcaccggggttcgtttagttggtttacattgttttccagagatgatatcaatcaatattctccacggaacgtttatagtcatcttcttactgaatgttataaattgcttttattgcagcctgtaagaataattgatccccatttggtctcaaccttctttgacgattacaagagagcttacttgcatgtgactgctgaactggaaaacaaaagcacatggaatactgaatgttctgtgaatattcaaataacagccgaactcgaaaacggtgtctgtttagtagagcatcttcagacagagaatgttttgatccctgctcaaggacgtattcagcacacatttaaaccagtgagtggtattgttatcgtatattacttgttacgacttaaattacttatggctctgaatctgtgatggtggtattgtttatcctagaaactaatgaaatattgaattaacagctctatttctataaacctgaattgtggtggcccaacgggatgggaaagcaaaacctttatgacatcttgatcactgttgttgtgaatgaattcggagaatctgattcgtggatgcagccatttggattccgaaagattgagagtgttattgatagtgttactggtggaaggtaaactttttatatttcagtttcagtttggcttgtgtagaatgattctgtggaggctctgcaacttgtttttgttaattttccaggctgttcaagatcaacggagagccgatcttcatccgtggtggcaattggatactatcagatggactgttacgtctctctaaagaacgttacagaaccgacataaaattccatgcagatatgaacatgaacatgatccgttgctggggcggtgggttggctgaaaggccagagttttatcacttttgtgatatctacggcttgttggtatgaatcttaagttattcgctatcacccttcttccaaaattcattgccatttctgaagtataccttatttattctcaggtgtggcaagagttttggatcactggcgatgttgatggaagaggtgttccagtatcaaatccgaatggaccactagaccatgaattattcctcttatgtgctcgtgatactgtcaaacttctgagaaaccatccaagcctggctctttgggtgggtggaaatgaacaagttccgccaaaagacataaatgaggctctaaagcaagaccttaggcttcattcttattttgaaacccaattgttatcagacaaagattcagatcctagtgtttatcttgacggtactagagtttatattcaaggatctatgtgggacggctttgcagatggaaaggggaacttcactgacggcccttatgagattcaataccctgaagatttttttaaagacacatattacaagtatgggttcaatccggaggtcggctcggttggaatgccagttgcagagacgataagagcgacaatgcctccagaaggttggacgattcctctgttcaaaaagggtttggacgggtttattaaagaagtgccaaatcgaatgtgggattatcacaagtacattccatattctaatcctggaaaagtgcatgaccagattctgatgtacggtactccagagaatctcgatgacttctgcttgaaggtaaatttgggatcttaaccgtttagcctttactggtgttgtcttaccctggtgcataaatgttacttttccccttaacttaataatgcaatgtctatgttcgattaataaaagaaacttgagatcataagtgatatattatgacttggtttttcctctgtaacaggctcaactggtaaactacattcagtacagagctctattcgagggttggagttcgcaaatgtggacgaagtacacgggtgtcttgatctggaagaaccaaaatccatggactggtctcagaggtcaattctacgatcatcttctcgaccaaacagccagtttctatggctgccgttccgctgcagagccagtccatgtacaattgaacctggcaagttactttgttgaggtcagtgtgattagttactctctctctctctgacaatcactgtgtacgaaggtctctcgaaattagattcttgatctaaataagaagtgtataaaagtctaataaattatgtaaataatacatggaatcatgtcctttgaccccccgcacaggttgtaaacacgacttctaaagagctgtcggatgtggcaatagaggcatcagtatgggacctagacgggaactgcccatactataaagtgtttaaaattgtctctgccccaccaaagaaagttgtgaaaatatcggaattcaa

SEQ ID NO: 140488 - DNA, 1795 bp, Arabidopsis thaliana landsberg
gttttgattttcgttctctattagtttctccccctcactctcatggcgatgaattttcaatttatgtgagattttattccacaatcggaataattttcctggcaatggcgacgaccaatgctccacctgagctagcttcaggaaacccttgctgcctcgctgtatgtattcgatttttatccatttatgttgtttagtgcttttcttcaaagaaatcttattctcgtcttcctttgattgtatttcagtggcaagggaagtacataggaatgaagaagaggcgagatgcttttaaagaaggagtaactcttctccagaaggctatagaaaatgttaatgctgaaaaatccaatctcgagagaagtaagttccttttactccttgtggcagagattagctcgctcccttttgatgtgttgtgtttctgttactgattaattttgtttatggtacatgatccattgttatgcctttgatttgatgtagctaattctccaattgatgattctttggcgattatgattgaattatggtatgctttaaaactgggctttgtggcttggttggaaagatgttgttgttactacagttccaaatcttaattttgatttttttactggtctatctgctgaatcctacagaatttggggagatggcgactgacggagatactaaggaaaatggttcaactgtgaaagcatctttggagaaagaaatatctcgtttgaagtttgagatagtgtctttgcaacaaaaactggagcggaaccttaaagaaaaaagtgaagaaacaaagcttcttcaggatcaagcttctagtcgagaaaaggagatcaatgaactgagggatctccttaagaaagaaacattaagggcagatagttctgaagaagagagggaacatgcttttaaggaactgaacaaggcaaaggctctgatagtaaaagatgaggaaatcgagcaagatattcctgaagtaaaaagggaaataagtctggttaaaaatcttcttgctagtgagagacagaagacagagtcagagaggaagaaagcagaatcagagaaaaataaagctgataagtatctttcggagttggaggtgttaagaaattcagctcataagactagttctgatttacttactttgacctccaatcttgagactgtaaaaaagcagcttgagcttgaaaaacagaagacactgaaagagaaaaaacgtgcagatatggagagtgcaaaagctagggaccagatgaagctggcagaagatgtgtctaagaagcttgaaatcgttagagcaagaaatgaagagctcaagaaagaaatggaatcgcagaccgctagtagccaagtgaagtttgctgaaaactcggaaaagctggaagagaagataaggctccttgagatgaataaaaaaacagccatggactggaaatctcgtactgatgatctgactcaacagttacaagaagcgcaattagtcgctgaaggtttgaagaaacaagtgcatgagctttcactttcccagaaatccatcaagactcactctatttctcctcagaaagtcagagacctggaaaaggctgaaatgaggcttttgaaaaaaaagatgaagtttgagagaaattgtgcaaaacactcccaaacagtggctaaatttgaaaagtttcgaagggaatttcagtgcgaagagctaggtcggttgaaactggagttcggtagtcttacgaatcgcatgaatctactggatgagtatttttcaacagacgttgaaggaacagctggccatggaaag

SEQ ID NO: 140489 - DNA, 930 bp, Arabidopsis thaliana landsberg
atggtgagcctgtcctcttattgatccccctatgattcattttctaaaaggttataaaactctaaaacaatgttgatgaatgtgtggatgcaggtaggaaatgggctgatggacgatttccatgacaggcttggtcttttccaatatatttggtcgttgggttttatatctgaccaaacatacagcttactgcaacttcaatgcggtttcgaatcgtttattcactcctccaaacagtgtaacaagattctggagatagcggacaaagaaataggtaacatagaccaatacagtgtcttcaccccagcttgtgttgccaatgcttcccagtcaaatatgttgctaaagaaaagacctgtaagtggccttaaaacttctcttttcaatgttacactctttagtgtcctaatttctctgtttattttacttagatgactagccgcgtgagcgaacagtatgatccttgtacggagaaacacactacagtttatttcaatcttccagaggttcaaaaagccctccatgtcccaccaggacttgcaccatcaaaatgggatacttgcaggtaaaattgccttgcaatatcttagaaacttggttttggaggaaatgagcctatttaagtattgtaacaattctgatccggacagctttggttatgcagtgatgtcgtgagtgaacactggaatgactctccttcctcggttctaaacatttaccacgagcttatagctgctgggcttcgtatctgggttttcaggtctctttctctaaatatatccactgaaagcactttaacgatatcttttcttcaagtgttttggcgttttggtggtaaaaacaaaaggttttgttctttggtaacagtggggacgcagatgcagttgtaccagtcacatcaacccggtacagtatcgatgcactgaacct

SEQ ID NO: 140490 - DNA, 1942 bp, Arabidopsis thaliana landsberg
ttagttatggcgagacggcaagtaggttcaacaagacgtgttggcgatggtggaagcttcccttttgcaggagctttacactcaaagtctcgatcttctccactactatctatttgccttgttcttgtggtatggtttgtgtatttcattgtcttccttgactgattcgattcctgggagatgaatggtatggttctaattgaaatctattgttgttttgtatgtttataatttctagggggcttgtcttctcattggttatgcttacagtggtccaggtaatgtatatgatagctctttttgcattatgtatagctctactagagatttttctcatcgctttcattttttctcgaacacaggtatatttaaaagtatcaaagaagttagcaaagttacaggtaatccttgtttctcattgttcagtacatgtgcttaagttaatacctttatccgcatcgatcaatttatcagcagtttaatccattcaaatgcttgacactcgggtttgatattttttttgtccaatttgttatgaattctcaggtgactattcttgcacagcagaagtccaaagagccattcctgtacttaagaaggcttatggagatggcatgcgcaaagtcttgcatgtgggccctgacacatgctcagtggtttccagtctattgaaagaagaagagactgaagcatggggtgttgaaccatatgatattgaggatgcagattctcactgcaagagttttgtgagcaaaggtcttgtacgtgttgctgatatcaagtttcctctgccctaccgggcaaaatccttctctcttgtgattgtgtcagatgctctggattatctctcacccaagtacctgaacaagaccgttcctgaactcgcaagggtggcttcagacggtgtggttctttttgcaggtaaactatcataaaacttgagaaaaagggttgctaataaatgtctttcaagttttggtttctaattcttgaacttcaactgctctaggtctccctggtcagcagagagctaaagttgctgaactctctaaattcggccgacccgtaagtttactatataccctgttctcctgaatcctgatgattaaatatgaatccaccttcatcgttagtgtttaatggcattagcttagtttatgtagttagtcattagcatctctttatgattaaaacactgtgtagactgtagagttaaacacatgcttaaatgacagttaccaatctttcacaaagtttttcaagatagagactacaagtacaagacttaatacttgcactcttatttttgttggcaggctaaaatgcgtagcgcatcgtggtggaaccgctttttcgtccagacaaacttagaagaaaacgatgcaccaagcaagaagttcgaacaggctgtttccaaaggattatacaaaccagcctgccaagtcttccacctcaagccattacattaaccagccaccaccaaagcctactggttccacaccaaagcatatttacacgtagagccgcacgcgaaaaaaaaaaatagcgtaatcgatatttctccttgtattttggaacaggtcagtttttatccttcaatgttgtatccgccaacacaatttttcctattcaattaaatcataattattatcaccaataatccccacatgaacacttgccatctttgaagcaatgaaaccgaaggttatctcttacaatgatctctctacctgcaaccgcagacataaacttgatagcattgtgacaatccccacatatcctcaaattcttaactacaactaattcttctccatctctagtcgacatcaacccaaaagccaccgctagcttctcgctgtgatgtcctaaccgcatttcttcgtccccttcgcctgcttcatcctcttttaccattgcccatttcttatccatcacataccca

SEQ ID NO: 140491 - DNA, 1376 bp, Arabidopsis thaliana landsberg
tcaaaagagtcgttttctttcctctccccactttttcagcgtttcttagatctctctctctctgcaaatattcaccattgtcttcttcttcttcaacgacgcttttggattttcttctctaaggtaagcgtcttacgacgatcgttgacgtaatcgcaatcatctcgccttttgttcttccgttttgaatccgtttctttcgattctatctgttgatttcttcgatctatgttgatttgatacgcgaatcgtgctttgattggtcgatcatgggagaagaaactatctccgttagattcatgattcatgtttatctactatctccgttagattcatgattcaactatgtttatgaagcttttagaatcttagaatcgattccttagggtttcgttgttcgtttctgttaaagattgcgttgattgattttgatctgtacctaaaagcatcacgaagaattaggtcatcgagtttgtggcatcaattttgattagttaggttaaggtcacgtttcttcttattggaatcaatttttgaacaattagggatctgatttgtagtcaccgatttgaactcttctttcgtttgttggattgtgtcacttagcaatgaagtcaggaagttctacattgaatccttacgcagcagcttatgtaccactctcgaaaagagaaggttctttggttgatacaaagcctgtcacacaacaacacatgcagcagcagcaccaccagcaacaaccttattatgggtatggagttcaaggaatgggaagttatcaaggaactcaaatgtcacctaagaagtcaccatctgagatggtatacaatcatcagctgaaggatgaggatttggagatggacatggatattgagtatctattagctacataccctggtctttcacaagagtctatcaatgatgtttacttggctaacacttgtgatcttgatgcaactatcgaaatgctgaatcaactcgaggtaattcattcttcagtcttcctgcattaagcatagtaatgacgtttggtgtttcttttctacagatttacagtactgaagctgaggaataccttccagacacactggacattggtgatgtacctgagatcatcacagagtcttcgaaacaaaagaatgatgggagtagtgcatcgtcatcttcgggtatccgcaacgctaacgtatcctcctcctgatttgatcagtccttaaaaaaatgtgaagtttttttcttcttaagtttcttttgcaaatggatgatatgaagttcatgatatattgttaggagatctctttctacattttccccactttgtctctgggaaaagagagtacaatgtatagtttttaagaaagatttcagtttgagaa

SEQ ID NO: 140492 - DNA, 909 bp, Arabidopsis thaliana landsberg
ccagaatcagttggataggaaaatggcggcgaagcaaatggaagagatacagaagaagctagggctgctaagttaccctagggcaaatgctccagctcagtctctcctcttcgccgggatggaacgttatgctcttctcgaatggctctttttcaagtaactctttcttcctctccttcttttatagcttattcgattctcttctaccagaaaaatgctgggaattctctgaattttgaatatcaatgtgaactctcaacattttgaatttctcgagctctgatcacaaaattcgatggggtttacttattgtttcttctctggctctgtctttgaaggttattaggtgataaatcacctttctcacagcaaaatctccaaggagatgctggagttcgtgatgaagaaactgttcgtattcaatgtaagtgtttctttgatcgtgttggcctttgaacattgcctagctattatcttagactatattagtttttgatgtgtaagtgacttctcggtttcagatttggcagagattgcaaagtttttggggattacaccaactgtagacattgaagccattcaagtaagtttgtttcaagtagccttactggatttatgcatttacctgtatttgctcaagttccataatttgtcaaagtgcaagcatgggttccacttttcaattttcttttgttttgcaaatctttcaaacttttagggacatggaacctatgaagatcggatggaaatgcttcgcaatattgttgatttagtggaggcgagcctcttctcagataatcaagaatggaggtagacatgtcacttgtatctgatatcttccaccagtttttatcattagtgtggcatttttgtagtctttcatcttccttattcccgtcgactttagta

SEQ ID NO: 140493 - DNA, 1101 bp, Arabidopsis thaliana landsberg
aaaaacatttgaaaccgggaatgcgtgtacttgatgttggctcgggtttgttttactttctcttcttgaattagttttgtacattcttcttcttgcttttgaatatgatgaattttgatagggaccgggtacttaactgcttgctttgcggttatggttggaaccgaagggcgtgctattggtgtggaacatattcctgaattggtggcttcttctgttaagaatattgaagcgagtgctgcttcgccatttctgaaagaagggtctcttgctgttcatgttggtggtgagcatcagttcaagtttttgagatttctttggtgtttctgtttttacattgctggtttcttgatggttttaaaatagatgggaggcaaggatgggctgagtttgctccgtatgatgctattcatgtcggagcagcagcaccggagatcccagaggcgttgattgatcagttgaagcccggtgggagactggtgatcccggttgggaacatattccaagatctgcaagtggtggataagaactcagatggttctgttagcatcaagaatgagacttcagttcgttatgttcctttgactagccgtgaagcccagctgagaggggactgatgaatatgctcgttgtacagatgaatgaatcaagtaagctcagtcgcctttctaaattagcatagttagtgtagaactcaaatcacaaggatctctgtgagtaaaattctcaaatgagtaaacttgttttggtacaactaaacatattaaaccatttatatataatgcctccatcaagtagtagatgatgcaatggcgtaaagagggaataaacggtgaatcaccataccggttgattcagcgacattggtttgattttctttagaatcctccggtaatttccaatcataccgatgcacaaagttagccaaagccacctcaatcaagaccactgcgaatgatattgctggacaaatccttctccctgctccaaatggaaccagctcaaaattgtgacctcggaaatcaacagacgaatctaaatgtctctctggtctaaacttctctgcgtctggcccccacgtcgcagcctctctcccgattg

SEQ ID NO: 140494 - DNA, 2440 bp, Arabidopsis thaliana landsberg; identical to SEQ ID NO: 6223

SEQ ID NO: 140495 - DNA, 2550 bp, Arabidopsis thaliana landsberg
gatcacgaaagtacaagttcatctcttgattctacatcctaccggaatgatcctcaagttcttgatgatgcagatgttggtgaatgtgaaattccttggaatgatctcgttattgcggagagaataggattaggtaatgtggcctgcagtttatttgtttacgtgtttgaaagatttaactagttagtatctattttcttttctattttggacggcagctaattattatctagtgggagcacaattttatagcatagccccttttttacgatctacagttgcttattacaagggatagctgtgcaataaactttaggtagcatatagcttttggagatcatatgtcctaatgcttatcttgttttggttagggtcctatggagaggtctatcatgctgactggcatggcacggttagtttttcagaaccttacatttgatttcattagagctattgtagcaacttgtatctgttattctcttccagaacttgctccgctttagttgcgttcacattttttagggcttcaattgtgtcaaggagcatgtatctgccggttatctggaacttcaaacattattaacctgtcaaatttgttaatgagtgcaaagagataaaatgcagcgcttaaatgcatgtttggtcattaaatattcaaagcagtgtttgtgttcttaaagtgaaacagttttaaaaagcacttttatatacgcttgtttcagtcactagccacaaaatgcattagtgccctccatggtattgtctcacattctctcatcaatattagctgttgtctttttagtttatttagtgatagattatttttggtgatttaaactagccttctgtgtctgcccgtgctgtttatcttcacagaagtggaaggtttcaagtttatatttctgcatttttgttatgattggatttaggaagttgctgtcaagaaatttttggaccaggacttctcaggtgctgctttagccgagttcagaagcgaagtaagccataagttcacttgcgtttatttactagtatacttagctacccatttatttttttggttgaacccaatggcttacgttgcagcttatttgcttgcctttgaattcccactctattaatatttccctatctgaaggtacggattatgcgaagattgcgtcatccaaatgttgtattcttccttggggctgttactcgtcctccaaatctttccatcgtcacagagtttctgcctaggtttgtcccatcttcttcttgtgaaagttaattgcatatgagatttttgagtcctaaaagattctaatgtttttttgctgttttattatagaggaagcttgtatcgaatccttcatcggcccaaatctcacattgacgagcggcgccggattaaaatggcccttgacgtggtagaaaaatagattcatatatcaacttccatgtcccccaggcttatttcttcagaatagtcactaaattccagactattgttactttcaggcaatggggatgaactgcttacacaccagtacaccgacaattgttcatcgtgatctcaaaacaccaaaccttttggttgataacaactggaatgttaaggtaggaagacttttttcttaagttgtccaacgaatatacttgtttactctaatggtaaataaatagattttgtttttatcttactaaccttgtaggtcggtgattttgggttgtctcgcttaaagcacaatacttttttatcctccaaatcaactgctggaacggtgagaacgcagaacccttaaatctctttactttttgatagaaatgcaactttcctactggcatgcttgttataatctggggtacggcttcttctctaatcacatgcattgttaattttaccagcctgaatggatggctccagaagttctacgcaatgagccctcaaatgaaaagtgagtagcttattagaagctcagttctgttcttggttctactagaaaatgttaaggcagatactactctttactttccctttttttccaaggagattaaaaaaaatgttggctgtttttcgtcaggtgtgatgtgtacagtttcggggtaatactttgggaactagcaacattgagattaccatggagaggaatgaacccaatgcaagtagttggagcagttgggttccagaatcggcggcttgagatccccaaggaacttgatcctgtggtgggaaggatcatcctggaatgttggcaaacgtaagtgtcatgaaacaaactcaaaacacttttagaatctgcgctggttgaaaatatgtttggttttatgtttgggcagggatccgaatctgcggccgtcatttgctcagctgacggaagtgctgaagcctttgaaccggcttgtacttcctacaccacaatagatgtcatctgtgtgaatatgtgaaagaaaaattggttaatgtatactatttgacctctggtgctgcgcagagttattatacataagccagcctagaattgaggaatgtaaatgaaatcaatgtacactatactacgttttgatgta

SEQ ID NO: 140496 - DNA, 2880 bp, Arabidopsis thaliana landsberg
atggctccacttcacgaatctctgtcatcaatcaacgatgtaatcgaatccaaacctctttttgttccaataactaagccaatcttgcagccaaactcatttaacctatccgaagggtctctctgtgccaaagactctactccaatcctctttgatgttcctcaaaacgtaactttcacaccattctcatctcactccatatccactgatgctcctctcccaatcctcctccgagttcaagccaacgctcacaaaggagggtttctcggattcaccaaagaatcaccctctgatcgtctcacaaactccttgggaagattcgaagacagagagtttctcagtcttttccggttcaaaatgtggtggtcgacggcttggatcgggaaatcagggtcggatcttcaagccgagactcagtgggtgatgctaaagattcctgagatcgattcctacgtggccatcataccaaccattgaaggagcttttagggcttcacttactcctggtgagaaaggtaatgtcttgatttgtgcagagagtggctcaactaaagtaaaagagtcatctttcaaatccattgcctacattcacatttgtgacaacccctataacctcatgaaagaggcttttagtgcacttcgtgttcatatgaacactttcaagcttctagaagagaagaagcttccgaaaatcgtcgataagtttggatggtgcacttgggatgcttgctacttgaccgttgatcctgcaaccatttggactggagttaaggagtttgaagatggtggggtgtgtccgaagtttgtcatcattgatgatggatggcaaagtattaactttgatggtgatgagctagacaaagacgctgagaatcttgttcttggtggggagcaaatgactgcgaggcttaccagcttcaaggagtgtaagaagtttagaaactataaaggtggatcctttataacatctgatgcatctcacttcaatcctctcaagccgaagatgcttatctacaaagcgaccgagcgaattcaggcgattatattgagacggaagttggttaaggagtctggggaacaagatctgaccgaacttgatgaaaagatcaagattttgagtgaagaactcaatgcaatgtttgatgaggttgagaaagaagagtctttgggttctgatgatgtttctggctcaggtatggcggctttcacaaaggatttgaggttaaggtttaagagtttagatgatatatatgtgtggcatgctctttgtggtgcttggaatggtgttaggcctgaaaccatgatggatttgaaggccaaggttgctccttttgagctttcacctagtctaggcgctacgatggctgatctcgcagtcgacaaggttgtagaagctgggattggtcttgttcatccttctaaagctcatgaattctacgactcgatgcactcttatcttgctactgttggtgttacaggagccaagattgatgttttccaagtaagttgttacattactcttactctgtcttagatactctggcttttctttacatataggagttgttgttaatgttgtgtgtctgtgtttggttttagaccttggagtcactagcagaagaacatggaggacgagtggagcttgctaaagcttactacgatggtctgaccgaatccatgatcaagaattttaatggaactgatgtcattgcgagtatgcaacagtgcaatgagttcttcttccttgccacaaagcaaatctctattggcagagttggtaatatatataaagctaaagccgtttcttttgattccactagtgtttgagcattaacaaaagttttgaattttgctcaggtgatgatttttggtggcaagacccatatggtgacccacaaggagtatattggctacaaggagttcacatgattcactgttcttacaacagtatttggatgggtcaaatgattcaaccagattgggacatgttccaatcagaccatgtctgtgccgagtaccacgccgcatctcgagccatttgcggtgggcctgtctatctcagtgaccatcttggcaaagcctcacataactttgatctcatcaagaaacttgctttctttgatggtaccatcccaaggtgtgtccactatgctcttcccactagagattcgctcttcaagaaccctttgtttgacaaagagtcaatcctcaagatcttcaacttcaacaaggtaatcagttttaaatcaaattcatcgtttagagatcagaactttattaaaacccatatgatttgttgcagtttggaggagtgattggaacatttaactgtcaaggtgctgggtggagcccagaggagcataggttcaaaggatacaaagaatgttacacgacagtttcgggaacagttcatgtctcggacattgaatgggatcagaatccagaagctgcaggctctcaggtgacctacactggagattacttggtttacaagcaacaatctgaagaaatccttttcatgaactcgaaatcagaagcgatgaagataacccttgagccatccgcgtttgacctgttgagtttcgtgccagtcacggaacttgtaagttcaggggttagattcgcacctctagggttgatcaacatgttcaactgcgtcggaacagtccaagacatgaaggttactggtgataacagcataagagtggacgtgaaaggcgaaggaagattcatggcgtattcgagttcagctccggtgaagtgttacttgaacgacaaggaagctgagtttaagtgggaagaagaaactggtaaactcagtttctttgttccttgggttgaagaatctggtggcatctctcatctgtctttcaccttttaa

SEQ ID NO: 140497 - DNA, 3630 bp, Arabidopsis thaliana landsberg
  unsure (1)..(3630): unsure at all n locations
gttatgggagatagatcaggaaacataagatggtgggatgtaacaacaggacagtcatctgcatttaatagtcacagagatggaatacggaggatcaaattttctcctgttgttgctggagatcgcagcagagggcgtgtagctgtgctatttaatgacaatacattctctgtatttgatctggtgagtcttaagaggattcagtattttccttcaatttgtgcacatgtcttgtggtttcaaaggtggtgtactaatattgtgtagtgtgaagagaaaacaagaacaggactggttttattgatacttgtttgaaattgtctgtcaactcaaaatgactctttctgacacttgcttttgaaaattgctgcaggattcaccagatccgttagcccaatcacttctccagcctcaaattcctggcacccttgtactggaacttgattggctgcctctgagaactgataaaaatgatccgcttgttctatgcattgccggggctgatagcaccttccggctcgttgaggttactgtgtatgtgtaaaactttattcgtatgcagagtcccatgaatgctttcagattaggattagtttttttcagcatgttgtgtctccccgtataacttaactgtatagaatagacatgtctaggtttatctattttgctcaccagaggactgtgcctaaaacaaggccgtgtagatggattagtggggttgacaactaggcgccctttcccccaggttaggacttaggcatgcctaggttagggcatataaatactgttttttttctgagggtccattattattgatccaagtttgaattggctacaatcatttacttctgcgatctttaatttccaactttttcttccggattttgcagaaatgaaaagaaagctggctttgtgccccagtctaaatcagtaaaggagaggtttcgtcctatgcctatgtattcccctatcttacttcctgtgccacatgcgctggtaactttctttgctttggagtacttcttgattctgaagtcaatcttggtttagttctgaattcatgtaatccagaagatactaattattgcattatctgtatatccgtataatctcccaagacaggttctgagaaatgagattccgattactcttgacaatgtgtctgattatttttatacatgcaggcactgcggatgattttacagttaggagtgaaaccatcttggtttaatacgtctagcacaactttggagaagaggcctcatttaatccgtgggatggcttcatcctctaaggatctacggagttacatgattcagttaccgcctttaggggaccctgtagtgcccgaaatgctgttgaagatactagaaccttatcggaaagaaggttgatctcatttgtcaccacagactagcctctctctgttaagatacctgtttaagtattctattttcttaccttctctaatttcttgtatcctaggttgcttgctggacgatgaaagagcaaaactttacgctgatgtggtcaagaaaggttatgctgcaagatttgcttttgcagcttctgtttttggtgaaacctcagaagcacttttctggttgcaacttcctcaagccattcgccatctgatgaacaagctaacgagaaggtctccgcagaaaatctcttcccctactttagactcaggagctgatgaagtagctatgccgagtaaaataccatctactggattatcgtcacctgaagccaggaagatagactctatggtcagtttcaaaataattttttttttcctnnnnnnnnnnnnnnnnnnnnnnnnnnnnnnnnnnnnnnnnntgcagagaagagatttatttattttggaactggagctccttcgctttgtaattttctgctagcttaatggagctttcttatttgaagtcggtttggattagaaatttccatttgcttagtgtttgttggtgagcttatattctacattttctcgaacagtgtgatggttcacttagattgatggcttttgagcgagaagaattacggacgcgtgccaatgaacgtcttccttggcatgaaaaattagacggagaagattgcattcagaaacaagtacacgagttagtatttcaccattagcttgtctttactgtttattgtcctttcaatttattacttgaaattacggttttgttttagtagtagctcctgtgtaaaatggaaactatatattttagaagcatcttaagctgagagaaaaagtagttgtgttgatcttgtatgggtaacctctttgaccaggctgatatcagttggaaatttggaagctgctgttagtttgctgctttcttcagctccagattctccatacttctatccaaatgctctccgagctgttgcactcgcttctgctgtgtctaaatctcttctcgaccttgcactaaaggtatctgtctttgctatattggataatctttcgtgtccttgtaaaaatatcattccatcacatttgttccacacgtaggttgttgcagccaacatggtaaggaccgacaattcactcactggtactcatcttttatgtgccgttggtaggcaccaagaagcttgttcacaggttagctttctttgtttccttggtcatactacatattgcatattcttcggaactatgcttccactgaaattgtcatttcattagttattcgagaatattcttagcttggtttaataataggcaacgttttagacacagaatattttatactttttaatatgcagctccaagattctggacgatggaccgatgctgctaccttggccgcaacacatttagaaggatcggattatgccaggtcttttcttctacggtttacttcaggatctaattattatttcctattattggttactagtcgttgtaactactcctatctctctatctactcagggtattgcaaaggtgggctgatcatgttctccatgcggagcacaacgtctggcggtactttatcatcatgctcacattcaatacagtttaacttagaaaatttaaatgtgacataaattcctcaaacagttccgatgatgagaaaagaatttcattttattaatgcagggcccttattttatatgtggctgctggttccctgcaagaggcgcttgcagctctcagagaggtgcaacagcctgatacagtagccatgtttgtcctcgcgtgtcaggagattcattcagaaatcataaccgagctatcaacccaagacgaggagtctgaatctgcttctggtgatggcacagtaccgctgcccgatctgcctggtcttgaatcagggaaggaagaagtgacagcggtttgtgaatactttcaacagtaccagagaaagctagtgcatttgtgcatggactctcaaccctacaccgactgatgaggaaactatactaccaaactctttcgttggctatgcaaaattacgcacatgaaatcatctttgaagaacaacaacaaaaacaagtttttgcatttaaatattactgtatttgtgatatagataatgtttctgcatgttgtaccctaaacccttcttctgtgtaaacttgatttaagaagacgagataattttctct

SEQ ID NO: 140498 - DNA, 743 bp, Arabidopsis thaliana landsberg
accctacgagcttttgaaaaagattaaggtttctgaattttcccgccataaaaacaaattctgttacttttttttttttgtcaattcttgattttctaaaaaaacaggaatcgacaagttttaaggaagttcctgttgtaattatgtcgtcggagaatgtaatgactcgtatcgacaggtcaaatctctcgccggaatctttttttttaattccgattttggtgatcggaaatttaatcaataaatctgttgtagatgtcttgaagaaggtgcggaggattttttactaaaaccggtgaaactcgccgacgtgaaacgtctgaggagttacttgacgagagacgttaaagtcgccgccgaaggaaacaaacggaagctgaccactccaccgccgccgcctccgctctcatccacatcctcgatggaatcttcggactctacggtggaatcgcctctgtctatggttgacgatgaagattcgttgacaatgtcaccggagtctgcaacttcgcttgtggattcgtcgatgaggagtcccggattagcttagagagatccgtgtgataacgatctccgttaactttttacttttgacggttttattgactgcaacgttgacttgaacgccgtcagtttatacttatagatctctctctctctttttatatcgttgcacgtggggtctctttgctcacgaaggaacttttataaaaacaagtattgtatttatttaattacgtata

SEQ ID NO: 140499 - DNA, 2941 bp, Arabidopsis thaliana landsberg
  unsure (1)..(2941): unsure at all n locations
agctaaaggtctcaatctctcagtcaaaaacaaaaggtctctcctttattaaactatctatcactaactagaagaagagattagaggaggaggaagaagatgttgtttcaggtgggaggtgaaggcacacgccccaccttctttgagatggctgctgctcagcaacttcctgctagccttcgcgccgctctcacctattccctcggcgtataatgcccttctctacctacgtctcttttcgattttgaaatttggtacttatctgtatgattcttatatttgtttgctgtttcgtgattttttaggtttttgctttgagacgatcgtttctccataagattttagactatgaggatgaattctttgctgctctgatgcttattcttgaaggacacagcttacgaaccacaggtagcttctggattctgttttaggttttgtgtgagagtgtactggaacttttttgcttataacagttagaggtttgtgaattgtttcagatggttcctttgctgaatcattgtatggtttaaggaggaaatcagcgagattgagattgaggaaagacagtgccaggaaggattctagcgaagaagttcaacattctggtttagagaagcgtcagagaatcctttctgttgtgtttctggtactgactctttcctaaatgctataactttgtaaatgcgtatatgttgaaagcataaagcttatgcctttaagcttggttactgcctttttctaggttgtgttaccgtatttcaagtcaaaattgcatgctatatataataaagaaagagaggctaggctccgggaaagtttatgggatgcagaggatcaaggatttgatgaagctgacttcttcacaggggatgattcaattgtttcaagagagcctagtgggaatgaagagctttctgttcgagtacaattagctaccaaaattaaaaagtttatagctgtctgctatccttggatacatgcatcaagtgaaggtaattgtggatttatgtgagcatcgacatttcgactgcatagtagctgatgattctttaacataattacgagcacttcttagtttacactgattagcttcgtgcgtagacttctatctctgagtttcattggcatggagaattttatttgatctgtatcatttataatgagcttatatgggatcctctgtgtaggattatcgttcacttaccagctcttatatctgctggacgctactggattttattctcttgggctacaagctcttgggattcaagtatgtagagctacagggcaagaactggtattaacttcctcctttctggttgaaatttcgtgtcaccattatcttactatgcaccccatagaattagggcgctttggctttgttggatggtattatttaaaattctacatacatcttgctgcaagatgttataccatcattgactgacccataaaaacctttcaaagtggtaaatttacatgtgttatgtcttaacacactttttttcttcgtctttaccttttttgatgccaagatagatggatacatcctcaaggatttcaaagattcggaatcatgagcgtgagagacttcgtggtcctccatggttaaaagtatgatttcacttttcttaaacttcatgtaacctaaggaatgagataggctgattcctactactgcttacactttagtgatccaacgtctgacagtattgttttgaatattgaattagacggtgcaagcggcacttcttagctgctcatatgctgtgcttgactatgcccaaaccggtctaattgcagcagtttttatcttcaaagtaagtatccataaatgtcccagtttatgttacttctcttatttcactgtcttaaaagcttccagcagaagtaggttcctttaggaaatgaaggtcctaagcttaaattacattagattagattttgtatgctacagccaccgctaaatccataaagcttattgctatacttatggcgtttttgactctcggtagatttttcatcgcataatcatttagttgaacctaaacatctagctcattttcgtgtgtttttggttttgtagatgatggaatggtggtatcaatccgctgaagagagattatcagctccaacagtgtaccctccacctccacctcctccagccccaaaggtaatcaatcaggtagcattatctgaaacttatgtaaacatcactcagtcgactttgtcaaagtttttgtttttctgtaacagatggccaaagaaggaatccctctacctccagacagatccctctgtgctttatgcttgcaaaaacgtgcaaatccatcagttgtcactgtctctggatttgttttctgctattcttgcgtatttaagtatgtttcaaaggtgagttctccaaatcattactctctattcccaaaccccaaccttggtattagcttatatccgtcttctatggtaatcacacagtacaagcgatgtccggtgacattgattccannnnnnnnnnnnnnnnnnnggaggttgtttcaggacacttaggaccagtctatttaatggttttaagccaacagtgagagttccatcatcgttctcccatgcaagttagagtctgaaccagaagagctaaaagactgccaagtgagacactaataccccaattgattttttatatatatatggataagctttcatttagagctcaccaagtctgggatcaagtgcttcttggattgaaagaaagctgtgttaatcctaatcaaagctgattctgattaaaacagagaaggcagacaaatggttacttttttctttcttagtttcagcttcgaaattgttgtctattgcacaatgggggatgatattattgttcaggatggaaaaataaaatttatatactgatcaaatttataaagaaaaggatggaaga

SEQ ID NO: 140500 - DNA, 439 bp, Arabidopsis thaliana landsberg
tggagtgaagggaaaacaaaacagagaaaaagataagagatatatggatacacaaaggttgccgaagaaagaagaagaagaagaagaagatcatctactttcttcaaccttcgagtccatcaatggtcactctcgagaccaacacaatcattctatagatgatttcgagagcattttcgacatcaccattgacaatttaagctgctctaacgaactcacgtgggatttctgggaagaagacgaacatgaagatgtaggggaagaagaaaaaagatcgagtactgatcaagaaggctcaagttttgggttttgggagaataagccgacggattatgaagacaaagacttgggtctgaagctgaatctgaaccatcaagaagttatcgatgcttggtctgatcaccagacacctctgtggacagatacttcaactctggac

SEQ ID NO: 140501 - DNA, 2263 bp, Arabidopsis thaliana landsberg
cgcttcttcttctgtgggttgtaaaaggcattcgctttcgagtgttggttgtcgatttcgatgccccaatctgggacctgggtactgttcccaagctccacctggattcttattgatgtgaagctcgtataacttgtgaatcgatgcggcctttttaatttcgcttgggatttcttaggtatttattctctgtatccggatctctatctataatcggatcttgtacctattgggttagtactcttgatctgaatgtaataagaagcgtgttttttttttttaataatttggaggagcttgtgttttagttcgttgagatctcgttcgttccgaatgtgggtttattagggttcttgaaaaagtctgcaactttgaattaggtgcattaccaagaaatatatagagactgcttctagttcgttattagttagaattcagagccatgtccttcaagagtctcattcaggacatgagaggagagcttgggagtatatccagaaagggattcgatgtcagattcgggtatggtagatccaggtctcaacgtgttgttcaggatacttctgttcctgttgatgctttcaagcagagctgctgggctagtatgcctccggagctcctgagagatgttcttatgaggattgagcaatccgaagacacttggccgtctaggaaaaatgttgtttcttgcgctggtgtctgcaggaactggcgagaaatcgtcaaagagatcgtcagagttcctgagctttctagcaaactcacttttcctatctccctcaaacaggttgagtatcccatcacattctctctttactttataaatgacttgtgtgcttatccaggctaatcgttcttccctacttccttttagccgggtcctagaggatcacttgttcaatgctatattatgagaaaccgcagcaatcaaacctactatctatacctcgggttaaaccaaggtgaaactaacagatgcttcttcttttctctttgcatacctaatctctttctgaataacactcaaaggtttactttttctggtccagcagcagcttcaaatgatgatggaaagttccttcttgctgccaagaggtttcggaggccaacttgcactgactacatcatctccttaaactgcgatgatgtctctcgaggaagcaatacctatatcggaaagcttaggtacttagctacagattgaccccatggttttttcatatatttgccataacctttctcttatcttaactttctttcagatctaactttctggggaccaagttcactgtctatgacgctcagccgacgaatcctggaactcaggttaccagaacccgttcaagcagacttctcagtttgaaacaagtgagcccgagaattccatctggcaactatcctgtagcacatatctcatatgagcttaacgtcttgggttccaggtgatttatctccttgcttacagatacattgtgagataaaacggtagttgcttaatatggcttttgctaattgtgaacattgtcgtatcataccagaggaccgaggaggatgcagtgtgtcatggatgccatccctgcatcagctgtagaacctggaggaacagctccaactcagacggaacttgtccatagcaatcttgatagtttcccctcattctccttcttcaggtcgaaatcaattcgtgcagagagtctcccttctggtccatcatctgctgctcagaaggaaggactgcttgtcctgaaaaacaaagcgcccagatggcacgaacagctccagtgctggtgcctcaacttcaatgggagagtcacagttgcttccgtcaaaaactttcagctggtagctgctcctgagaatggacctgcaggacctgagcacgaaaacgtgattctccagtttggaaaagtcggaaaagatgtgttcacaatggattatcagtaccctatctctgccttccaggccttcaccatttgcctcagcagtttcgacaccaagatagcatgtgaatgattaattccatcaaaccctgttactccgtgtttatttagttgtatcatgttgaaagagaagactggtttggcctcgtcttagaagtgtgtgtacatagtttcaaaagtcttggcaagtccatacaagagaagagtcaagaatcgaagacagtagattgtgtttgttgttgttgttgttgcattgtgttgctagtgattgtagttccagactatgatttcatttctctgataattaatttgatcgttttttg

SEQ ID NO: 140502 - DNA, 4370 bp, Arabidopsis thaliana landsberg
aggaatatgtccaaatccttgcagaatgccacagactatactgtgaacaacggctctcgcttgtgagttcattttctggaatacaatttggtttagtttctatctgcaagttactagaatcgcctgtttattactcatttcacattatcaggtcaaaggcatagtgcaccaacgagtatctgatttcgccaagaaagaggcactgccatctttaactagatcgggttgtgcatatctgatgcaggtatatgaaggaacataaaggataatatgttactttactcatgagggttaataggagctataccagtttagtagaaaaggacattccttccatcataagtgatagaaacatataggaaaatgaggatattaatatagttgttaatctgtgagatttcaaaggtaagatgaaggtctgtttgagagagacaatggctggattatcagctttagcaactgaggataacggatttggttttgcagaacatgaaatttctgcaccacatgtattaaccttcattatgaatttcaggtttgtcatatggagcatcaactgtttactcatttctttccagcatcgtcagaagaagtttcgagtctggcacctttagtggatcctttgtaagcttttctctgccgtgctgtatatgttctttgaatctgattatgaattcttaaaagtttagaggtttagagaaatgagtaagcataagtgatgttttgaatttggagcatatatgaacttttatggctagtatcttccgattttttttccgtttgttattatcttatgatgaactattgttgctgtagtcggtgaatccactacactgtagtcaattttctttgaatctgaataatacttcttaaaagtgtgtgattcagaaatatgagtaagtgtaactgatccagattgttttcggtagatatatcttatgcggtgcatccaattgatcacatttgcttgttcctgaacaggtctacgtacttgtatgacattttacgcccaaaattaattcacgaagcaaatattgatcttctatgtgagctcgttcatatccttaaagttgaagtcctgggagaccagtcagctagacagagtgaacccctggccggactgaggcctacattacaaagaattttggccgatgtaaatgagagattgactttccgtgccagaacatatattagagatgaggtaccgtatttaacttaccagcaaatactggaatagtttcccacaagtcctttaccttggcctttacttccatatgtgtggccttgtcatctgctattatgtagaaactgtgaactttgtatgttgtcaccagtaagacgagtcaccctactattaatatgatgaaattgggttataactgtgatactgcacgactttttagtggagagatttgttagtttcggctatgtcaccctgtttagtcttaaaggactttgctttccttgagttgctctgtttgaatctccttctcacttctgcagattgcaaattataccccctctgatgaagatctggattatcctgcaaagctggaaggatctcctaatacaacatctgaaactgatctcagggtagaatgacattctcaaattagttctatgggtttagtaatctttagctgtatacttatattctaaggtgcaggatgatgaaaacgctgatgtgtttaagacttggtatccacctcttgaaaagactctctcttgtctatctaaattatatcgttgcttggagcaggccgtcttcactggattagcacaggcaagactatcagtaactttattgcttccattctgtcaaaagataccaattcattttaagaaaatttgtgtaacaaaacttcttttctgctccacaggaagctgtagaagtttgctcactgtcaattcaagtaagcaagctagaaaaccagattttcctcaccttgatatttgtttccgtttcacttgtccttattttcattggcattatcaaattttgattacacgaagatgtgccatttcttgttgttttggtttaattaccaagcttttacatctactccgcgttaccatagttgagatgtctacattattttgtcaaatatgcaacagaaagccagcaagcttatcattaagcgatcaactacaatggatggccagcttttccttatcaagcatctccttatcttgagagaacaggttacggctgatctatcttaagtttgcttcttttgctattaagtgatgattttaaacaatttttttattttccagattgccccttttgacatagaattttcagtaacccataaggagcttgatttctctcatttactggttagttcctcaacattcaagtctacttcgtatgatagatctaattttttctttatcgctttttgagaggttcttatctttatacagatttcagatgtttttccttcttcagtttctttctttgttgatgactttgctaactttctccaataatccatgtcaaaaatgtggttaggaacacttgaggaggatacttagaggtcaagcgtcactttttgactggtctaggtcaacctctctagcaaggaccctgtcacctcgagttttggagagtcaaatagatgccaaaaaggttagggattttttctcttccttccactatcatttgcagatttgcttcatctttacataaaagctcgccactaagatgtgttgatttcattttacaattttctgtgagacttctgtactagtattggtgaaagattataaattttgtttcggtctgggttatgattttgccatgctagtaggctcaagtaatatggcaagttgttggttgtatctggctccttgcgttacttgatatgaatgggaatgatgcatagacctttattttcgcaggaactggaaaaatgtcttaagacaacttgtgaggagttcatcatgtcagtaactaagctagttgtggatcctatgctttcatttgtgacgaaggtgggttgctcctttcctttttatctgagaaaaatgtttttcacagttttgttaagattctaggcgtcctcgaaaaagtttaagtcagcatcttttgcactgtctggttttaagttgtgtcgaagacacatccatctacaatgtactgataatgagggagaggatctgtcttatctaaagaatttcctctcctaatggaatagtgtaacagttttgctatgtttatacatggtatacttgtatatgcaggtcacagccataaaagttgctctttcctccggaactcagaatcgcaaagttgattctgtcatggctaagccgctgaaggaacaagctttcgcgacaccagataaggtggttgaacttgttcaaaaggtatgagatagataatgtactgtttaagttttttctttttcttcaaggtatatctcagaaatagagatggcagctatttcttgttccctatgcagcttcctctacagaagcatgatattgaaaactctgttcataggcagttcgttagcctctaagtgctaaatgataccttgaacatgcatttgtggttccttaggttatgctcagacagtgagtgattcgatatgaaaagagagaatcagtgtagatcatatatataacccgcaatggttttttgcatatttaagctttaattaccttcataactcagaatgcaaaaccacatctctcctccacacatatggatatactgatttgtatttcaaccaggtatacgctgcgatacaacaagagttgcttccgattttagcaaaaatgaaactctatttgcaaaacccatcaacaaggaccatacttttcaagccgatcaagtaagtccatttctctgcaactttatcaaccatgtatattatctttggctggtttgtatatgtgcggttacttgttctaatcccttatgtttgaacccaaatctcttgcgctaattactttgaatactaaatgtgcatcatcatccgatgatatgttttatattcaggacaaatatagtggaagctcatacgcaagtggagtctttgctcaaagctgagtactcagctgaagaacaagccaatattaatatgatctccattcaggatttgcaaacccaactcgacaatttcctttaaggtcatggctcaatcgatgtttttgtgatgtccgtacttcctctgggtatatcttatataatgacttgtgattcttttgactccttttagctactttacaagagttcgctttagaagaatacatattattttgtattccaagaactcatacatgttggtctctctacattcgatctatctacggtcaaagagtgtagttcatatgcttatataagactagctatcaagttc

SEQ ID NO: 140503 - DNA, 1486 bp, Arabidopsis thaliana landsberg; identical to SEQ ID NO: 8440

SEQ ID NO: 140504 - DNA, 378 bp, Arabidopsis thaliana landsberg
atctcacagtgcccagttctagaaaacctaaatatcaccaggagtttctgtgatgattttgaatttacatgtgtgcgttctcagtcactattgagcttcactcatgttgcggacactgatgaaatgttgaatgaagatctagtagtcgcaattgatgcccccaagcttaagtatctgaggctcagtgatcatcgtattgcaagttttatactaaatgatctggcttcccttgttgaagctgatatcgatactgtctttaacttgatttgcaagaagatgttcaatccaaatgatctgaataaaagaaatatgattcgtgattttctcgtcgggatctctagcataaaaactttgatcatcgcttcaagtactcttgag

SEQ ID NO: 140505 - DNA, 1592 bp, Arabidopsis thaliana landsberg
atcaagatcaccaccacaaggcaaaatctaaactctctctgcaaaatttctgctaacttcttcctcccattttcttgccatggaaatcgattccgccaccaacggaaactctgacaccgtcatgacggaatccgccgctacgatcactccgtcgccggtcgtcgtctcgtcttcgagatcgaatcaatttacggaatctctcaagcttgagcaccagctcctccgcgttcctttcgagcattacaagaagacgatccgtaccaatcaccgttctttcgagaaagaggtctcaaccattgttaacggcgtcggagaattggctgattccgattggtctaaagacgataccgtttcgcgtcttacttgccttgttactcgattacaaggcctcaaacgaaaggttgatttttccgtctctctccctctgtgatcggtgttttaaattatgtacacgaaactgaatcaattaatttagcgattaaagtttctgattgtgctaaatgatatccacttatctgtaaaaaatttgatcttcgatgttgaagatcaaagtaaagtatctgtctttggcgattatgtctcactagacattggatctcgatgaattcaatgtagtggtggagttggttcattggagcttcccatctgactatttgcattgtcttctaaatttttatcatttgggatagtttctatatcttctggagtaacatcacatggatatggcctggcttacgtatttttttggttttgtatctcagttggaagaagggagcaatgtggagaatttgcaagcccagagatgtcgtgctcgcatcgatcatttggattcagtagatgtggaaaatattactgaatggaataataccaaactgaaacggattcttgtagactacatgctgcggatgtcatatttcgagactgctacaaagctttcggaaagcagcaatattatggtttctctcatcctcttgacactcattatatcacactattatgctatattgctgtcttggttaatatatcagaacatattctttgctgtttcgtttttacaagcagtgaaacagatttgttgatttgtactgcatctctatgaaatgctaattataaatatctcatcttttcaggaccttgtcgacattgacatatttcgagaagctaagaaggtgattgatgcccttaaaaatagggaggtagcttctgcattgacatggtgtgctgataacaaaacgcggttgaaaaagtcaaaggtacgtgctctatgtactctcatggttaagttttactttcattttttatgaactccatgtggtttggctaaagtatccaattttttaccagaactctatgtataattgttcattgctaattatatattttccttttcataacagagcaaatttgagttccaactaaggctgcaagaattcatcgagttggtacgagttgatacagctgagagctacaaaaaagcaatccagtatgctcgaaagcatctggcatcatggggaacaacccatatgaaagaattgcagcatgttctggccactttggcttttaaaagtaccacagaatgctcaaaatataag

SEQ ID NO: 140506 - DNA, 1353 bp, Arabidopsis thaliana landsberg
atacagagacttatcaaacaacagcttaacagggaaagtacccgatttcctcgccagtttaccaaacttgactgaattgtgagtcgtgcatactatagtggtgagatttataaaccagtagcagtttattacatgtgaaatttatacaaggttctgtgcttatacttgtagaaacctggaaggaaacaagttaactggttcgattccagctaaactgttggagaaatcaaaagatggttctctttcgcttaggtatgcatctcaatgagctctgaaacataatgtgtgcattttcatcaatttagtttcgtattgcaatctagaaaggatggccttgcttgttgctatgtgaggtagtttgaaccgtttctattgcgaaagatacagactgaagtttctattttgtaaactttagatttggtggaaacccggacctttgtcagtctccctcatgtcaaacaacaacgaagaagaaaattggttacatcgtcccagtagtagcatcactcgcaggattgctcattgttttgaccgcattagctttgatctggcattttaaaaaacgatcacgaagaggtacaatctcaaacaaaccattaggtgtcaacaccggaccattggacacagccaaaagatactttatatactcagaagttgtgaatatcacaaacaacttcgagagagttcttggtaaaggaggttttggtaaagtataccatggtttcttgaatggagatcaagtagctgtgaagatactttccgaagagtcaactcaaggttacaaagagtttcgagcagaggtcattctctaaattacttgttaagacatcatttctctgtaattcctaataatgttttgcatccaaagtccaaactaatctatattctctcaggttgagcttctgatgagagttcatcacacaaatttgacatctcttatcggatactgcaatgaagataaccacatggcacttatctacgagtacatggctaatggaaacttaggagactatttgtcaggttagtctttagataataaactcacagcccttttgtattaacagaagcaactaaactaattcagtttttttttttttttttccttattgtaaaggaaaaagttccttaatcttgagctgggaagagagattacagatatcattggatgcagcacaaggtttgtaaaatcaaaaaacacaaaattagttctttttaaaaatttacgcaatctgaatgagaattttcaaatgattaaggcctcgagtatctccattacggttgcaagcctcccatagttcacagagatgtgaagccggcaaatatcttactgaacgagaatcttcaagccaagat

SEQ ID NO: 140507 - DNA, 698 bp, Arabidopsis thaliana landsberg
gccctatatgttccattaagcatgctggtggcccgtgggagctgggactagctgaaacccagaaggtatattatataacttcgtcgtgagaatatgtttttcattttagtttgccctggtatcagcttcaaatttccgtgtagtctcttattaactccttgatgtctattgatagctaagcttcattcttttgcagactctcattggaaatggactaagggaaagagttattatcagggttgatggcggattcaaaagtggtgtggatgtgttgatagctgcagctatgggcgctgatgagtatggttttggtactctggcaatgattgccacaggatgtatcatggctcgcatttgccacactaataactgccccgttggtgttgccagtcaggtaatttggattctcttcttacttgttattgtatatttccccaatgtataaccaatttccactaagatttccctgaattcggttacagagagaggaactgcgtgcacgtttccccggtcttcctggtgatcttgtcaacttcttcttgtatattgcagaggaggtaatcttcaggaatattttctcttatacaaaagttcattgattttaacactaatatttcatctaatttttgtaggtgaggggcatattagctcagctgggatatgaaaagttggatgatataattgggcggacagattgc

SEQ ID NO: 140508 - DNA, 2988 bp, Arabidopsis thaliana landsberg
  unsure (1)..(2988): unsure at all n locations
ctccttttattttattttattttgtcttaaagcttttggcgagtttgcttgtgtgtgagtgtgtggttatggagtctccgttcaaacctgatgtcgtcagaggtcaagtggctctcatcaccggtggtggatccggtatcggttttgagatctcttctcagtttggcaaacatggagcttctatcgctatcatgggacgacgaaaacaagtcctcgatgacgccgtctctgctcttcgatctcttggaatccaggtaatcagcgatttttgttttgaggactttgtttgttggatatgtgtttgaatctgtctgatttctgtttcgtttgaaggctattggattggaaggtgatgttcgtaagcaagaagatgcgagaagagttgtggaagcaacttatcagcattttggtaaacttgatattcttgttaacgccgctgctgggaattttctggctgctgctgaggatttgtctcctaatggcttcagaacaggttcctttttcgttttctcattaatttgatcatgatctgagaagaattatgcctgaaagtttgtcaatttagctcaaggaaacgtttttttgttgtgcatgtgcagtcttagacattgatgcggtaggaacattcaacatgtgtcacgcagctctcaagtatcttaagaaaggagcgcctggaagagactcatcaagcggtggaggttcgattattaacattagcgcgactttgcactacacggcttcttggtaccaaatacatgtctctgcagccaaggtaatttgattagtctgatagagtcattcaatgtcttgagttttggttagagaatcaagaactaagtaataggaacaatagatgtagcaaaaatgtgatcttaggagtttgaaacttgaaacaggctgcagttgatgctaccacaagaaacttggcattggagtggggaactgactatgatattagagtgaacgggattgctccaggtcctattggaggtacacctggaatgagtaaacttgtacctgaggagattgaaaacaaaaccagagagtacatgcctctttataaagttggagagaagtgggatatcgctatggctgcactctacctcagctgtgattctggtatgctgagttaaataaagcacactctttaatataaaacatatatacatggttagatgatgtaactcattgcttgatttgtttaacagggaaatatgtgagcggactaacaatggtggtagatggaggactgtggcttagcaaacctcgccacttgcctaaagaagcggtgaagcaactctctcgtgcggtggagaagaggtctagggccaagcctgttggtctcccaaccagcaagctgtagatcatttgaatttcagatatcaaataagtgcacattgaaaaaatgttttggtttattgaattacattggagactgagaaaatggtattaagattatgtagatcaaactatcttatgcacaataaagtagctttctttgcaaaagaggcaaaacagtaacgaatatatgatcaaaaagataatcgcttttgaacctctcatcagtgataagagagaaatattccaaactcataaaatctcaaatggctaataaataagaacattgtgagtcactctctctgtttctcatctcctcatctttttatcttctttgattgatccacatggcttccgctgccgcaagttccgccttttcactccttaagtccaccggcgctgttgcttcctccgccggaactcgcgcacgtgcctcccttctgccaattccctctacctctgtttccgcgcgtcctctaggcttctccgccactctagattcccgtcgtttctctctccacgttgcttccaaagttgaatcggtgcgtgggaagggaagcagaggagtggtttctatggcgaagaagagcgtcggagatctgacctcagctgatttgaaggggaagaaggttttcgtgagagctgatctcaatgtacctctcgatgataatcagactatcactgacgataccagaatccgtgccgccattccaacgatcaagtatttgattgaaaatggtgctaaagttatcctctccactcatctggtaatattattcccacacactccttacgtttgattcctccatcacctgaactaaagttgaacactttgatctttcagggaaggccaaagggagtcaccccaaagtttagtttggctcctcttgtccctaggctctccgagcttcttggtattgaggtaaagtccgtgatttgtctcagtaatcaatcatctacctgtgagaatcaatcacttgagacagcttattgatggtgaattttgcaggtcacgaaagctgatgattgtattggcccagaagtggaaagcttggtggcttctctacctgaaggtggagttttgcttcttgagaacgtcaggttttacaaggaggaagagaagaacgatcctgagtttgctaagaagcttgcttctctagctgacctttatgtcaatgatgctttcggaactgctcacagagctcatgcttctaccgaaggagtcactaagttcttgaagccttcagttgctggtttccttttgcaaaaggtaatattttgatagagattattctattcagcattgaagcatcgttgctacaaatggtaccatgaactttttgtttacttctctctaccnnnnnnnnnnnnnnnnnnnnnnnnnnnngctgtttcaaacccaaagagaccatttgcagccatagtgggtggttccaaagtctcatccaagattggagttattgaatcgcttctggagaagtgtgatattcttcttcttggtggtggaatgatcttcacattctacaaggcacagggtctttcagttggttcgtcccttgttgaagaagacaagcatgaaccggctaccgaactccttgccaaagctaaggccaaaggagtaactcttttgttgccaacagatgttgtagt

SEQ ID NO: 140509 - DNA, 498 bp, Arabidopsis thaliana landsberg
aaattcggaaaaaagtctcaatctttctttctgggtttctactttatcaaacgaaatcaactcaagcaatgtttcactaatatatctgcttccgtgaattctgaataaaaagatcatgaagctcacaagcttgagcaagaatgctaattccacagcaacagcagtaactgtatcttcaatacagaaactcccgtttctgtctctgtctgaaactttgccttgtccgaagagttcgagaaaacccacgtttcttccttgtaagttactcttcctacgacttgaaagtccacgactttgctatggattgtgtagaaatgagcttagctaaagatttcttattacttgttcatatggaaatgatttttttagagttcgatttaaagatttctagtactaactagtttgtagtaagatgtagacggagaccaaagttggatttgctctggggaaaatttagagttcgtgcatcagatgctggtgttggaactgggagttata

SEQ ID NO: 140510 - DNA, 1629 bp, Arabidopsis thaliana landsberg
ttcatcgtgcaagacaacgggacatcctgcttttttcgggaagcttcctacattctgggctgttaagacaaacattcagatttcaggggagcttacaactagccgtggacccggcacttctttccagtttgctctttccttggcggagcagctcttcggagaaaccacagccaagtcaattgaagagtttctggtctatatcctattcacttatacttttctggatcatgcttttctttatccttctcggtatgcaacaatcttctcatagtcttctttttcaatcatttctccagcttctgcgtgatggttaccagaatcctaagaacaaagagttcaatagcattgactggtctttagaccacacacctcgtgtaagtcgcatgaagctatgatcaatgcatttccatgtaatctcatgatatatgatgagaactgatcttggttttatcttctatacctatggagttttttcttttatccattccttctcctttcacgctcagttagttttgaaagatgaaaaagttagctgattctaagaacatttcattttagtttgaaagctgagaaacttgttttaatgatgcatctaaatccaggttcttatcccggtagccaacgggtctgaagcggttgaactggtctcaattgcagatgttcttagaagagccaaagtagatgtcacggtttcatcagttgaacgatctttgcggattacggcattccaaggcaccaaaattatcactgacaaattgattggtgaagctgctgagtcatcatatgatctaatcattcttccggtaaggctttaagcaaaaccctgcatgtcctagtctcataataaactcataccatttcgctagtttacttcttcttaaataaatcttgctatgtacatgtttcagtataacttatatgccatgtcaaatcaatgcgcttaggaaaagcttttagacaaactacaactgttggttgttccatggtgagtaatatgatttcttttctttgatggaaattcccaagggaggccatactggctcagaacgtctgcagaagtccaaaattctcaagaaactgctcagggaacaacatgaatctgggcgaatatatggagctaccaactcttcatctaccgttttgcataaacatggtttactcaaggtaaggtgaagacaactattgttcttttctttgtcatatacatggacaaacgccataaacaattggaatcctattttaggagaagagaacgactgtgtatccttcagagtcagacgagcctatgaatcaacaaatgatcgaaggagccgaagttgttatagatggaaacgtgattacaagtttggggctcgcaactgttaccaaattttccctggctattgttagcaagctgttcggacatgctagagcaaggagtgtttcagaagggcttgtgcatgagtatccaaggcagtaaccgtttgaaagcatcttgttcaagaaacacagttagaagatgtctcattactgatcttaaaccgaagtattacggtccgatggtatcaaaccacctcaactccagagacttttcacaagtatcatctattcaacgttgatgcaccttatcctgaagcgggatgctatctg

SEQ ID NO: 140511 - DNA, 1532 bp, Arabidopsis thaliana landsberg
  unsure (1)..(1532): unsure at all n locations
atgcccgtagtgtcacattcacgtggaaagcgtggagagtattttattaattactacggcagacttctgtgcatggtcgaaaatacttcgacttctttatataataatctcgccttcgataagtcatcttacaatacatttactccttcgtttttctcgagaaatctagagataattaataaggatcccgacgaaattaaggtactctntatttctgatttctgaaaactctttgagtagatcatataaagaaaataaaccatttctgaaaactcatcattgctagggttggttcgacttatatgtaattcttttttctctgatgactgtttttagctgtccaaattgcttgactagagaaaagccttttcattgaagataatggcggaagtaaatggagtcattccaacaatagacttggaagaggttaatgatcagattctgaatgagaaaatccgtgaagcgagtgagagatggggatgtttcacggtgataaaccatggagtttctttgtctttgatggctgagatgaagaagactgttagagatctccatgaacgtccatatgagatgaaactgcgaaacaccgatgtgttactagggaatggttacaagcctctaagtgagttcaatcctttttatgaatcatttggtctttttgacatggcatctcctcaagctgtcaatagtttttgtgataaactcgacgcctcgccagatcaaaggttaatttatcttttttataatgtttttgatgacgtcgttatcattttttgtacaattatattggtcccaatcacagttttggatccatcaaaaattattaatatatgctgtcttttttttttttggttgttggcttgcagggagattttgctaaagtatgcaaaagctactgatgatcttgcgaggagtctagcaaggagattagcggagagctacggagtggtagagcccaattttttgagaggatggccaagccaatttcggatgaacaaatatcattttaaaccggattctgttggaaaactcggtgtgatattacacacggatcctggtttcttgacaattcttcaaggtgatgaggatgttggtggacttgaagccatggacaactcttcaggatcctttttccccatacacacattgccgaacacgcttcttgtcaaccttggtgacatggctacggtgggatgatatcacccgtagttagtatatagttccaaaaatatgttgaacatgaaaattaaactttattttttttggtttttgaaactttatgatagatatggagcaatggaaggttatgcaatgtgaagcatagagtgcaatgcatagaggcaaaaatgaggattactattgcttcgttcctattaggaccagtggatagagatcttgaagctccagatgaatttgtggatgctgaacatccgcgactatacaagcctatcagtgacggaggactaagaaagattagacttagcaagcatcttcatgctggcgaatctctcaagttcataaccataaatgag

SEQ ID NO: 140512 - DNA, 955 bp, Arabidopsis thaliana landsberg; identical to SEQ ID NO: 11157

SEQ ID NO: 140513 - DNA, 427 bp, Arabidopsis thaliana landsberg
aaaatctgcagttctgatgaatttggaatctcgggtatatttttaactctcgcaccctctacttacataaaaatacttaaatgttgccaatttgtttaacttgatccaaaccattatatgttatgaatgtgttcaaacggttttcctgtgccagatgattgcagcagaagacattggtagacagatacttacatacggagagaggtatgtatacgcagaacttcatttgaaaacccgaagaagttcactagatctccatagttttcttcaattccagacacatcataatttgtggtttttacaaaatcttgcaggaaaccagttgatcaattcttgaagtcagtagaccaactaaccttgaaagacattgcagacttcaccagcaaggttatttcaaagcctttgacaatgggttcctttggagatg

SEQ ID NO: 140514 - DNA, 2341 bp, Arabidopsis thaliana landsberg
ttgaattcagcgtcactactgtatgatcagctcaaggttgagttttttttactaggttcagtgttattttttttattttcttccggtgaattgagttatcttatcgtacggacaatgactcattgcaggttgctgagccgtttttcttattggctggtccaaatgtgatcgaatccgaagagcatgttcttcgtatggctaaaagcatcaaagatatttcgacaaagtatgtgtaaccatcaccattgaagctctttttcttgttgtgacatcttgtgttcaactgtgttggaactattaaaataattgacaagggggaaaaatgtttaacacagtggagaccttgatcctctcatcacatgagcattttagcttattgagcaaggtgtttacttatatagttatagttatgcatgttcatgttgattgtgaatgttgtaggcttgggttgcctctggttttcaagtcaagtttcgataaagctaacagaacttcatcaaagtccttccgaggtcctggcatggctgaggggctcaaggtaaatcattccctctttcttgagttgcaagcatggatgactctttatctggtgctcttagaactgcgcatttgaaaaccttcagaagtatattgatgtcaaagcgatcttatatctataaattcttacgtcttttagaaccttcagtatgagctgacaccagcaattgcatttagctcctggctataatgcaaccatttacatttacggcaactagtattgatgtggcttcatttttttgtgtgtagttcctgcacaagtatactacaggtagtaacttttctgtttctctcgacagattcttgagaaggtgaaagtagcatttgatctaccaatcgttactgacgttcatgagtcgagtcaggtattttgagttttagtcacatcagagattcaagattcgaaaaatctttgttcctttctaatgcttcgtttgtttttattagtgtgaagcagttggcaaggttgcagatataattcagataccggcgttcttatgtcgacaggcaagattctaacatatgcttttcttcaactcttttttagctatcaaattttcatttactgtttgaatttatcatttatatacagagttcagggttttaactattgcctatatctccagacagatcttctggtcgcggcagcccaaagtgggaaaattatcaacataaagaaaggacaattttgtggtcactctgtgagttatctttttgatctgtacaaacttttgttccctggtatattgtagtgactgatttcatgtatatccattttaaggtcatgagaaactcggctgagaaggttagactcgcagggaatccaaatgtgatggtttgtgaaagaggaaccatgtttggatacagtaagttaactgttctttgtgtcaatagaattcaccaatttttttgcaaatagagactaaaatagactaaaagacactggatataactcctgagtgtccttacattttaattttgttcctcagatgatttaatagtagatccacgaaatttggaatggatgagggaagctgattgtcccgttgtgagttaatattgcttcttgttcttttcttgttgtgggagtttatatcttggctttggctttatactttgatgttttgacactcgtataatataatttagttattggcttcaggttgctgatataactcattcatttttacaacctgcaggcaagaaggtatggtcattagaacgatgctctgagtaatttaagaaaatgcttggtgttttaaagctaaatcagaattggtctaaactcaaacataccttgtttatatagttagatggtgggggtgttgctagtggtggccttcgcgaattaataccatgcatagcaagaaccgccgtagctgttggtgtcgatggaattttcatggaggtatccaactttatcgcaagttttgtcatctcgttgaatctttgttccaatttggttatgaaacttggttcattttccggtgaattaggtgcatgatgatcctttaaatgcaccggtcgatggtccaacacaatgggtgagttttactttttttcagaccatatccattagtctgacacaatgcattcttgatcatcgtttttcttcccgttcagcctctgcgtcatctagaagaactgctagaagagctcattgcaatcgcggtaagccctttacattatcccataaaaatttaatctgtttccttttgttgtaacattggctcttataacatctttgcagagtgtcacaaaggggaaacaacagttccaaatcgatctcacgccttatcgtgat

SEQ ID NO: 140515 - DNA, 1546 bp, Arabidopsis thaliana landsberg
tgcatgcctgcaggtcgactctagaggatccccggtttagttggggcaaagtaagtagtaaagaagaagaagatgcagcagcagcagtctccgcaaatgtttccgatggttccgtcgattccccctgctaacaacatcactaccgaacagatccaaaaggttccttctttctcaccctatatctctccctctctcttaatttgttcaacactacttaggaggctcttagagcttttttgtactgacaaaatcattggcttctgagtgcaagtaatactcttttgactgtaattggtggcaattagggttttcatttgaatctttctcgttaattccacaacacttgagagtctgttgttggtgatgatgagaagagacagtttctaggactaggaaattagtagatgcttggtgggtcaggaaactttgaatccggttttcaagaatggacattgaagttagatgcttgcttgatgttgttgttttgtactttctcttggcttgatgtcttccatggtaagatgataggctgcatcgtcatttccttgtcattctctttcctttgcttaaacgcagtaccttgatgagaacaagaagctgattatggccatcatggaaaaccagaatctcggtaaacttgctgagtgcgcccagtaagtctcaccttttctatccatcttcttatgtctcttagatagtaatggaagcttagaattactattattaatggtgaggtttatatagttattctatcttttgctctgttatattttcaggtaccaagctcttctccagaagaacttgatgtatcttgctgcaattgctgatgctcaacccccaccacctacgccaggaccttcaccatctacagctgtcgctgcccaggttgtttgtgatgataaaactcaattgcgatctatcacagaaatttaatgttgtttgggggtttgcttactgttgggtatgatttctgttagatggcaacaccgcattctgggatgcaaccacctagctacttcatgcaacacccacaagcatcccctgcagggattttcgctccaaggggtcctttacagtttggtagcccactccagtttcaggatccgcaacagcagcagcagatacatcagcaagctatgcaaggacacatggggattagaccaatgggtatgaccaacaacgggatgcagcatgcgatgcaacaaccagaaaccggtcttggaggaaacggtaactctctttacattattaagacaatactcaatctcataaattgtaacttgtatccattacttctttctttgctaacagtggggcttagaggaggaaagcaagatggagcagatggacaaggaaaagatgatggcaagtgaaaaggatccaaagaagctttgttttgttgatatttaggacttgtgagtctcgtaagggctttttgcaatagcttgtttgagttctttaacagaagatagactgtggagtagttccgcaaaccgtgttgtaatgtattgttatttagtacaagctcggatttagaaaacatcgt

SEQ ID NO: 140516 - DNA, 1299 bp, Arabidopsis thaliana landsberg
aatcgatcgatattgaaggagagaagatgcctggtttaacatgtaacgcgtgtaacatggagttcaaggacgaagaagaacgtaaccttcattacaaatccgattggcaccgctacaatctcaagcgcaaggtttcatttcttctgctttctctatcgaatttgaactcaagcctatctgtttctcgggaaaatcttgcgtcggtgatgagatgaaagtttctgagaaacagcttttccattttgctatcgaaattgtttagttaaggttatggaatcgtagagtttatatgaaaatttgttttgaagcttattctactaaggaacaaggatttcaataaccatagatttggttacttctaggcatttgaatctttgtatttctgtaattttttatgttaggtggctggagttcctggagttacagaagccttgtttgaggctagacaatctgctcttgctcaggagaagaataaatcaaatgaagcacctatgctttatacttgtgcaatctgtgctaaaggttacaggagttccaaggctcatgagcagcatcttcagtcgcgtagccatgttttgcgggtttcacaagggacatcaatcaacggagaggaggatatagcgattatcaggcaacttcctcgccgtgttcaacacaggggttccattgatgatgatagtgaagatgaatgggtggaggttgattctgacgaggaattggctgctgaagaagcctctgattctttgtctaagttgaatgtgaatgagtctggatctgctgaagatatggatgatgatggtgatgcagataagtatgagctggatccaacctgctgtttgatgtgtgacaaaaaacataagaccttagagagctgtatgcttcacatgcataagcatcatggtttctttattcccgatattgagtatctcaaggatcctgaagggcttctcacttaccttggtcttaaggtttggactcatcaatttaccattcagtgttcgttgttgtcaagctttgaaattcttactcctgtttacttatacattgctcatcatttaggtcaagagagacttcatgtgtctgtactgcaatgagctgtgccgtccattcagcagcttagaagctgtaagaaaacatatggaagcaaagagtcattgcaaactgcattatggtgatggtgatgatgaagaagatgctgagctagaagagttttatgactacagcagcaggtttcaactctcttctatctctgattattcttgttctcgcctgtattcctcgttctatgccaaatcttaa

SEQ ID NO: 140517 - DNA, 560 bp, Arabidopsis thaliana landsberg
gtgtttgcggatcatgcatccagcctaaacccaatcgatgtcccaagggaattgatatgggaattacctcgaagaacggtctattttggtacctctgttcctacgatattcaaaggtataagattttctttattggattgtgatgcgattgtttatataaaagaaagttgttctaaccacttgagctctatttttctcaggtttatcaactgagaagatacaggcttgcttttggaaaggtacattttgtattaagcagtttcttcttgttctgaaacataacttatcttttgatattatgtagggtacgtatgtgtacgtggatttgatcgaaagacgaggggaccgaagcctttgattgcaagattgcacttcccggcgagcaaactgaagggacaacaagctaacctcgcctaatccgttggcaagcaaacaaatacaagcttatggttaagagtgagagagcacactgttccaatctagttaatgtaagaaagtgaaaacgtaaagttaacagtcctagagttgtacaaggtttctaaatcccattttagtttcgt

SEQ ID NO: 140518 - DNA, 1205 bp, Arabidopsis thaliana landsberg
cgtcagctgagagaatgaaggaagttgctgatttgattttgactttccggaagaaagtccagtcattgttctctctgctatggggaaaactaccaacaatctcttgcttgtaatgctgagattctctcccttttctctgttttctattcaaagttttgaaatttttgattggaattattggttttgttgctagtgaaggcgggagagaaggcggttagttgtggtgtttctaatgcatctgagattgaggaattgagcattataaaggaattgcatatcaggttttggtttcttgtaactatgattaatttggtacctttgagtatcttttcctttgttgctgttggttttgatcaagaatgtgtttttttgttgtttcaggacggtgaaagagctcaacattgatccctctgttattttgagtgagcatattttaacttgtagactttccaacatttggagcttcatttctttctaattctgataacgctcataaatttttgatttgtgatgagtttggtaataattcaagagtgtacatgcattgcctatttatatcttggatacattttgcagcctatttggaggaactggagcaactcctgaaaggcattgccatgatgaaggaattgacacttcgaaccagagattacttagtctcttttggagagtgtttgtctacaaggatttttgctgcttatcttaatacaatcggtgtcaaggcacgccaagtatgtccatcatcatatttttagttctactgtaattttcttaattatattatatatcacatttggttgcttatttagtcaaattgatatcttggtagattagggtagaaaagttcaatctagatttagaaaatatgataaacaaattctatatactctgaattggtcatttaacttttttattagtttggtttcggttatcaaggaacacatattggtgtactttctctgttacatgctaaactggccttggtgtgagctttattgcacaatgatccggctcgcaaacatagctaagtagatttatcgaccattactttgcagtatgatgcatttgaaattggtttcattacaacggatgatttcacaaatggggatatcctggaggcaacttatccagctgttgccaagagattatatgatgattggatgcatgatcctgctgttactattgtaacaggtttccttgggaag

SEQ ID NO: 140519 - DNA, 2004 bp, Arabidopsis thaliana landsberg
gaccgaccatcgatgcttgcttgcttatgtcttagctcttaagtcatgccatgaacactcaagaatcatgatccatgcatgaaaagtccacgtgtcataccacgtccgtagaagataaagctaagtaaattgtacgtggcagctgttgcgtccctctatctaccacgtagcgtctcaacagaaacagagcattactataagaagtaacaaaagcagctcaactgatagcacaagttaaagaattctaaaatcgtaaagttctaaagcggtttttcatcaattttcaagcaatcgagaaaaaagcaatggcgtcagacaaacaaaaggcggagagagccgaggttgcggcgaggctagcggctgaggacttgcatgacattaacaaatccggtggtgctgatgtcacaatgtataaggtgacggagagaacaactgaacatccaccggagcaagataggcccggtgtgataggatcagtgttcagggctgtccaaggaacgtatgagcatgcgagagacgctgtagttggaaaaacccacgaagcggctgagtctaccaaagaaggagctcagatagcttcagagaaagcggttggagcaaaggacgcaaccgtcgagaaagctaaggaaaccgctgattatacggcggagaaggtgggtgagtataaagactatacggttgataaagctaaagaggctaaggacacaactgcagagaaggcgaaggagactgctaattatactgcggataaggcggtggaagcaaaggataagacggcggagaagattggtgagtacaaagactatgcggtggataaggcagtagaagctaaagataagacagcggagaaggcgaaggagactgcgaattatacggcggataaggctaaagaggctaaggacaagacggctgagaaggttggtgagtataaggattacacggtggacaaggccgtggaagctagggattacacagcggagaaggctattgaagcaaaggataagacagctgagaagactggagagtataaggactatacggtggagaaggcgacggaggggaaagatgttacggtgagtaagctaggagagctgaaagatagtgccgttgagacaacgaaaagagctatgggtttctgggcggggaagacaaaggaggccaaagaaaaagctgtggagaccaaagatactgccaaggtataatttcttggaactttgtttccatgtaaatgaagattacatatgtcaaatggtttgatataatgtgatgttttgataacataggaaaacatggagaaagctggagaagtaacaagacaaaagatggaggaaatgagattggaaggtaaagagctcaaagaagaagctggagcaaaagcccaagaggcatctcaaaagactagggagagtactgagtcgggagctcaaaaagccgaagagaccaaagattctgctgccgtgaggtaaatgatgaaatgccagttatatcttgtcatgttcttcaagtttaaaggtgactgtgaaactctttgttttgttttttgatgtgattaaatcatgcaggggaaatgaagcgaaagggactatttttggtgcattagggaatgtaacggaagcaataaagagcaaactgacaatgccatcagacattgtggaggaaacacgcgcggcacgtgagcatggagggacgggtaggactgtggttgaagtcaaggtcgaggattcaaagccgggtaaggtggcgacttcactgaaggcgtcggatcaaatgaccggtcaaacattcaacgacgttggacggatggatgatgatgctcggaaagataagggaaagctgtgagaatactagaaaaatgacaatgttttttgggccttttgttctggatgaatatctctgttgttttttgggccttttgttttggatacgtctgttatagcagataacgttttctgatagtttctatgtttgtattcttgttttggaataggaaagctttcttcagtt

SEQ ID NO: 140520 - DNA, 1048 bp, Arabidopsis thaliana landsberg
gaatgccgatttgtgaagcatttgctcaaatagagcagcagcctaacatatatgatgttgttcatgttaaatactacgacgaggtttgtactaggtcacggattgtattagatacttcttttatccaacttatcttcattgtttgttgagttttctatgattccgttgcctcatgcaggatcctttgaaactggatgttgttattagctttccagatcatgggtttcatcttcgatttgatccctggtctcaggtacaattctttcctagatgatactgtggacctatggcttttgcatgtgtatgattaaaccaacttcactgctttacaaacttttgttttcaactattcaagagtggaaagcaatggagggtatctttatataactagttttaactggaataaacttagcttttgttcttccaatttgtttgcagaggttacggcttgttgaaatatttgatgtcaagcggcttcagatgcgctacgccacttctatgattgggtgagtcgaatgggatcaatttttttggctttggtgtgtagtttactgttgtaacaactgtcttttgcttttacttcaggggtccatcaactctggcaacgtttgtggctgtttatgcactttttggaccaacctttcctgggatttatgataaagaaagagggatttattctctgttctacccggtgagcaagaaatagacagatggtcacattgttttaccattaatgtttgaatttgttctatcaatgtttaatctttttaactattgcaggggctatccttcgagtttccaattccaaaccagtacacggactgctgccatgatggagaaggtttgctcttctccggactccagtgaaatcttgctcatattttgtgtcttgaccgatatctaacttctcagatttttttttctcctttacaaagcggcactaccgatagagtttccagatggcaccacaccagtaacatgccgggtctctatatatgacaactcaagtgacaaaaaagttggtgtcggaaaattgatggatagagct

SEQ ID NO: 140521 - DNA, 1169 bp, Arabidopsis thaliana landsberg
acccctcttggtgtcaaggctaaagaagctatggaaaatttcagcttcttttgtctttctttgagagagattctgttatgggttcctttctgttattagattttttattctttgtgattgtttttttatttcagggagagctcgtctctgatgatttggttgttggtataattgatgaagccatgaacaagccaaaatgtcaaaaaggatttatccttgatgggttccccaggactgttactcaggcagagaaggtgatgctcaatagaaaaactcactgttgattcggtctccttttggttcttttggttttgattgtaattaacttctaaccatggtggtctgtcttttgtttgcagctcgatgagatgcttaagaggcgaggaactgaaattgacaaagttctcaactttgctattgatgacgcaatcttggaggaaagaataaccgggcgatggatccacccatcgagtggcaggagttaccacaccaaatttgctcctcccaaaacccctggagttgatgatgtaagacttacagtaactattaatatatttcgtctgtttatttcaaatgccctcccataaatctgagactctacattatttggtattgaagattactggagagcctctgatccaacgtaaagatgataacgctgatgttctaaagtcgaggcttgcagctttccacagtcaaactcaaccggtattgattccagtttcatatatctccaggcttattaaaatgaaaatctgtatcttttgcaaacatgttgatgttctccccctttccacaggtgattgattactacgcaaagaaggccgttctcacaaacatccaggccgagaaggctccccaagaagttacatcagaggttaaaaaagcattgtcatgatcaaagactcctcaagcaaatcatctcctctggttagaatccattcttttccttactacaagagagagacacatctatataatccactcatctgcggaatgacagttttttcttttagtccttgcgcttttccttcttcgactaatattcaaaatatggagaagagtttttactcctgaatattatctactgtcgcagtctctttaccaaataagtaacttgtctcatcgtttttttactcggaaactgataataataagagggtaattta

SEQ ID NO: 140522 - DNA, 2227 bp, Arabidopsis thaliana landsberg
aaataataatagtgtaattaagtcggaggaaaacaacaagaacccagaaagaggaacgaagaaactaattcaaaggtatgatctttttttctttgagagaattatgttttctttgtagcaaatcctctggtcttacgtttagtcactgaatttgttccacttctggaaaaatctagacaccagagcaatctatgaactttaatttccaatcactaccgtcttttgaggttgtaaaatcggtaaatggcagatttttcactctcattcctttgtggtgataggatcaagttcaccgcttcattttagtcattaaacaaagatggtgatgggaggagaagcatccatggaactggaccagtgttttcagaagatgaagatggaaggaatctcgatcaaagagtggaaagatatccctgtggagcttctgatgaggatcctttcccttgttgatgatcgtaatgtcattgttgcttctggtgtttgcactggctggagagatgctatctcttttggcctcactcgtctccgtctctcttggtaagaatttctatctaacttataaaccctttttgtatttaggactcttctctgtgttggtgttttggatttgaagtaggagttgagtttctagagtctttattgtatcttgtgcttagggtcatgttgatttattgtctatttgtgtaagatcagatctttttttgttgcttttgttttgaggaacattttagcagtctatatatgattgatttggctagattgaagaaagtgaaaaagctgtttaaatttttgatggaactcttttaagatgatagatcagttttcaataggaggtgaaaccaagttctttaatccagaagagtggtctgaagatgactcttaaatctttgaaccactagaagcttgttcttgtcacttccagtgtattcagattgatctctgtctactacactctttgatgttgtttcttatttttatactaggtgcaacaacaacatgaacagcttgttcttgtcacttccagtgtattcagattgatctctgtctactacactctttgatgttgtttcttatttttatactaggtgcaacaacaacatgaacagcttggttctttctcttgttcccaagtttgtaaagctgcagactttaaatctaaggcaggacaaaccgcaactagaggacaatgcagtggaggccatagcaaatcactgccatgagttacaagaacttgatctcagcaaaagcttgaaaattacagaccgttcactttatgcacttgctcatggttgcccagacctcacaaaactcaaccttagtggctgcacttcattcagcgacactgctattgcgtatttgaccagattctgcagaaagcttaaagttttgaatctttgcggatgtgtcaaagctgtaactgacaatgccttggaggtgaatctttgtttttctttaatgttctctcccaaacttggttttactcctttggtcataagtgtggcagagttgatagaatttgttcatgttgttgtgtgcaggctattgggaataactgcaatcagatgcagtcactaaacttgggatggtgtgagaatatcagtgatgatggggtaatgagtttagcttatggctgtccagatctcaggacccttgacctctgcggctgtgttcttattacaggtacttcacatagttaagcttactcgaagctaagatcattagttttccctctgcagagaactatcattggataaactgcattgaaataaacaaaactagtaggttgttatagatggactccgaaagccattgatcttgagactcaattcggtttgtcttgtactatttcgcagatgagagtgtggtagctctagcagactggtgtgtccacttgaggtcactggggctatactattgcagaaacataacagacagagcaatgtactcgctagctcaaagcggggtaaagaacaaaccgggatcgtggaaatcggttaagaaaggtaaatacgatgaagaaggactgagaagtctcaacattagccaatgcactgcccttacaccttcagcggttcaagctgtttgcgattcatttcccgcacttcacacatgctcaggaaggcattcgcttgtcatgagcggctgtctgaacttaacaactgtgcactgtgcttgtatccttcaggctcatcgtgcacacaatgcggttcctcatcctgctcattaa

SEQ ID NO: 140523 - DNA, 1354 bp, Arabidopsis thaliana landsberg
ttgtatgacataatgacgacgagacgaaggacaaaattgtcatttaaggaataaaagatattcttacaaagatattttttgctcgaaacgaggagaaaaaatcattagttatcgaaaatgctcacatgatgtgggcctaaccactaacccaattaaccacacatcttaatcagagtaagttgaaacaaatctttcagcaaaccctagaaaacatgtttaaccctagttattacgtcacacctgttctataaattaaggctgcgtcttatcacctcaaatcacataagtctctctcttacattttgaaaccctaatttctcaaaaaaaatgtctgaagttgagtaccggtgctttgtcggcggccttgcctgggccaccaatgatgaagatcttcaaaggacgttctcacagttcggcgacgttatcgattctaaggtctgttacacgagagatcggtctcccggatcgagccgattccgatgattctgatcctcgacggatctgattccgatctgtttctctgttacttgattcgattactgttactatgttctctctcgttctttgttactgttacttaatttgtcccatcggtacgttcatcttcctgcttctatgagctcggagatcgatcgatttttgctttattttcatcgctttgttttatattccttccacgattgtttttgctgatgtgtatgattttgtttgtttacagatcattaacgaccgcgagagtggaagatcaaggggattcggattcgtcaccttcaaggacgagaaagccatgagggatgcgattgaagagatgaacggtaaagagctcgatggacgtgtcatcaccgtgaacgaggctcagtcgagaggtagcggcggtggcggaggaggccgtggtggaagcggtggtggttaccgcagcggaggcggtggtggatactcaggaggcggtggcggcggatactcaggaggaggcggtggtggttacgagagacgtagcggaggttacggatctggtggaggcggtggtggccgaggatacggtggtggtggacgccgtgagggaggtggctacggaggcggtgatggtggaagttacggaggcggtggtggcggctggtaatcaaagatagagttgtttgcgtgctgctgctctgtttttggtttagatttggttttgtgtcaccacttctggtttggttatcgttcgtttggtttacttttttgatgaaacagtttcgtttaagtcttctttgtctggaacgaaatgttaattcgcgtgttgtttactaaatttataacgtttccttttaaccagattcgagattttccctcaaataatttatcttgttagaca

SEQ ID NO: 140524 - DNA, 1639 bp, Arabidopsis thaliana landsberg
gattgagagtggtgtcatcaagctaggagagaaacaggttttcaatttatttggattagtcttcacctttgtttttcctgcaaatggcatttaactgatttttgttgttcaattctttcatttttctaatcatatcagtctgagagcaaatgtgccctagtgtatggacaaatgaatgagcccccgggtgctcgtgcccgtgttggactgactggtttgactgttgctgagtatttccgtgatgctgaaggccaagatgtcttgcttttcattgacaacatcttccgtttcacccaggtgagccttattttcatctagattttcagcacctttgtgccacaagcatgatctaaaacactctcttgtgtaggccaactctgaagtgtctgcgttgctcggtcgtatcccgtctgctgtggggtaccagccaactctggcttccgatcttggtgctcttcaagagcgaatcacaaccaccaagaaaggttcaattacctctgtccaagccatctatgtccctgctgatgatttgacagatcctgctcctgccacaacttttgctcacttggatgccacaactgtgctttcaagacaggtgtgaactttctccttctgatgcttcttttcaatataattctgcatatcttgtaatgcttcataaatctgtcatctttatactttttctttcctatgtgtagatttctgagcttggtatctaccctgctgtggatcctttggattcgacgtcccgtatgctctcgccccacattctaggtgaggagcactacaacacagctcgtggtgtgcagaaagtgttgcagaattacaagaatttgcaagatattatcgccattttgggaatggatgagctaagtgaagatgacaagctgactgttgcccgtgcccgtaagatccagagattcttgagtcagccattccatgttgctgaaatcttcactggtgcccctggaaaatatgtcgaccttaaagaaaacatcaacagtttccaggtatgatacatacaacaacattttgctataatcatatgattatcaaacattttgctttgaattcctgaaagctttcaatgctgccttaacatgtccgcgtattagaagtttagctacaactgcctttcagtatagaagaattcattgtgatgtctatgtgtagatggactaaatttactctggcgtagatagatttgttattatcaaatagaatatttagagtaagagtaagtgaccaaaatcatcttgtgtttgtttcagggtttgttggatggcaagtacgatgatctttccgaacaatcgttttacatggttggaggtatcgatgaggtggttgcaaaggcagagaagatcgctaaagagtcagcagcttagaagctggatccatctcttgcatatgcttaatacctgtctgtttcttgtgacaataacgaaaagaaaaaaaccactgcctgtgagttacccacaccaagcggaatttgagttccgtatttatagtttctttcgaattccttgagagctacgagatgatgctgaacatacccttcattcccttgtactcagatttttggttcatttacttccttgacttgttgaaataaaggttaagcaagtcttgcagattatga

SEQ ID NO: 140525 - DNA, 691 bp, Arabidopsis thaliana landsberg
  unsure (1)..(691): unsure at all n locations
aaaaaatcactaaacatgaagaatctggtcatatttgccttcttgttcttaagcatcactactgtaatcaatggtggaataacaagtaaatttgtccgccaagctttaccatcgatcgaaatgtctctcgacactttcccttctcctggtggctacaacactcctgaacaggtatgattttctcatgttaattaacttagatcataaaaaatttctttgttattttagagctttgatacagaaattttgttttaagtttttaaagaaaaaataattagcacttgattactttaacaataaaatcttaacccaattacccaacctttgaagagtttcctagcgttttaacatttagcaattatatttcttatgataacgtaaacacccaccaccaatttcgttctacaaaacactattatcgtttttttgtgtcattgtgtgttaatgtgtgttttcttaaaatgagttacctgatggcttattgtttatatcgtgaccaaatgcaagctataagatttttttgtttgctataagattcatattgataattttttatatgtttttttttaggttcatctgactcaaggagaccatgatggacgtggcatgattgtctcgtgggtcacaccgttgaatctcgctggttctaacgttngtacctactggatcgctactaatggtagtgacgtaa

SEQ ID NO: 140526 - DNA, 923 bp, Arabidopsis thaliana landsberg
atggatttggatccaaagaagtttgctgcactattggacaaaattgaagctgaagctgatgagtttctattagctcgaaatcaggtactcgggaatctgctttggtagtatctagttggaaatattcactacttcgtaatttatatgtgattgacagattgaggaaagcacaagatttttcaatctattgttgtctgcaacttattttgtcttgtgagaaaacagatattatatgatatgtattgttgttaggtcaataagtttttttaaccaaaatggagcttgtaatatgtgtaatagatggtggagaatgacaaggagaggaatgcaaaccgagaggctcttacagcactaaggaagagagctcggacaacaaagactagtgttatgtctccatttgattctatgatgaaggatatccatgggagctcaacgaaacctttggtccaagaagtttgctccacatgtggatcccatgactctagtgaacccacctggatgatgctcccaggagctgatctttttgctgcaattccgtttcatgctgtgcatacaatgctagagaaaggtatcatctttgtttacatttatttgctactctcatttagagactagtgcagtttcctcatgagaaaacggcctacttgttactatgtgaagatgaagagaaaatggagtttgaatcgaagaagttacagagcttagtgaaggaaaaagctctgtttatatcggaactaggggctcttgctgatggtatttctcctggcgttatcagatcgttggtggctttagaggacaaaccttaagttaagtagaagaagtagaacaatgttagtttgtcacaaaaaggatatgttcattgattctcttgtatgatgggaaaagtcattatccttaatattaattaaaatcacaaaactttc

SEQ ID NO: 140527 - DNA, 3265 bp, Arabidopsis thaliana landsberg
gaagatctgaaagtgaacgcgaaatcacttcgccagcgttattgttaacaagaatcatcatattagtctccgtagatctgaatcaacgtcgtaacagtagcagaattttgcggtgaaacgatggttttggttacgtctgtgcgtgattacattaaccggatgcttcaggacatctccggcatgaaggttctcatactcgactccgaaacggtaaagtccgatctcgtcttcttcgattgctaatcttctctgatttgtttctggaatcgtggttcataatttcccttgtaaccggaaacacatcttcgtgattacttgtttattggattaattgttgaatttgcaggttagcaatgtaagcattgtgtattcacagtcagagctgcttcagaaagaagtgtttctggtggagatgatagattcaatatctgtgtcaaaagaatcgatgtcacatctgaaagctgtttatttcatccgtccaacttcagataatattcagaaattacgataccagcttgcgaatcctagatttggagaataccatttatgtatgattttttcatcttctaactatttcgagtttatcattgttcactcacaatatacaaaatttgatgttgtttatgttatgaattctttcagttttctccaatctgttgaaggatactcagattcatattttggctgattccgatgagcaggaagttgtacagcaagttcaggtgatttttagacttccctcatccatgatgtttttgaataggaggctaatgctaaaagaatgtttcatagcctatatgatggatcaatatatgtatagatttttagctgtctctgagaagttgcttggtttgtgatgaaacggccatacttgtggagcttagtatcccccctacctgtctttagttttctgatttaaacttatattgcttggtgcactcggcatagtactgtataatggcttgtttaacatagtctttgtggttttttatattgcaggagtattatgcagactttgtttctggtgatccatatcatttcacattgaatatggcatcaaatcatctatatatgatccccgcagttgtcgatccctctggtttgcaacgcttttccgatcgggttgttgatggaattgcggcagtgtttctggcgttgaaacgaagacctgtcatcagatatcagaggacctctgatactgcaaaaaggattgcacacgaaacagctgtaagtgaagttgtttgacaagctctcgtaaagttatttgttcccgctatattttgcatgcatgtgatggaactaattcccacttgtgtctatccaatagtctgaaaattcgctgtttatgtttcagaaattgatgtatcagcatgaaagcgctctttttgactttagacggactgaaagctctccgttgctacttgtaattgacagaagagatgacccggttaccccattgctgaatcagtggacatatcaggtaacttgactaaacaaaattattgtgctactctatgatataagatgtgcctcccgctgtcttgcttttttgtaagactacgacttactaattaacgagattttctgtaggcaatggtgcacgaactcataggacttcaagataataaagtggacttgaaatccattggaagtcttccaaaagatcagtaagtggttagtattctccaatgccattggtttttagttgagaacctttacagctatatgtctcttaaactggcaggaggaggttatatcatcagagcaagatgcatttttcaaatctaacctgtatgaaaattatggggatattggaatgaacataaaccgaatggtggatgactgtcagctggtggccaagagtaaccaaaatatccagacagtaggtacaaatatggctagtcttagactattctctgcaaaaacttttgtaacaacagtttctcgtgctagtgacaattatatatctgtgaattcgttggttgtacagaggatatggccagatttgttgacaactaccctgagtacaaaaagatgcaaggcaacgtttcaaagcatgtaactctggttactgaaatgagcaagctagttgaagcaaggaaactgatgacggtttcacaaacagagcaggacttggcttgcaatggtggccaaggagctgcatatgaggtagtgaatatctgtggtgaacattcacttgtagtcgcatatattaaaaaatagctacaacctgcagaagttcttactgaataatttggcattcaataatttggagtcccatgcgaatgtaatccagtgaacctgcagaagttagcgaaatatgcaaaattgtgcagactctgctgtaagcacggagctctgactctctattcatgcttatttgcaggcagttacggatctcttaaataatgaaagtgtgtctgacatcgaccggctgcgtttggtaatgctatatgctttgcgctatgagaaagaaaatcctgttcagttgatgcaattgttcaacaaattggcttcacggtctcccaagtacaaaccaggggtacagtcagactatcatctgtttcctttcagtttaaattgcatctctttcttgtggctttattattctgcatctcttttaaggttgattttgatctgtccctctgctactactatacttgttaacctatctgcaattccgtccatagtagttttaccttttcgtttttatttttgaataacttgataaaagtaccctcaaatcatgttataactttctggttgccatgcaactgcagctagttcaatttctcttgaaacaagccggtgtggagaagcgcactggtgatctatttggaaacagagatcttttgaatatagcacgtaacatggctcgtggacttaaggtctgtatctgagttaactcgtctccagcaacattctatatctccctatatatatgtcatgttactgacatcttgaaaaatacagggtgttgagaatgtctacactcaacatcagcctcttctgtttcaaacaatggagagcataactagagggagattacgagatgtggattacccatttgttggagatcattttcaacagggacggtatgtgcctctaattttttcaatttcttaaaacaggtaacttgtttgatagttacagatttctgcaattcgtgaaaacttacataactaatcaaaaactgcaaaatttctggataaacaggccacaagaggtggttatttttatggttggtggaacaacatacgaggaa

SEQ ID NO: 140528 - DNA, 611 bp, Arabidopsis thaliana landsberg
aggagagagaaatctgaggaattcgatcttcgcttaaagaagacgaaacaatctctctctctttctctcttcaatggtctcaccatctctgtctaccatatcctagccaaagaagaagacgagaagaagaagagagggtcacaacaatgctttattcttcttatgtctccagccatgtgagctcccactgacacattctctgcatcttcggaagttttgttttggtttgattcttctcaccgattcctgcgaccgagtttgaccctcgagtttcgaggttagtggatggcttcatcctcatcgagaactagaagcagtagacctccaagtcccgcttcttccacttcttcttctcatctcagcaaccgtctcattcctcgttctaactctacctctgcttcctcattgattacctccgccgccggaatcgcctcccgatctatgacgcctagtcgcaccttctccgactcgggccttatcggctccggcagctttggaattggatcgcctgttccctacccgtcagaggagcttctcggtgaccctatggacgatactattagctctgagcgggatagtatctccgtcaccgttcgttttcgtccgttgag

SEQ ID NO: 140529 - DNA, 1948 bp, Arabidopsis thaliana landsberg
cgtcacttaatctccgacggaggaaaagtagccaccgcttgacgaatcattcatcaacacacgcagagagctctgaatctcgaggaagaagatggtgaggatcattcctatggctgcttcctccattcgaccttccctcgcctgcttctctgattctcctcgcttccccatctccctcctctccagaaatctctctcgcactctccgtaatcattctcctcctttcacatatatcggtgactacacaatatagatacaatcattctccaattgattagtgaattctagaactagggttgttttaaagttcccaaatttctggtttatgattcttgttcaatttgtgttgttgcagatgttcctcaatcacagctttttggtttaacttctcataagcttttgagaagaagtgtaaactgtttaggagttgctgaatctggtaaagcagctcaagctactacacaagatgatcttctcacctgggttaagaatgataagagaagaatgcttcatgttgtttatcgtgttggcgatatggaccggacgataaagtacttcactttggctttcctgtgatatggctttgatgttgagtctcttaaagtcacattaagtttaaaagaatcatctgattgctgtaggttttatactgaatgtcttgggatgaagcttctacgtaagcgtgatataccagaagagaagtatactaatgctttccttggttatggaccggaagattcacactttgtgattgagcttacttatagtaagttatatctgtatcccccttttatgctactgccaagactctgagtattgtagttcatttagctctagggagctcaagactatgcattttatatttatatggttggcttagctttcttagtgtaatttttttttacagattatggagttgacaagtatgacattggggctggttttggtcactttggtattgcggtcgatgatgtgagcttctacaatctatatgcaattatgttctttctttgaaacagtgtttgatgtgtatggattttactctttccacttaatggttttatatctaagaagtgaaaatttctttccaaaaggtggcgaaaactgtagagcttgtgaaagccaaagggggaaaagtaagccgggagcctggtcctgtcaaaggtggcaaaactgtaatagcattcattgaagatcctgatggttacaaatttgaactcttggaaagaggtcctacaccagaacctctttgccaagttatgctccgtgttggtgatctcgatagggccataaagttctatgagaaggtgattcctatgaaattgttttgagatgtggtagtttgcagcctgacagtaaatgtttgatctgatatagtttctatctcttttatcagaatgcattcttatcctctgatcatgtgtgcttcctttctttataggcttttggaatggaacttctgcgaacaagagacaacccagagtacaaggtaacttgcaatgcctcacaaatctaattcttacttatgcggccttaaccttccattgtatatatcggttatatgtttttgtataaactcacttaccgtaagtggttatttgcagtacacaatagccatgatgggatatggtccagaagataaatttcctgtcctagagctgacatataactatggtgtcactgaatatgataaaggaaatgcttatgctcaggtaaaagaaaattgacattccgttcgtctatattacttttcaactggagggttgcgatagttttaacttgtttgcttgtatttgattactatcagatagcaatagggacggatgatgtgtacaaaactgcagaagctataaaactctttgggggaaaaatcacgagggagcctggtcccttaccaggtattagcacgaagatcaccgcgtgtctggtacaaaatggttggaaatcg

SEQ ID NO: 140530 - DNA, 601 bp, Arabidopsis thaliana landsberg
atgggggcgagaataccgaacataaagcctgggaaagccacaatcgagtacttaacgaagatacaagcatcaactaggttttggggtaagttaagctgtttcattttagatatattgcgtatatggtacaagtataatctctaaaaaccatttcatttggtttgatgcaggtggccttctgttgagctttttggcaacagcttctactgtacttgaccactatctacgcagcatcaatcaaggcttttctatcggatttacatctgttttgatcattgtaagtgttctttccacgtatcaatatcattcagtttagcagtattgatgtcgttgtgttaataatctctattgtttgtgtacaggttggttccattattgaactcagaagatcttaccatgcctacaatgtaatgccgagtttaagcaaagcgttaaagagatatggcgtataaagggagattggagaagcagaagaacttatagatatattattgtcgtttaacctttagaagtttctgtagctcttttgattagtagattaggcattagataatttgtattaagaaccaaaacacatttccatcataatattagaagactt

SEQ ID NO: 140531 - DNA, 2241 bp, Arabidopsis thaliana landsberg
  unsure (1)..(2241): unsure at all n locations
caaaaatcgaaattcacaatttctcttcttctaaatccatggagtgatgatgatgatagatagattgaatccaaacacaaaccggatccgagattaaaaacaatccggattgtttatatttactttagatcggagaaagatgccgccggcgaccggagatatcgatcgtcagatcgagcagcttatggagtgtaaagcgttatctgaaacggaggtgaagatgttgtgtgagcacgcaaagacgattcttgtggaagagtataatgttcaaccggttaaatgtccggttaccgtctgcggtgatatccacggccaattttacgatctaatcgagctttttcgtatcggtggttcttctcctgatactaattatcttttcatgggtgattatgttggtgagagtctctctttaccttatagctttttttagggtttctacatttctcacatctcttgatttggatttgggtattttccctaatttggatttgattttgttgaccttttggggctaatgtagacttatttggaagtgtttactagaaatggatagattattgtttatctatcgaaaagttttggttttggaagattttgtcattgaaaagacgaaacttttgttttagctgttaactattctcagggcttctacaatggagtaacttgaccttgggagatataacattttaatgtagtttgtgaagcttcatgttcgagtactcggatttgtgtttctcttttctctgtttaagtgccttaagctccgtttcctacttaagttgctcaattagctaactaatggatcattgttaaacttgtgaagatcgagggtattattctgtggagacagtctcacttttggtagcactgaaatatcgttacagagatagacttactatcgtaagagggaatcatgaaagccgtcaaattactcaagtgtaagttgttttctctactaagttntgtattataagcttctcagcctctctcaaaatgtttcttgctgattgcttacctttttcaggtatgggttttatgatgaatgtttgaggaaatatggaaatgctaatgtatggaagcacttcactgatctttttgattatcttccacttacagctcttattgagagtcaggtatttaaaaaactaatgagctttttcactaccttagacaatctcttctctgtttctgctgttttggacttgactacagaactctttttttctgtaggttttctgtttacatggaggactttcaccttctttagatacacttgacaacatccgatctttagatcgaattcaagaggttagttccagaatccaaaccaacaaaaggatgcaccttacttgatgtttacataacgagactaagatgtttgtgttgcctctaggttccacatgaaggaccaatgtgtgatctcttatggtctgatccagatgaccgatgcggttggggaatatctcctcgtggtgcaggctacactttcggacaagatatcgctactcagtttaaccacaccaatggactctctctgatttcaagagcacatcaacttgtcatggaaggttttaattggtgccaagaaaagaacgttgtgactgtatttagtgccccaaactattgctaccgttgtggcaacatggctgcgattctagagatcggtgagaacatggaccagaatttccttcagtttgatccagctccacgtcaagtcgaacccgaaaccactcgcaagactccagattattttttgtaagtaccaaaagaactaaagctgcaattccacacactagctcttcgtctcttttgcttctattcttaaccactttttgtaatttcatattccttacgtctatttctgtttgttaaactctccattgtcttttaaaatccgtaattttttgtgtgcaaagattctggtccaagtaactgaaaccgctatcaccaaattctattgaagccaactttgtacagagaaatgatgatcatgttacacagcaaaagccctagctaggtagatataaatatgaatgttgtggagaggtacagacaataaacaaacaagctggagctgagatctaatctatagaaaaacaacactcagatcaaaataagatgaatcgagagtttcaagagctttctagttcgctttggatccaatcttgtgcacacatcaaggcttgcacggtactcggtctaagcgaacgccatgtttcactaacccgtctcctttgacaa

SEQ ID NO: 140532 - DNA, 867 bp, Arabidopsis thaliana landsberg
tactcgtacaaatctcagcccgttaacccggttcctaaaccggacacatctccttatcggatacagtaaaagaagagattcatctttctccgacgacaccgttgaaaggaaacgatgacgttcaagaaacgaatggagatgaagatatggttggtcaagaagtcaacatggaagaggaagaggaggaagaagaagtggaagaagatgatgaagaagaagaagatgatgatgacgtggatgatcttttgataccaaatttagcggtgagagatcgagatgatttgttcttcgctggaagttttccatcttggtccgccggatccgccggtgacggtggtggatgatgaaaacgaataaaatctcaatttacaatttacaaaaagaaaaaagtcagtttttaattattatttttgtttgttaaaacttgacatttattgtgttataaaaaaatatatagaagagaagagacagagaaagaaagactaatcataattgttctttgtttagattcatagctaaaattagtaaattagtcttgatttaataatttggtcgatttgaattgacattgcatataccaaagctttttcttggctccaaatgtataaatcatcttttcatttttcctatttcatttatgaatttatctgtattactaaactagtgatactttaaataccaaaaagcaacaaattttgtcaaaccctctatttttagtgttgtaaaggtcaatacgggttgacaaaagaaaaataaatagaggctaattctgaaacgaattaaagagttaagctaatttaatgtgcctagttaaaaaaaaagttggcagcgagaaccatgctaaaaaaatcgtatcgtattattcac

SEQ ID NO: 140533 - DNA, 583 bp, Arabidopsis thaliana landsberg
tcaatcatcatctccgatcatattttcaataataatttctgtgttttgattttttgagaattttgaaaaaaagatgttgctttacaagaaagagaatcagattgttaaaggaaacagaatcttgatcagcgtaacgtttcttggtagtgctggtccgatccggttcgttgctaatgaaggtgatcgtgttgcatctgtgattgatactgctttgaaatgttatgctcgtgaaggtcgtcttcctattcttggatctgatttcaacgattttgttttttattgtccaatggttggacctggaggtaacttgtcaaatacgcaaagtttctcctctgttttgtgattatataaagattgttttttttttaatttttagttttcttggtgtagctttgagtccatgggaagcaattgggtcggtgggagtgaggaactttatgttgtgtaagaagaaaccagaggagaagaaggttgaggaagataagggaagatcgaattttccgattaatggagccagccaaggagctggtggaagttttaaggcaaggaataataaatctttaagacttaaagtgactaccca

SEQ ID NO: 140534 - DNA, 2970 bp, Arabidopsis thaliana landsberg
agcgcaagtgagttacgagaggagctaaacagagttaattcagagaacaagaagctaacagagatgttagctagagtctgtgagagctacaacgaactacataatcatttggagaagcttcagagtcgccagagccctgaaatcgagcagaccgatataccgataaagaaaagaaaacaagacccggatgagttcttaggctttcctattggactcagtagtggaaaaactgagaacagctccagcaacgaagatcatcatcatcatcatcagcaacatgagcagaaaaatcagcttctttcatgtaaaagaccagtcactgatagcttcaacaaagcaaaggtttcgactgtctacgtgcctactgaaacatcggacacaagcttggtaagggattttgtctgtgaatcttttgattaaagagtcatatgtttaaaattgcatagaggcaaatgactaagcagagtgtaactctgcagacagttaaagatggatttcaatggaggaaatacggacaaaaggttacaagagacaacccgtcacctagagcttactttagatgctcgtttgcaccgtcttgtccagtaaaaaagaaggtaatttacacacatcgagtttattgtatttatagcttcatttgtaattgtttatctctgcttgcttcttcagttgtctaatgatctgtggtattactgttcaggtacaacgcagcgcagaggatccatcgttacttgtagcgacatacgaagggacgcataaccacttgggtccaaatgcttctgaaggggatgctacaagccagggtgggtcaagcacagtgactttggatctggttaatggctgtcatagactagcgttggagaaaaacgaaaggaataatacgatgcaagaggttctgattcaacaaatggcgtcatcgttaacaaaagattcgaaatttacagctgctcttgctgctgctatatctgggaggttaatggagcaatctagaacatgaacgtttttagtgaatgtattgtttttgtttgtttagaatgattcttcgttttcgaattgtgtctttcgatggggagataaaagatgtatataaatattataagtagatgaagaaatcgtataagtattcgagaaactttaaatgtacgaattctatataaccagttagatgaacattgagtcgtctgaatactgtatatgaaaattttgaaataaatgatgtggttaaaaaagggtcaccataaatattcaatcacaattgtctctttcatttattggaaatttggagtcatttgagaaagaaataagaattggacatcactaaatagtatcttaagtattctttaataatgtgttacacaagtaaattatagtattaagttggtaatacaatgatcggaaaaagaagcgcaaaaattcaaatgagaaaaatcaaagtttccctccataaactcactctgcaagtctcgtgattctcatttatttcctctccccatctgttcatagctctctgttacgactccgtcccaccattatcaatgtctatccgatcttggtccctccaacgaagccttcttccttttaaatctcgtctcttgttccaaacccaaaaacccatgattattcgttttctgtcttctcttggttttcaatggaaggctcgcagcggaggaggggagatgggtgcactatcgtgcagtgttatactcctaggagagtcgtcggtcggtggctttcggggttgagaagttccaaggggaagagagatgcaggggaggaacaagaagatgacaccagaaggtatcaattagcgcctataaggtgttcgacgagtttaaatcacctggtaatgcaggataataagcagaactgccgcctgaataagagtaaagagccggagactaatacatttggtgagaatcttgtgtttttctttttcatacacttttaattctctggaaatagcctaatgatcattgaacggtaagattgtctttagaatttgaaggagttccctttttctcttataggtaaacaagacttgtctttggtgggttatgtttatagacttatacttggttttctttgtgcagagtcacaaagcagagagtcacctttggaagtgggaattggttcttttttgctctatcttgttgttgcaagtaaaaccgagcttgataagatgacaaacctgcgaatgcaaatggagatgtttcttcttaatgcaaaagaacaactacagaagaaggatacacctatgtcttcaaatgaagcaagcggtttccagttttctcctcaagaattctcgaatttggcgtcatccattttccaagagtcatcatcgagtgttcttcaagaggagtacaccgaattcgaggtctcagagccagaggattatcgtcgaggaacagactgcaactcaaaactccaggctgaggtaggtaggttacctctgggtgaaaaagcagaggatagacaaacaaagcatcagattcagagacaatgcaaacttaaagtacttaaaagaaaacccttttatcttcttaagttgggtttcaactgtttaagcaattatgaaacaggctcttgattctcagacttgtggttcttttgtgtttgtaggacaatgaggtcacaaagagtcatataccagagatggtggtgtcagatgaaagatatggagtgtgtccgtacgaactagacaaaaagctgcatgaactactggagacaaggcaacaagaagagttagtgaagcttgagactgctctgaatcgtgttgaacgcagactacaagagaaagaaaccgaggtttcatggtggaaagacgcagcccgcctgcttgcccagcgtgttcctgaatcttctcggtctggactagaatggtgcaacccagactcttccacatgttcagagcgatctgttccaagatcttatgaagcatgttcgatacaccgcaccagtttttctagatga

SEQ ID NO: 140535 - DNA, 706 bp, Arabidopsis thaliana landsberg
attatcttcataatttggttggagacacagagattagaaaaggagaaggaatgcaattagatcagcttattcctaatgcatcacttagtagccgagatacgaatgctcgcatccaaccttttgttcttgatgaacttaaggaggcttttgagcttaatgatacagctcctgttgaattgcctccagtaagaatattgctctctctgtttagattttaacttcctgtaacatctagatcttttactaaccatgataagttgaattacttccaagtatcttgtgatgatagttgagctaggtttgagaatatgagatctcctgttcttatttcaggcagagaagggagctcctaccactgtatcaaaatcaaaaagtgagtcaaaagataaggataggaaacatagaaaacataaagacaagaaggagaaagatagggaacataagaagcacaagcacaagcataaagataggagcaaagataaggataaagacaaggatcgagacaaaaagaaggaaaaaagtggacaccatgataaggtaatagaactgtctgctcttgttggtacctaggccgtctatatatgtatattttggattcttaaattcgatagaattgacgtggtatacgctatcactttactttcagaaaaggaagaacaatgggactgaagatgctgatgacgttcagaggcacaaaaagagtaag

SEQ ID NO: 140536 - DNA, 1452 bp, Arabidopsis thaliana landsberg
taacaactttctgatgagctgagatcagacgtgatctttaatgtgtcgaaaaccggtggacatttggggtcaagtcttggtgttgtggagcttactgtggctcttcattacattttcaatactccacaagacaagattctttgggatgttggtcatcagtcttatcctcataagattcttactgggagaagaggaaagatgcctacaatgaggcaaaccaatggtctctctggtttcaccaaacgaggagagagtgaacatgattgctttggtactggacacagctcaaccacaatatctgctggtttaggtaatacaatcaatcattcctttggtgtgtttgccttgtgttgttgtgtttagacagtaaactgtaataagaaaacagaactgaatcagatatatgagttttacaggaatggcggtaggaagggatttgaaggggaagaacaacaatgtggttgctgtgattggtgatggtgcgatgacggcaggacaggcttatgaagccatgaacaacgccggatatctagactctgatatgattgtgattcttaatgacaacaagcaagtctcattacctacagctactttggatggaccaagtccacctgttggtgcattgagcagtgctcttagtcggttacagtctaacccggctctcagagagttgagagaagtcgcaaaggcaagtttattgcatttcttttctagaatggtaaagaatactggtctttatggacttgatgagaattttggcttttcttgcgtatagggtatgacaaagcaaataggcggaccaatgcatcagttggcggctaaggtagatgagtatgctcgacgaatgataagcgggactggatcgtcactgtttgaagaactcggtctttactatattggtccagttgatgggcacaacatagatgatttggtagccattcttaaagaagttaagagtaccagaaccacaggacctgtacttattcatgtggtgacggagaaaggtcgtggttatccttacgcggagagagctgatgacaaataccatggtaaaacaagttagatagataacgttttctctagttcctaagcagtgggatatatatattgattatttttctttcaggtgttgtgaaatttgatccagcaacgggtagacagttcaaaactactaataagactcaatcttacacaacttactttgcggaggcattagtcgcagaagcagaggtagacaaagatgtggttgcgattcatgcagccatgggaggtggaaccgggttaaatctctttcaacgtcgcttcccaacaagatgtttcgatgtaggaatagcggaacaacacgcagttacttttgctgcgggtttagcctgtgaaggccttaaacccttctgtgcaatctattcgtctttcatgcagcgtgcttatgaccaggcaagttcaacatcttaa

SEQ ID NO: 140537 - DNA, 2247 bp, Arabidopsis thaliana landsberg
aaaataaaaagagtatctctctcacacacatacacaaacttgacagttttttaatttctctgttagtgaactcaaaccttcccatttccatggacaccaaaatcggatcgatcgatgattgcaagccgacgaacggcgacgtctgtagtccaacaaacggcaccgtcgcaacaatccacaactctgttccttcctccgctatcaccatcaactactgcgacgcgactctcggccgtcacttagctcgtcgtctcgtccaagccggcgttacggatgttttctctgttcccggagatttcaacctcactttgcttgatcacctcatggctgacccggacctcaacctaatcggatgttgtaacgagctaaacgccggttacgctgccgacggttacgctagatctcgtggagtcggcgcttgcgttgttaccttcaccgttggtggactcagcgttttaaacgcgatcgctggtgcttacagcgagaatcttcctcttatctgtatcgtcggaggtcctaactctaacgattatggcactaaccggattcttcatcacaccattggattacctgattttagccaagagcttaggtgcttccaaacggtgacttgttatcaggtaatcacaaaaaatcagatctaattagaaatattttgaagattaattagcgtcggattatgaatgattttggttctgtttttgtttctcaggcggtggtgaacaatttagatgatgctcatgaacagattgataaagcaatatcaacagctttgaaagagagcaagcctgtgtatataagtgtaagctgtaacttagcagcgattcctcatcatacatttagccgtgatcctgtccctttttctctagctccaaggtaatttatacttgaactctgatcaatactctgtttctgcgagaattaaaactcacaaatggttttatcagattgagcaacaagatgggtttagaagctgcggtggaagcaacattggagtttctgaataaggctgtgaagccagttatggttggtggtcctaagttgcgtgtggctaaagcttgtgatgcctttgttgagctagctgatgcttcaggctatgctttggcgatgatgccttctgcgaaaggctttgtaccagagcaccatcctcatttcattggaacttattggggagcagtgagcactcctttttgatctgagattgtggaatctgcggatgcttacatttttgcaggtccaatcttcaacgactatagctctgttggttactcgcttctcctcaagaaagaaaaagccatcgttgtgcaacctgatcgtatcactgtggccaatggtcctacttttggttgcattttgatgagcgatttcttcagggaattgtctaagagggtgaagcgtaacgagactgcatatgagaactaccataggatctttgtccctgaaggtaagccattgaagtgtgaatcaagagagccattgagagttaacacaatgttccagcacattcagaagatgctctctagtgaaaccgctgtgattgctgaaaccggtgattcttggttcaattgccaaaaactaaagctgccaaaaggatgtgggtaagtgtccagaaaaaaaaagagactctaatctttacacttaatatagtgaagtaggcacaagatttgaacctgctttcttcattgtaggtacgagtttcagatgcagtatggatcgattgggtggtctgttggtgcaactctaggatacgcacaggcatcaccagagaagcgagtgttggcattcatcggtgatgggagtttccaagtcacggttcaggacatatcaacaatgctgcgtaatggacagaagacgatcatcttcttgattaacaatggtggctacaccattgaagtagagattcatgacggtccttataacgtgattaagaactggaactacactggtctcgttgacgccattcataacggtgaaggcaattgctggactgcaaaggtaattaaaaagattgatgacaatggagttttagccagactttggttataaactaacatatgaatttggtgtgtttgacaggtgagatacgaagaggagttagtggaggcgattacgacagcgacgacggagaagaaagattgtctatgtttcatcgaagtgattcttcacaaggatgatacgagcaaagagttgcttgagtggggctcacgcgtctctgctgctaacagccgtcctcccaatcctcagtag

SEQ ID NO: 140538 - DNA, 3897 bp, Arabidopsis thaliana landsberg
ctcattctctcatcttctcgactttgatgcgattgattaaatatggtggatacggttattcccggagatatggcttgtttggatgcagatttgttgcagcttcaggaaatgtcttcctttgttctcaattctaaacctggattcactcagaagctcttcgaccagtggctttctcttcccgaagctcagcgacaggtttttgctttttcactatgcttacactcatgcttcttagcttactctctgttaattcgaatctttctttcgtaatgtcacaatgatacttcggtcgcttacttactctgttgtgttgaggattggtgtaaagtttgaatctttctttgatagtgttagtgagtattacaatgatgccttaggttgttactgagatttggttgcttaattactctctgctttctgttaaggattggtgtaaagttgggatctttgatagtgttagttattacaatgatgcttagcttactgagaatggtgtaaagttcgaatatttctctgattgtgttagtgagtattataatgatgccttaggtggttacttagattcggttgcttaataactctgtggtgtaaagttcgtatctttctttgatagtgttggtgagtgttacattgatgcttaggttactctagtctaatctttttctcgtttcctaatcggttttctaggttggatcattgcttaaggatgctgtagctggagctcctatcaatgttactggaagtgcatcgggttctaattctgccactataccatctatgtttcctgcgggaagtgctcctccgctttcaccaaggagttgtggttcaccccgtacaaccaaacagagagccccttctaacttaggttctactctcaaagtagtcaacgagcctgttaaagagcctatacctcaggtttcttttcctctttttcttccttctttatatatatatagtaatggaatggagttaactcactgatttcttaacttgaaatgattctagttttatttccaaaatggtcgccctccaccaagcgagattaaagagcaatgtatgtttagaatcaatcacttcttttatggtcacatggatggcttgcagatacaaggttagaagtcagtcatttgttttctactatttatattttaactgtttattaacttttttctccattttcaatcaatactcagaattcaagttagtcaccagagaaatctgcaagctcccatctttcttctccacttcccttttccggaagatcgatctcaacaatacaggttttgttactaggtgtgtgctgctgcttctatgcttttttttttgtatggtgcttcctcttcatgtctgcatagtttactgaaacaccacccagtataacagtttttcgtgtttgtttctacagagatgcatttattgatttttgggtaaacgggaacatgttgataatggatacaacgacccaaatcttcaagatcctaaagcagaaagatcagagtttcattgttaaggtaattttcttttgatttgcatattcagtcagtcatgaaagcgagtttatactccagattctattcttttcttttctttttttcatggcaggatgatttcaaaccactacttaaagaactgttggcgacgcatcctggcctagagttcctgcaatccacacctgaattccaagaaagatatggttaggtctcaacttcatttacatttcctaatttatctaatgtattctttttccgcttggtattgcttgagtaatggtgtttagtaattgagtttggttgtacattttattcttcgaagtatatggttagctacagccctagttgagaagaatgagtgaataagtttgccattttcggtatgatgtacttatctaaatctgtcgaatggttaccacatcaatagtatttcttcttgatattgcttgagtaatggtgttcagtaattgagtttgattgtacattttattcttcgaagtatattggtagctacagccctagttgagaagaatgagtgaataagtttgccatgtacttatctaaatctgtcgaatggttaccacatcaataatatttctagtgaaagaaaataattttgataattgatgcatcgagatacagtaataaatgtggcattactctgtatggattttaaaatgtttataagatacggtttctttgttttgttgtgttagacatcatcttataacttgcaaatccataaagctttcaagcacggaatgaatcatcttcagtctatgaatcctgcagatataatcaatattagaaaaaataaattctggagcttgtttatgaatcatgcgtcagttagtaatgaattcacgagaacactttgattgctttctagatatctggagtccatattctttggtatttgctgctaccggtatcaaagctaaatttttaaggatgcttttctgtctgatacaatttgtattttgctgaaacagctgaaactgtcacctaccgaatattttattacataaatagatctggcaatggtcgaattacatttagggagcttaaacggggaaacttaattgatgctatgctacatgctgatgaagaagaagatattaacaaagtgttgaggtactgacaaaaatatttgcgtgctattgttgtatttatagtattgtttttgctcatttaacatcacttttctattcactttggcaattagatacttctcgtatgagcatttctatgtcatatactgcaagttctgggagctggatacggatcacgatttcctgattgacaaagaaaatcttatgcgatatggaaaccatgctcttacctaccggattgtcgacagaatattctcccaggttctgtctaaaaaaccttgctctttaatgcctactacttgaagattttatttatattgcttctattttaagagttctttcctcgttcaaagttattattgctcttaagatgcattggtttcttctcaggttgctaggaagttcactagcaaagttgaagggaagatggggtatgaggactttgtctatttcattcttgcggaagaagataaatcgtcagtgcctagcctagaatattggtaagttgtgatagaagggtccgaaagttgcagacagataccattttaagtctttttatctgacacaagtatacgttggactaggtttaagtgcatagacttggatgcaaatgggattattacgcgaaatgagatgcaattcttttatgaagagcagttgcatagaatggagtgcatggcgcaagaggctgttcttttcgaggatatcttatgtcagatgattgatatgatcggacctgaggttcaacaatatgtctcttgtttttttctttctatattaaggaagatatatgacagtcccagaagtagtttgggttcccagtttttctttctgactctcgcgactgtgtcatgtgtttgattgttttttatttccttccacagatcgaaagccatataacgctgcatgaactgaaaggctcaaagctctctggaaacgtcttcaacatcctttttaatctaaacaaatttatggcatttgaaacccgggatccgttcctcattcgtcaggtactactccacgtttgatattcaaccttgctgttttcttgacacaatgggcctcttataacatttcaacatgtcaaacgaaaacaggagcgcgagaacccgacattgacagactgggaccgttttgcacatagagagtatattcggctatcaatggaagaagatgttgaagatgcatccaatggaagtgctgaggtttgggatgactcgtcactggaggctcccttaaaagaacaaagaggtagcaagtcaacaaaagaaaatcataatctctagaatggattt

SEQ ID NO: 140539 - DNA, 879 bp, Arabidopsis thaliana landsberg
ctttctcagtcttcttctagaatcatctttgctctttctcgtcgactatttgctcgccggagaatctctctcagaatggctaggtcaccgagcaaacacggccgcgatcaaactcaggtaaccatttctactcgattcatctttcttacatgaatcttctctagctaaaatctctgtttactcgagaatgaaaaaggaaaaaaatcgaaacgactcgtgctccttatctccacttcgttatctagatttcatggagattgttagttcaacgaactgttgtacaatcgattatgtatatagactaagaacgaattagatgtttacttgcatcgtttggtttcgaatttttttttccaggatttccagggatttttcaatgacttgcaggattgggaactctcattgaaggataaagacaagaagattaagcaacaacctgctaattcgtcgaatccggttcgttcttttgtgtatatacagaagtgctctcatttgtaaaacttaatgcatccttatgagattccttgttttgaactttcagagtagtgagacgttcagaccaagtgggtcagggaaatatgactttgctaaaaagtatcgttccattagggatttgtcgagtagtttgattggagaaagtctattggattctagttcagagaaggagcaggtactttctcttcttcaagctttgtttttgttatgtgatattctcgtgatgcaatctttctcatggacctctcttggaatacagggtaatgaattcttcaagcagaagaagttcaatgaggcgattgattgttactctcggagcattgctttatcgccaaatgatgtgacttatgcaaatcgagcaatggcttaccttaaaatcaaagg

SEQ ID NO: 140540 - DNA, 1133 bp, Arabidopsis thaliana landsberg
atgcagagaagaaagctagtagaaatctccatcttcgtaatcagaaaatctaatttttcatcttccattaaatctctaaccaatctcgacgtcgacgtttcagttgataatgatgaagatcctctttacgccgacgtacctaaacctccgaaggataaatcggagaggaaaccgtatccgactccgatgaaggagttgattcgtcgtgcgaaagaggagaaacaactgagaaaattacaaccatgtcgagttctcgaagatccaccggataatggtttacttgtgccggaacttgtcgacgtggctcactgtgttcaccgatgccgtaacatgttgctctctggcctctctaaaatcattcatcatgttcctgttcatcgttgcaggttactttcactctgtctcatctctgtgtttgatttgctgatacttcctattgcttgtttaagcgttttatataatctatacaaccagaatttgatccttgaagtgttttgcgtgctttgtgtggtaattgattggaacagaagatccagtgagatttgaaaaaaaattgagacttaagttggctttagctagttttgaagtttgaacttgtgtggtttgtttgcagattgtgcgctgaggttcatattggcaagcaaggtcatgaaatcaggacttgcactggtcccgggagtggttcaagaagtgcgactcatgtttggaaaagaggaagagtgagtgatgttgtgttgttcccaaaatgttttcacctctatgaccgtgctgtgaaaccgagagttatacatgatgagagatttactgtccctaaaatctctgcggttcttgagctatgcatacaggctggtgtagacctcgagaaattcccatccaagcgaagatcgaaacctgtgtacagcatcgaaggacggattgtggattttgaggacgtcaacgatggaaattcagaattggcagttacttctacaactacacttatacaagaagatgatcgttgcaaggaagagaagaagagcttgaaggaattaagcttcgagacgatggagtcatggtttgaaatggttttaggggacaggaaactgatggagagatacagagtgtggacttgtgggtattgtccagagattcag

SEQ ID NO: 140541 - DNA, 1605 bp, Arabidopsis thaliana landsberg
ggtgatcaaaagatgaagacatccaaaacgctgaagattactatgatgatgctgatgaagactctcgtgatggtaagattgtagcatacttattacttacaaatggatacatttggaacaaaattgaattgaaaagttataatggtttttgaaggtgaaggagaggagaagaagagagattttactaaattggagttgaagccagatcatggaaacaggcctttgtgggcttgtgctgatggaaggattttcttggagacattttctcctctctataaacaagcttatgactttcttatcgccattgctgaacccgtttgcaggttcgattttgatttggtgattatatcaatgtacaagttatgatttttgttgttgattttcattcatttgttactatttcaggcctgagtcaatgcacgagtataatttaaccccacactcgttgtatgctgctgtttccgttggtcttgagacagaaactatcatttctgttttgaataaactgtctaagactaagctacccaaggagatgattgagttcatccatgcttctactgctaattatgggaaagtaaagctggttttgaagaagaatcggtattttattgagtccccattcccagaggtaagttcattaggctgatgctctgtctctgctcttgtgtatttggatattggttttcgtttttccattgcctttgctcaattgtaaacacaaaacaatctcaggttttgaaaaggcttctcagcgacgatgttataaaccgagctagattttcttctgaggtatgttgaactcctccatttagttcattatgtttgctttcaagattttatgctggataaaaatacataccatttttggttgttctcaacggtgttttgcatcttttgtcaccagcgtggcagaaatatatatatatatatatatatatatatatatatatatatatatatatatatatattctctgaatcacttgaagaaactttaatcatgggcgggatatacaattccggctggttggattgtggcggttgcaccttcagcggttcattttgatcctgcaatctatgagaacccatttgagtttaatccatggagatgggaggtcttagtgatacacttactataattttcagctgctctatttttttctctttctccatcatcctttgtaaacctatagatgggatttggttggttgtggcaggggaaagaaatgatttggggatctaaaacgttcatggcgtttggatatggagttagactttgtgtaggtgcagagttttcgcggcttcaaatggcaatcttcctccatcatcttgtggcatattacgatttctcaatggtccaagactccgagatcattcgttcaccattccatcaatacaccaaggatctgcttataaacatctctcagtctcctaccaagtgaaccatgcatgcagtttccaaatcttaataatcagatcattatatgcaataatctcatttcctgcttccgcaaaatctctggagtctttttatatgtaatatgcgatctctataatttttaaaaagtatctatcttgtcaaatgagttaaactttgtttatatat

SEQ ID NO: 140542 - DNA, 1151 bp, Arabidopsis thaliana landsberg
ttactcacttctgagtgaattccagtggccaccgaattctgagacagaagaggaggggactaaagagttgtttctcaagtgcaaaacgttccggttacatggaagtatggagcaggaggatagaagatctgcgtttgggacctttaaaacagagaagcaggctgttctgttgagtacagatgttgctgctagaggcttggatttcccaaaagtaagatgtattatacaatatgactgtcccggggaagctaccgagtatgtgcataggtaaattctgaaatggcaaaaaaccacttgacggttataccttagatacttagtaacttgagtttactgagcttatgtgtttgtgattcatggttgcagaagtgggagaacagctcgtattggtgaaaaaggagaagccttgttatttctaccaaccgatgaaatagactatcttaaggagctgaagaaacatggtgcatcacttacagagtaccctcttatgaaagtacttgataaatttcccatacccggcaatatggcccgaatcaaaaaggtcctatctctagaatcccatccatgggtcatatctctgcagagagctcttgaatcccttacttacgccgaggtacgattctcttcaatgtgttcctccctctctatgtgattaatttacagtctgatggtctaaatgtctcattgtttgtatctgttttattcacagccaaagatgaagagcctggcaaagaatgcatttgtctcttgggttaggggatatgcagctcacaagggagagctcaagagtattttcgtggtgaagaagcttcacttgggtcatgtcgccaagagttttgctctgagagaacaaccgtctttagttgggaaatcacatcacaaggaaacaatgaagagaaagagagacgaacgtcaaaaagggcaacaaggtaagaagagaaagaagatgagtggtactggcaatagaagtacacaaaaaacttgatcaaatcggtttcgccaccataaaccgtggcgtaagttttgtagttaaggagctggtttgctcatcgaatattttgaaatatcgaaaagaagttgggagctttatcatgtttgttaacaatattacttgtattggccagaaagctaaagattcacaaaatttgctt

SEQ ID NO: 140543 - DNA, 1681 bp, Arabidopsis thaliana landsberg
gccggcgaaccctaagacttttgatacctcttctcttctctctcttcgaagatgtctctctcttccctcactctcgactccaatccaagattcgctgttggtggaccttatcaccgccgttatcctcctcttcaccaccctcgaagcttcgtctcttgctctgctaaacgtccagctgtctccgcttcactgagcgtcgccgctgattcagccgccactgagtctcttggacggattggatcactgagtcaagtatctggtgtactcggttgccaatggggagatgaaggtaaaggcaaactcgttgacatcttagcccaacactttgacatcgttgctcgttgtcaggtaaagtttacatttttacctttttcatattccttatgaacttttcgtaaagattaaggatttaatctgtgtttgcaattggagatttgtgaacattttgaattgaatttgttgattcttttactaagtttctgttcctgatttgattgttccggcaaagtttaagtctttttgtttgaatattgtggtttggttaccgtagggtggagctaatgctggacacactatatacaattcagagggaaagaaatttgcacttcaccttgtgccttcaggtatcctgaatgaggatactacttgtgtcattggaaacggagttgtggtgcatttgccaggtctcttcaaagagattgatggtttggagtccaatggtgtctcctgtaaaggaaggattttggtctctgatcgcgctcacttgttattcgatttccatcaagaggttgatgggctcagggaatctgagcttgccaagtcgttcattggcaccaccaagaggggaattggtcctgcctactctagtaaagtgataaggaatggtattagagtaggtgatctcaggcacatggatactttacctcaaaagcttgaccttttactatcagatgcagcggcaaggtttcaagggttcaagtatactcctgaaatgcttcgggaagaagttgaagcatacaagagatacgctgacagattggagccctacattactgacactgtccatttcatcaatgactcgatttcgcagaagaaaaaggttttggtcgaaggtggtcaagctacaatgttggacattgactttgggacttatccttttgtaacttcatccagcccctcagccggtgggatctgcacaggtcttggtattgcaccaagtgttgttggtgatctaattggagtggtaagcatcattttcagtcatagacttgactttctgcattggccattatttaacctatgttgttctgagttagtagtattgatgttccccatacatttgccatttactctttgataacataatctgcaagcaatgacagagatatgaaagcattgtgatgatcctgttatttcaggtaaaagcatacactacaagagttggttcaggtccattcccgacagaaaatttgggcacaggtggtgaccttcttaggttagctggacaggagtttggcactacaactggtcgtcctcgtcggtgtggctggcttgacattgttgccctgaaattttcttgccaaatcaatggatttgcatcacttaatctcactaagcttgatgtactttcggatctgaacgaaatccagctgggtgtggcatacaagaggagcgtcggcag

SEQ ID NO: 140544 - DNA, 1767 bp, Arabidopsis thaliana landsberg
cttgctggtaatgctcaaccttcctggggtagttcatacattggtcagaactatgcaagtttctccagagctttcgggtaggtttgtgtttgtttcttgtgctttttatacctattagaattactctgtggatgtcatttcgactacgtgttgttttcttttataggtcaaaacctgttgtgaatgacattcttggtactggtttgggcactaacaatgccattagagaggagagagaggtaaaatgactttgtctacattttgtttgatttttgcttttgtaatgtttaagagcagcttaacttatcctttttgcctggtgatccttgtctcgatttttccagaagtcaaaatctactgaagctgcaattgttggtgctcaattgactcgatctttccgtgctcttgatgtgggaacatcgaaacgattgttttctacaatctcaggggatataaagacaacacaggaggaaccaaaaatcaaaagctttcgccctttatctcctcacctttctgtttaccagcctcagatgaactccatgctatcgattttcaacagaatctcaggggtttacttgaccggtgtcactttcgctggctaccttctctacctgaagatgggtatgatctgcctcacctacccgagtttctaccaagtcctttaccatacacaacagcaacttccagtcatcacctcggttactgcattagccgctatttatcatactatcaagagtactcactcactcttgacccattaaaaacctttaccaaagctctttcgatgaagccgccaaagtctccagtaagagtttctttgagatgattaataaggagacaagaaaacatttgttaaactctgtcttgaaaaggtaaagatttagcacctgtttctttggattcgaggcttttttgggggtatgtttgttgcttttctttgttctcagaccttttttgaatgatgtaataaatgtttaccaaagttctgttgctacgttactctttttgctacaagttttcttcatgaaatttgtcaacttcaatttcaggaaaagatgagttaaaatattgttttatttgcagtgatgatgttttaatttttaatgcaatttctatcaataactttaatcaggctaatttttgcgtttgttaaaaaaattaaaaaatttaaaactctatgcgagtcctccaaatcgaaaatgacttgggaccggagctcttatctctataactcctgcgattcctattccaactacgaacacagaatctcctcttctctatataagtaacacttttgcaatcacaatctcttcgattctctttgtacgctcgagatctctctggttcttctttaacaggggtcatgaaagcacattcctgtgatatatactaatttatgagccatccaaagctaccattgtttttgtcaagtttttactaaaatgttgattgtctcgtttcattctcttgaaggtgttctcaactgcagccgataatcagactcaagttgggatcagggtgcttcaaggtgagcgtgaaatggcaacagacaacaagctcttgggagaatttgatctagttggcattccaccatctccaagaggagtccctcagatcgaagtgacatttgacattgatgccaatggcattgtcactgtttccgccaaggacaagacgactggtaaagtacaacagatcacaatccgatcctctgagtgttgcgccttccaagacgagcaccatcaattccaaatgagttgctactga

SEQ ID NO: 140545 - DNA, 1327 bp, Arabidopsis thaliana landsberg
acggattacacagaccctagcctcttccccaaatcccaattctccattgctttagaagaatcacccaatggatctagagattgttggtcgtcacgctctctttttcgacgatgattcgatggcaacgtttgtcaactctccgacggcgctcgttgactggaacagcctctttattgaccgctacgatgttcgtcatctccctctcttctcctcctcctccacgtatcaaacgccgtcgtccgaattcaaacgatgctgacttggaatcggagctcgatcacgagcgttatctagatttaccgtcggaatctccatctccgtcggatgatgatgaacacggtaaggatgatgaactccgtagaaatctccgttaatctatatggtagagagactcgaactagctatgttagagacataaaactgttctagagaatgattacgaaaaattcagatcgaaacttaatttgtttgccctttggatttgctttactctccagatatgaatgaggattcagcaaatacaaatgcggatggttatcgtgctgtctctttttcatatggaagctctagtgatgtcaatgaccagaaaaatgctgctgatatggaatctggatttcacccgcctttccccgtgcctgattacttacgtcaaaacctggtaagttattgctttagattgttccctttagcagtatgctagtttttgctaacttatttggtacttaaactgatattggccacgtaaacatctgaaaggtgcatttgttattctaaggactactatgtctaagtttcagatgctaggagaagagatggagttgtctaaggttgtcattcacatgcaccttgtttccttttgctgccatgacaaggggcagtgcaggtgggattaagatgataaaaattcatgacttaccaagaaccttaaaactgattgcacaccagatgatgcatttctatacagttctgaattttgcaatttatggttctcgatacttatgtgaggttttattatgtatatatacctgcgagttgccaaaggtgtcattcatcatatttcacattactaattttttcttggatattttttttctctcttctttcagcctccaactgagaaattacatcagattatcactaggacttcaagtctttgaagcaaacacggtgggcaattttgaaattgtcttgagagtcaaacaaggagacaaccctacatttgggttcctaatgccagaccatcatcttcacctttactttaggtttcttgttgaccatcaagagcttttgacaggaaagtcttctgtagaagagaaaaagaacgaaa

SEQ ID NO: 140546 - DNA, 1312 bp, Arabidopsis thaliana landsberg
cttctttcctttatatttaaaaaccttcttcttctctctctgtacatcgtcacaacaaaaaaaaaacagaaggagaagaaacaaaaacaataatctcagcaaaaacaaatctctactcatcgaaatcgaaatcgaaatcaaaatatagaaacgatgtcttgctccgtcgccgtatgtaattctccggtgttttcaccgtcgtcttctctattctgcaacaaatcttcgattctctcgtcaccgcaagaatctctttctctaacgctttctcatcgcaaacctcagacctcttctccttcctctccatccaccactgtttcttctcctaaatctccatttcgtctccgtttccagaaacctccgtccggattcgctcctggtccattatcttttggatctgaatctgtttctgcatcctctcctccgggaggtgttttaaagaggaaacgacctacaaggcttgatataccgattggtgttgctggatttgtagctccgatttcttcatcggccgctgtggctgcgacgccgagagaggagtgtagagaggttgagagagaaggtgatggttattctgtttattgtaagagaggaagaagagaagctatggaggatcgtttctctgctatcaccaatcttcatggagatcgtaaacaggtaattttaaatttcaaattcatttttcagttttggtttagaattgaattgaattggtgattttgattcgattgattagcaattacagctcaaattagggtttatcatgtgagatctacattgattgggttaataagctatctaaaattagggttctttggggaaaattgaaattctgaatagaattagaagttttacagaatcatatgaaacaattgtgtgcttattgatgaatcgtgtattctaaacgttgttttgctttgtgataatttctcaggcgattttcggagtctatgatggtcatggaggagttaaagcggctgagtttgcagctaagaacttagataagaacattgtagaagaagtagttggtaagagagacgagtctgagatagctgaagcggtgaaacatggttacttggcaacagacgcgtcgtttcttaaggaggaagacgttaagggtggttcatgctgtgtcacggctctggttaacgaagggaaccttgttgtgtctaacgccggtgactgtcgtgctgttatgagtgtaggaggtgtagctaaggctttatcttctgatcaccgcccgtctagagacgatgaacggaaaagaattgaaaccacgggaggatatgttgatacggggatcctctagagt

SEQ ID NO: 140547 - DNA, 1838 bp, Arabidopsis thaliana landsberg
gcgtgccacacgacacgcattacgagggcactgcaattgtataatcggagaaacagaggaattcgccgatcaacgagagaagatggaagtgcaaattgaagaatctggtaaaaatcaaacctttccggaatcaattgaagcagacaaagcgaagcagatagtggtgcttctgattggtccaccaggaagcggcaaatcgacgttttgtgacaccgcaatgcgttcctctcaccgcccttggtctcgtatctgccaggtctctcttttttatcgattgttttatattgcacataagctgactgatgaaattcttcaacgagactaagtatttacaaaacttatgtaagaaatatctgtcttggttgctatcaatgtaagaattttgtgttggcttagatttcatttgtttaacttatttcaggacattgttaacaatggcaaagctggaacaaaggctcagtgtttaaagatggctacagattctcttagggaaggcaagagcgtctttatagacagatgcaatcttgacagggagcaacgttcagagtttattaagcttggtggtcctgagttcgaagttcatgcagtggttctggagcttcctgctcaggtttgtatatctagatcagttaaaagaactggtcatgaaggaaatctacaaggtggaagagctgcagctgttgtgaataagatgcttcagagtaaggaacttcccaaagtgaatgaagggttttctcggattatgttttgttacagtgacgctgatgttgataatgctgttaacatgtataacaagcttggtccaatggatacccttccttctggctgttttggcgaaaaaaaattagatactaaaagccaacccggtataatgaagttctttaagaaagtcagtgctctgcctgcttcatcttctaatgaagctactaacacaactcggaaagctgatgaaatgacagcaaatgtccgagtttcgccagtcaagcttggttctgctgatattgtacctacactggcattcccatcaatttcgactgcggattttcagtttgatcttgaaaaggcttctgatatcattgtggagaaagcagaggagttcttgtctaaacttgggactgcgcgtctcgtcttggtggacttgagccgcgggtcaaagattctatctctggtcaaggctaaggcttctcagaagaacattgattcagcgaaattcttcacatttgttggggacataactaagcttcgttctgaaggtggtctacactgtaatgtcatagctaatgctactaactggtaagcttccattattttcttgatcttcagtatatacatcttcactggatagctaattttgaaagctaaatgtgtaggcggcttaaacctggaggtggaggtgtgaatgcagcaatattcaaagctgctggtccagatcttgagactgcgacaagagtacgagcaaacactcttcttcctggaaaagccgtggtagttcctcttccttctacttgtccattacacaatgcagaaggaattacacatgtcatacatgttctaggaccaaacatgaacccaaaccgaccagacaaccttaacaacgactacaccaaggggtgcaaaactctccgggaagcttacacatctctatttgaaggttttctatcagtagttcaggatcaatcgaagttgcccaaacgaagcagtcaaacagctgtgtcagattctggtgaggatattaaggaagactctgagagaaacaaaaagtacaaaggatcacaagataaggccgtaactaatagtttggaatcagagtctctggaggacacaagaggcagtggaaa

SEQ ID NO: 140548 - DNA, 759 bp, Arabidopsis thaliana landsberg
cgggtggtatccaagaaaatgaggctgaactagcggtcgagaagcttgcggaggagctgctgtggatgacagagaagcttaggcgttatggtgcggtggcagaagggattaagcggtggagctacgcttccggtttagcttccttgtctctcacggctgctcccagggttcaaggcctcatggttaagatttcgggtaaagtatatgtattcagtttggttttgtttaggaacttctgttatattcggtttctatgcccacgaattcatagcatctcgacatgatccgtggttttctcacaaactttaatgatttgcagcgctcttaattggagagttagcaagagacagcacacaagttccaggacaagtgacattcaggctccttgcaaactggctcccactgtttagtcacgcaaggaacgggcttgcgtttcccgtactgacgggttatgagagagttgaggtggaacgagccatagacaaagctatctcgactttacctgcattggaccaagaaatcttactcactaactggctccaagatttctcagtctcggcctccgagtggcccaatcttcagccagcatatgaccgttggtgccactccactcgccaacttttcatgtagacgaccaataccatagtcatgttccaaagagaaaacatgaaaatttgttgtacttttctttgctacgagttttgatattaccttctgtgtccacatatttatcttaggtaataaaacaagtttcgatct

SEQ ID NO: 140549 - DNA, 1860 bp, Arabidopsis thaliana landsberg; identical to SEQ ID NO: 7818

SEQ ID NO: 140550 - DNA, 2992 bp, Arabidopsis thaliana landsberg
tgtctcaagtcttctctttcatttttttgttgtcgccgtctggttttactttttttctttcttcaaaatcattcattctttaacatcaagcaagaatcaaattctgggcatactcaaattcttcatctttttaatatatatttttgccaagaacaagtcttttactttatctctgcagtttttgtttgctcctttgtgcatttggtgatgattcaatcaatgattgtctcttacctttgatctaatcgtttccgcaaaattctcttctcgttttttctgatttcaagctcaacaatctcaaaataatcaatttttggtagtgtgttaaatctgagaagggtttttgggttttgggtttaaagcttgttactttgatctttatttggtgaattcgaagtggaaatggaatcgttaccatctccatttggcgatccagctcctaatttatccaattcggagctccgagaaactgcttacgagatcttagtcgctgcttgccgtagcactggaagtcgtccgctgacttacatccctcaatcgccgaaatctgatcggagcaacggtctgacgacggcgtcgttatctccgtctccgtcgcttcatagatctctgacttctacagctgcgagtaaggtgaagaaggcgttagggatgaagaaacgaatcggagacggagacggaggagcgggagaatcgtcgagtcaaccggatcggagcaagaaatccgtcacggtgggtgagttggttcgggtacaaatgcgaatctcggagcagattgattcaaggattcgtagagctcttctcaggatcgcttctggtcaggtacgttcattttagtaaattgagaaatatctgtttgaatttgaggtttaagagaattttgtgattttgattttagcttgggaggcgtgtggagatgatggtgctacctcttgagcttctgcaacagcttaaagcttcagattttccagaccaagaagagtatgaatcatggcagagaaggaacttgaagcttcttgaagctggtttgatattatatccttgtgtgccgctaagtaaatcagataaatctgttcaacagcttaagcagattatccggtccagtctcgagaggccgttagataccgggaagattacgggggagacgcagaatcttaggagtttagtaatgtctcttgctagtcggcagaacaacaatgggattggttctgagacttgtcattgggctgatgggtttccactgaatcttagaatctatcagatgcttttagagtcttgttttgatgtgaacgatgagttgctgattgttgaagaggtagatgaagttttggagcttataaagaaaacatggcctgtcttggggataaatcagatgattcacaatgtttgctttctctgggtgttgtttaatcggtatgtttcaaccgggcaagtggagaatgacttgcttgtggctgctcataacttgatactcgaaattgagaacgacgcaatggagacaaatgatcctgagtattccaagatcttgagttctgttttgagtttggtgatggattggggtgagaagagacttcttgcttaccatgatactttcaacattgataacgttgagacgttggaaactacggtttctttggggattttggtagctaaggtactaggtgaagatatttctagcgaatatagaaggaaaaagaagcatgtcgattcagggcgtgatcgagttgatacctatatcaggtcttcgttgcgtatggcttttcaacaggttcgcttatatttctttttctgttgatctgatttcgtatctgcagccatttatgtagctttattgttttttgtttgtaatagacaaagaggatggtggaacatagcaagaaatcaaaatcccggcagagcacgaataatcttcctgctcttgcgattcttgcagaggatattggtcatttagcttttaatgagaaggcgatatttagtccaatcttgaagaattggcacccgcttgcagctggtgtggctgcagctacgcttcattcgtgctatggtaccgagttgaagaaattcgtctcgggtattactgagttgacgccagatgctattagagtactcactgctgcagataagcttgagaaggatctggtgcaaattgctgtacaagatgcagtagatagtgaagatggtggaaaatcggttataagagagatgcctccttttgaagcagaagtcgttattggtaaccttgtgaaatcgtggatcaagatccgagttgataggctaaaagagtggatcgaccggaatctccagcaagaggtatataacaactttaaagatctttcctggtttttgttccttttaagagttttattcatatattgattggttttgtaactttctattgtaggtatggaatccgagatcgaataaactcggtatcgctccttctgctgtggatgtactgaggatggtagatgagacattggaagcgtttttcttgttgccgattcttttgcatccagttttacttcctgagctaacgtcaggactagacaagtgtatgcagcattatgtatcaaaggcgaaatcatcctgcggtaagcagttgattgtttagtttttggaataaaaaagctcacgctttgttcatttcacttatggagtttctggttttgtttttatatggtttctattaggctcgcggaatacgtttctacccgctttgcctgctttaacaagatgcacggtcgggtccagactacatggtgtattcaagaaaaaggagaagccaatggtagcttctcacaggagaaaatcacagctggggacgggtaatgactcggcggaaatacttcagttctgttgcaggatcaacactctgcagtatatcaggacagagatcgaatcatctgggagaaaaacattgaatcgtctcccggaatccgaagttgcagctttggatgctaaaggtaaaatatttgaacagtcaattggttat

SEQ ID NO: 140551 - DNA, 1661 bp, Arabidopsis thaliana landsberg
ataagaaaaaaaacacaaacatctatcaaatttacaaagttttaaaactaattaaaaaagagcaagatgcctgctatgttaacagatgtgtttagaggccatcccattcacctcccacactctcacatacctgacttcacatctctccgggagctcccggattcttacaagtggacccctaaagacgatctcctcttctccgctgctccttctcctccggccaccggtgaaaacatccctctcatcgacctcgaccacccggacgcgactaaccaaatcggtcatgcatgtagaacttggggtgccttccaaatctcagaccacggcgtgcctttgggacttctccaagacattgagtttctcaccggtagtctcttcgggctacctgtccaacgcaagcttaagtctgctcggtcggagacaggtgtgtccggctacggcgtcgctcgtatcgcatctttcttcaataagcaaatgtggtccgaaggtttcaccatcactggctcgcctctcaacgatttccgtaaactttggccccaacatcacctcaactactggtatatcttttatacactcgatcctatatacttgtacttgtgtttattagacctttttctacattaacaaaaaacatatacataaggacacaatgtttacatttaaggtagaacatccacaaacgttggacgccctataggtagtaacaaggggcatagataacagaagcaaccgaaatttgccttgtcctcggagtttagtggatttaagagttaagtgcataatgaaatctagtgtagtagtggacccaactcaaagattttgaagatatgtattcttttaatcttatcggagaaaacaaaacaaaaaaacaacaacttgcttttctattttatttaaaggtcgtacaaatatttaatgtatgtatatgcaaattgtgtctaaatctcatctgtactaattagatgaatacaattcgtttttaattaacagcgatatcgttgaagagtacgaggaacatatgaaaaagttggcatcgaaattgatgtggttagcactaaattcacttggggtcagcgaagaagacattgaatgggccagtctcagttcagatttaaactgggcccaagctgctctccagctaaatcactacccggtttgtcctgaaccggaccgagccatgggtctagcagctcataccgactccaccctcctaaccattctgtaccagaacaataccgccggtctacaagtatttcgcgatgatcttggttgggtcaccgtgccaccgtttcctggctcgctcgtggttaacgttggtgacctcttccacatcctatccaatggattgtttaaaagcgtgttgcaccgcgctcgggttaaccaaaccagagcccggttatctgtagcattcctttggggtccgcaatctgatatcaagatatcacctgtaccgaagctggttagtcccgttgaatcgcctctataccaatcggtgacatggaaagagtatcttcgaacaaaagcaactcacttcaacaaagctctttcaatgattagaaatcacagagaagaatgattagataataatagttgtgatctactagttagtttgattaataaattgttgtaaatgatttcagcaatatgatttgtttgtcctc

SEQ ID NO: 140552 - DNA, 1819 bp, Arabidopsis thaliana landsberg; identical to SEQ ID NO: 41967

SEQ ID NO: 140553 - DNA, 1629 bp, Arabidopsis thaliana landsberg
ttacactctttaagtcttaaacgaaacaatggcccttcaagctgcttctttggtctcctctgctttctctgtccgcaaagatgtattttattatctctttctttgttttagtaatcgtttcctttttgtttatgacctgtctcggagattaattcgcatgttttggttgcagggaaaattaaatgcttcagcatcatcatcattcaaagagtctagtctgttcggtgtttcactttcggagcaaagcaaagctgactttgtctcttcctcattgagatgcaaggtaccaaacacaatcttttatgagtatttttcttggaaaatgatgtaataatctaatcaattgaaatgcttctactttgtagagggaacagagcttgaggaataataaagcgattattcgagctcaagcaatcgcgacttcaactccatcagtcacaaaatcttccttagaccgcaagaaaacacttagaaaaggaaacgtggttgtcacgggagcttcttcagggctaggtttagcaacggcaaaggcattagccgagacaggtaaatggcacgtgataatggcgtgcagagacttcctcaaggctgagagagccgctcaatctgcagggatgcctaaggacagctacactgtgatgcatttggacttggcgtctttggacagcgtgaggcagtttgttgataacttcaggcgagctgagatgcctctcgatgtgttggtctgcaatgccgcagtctatcagccaacggctaatcaacctactttcactgctgaagggtttgagcttagcgttgggataaaccatttgggccactttcttctttcaagattgttgattgatgacttgaagaactccgattatccatcaaaacgtctcatcattgttggatccataaccggtctgtagtctcctcataagaagaatgctttatgtacttactacttactctgaaccctaaatctgaaatcttattcgttttgtttcttattgagcaggaaacactaatacattggctggtaatgtacctccaaaggctaatcttggtgatttgaggggactagcaggcgggttgaacgggctaaacagctcggcgatgatagatggaggagattttgttggcgcaaaggcgtataaagatagcaaagtctgcaacatgttgacaatgcaggagtttcataggcgtttccatgaagacaccggcataacttttgcttccctttaccccggttgtattgcaacgactggtttgttcagagagcatattcctcttttccgtaccctcttccctcctttccagaagtacatcacaaaaggttacgtctccgagtcagaggctgggaaaagacttgctcaggttagaaaattaaccaaaacctaacgttgtttgtgacgcaagaaaccattctttcagtttattattcttgctatgtactcaacctatgtattgatttgttgaaggtggtggctgatccaagcttgacgaagtcgggagtgtattggagctggaacaagacctcggcttcatttgagaatcagctgtctcaagaagctagcgatgtcgagaaggctcgtagagtttggaaagtcagcgagaagatcgtaggcttggcctaaaatttgatat

SEQ ID NO: 140554 - DNA, 1106 bp, Arabidopsis thaliana landsberg
cttcgaaaccgatcaaatccatggctaactcttccgctggctccgccgcagaccaccgcaacaaacacctctccgtcaatccaccgcaccagatcttcaaaggtattttaatcgcttcttttttcttcttcctcttctctcccgatgatttaggattgtgttttgagtctctctcattacagagactcgaacacaatcctaatttttcagtgtgattgtagctcatctctttcccggtgcttaatcggagattgaattagcgttaacagaatttatattataagtctctaattagggtttttggtgtctttagatcgttttcgataacattaccagttttcagctcttggggttttgattttggtactgaatttgttatttttaatatttggtattgttaaagcattgatttttaatggttccatgagctatgtgtgttatcaatttgtttgttgtttagtgttgttgtagatccattagatgtgtattgtttaaatctttgatgtgagacgtattggtacttcattgtatcccttgtagagacctaaagctgattcttttactgtgtatttgctaaaggattagagtgacattttggccttgtgtgtgcagatatccaaggttctgacaatgcgattcctctttcaccacagtggcttctctccaaaccaggggagaacaagactgggatgggaactggggtatgtttctattgtttgtgtatgcgtgcagtttgtttttgatttcttaacatgtgagctggtttaatgttttacaggatcctaatcagtatggaaaccattcggatgttgtgagaacaacagggaatggggaggagacactggataatctgaagaaaaaagatgttttccggccatccttgcttgatgcagaaagtggtcgtcgtgatcgttggcgtgatgaggaaagggacaccttgtcctcagtccgaaatgaccgctggcggaatggcgacaaagactctggtgataataagaaggttgaccggtgggataatgtggctcctaaatttggggaacaacgacgtggtccgaatgaccggtggactgattcaggaaacaaggatgctgcgccagagcagaggc

SEQ ID NO: 140555 - DNA, 1459 bp, Arabidopsis thaliana landsberg
atgatcatcactaaaaccaaaactttacaagagaaggtggaaacatcatcaacgttttggtctgagactctgagtgataccaatggtatcataccataccaaacgaattatcatctctcattcaaatgggcctcatatttagacatgataaggcccattaataacaaattacaagcccaatttgttttactctctttcgttttcttcaatcgtatccataaaccctagtctcgtcgtcttcgtcgatcatcgccgggaaaccacaccagtctcaatggcgaaaactctatcccgatccaccgcctcatgcgtcgctaagcgtttcttttccacctccaatgccgtcgcctctccttctccgcttccttctcatctcatctctcgtcgattctcaccgacgatcttccacgccgtcggatacatcccagctttgacccgcttcacaacgatccggacccggatggataggtctggcggctcatattcgccgcttaaatccggatcaaacttcagcgatcgaccacccactgaaatggcacctctatttcctggttgcgattacgagcattggcttatcgtcatggagaagcccggaggtgaaaatgctcagaaacagcaaatgatcgattgctatgttcaaaccctagctaaaattgttggcaggtgagtgtctttgtcatgttcgttagtgttattcctcagctacttcactataacaaaatgaatctgattgttgtttggtttaatagtgaggaagaggctagaaagaagatctataatgtttcgtgtgagaggtattttgggtttggctgtgagattgatgaggagacatcaaacaaactcgaaggtatctttttgtaacacttgttgtgtatgatactgtagcatagcacccgatgatgtgaatgtaattgatggaattgggtcttttgtgagtttcaggacttcctggtgttctgttcgtgcttccggactcttatgttgatccagagttcaaagattacggaggtaagtagtatcatcaactttgttctgcattttcttaatgtcctttgtcataatcataatcatcaagaacttgtctgatcaaagtctggtttgcatcactcttaagtaaacactgaaacttaactgcattttcaagcaaacagtattctgtgatgatgcatttgttcgtatgtatgaaagattgaacttgctaagggcttctctggtttatgtacataaaattttgttgattctatcagtttagcttataaactcattgctgaatgtttgttatgcaaatgtagctgaactgtttgtgaatggagaagtagttcctcgtccaccagagagacagaggaggatggtggagttaacgaatcaaagagggtcggataaaccaaagtaccatgaccgaatcagaaatgtccgacggagggagaacatgcggtgactcttattaatctcagccttt

SEQ ID NO: 140556 - DNA, 4404 bp, Arabidopsis thaliana landsberg
atggtcaacaatgccagagattgcgtgtcatctatagctaaaagggtgataaataccagggacccgaaaataaaaattggtggagctgctattattatctgtgctgccaaagttgacgaccagaagatgatagaaaatctgaatgagacacaattgtgtgccaaattcgttcaagcacttgtggggatcctagattctgtgcaagatcaggaaaaggatgagaaagataaaatctgcatatgcattcatcccaaagaaaaggaagaagatgaagaagaagaggcaacagaaaatagggagggttccacgggggcaacagttatttctggagacaatttagccatctggttgctctcggttctttcttgtcatgatgaaaagagcagagcagtaatattggagtcagaaggcattgagttgattactgacagaataggcaaccgttttctccaggtattcaactctcttatagattaaaatctttgagatcacaacttatcaaagtttcagaagtatggataaaaaaaaccatattatgaatgtgtgatagcgtttaacattctaactcattttggaatgctaggttgtcgtttatgttgctttaataccttttttacatttcaggctgataatggagaagatgccaacatttgggtttgtgctttattgctggccatacttttccaagacagagaaatcactcgcgcacatgcaacaatgaaggctgttccggtgctctcaaatcttgtgaagtcagaggaatacgcagacagatattttgcagcacaagctctagctagtcttgtctgtaacggtagtcgcggaactcttctatctgttgcaaactccggtgctgcggctgggtttatatcattgcttggttgttctgatgatgacataaaagaacttctgcagctgtcgcaggagttcactttagtgcggtacccagaccaggttgcccttgaaaggcttttccgagttgaagatattagagttggggctacttctcgaaaggcgattcccttactagttgaacttcttaaaccaattccagaccgccccggtgctcctctactttcacttaatcttctaactcagcttgctggggactgtccacaaaatatgattgtcatggtagagtcaggtgctcttgagggtctctcgaaatatctttcccttggacctcaggacgagcaagaggaagctgcaacaggtcttttaggcatcttatttagcagtgctgaaattcgaaggcatgagtcagcatttggcgcggtcagccaacttgtagctgttttgcgtctaggtggaaggggggcaaggtacagtgccgccaaggcattggatagtctctttactgctgaccatataagaaatgcagagtcttctagacaagctgttcagccattggtagagattctcaacactggttcagagagggagcagcatgctgctattgctgcacttgttaggttgttgagtgataatccatcacgggctctggcagttgcagatgtggagatgaatgcggtggatgttctctgcaggatcctttcttcaaactatacgatggaactgaagggagatgctgcagagctgtgttatgttctgtttgcaaatacaaggattagatctacagttgctgcagcgcgttgtgttgagccacttgtctctcttcttgtgactgagttcagccctgctcagcattcagttgtgcgtgcactggacaagcttgtcgacgatgaacaactggctgaactagttgcagctcatggcgctgtggtacctcttgttggccttctctatggtaaaaactatgtgcttcatgaggctatatccagggctctagtaaagttgggtaaggacaggcctgcttgtaaactggaaatggtgaaagctggagttatcgactgcgtacttgatattctccacgaagctccagattttctatgtgctgcgttttcagaactgcttcgaatcctcacaaataatgcgactattgccaagggacaatctgctgcgaaagtggtggagccacttttccatttgctgacgaggttggagtttggagctgatggacagcacagtgctctgcaagttctggtaaatatcttagaacatccacaatgccgcgctgattatacacttacaccgcaccaagtaattgagcctctaattccgctactggaatctccatccccagcagtccagcagttggcagctgagcttctatctcatcttctctacgaggagcatctgcagaaagatccattaacgcaacttgcgattggtcctctaatccatgtgcagggatccggcatacacctattacagcagagagctgtgaaagctctcgtcagcattgctctaacatggccaaatgaaatagctaaagaaggtggtgtgagtgagctgtcaaaggtgatactgcaagctgatccatcgctctccaatgtgttatgggagtctgcagcatcaattttggttatcatcttgcaatttagctccgaattttacctggaagttcctgttgctgttcttgtaagactgcttcgttctgcatctgaaaacaccgtggttggtgcacttaacgctcttctagtgttggaaagcgatgatggaaccagtgcagagtccatggctgaaagtggtgccatagaagctctgcttgatcttttaaggtctcatcagtgtgaggacacagcagcgagactgctcgaggtactgctcaacaacgtgaagattagagattcaaaagccaccaagactgcaatcttgccattgtctcagtacctcttggatccacaaactcaagctcagcaggcgcggttactagcaactttggcccttggtgatcttttccagaatgaagctcttgctagaagcaccgatgcagcttctgcttgccgtgctttagtcaatgtccttgaagaacaacccacagaagaaatgaaagtagttgctatatgtgctctgcaaaatctcgtcatgtatagccgatctaacaaaagagcagttgccgaggcaggtggtgtgcaggtcgtcttggatctgatcagttccagtgatcctgaaacgtctgttcaggctgcaatgttcgtaaaactactcttctctaatcacaccgttcaagagtacgcatctagcgaaaccgtcagagcaataactggtgagaaaatctctgtaccttttgtatcaatacgatctgctcattcttattatatatcttatatctcagatgttgcttccttttaatttgcagctgccattgagaaagacttatgggccactggaaccgtgaatgatgaatacctaaaagccttaaactctttgtttaacaacttcccgcgtctaagagctacagagcctgcaacactaagtataccacatctagttacatccctcaagacaggatcagaagcaacacaagaagctgccttggatgcattgtttcttctcagacaagcttggtcagcctgtcctgccgaagtttccagggcccaatcagttgctgctgcagacgccatccccctacttcagtacctaatccaatcaggtccaccacggttccaggagaaagctgaattcctcttgcagtgtttgccaggtactctggtagtcactatcaaacgtggtaacaacatgaagcaatccgttggtaacccgagcgtgttctgcaagataacactcggcaacaatcctcctagacagaccaaggtaggaaaagacttatcaccctttcgtcaattcactgtgactagtaattcctttagatatcaaccgtatctttcgattttctcaggtgatatcgacaggtcctaatccagagtgggacgagagcttctcatggtcatttgagagccctcccaaaggtcaaaaactccacatttcatgcaagaacaaaagcaaaatgggaaaggtatgtcatcaaacttcactcgtattttacagtttgaaaatttgccggtttaactgaaactgtggcttttcgcctctttctttctgcagagttcctttgggaaagtaacgatccaaatcgatagggtggtgatgctgggagcagtcgcaggtgaatatagtttgttaccagaaagcaaaagtggtcccagaaaccttgagatagaattccagtggtctaacaagtaaaccaccacttcattttttgtttttgtttgagaggtttcttaaatcgaaacttctgcttcatttttttgccaaattttttaaaaatcgtttgatttataatgctactgtatatagttggtattgtaatgtaatgattacagtttacaaatggtttttttttatcttcttctttttttcttaactgtgtttactgattcaattcatttgtaacattttgttgtcctcatttgtattttatgtatcttcatatttgttcat

SEQ ID NO: 140557 - DNA, 717 bp, Arabidopsis thaliana landsberg
atgtcagggaaacgggtcatagcaatatgtatgtctggtggggagttccagacagagaaaggcgggtcgctgtcttacaaaggcggcgatgctcacgcgatagatgtggacgagcagatgaaattcatagactttatctcagaaattggtgagatgtttaattgcgatgtcaggacagtttctctaaaatactttctcccggataacaagaaaacgctcatctccatatctaacgataaagatttgaaacggatgatcaaatttcatgagaactccaacactgctgatgtctatctcttacccgaagaagctactcccgacatttcaaacatgccagctagcaggttagcaaagcctttacataaatcattatatcaccttatcttttttaagtttctaagagtttttttcgtccagatcaagcagaacaacattgtctgaagcgattcccccggttcctatggacgacatgattgacgacacaatgggaccagaagagcttcccatctcaatctcagtctcagctcctcccgctgtgactatggaggaagtcatgaaccgagctgaagatgcacagattattattaatccatccgaattgatgtcatcgattgttgaagtcccgaatccgaaaggagatattctcacaaaggcaagaacacagcagtggcagaacacaatcacaggagtgggtcaacggtttaaaaatgttgggga

SEQ ID NO: 140558 - DNA, 822 bp, Arabidopsis thaliana landsberg
gccagttttcttctctgttgtttcgtgccctgagaaaccttgaagcagccatggctcccaaatcgaaagaaaaccccaaaacctcgactccagcaatcgaacatctcttcacttccctccacaaacatatcaaggatactaaatatgaagaagccgtcaaggtcgctgatcaaggtttccacaattctcactttccttcttactcgttgattttggtttggtgaaaatttgaatccgtgatttcgtttacagttttgtcgattgtacctaccgatgaggatgcgatccgatgcaaagttgtggcactgataaaagacgataagttcgatgattatctaatcaaagacgttaagatcaatggtgctctctccgttattaactcgtttccaatcgatctaggttttcacaaggtatagtaattttgctaagatttgaaagttttttggggtctaatggatgtttctcttgataggcgtattgtttataccgtgaaaacaagttagatgaggctttggtgtgtttaaaaggtctcgagagagagtcaaagactttgcttttagaggctcagattttgaactgtttggggaaagtagatgcttgtgtggatgtgtatcagaaactgaacaagtccgggattaaattgatagaggtcaatttagtcgcggcgttgattagagccggaaaagcttctcaagtattggagagtttgaagatcagacctccgactacttatcaattggcttataatactgcttgctctttgatcgaaaacagtaactatgttgatgctgaacaacttttgctcactgccatgaggtatat

SEQ ID NO: 140559 - DNA, 811 bp, Arabidopsis thaliana landsberg
atggttgcttttgtagcgcatgcaagggttatggttcttgctgcaactaacagaccgtcagagcttgatgaagcaatattaaggcgtcttcctcaggcctttgagattggaatacctgatcgccgggagagagctgagatattgaaagtgactctgaaaggagagagggtggaacctgatattgactttgatcacatagctcgcttatgcgaaggctataccggatcagacatttttgagctatgcaagaaagcagcttacttccctatcagagaaatcctagatgcagagagaaaggggaaaccatgtttggtaagtttaaaaagaaaacatggtccactgaaatgttcagtgttgcatccactagtttcaaggtactgatgttatgagtttgtcacgtttgcaggaccctaggccattatcacagttagatttggagaaggttcttgcaacgtcaaagaagacacaagttgcagcaggcgagtactcattgagctcgcagtcctcggcttggagaggctcaagggaaccagatgaggtccaggcagcgataagtgggatctcgaagcttctagtttctcagatcattaacctacagtcagaatctcaggattcatggcagcgggatcccgaagaagattcccgatgaaattccggatcacttttataaacgttctggtgttttcattggaagtttagaatttgtcacacacttcagtttattctgtaaaacttttcttttctttttggtaggatcatttgataacttatgactgtactaaaaagtctctcaagtttctacattactgaa

SEQ ID NO: 140560 - DNA, 944 bp, Arabidopsis thaliana landsberg
  unsure (1)..(944): unsure at all n locations
aaacggccaggctcacctaaacagcgggatgatactccatctggtaagcccccgctaccaaacaatactgcatcacaattcaggaaaggggcttaccacgagtcgttggagtttgtacaagcgttatgtgaaacgtcatatggtttggtagatatctttcccatcgaagatcggaagattggtcttcgggaggtgaaactgacttttcttattgataattaaatttatgtcaaattctacctttgtagcaactgactaaattttatatttcttttgtttggttttagtctcttgcagagatcaattttcatttatcggaagctgaaatcactggaggtatttttctaaaattatattttaagagttattatttggaggtctactttatttgtgtagctcaaatatattgagccggtatatattctataggccatgtatgcttttctctgaaatagtatgtgaacgtttcatgccctgttaaagtttctgagtgctcatcgtgttgcttgtcttaaattagtattatgtccgntatatcatatttatttccactcttgtttgaagaatctatgtttttccatccttgctcttttatcacttattttcctctcttgtataggatttccttgcacttgtgtttctttcttgagagaattatctggtccaatctttttggcttctaaacctccgcgtttttaaggattattgaattctttattttatatttcgtcaacattgtttctgttgtggtaaatgtttttgttatcaaattgaatttgtattcataatttaaattcaaataaccttccaggaatttgttttccaatggggagaggagtttttcgtgtggtccatattcctgaagacgaatgcattcttttgaattctagggaaaaggcgccatacatgatctccgtagaagttttgaaagcagaaacacccag

SEQ ID NO: 140561 - DNA, 741 bp, Arabidopsis thaliana landsberg
tccggtttcattcatatctctctctctctctgggccttactcaatcaccaccaaataacagacaaaaaaacgccttcatcgccggcgaaagtgagtcggagaatggcgtatatgtgcaccgacagcggaaacttaatggctatagcacaacaactcatcaaacagaagcagcaacaacaatcacaacatcaacaacaagaagaacaagaacaagaacccaacccctggcccaatccatccttcgggtttactcttcccggttcgggtttctccgacccgtttcaagtaaccaacgacccgggttttcactttccacacctggagcatcatcaaaacgcagccgtcgctttcgaggagtttgactccgacgagtggatggagagtttgatcaacggtggagatgcgtcacaaaccaatccagacttcccaatctacggccatgatccattcgtctcattcccgagtcgactcagtgctccttcatatctcaaccgagtcaacaaagatgactcagcgagtcaacaactccctccgccaccagcttccaccgctatatggtctccatctccgccatcaccacaacatcctcctcctcccccgccgcagccggattttgatctaaaccagccgatttttaaagctatccacgattatgcacgtaaaccggaaactaaaccggacacactaattcggatcaaagaatccgtgtccgaatcaggcgacccgatacaacgagtcggg

SEQ ID NO: 140562 - DNA, 1404 bp, Arabidopsis thaliana landsberg
catttatgggagaaacacttgaagactaaatggggaaaaatccttggaccttctgctcacaaagaatggcaatgctatctatcttctccatatcatctcgattctcctcatcacaaaactagtcatcttggtttggccaaaatcatatctcttatgcgatcgctttcatccatttttcgagatgatgatcataggaggagatatccatcttcaatccctcttgactctaccatgaacttctacctatccctcgaaacaggtcgcttttggtttccagctcaagtttacaaccgtgaggtaatcatagatttcataaacatatatagctactccattttattctttatgggtttgactaaagtagtgagggcttttttggtgtaagagcagaatggacatgtagggttcatgttgtcatgctatgatgctgagctcagctatgacactgacactaatacttttcaagctaggtataaaatatttcatgtccatattcaacacaatattttgcttattcttcatagaaagctataaactatactgtattgaggattttaggtatccaccacatggtaaaagagcaattgcggttgaaaaagacgtgacatgggagaggataagagcagctcccgttgatgcatcaccccataatctctatgtgtcagattctctaaatgagttaaaacccggagaccacatagagatccagtggagaaggaacaaagagtttccttatggtaagtataatctataatgcttgtggtttggacataatatgactctaaagcacatttgtgtaatgttgttgtgtaggatggtggtatagtgttgttggacacttggaatcttgtgatggcaatcttaaccattgtcaatgccataatagcggtgagtcctcaactttatatttctgtttctgcttacaaaggctattaaattccatacacttagttgaataggagaaaaatgtaagacacaatgattctttatcgctcctaaaatctgtttctttcctttttttgccttggaatcaccacaaaacgtagtaatcaattaaaaaagacaaggttctggaatgtcttatacccacttgcattagaattcaacataaccccctaatcatatggcattagcctttctctattaatgttgtgtcaaaagtatttatgcattcacatgttgtactaaatggtaagtgttgatatggtgaaaatagagatgatggtgttggaatttaaccagtacacagtcggatcaaggtggagaaaaacgatgattaacaggagagatcatagagagaaaggtaacgaggaagacgggttctatggaggaattcgaaaaataaattgtaaagaagatattgaaatgtggaagcgtctttggccatcctccatcttggagtag

SEQ ID NO: 140563 - DNA, 819 bp, Arabidopsis thaliana landsberg
tcaaatgtttgaattcttccatctctcataattcttaagtggtcgtggtgtgtactatctcctaagctctctgttttttttttgtttgttcattggctatatttcaggtcttcttcttcttcttcaagaatgagctaatactcacagaagaagaagatttttctttggatttttcactactggtaagctcggttcctccctcttttgactgtaatttttaaattcggttttttttttggtgtttttctgaagaagttctgattattttatttgtgaagtttggatctttcttacagatttagtaggattaaagaatgttgttgtctgtagttaatcttcctctgtaaatctatatgctttgttacaaatctatgcttcaggaatctagggtttatattccactttgtttactttaataaaatatagtttcttaaaccctttttgtctgatgaatcaaaatctaattactttatttgaatcaagctaaaataaattggtactttaacatccccacagtgttcttctataatcttgattttttggaaattttccagaggcattgttgtgaaattggatggtagtagcattggaatggcagaacaaaagagtagtaacggaggaggaggaggaggagatgttgttatcaatgttccagttgaggaagcatcaaggcgttccaaggaaatggcttcaccagagtctgagaaaggagttccctttagtaaaagcccttctcctgaaatctctaagcttgttggtagtcctaacaagcctcctagagctccaaatcagaacaatgtgggtctaactcagaggaaa

SEQ ID NO: 140564 - DNA, 1712 bp, Arabidopsis thaliana landsberg
gttggagattctagacttctgtctgacgttgatgatcttgctagtactttttcaaaggttagctagctttaatacgcgttataagtgatcacacttgcatcctatacttctgttttctttctcattatattttcaaaatggtaagattgctttgaagaagcttgtgactgaggatttttatctttgcttttacagttgaatagggaacctgatgtgtatagtaatacggggccaatcactgataggcgatcaagtcagagtgagttcctatttgccctaatgttgtcttcaaatccttgtgaaagaatacttgatcaatttatttctgtgtattgcattgatttaatatttcatgtactgtctgtaaaacttcgcatcatagctttacttacttctgtgtatttatgtatgtcaaatctgtgtctgtcagtttacttttaacgttatgatttagagtgagctgttttaactccattctccttatccatatgtttcaacgatctgccctggtttcttatacattcccatggtttttcatctatcttgcaagcaaagctttagtttgtggtttaacatttcaatggtttctctcagattctttagctgctgagtggacccatggggaagagttaccaaattggtacggccggcaaatactggactctgatgccattaaagatgacaaggtgtggtcagcacagccattttcatctctggaccgtgttgagcagagaatccctgacagaacaaaattgtatccagaaccacaacgtcaactgcatcaagaccataatcaacaacagttttccagcgaaccaattcttgtcccgaagtcatcttttgtttcataccctcctccaggcagcatatcaccagatcatcgtttaggacaccctaatataccatatcaatctggagggcctcaaatgggatcgccaaacttttctccttttccaaatttgcagcctcagttgcctagcatgcatcatggatcaccgcagcatactggaaacaggcctcagtttcgtcctgctcttcctgggaataatctccctccagctcaatggatgaatcgtcaaaatatgcatcctggggatagttccgggatcatgaataatgcgatgctacaacagcctcctcatcaaaacggtttgatgcctccacagatgcagggctctcagaataggttaccacatccgatgcagcctcctctcgggcatatgccaggaatgcagcctcagttatttaattcccatctttctcgatcatcatcctctggaaattatgatggaatgcttgggtttggtgatctgagggaagtaagaccaggatcaggtcatgggaacagacagaatgtgcgttttccccaacaaggctttgatgctggcgttcagagaagatatccattccggtctaaatatatgtcagctggtgagatagagaatatactgagaatgcagcttgttgctacacacagcaatgatccttatgttgatgattactatcaccaagcctgtcttgctaagaaatctgcaggtgcaaaactgaagcatcatttctgtccaaatcatttgagggaccttcaacagcgtgcacggtcgaacaacgagccccatgcttttcttcaggttgaggctcttggtagggttcctttctcttcaatccgcaggcctcgtcctctgcttgaagtggaccctccaattcagctaaat

SEQ ID NO: 140565 - DNA, 1163 bp, Arabidopsis thaliana landsberg
ctcaagacttacaaaagctaccttgagctctcttctgctcttgagaagatgttcagttgcttcaccattggtaacgttttctagtctctccttctttgagatcaataccagtgattgagttaactgttttcttttggttccttttttcaggtcagtttggttctcatggagggtgtggcacagatgggttaaacgagagtcgcttgactgatctcttgcgtggttctgagtatgttgtaacctatgaagataaagacagtgactggatgctggtcggagatgtcccttgggagtaagtctttgatttttaaaagatcaatctcagcaatgtaaattaacatcaagtattagatcatatctaatgatcttagcacagttttagcttaacagaagaatatagatcagtgaagctctcttactgttttttcctctgcagaatgtttatatgctcctgcaagaagctgagaatcatgaagagctctgaggctatcggcttaggttagtatttctttactaaaccctagtttaatgttccacacccatgtgctcgattttaagatgtattagaaaggtggtccattttgaactaagacacccttctaatactttcatggttcttaagcttctcgctggattctataaacattctgaagctaaagaaatatattactggagaaactaaaacgatgcaatttagtcctttccaagcctcttaaacactaggaacttactgcacactactgtacaaatgaagaatacacaatgattcatacacaaatcttgctttttctttttttgcagctccaagggtgatggagaagtgcagaagcaggaactaggaaaagcccttttatgtgataatatatgatttgaaaaaatatgtttttaagaaattgaatagccattttgttttgaagtattcttgtgtgtttgtgtgctaggagtgatgtttgatctttcttaaaccagcctctactaagctctaataaggcctcttcctcttacttctttctctaatcaatctaatgaaacatatgggtttgtgtatgtgtgtttaacaaggaagacttcataattcatatgtataaaagttttggtagtgtgtaaaccggatgtggttttcattgttatatatgttttggatgcaaactttactatagaaa

SEQ ID NO: 140566 - DNA, 1950 bp, Arabidopsis thaliana landsberg
attccttttttcctgcaggataataaagagatccattaggagtaaattatctgacaagagaatacaatgggcattttcattttagttgaattagggatttgggctcgtcatggctcctggaggcagtgctttgaaagaagtcatggaatctaattcaacgggaatggattacgaggttaaaacggcaaaagtggaagttaataataacaaacctacaaagccagggagtgcagggattggaaaatatgggatccattcgaacaatggtgtttacgagcttcttgaatgtcccgtctgtacaaatttaatgtaccctccaattcatcaggtcagtagtatatgagcttgaacagatttgtaattgactaattgcaatgtttcatgttctaaatgttatttaattctacagtgtccgaatggccacacattatgttcaaactgcaaactgagagtgcagaacacatgccctacatgccgctacgagcttggtaacataagatgcttagctcttgagaaagttgcagagtctttggaagttccatgccggtaccaaaatttggggtgtcatgacattttcccttactacagcaagcttaagcacgagcagcattgcaggtttaggccttacacttgcccttatgctggttctgagtgttcggttacaggtgatatccctacacttgtcgttcatctcaaagatgatcataaagtcgatatgcatgacggatgcaccttcaaccaccgttatgtaaagtcaaatccacatgaggtcgaaaatgctacatggatgcttacggtaaaactttctttcgatatgttttcttctttttatcaaaggtttctaatttaaagtctgattcatgttatttcttcagatgaaatttttatgcaggttgtgattttatatcatcatatgactaagcttttacattcaccttctttcgctgttatcctcaaccatgaaatattcctggctttagctcttttctacaaaatacagattggattctttagaaggaactataggaatctctggctctgctcttttatgctatttttggatttctattttgcctattaaattttgaccttgaacaatccggtgccaaactcccttactagctgctattccggttcccgctttgctcttctttgttagtccaattttacggtctccttaagtacctaccatagggtctcttagtcccactttaatcctcacacttaaacttgaatctcagttactaaaattttgtttccaggtgttcaactgttttgggagacagttctgtttacacttcgaggcgttccagctgggaatggctccagtgtacatggcattccttcgttttatgggagatgagaacgaggcgaagaagttcagttacagcttggaagtaggagctcatggacggaaattaacatggcaagggatccctagaagcatccgtgacagtcacaggaaagtccgggacagtcaagacggactcatcatcccaaggaacctcgcactctacttctctggaggtgataggcaagaactcaagttgagagtgactggacgaatctggaaagaggagtaaacgaaaaacgaaaaacgaagaaaagaaggaatcgattgaaaaatgttgtacataagaagaagcctcgtggaagagctaatgatcatatggaagatttgaagtttgttgtctggttttagtgtggtataatggattcttctccaatgggaatgaagatgagatgatgataatgacaaatcttctatgatgaatcagtttggaggagccattgttactattttgtggctgcaagaactatattatctctgtattttttgttttttttgttgggatttcttttgtggtttcagagaatgtaggaaaaagtaagacatggttttggctatgttcttgttgtaaaaccaagttcaaaacagattggtgcact

SEQ ID NO: 140567 - DNA, 621 bp, Arabidopsis thaliana landsberg
gtaggaaaacgtgggagtctattcccaaaaagtataggccactctctggtcgcctgaatgttgtcttgtctcgttctagcggtttcgatatagccaacactgaaaatgttgtaacttgcagtagcatagattctgctctagacttattagctgcacctccgtttagtctgtccattgagaaagtgtttgtaatagaaggtggcgacatattgaggtgtgtgttctatagtcaagactctcccttttttcgtgattttaattctctttgatcgtgttatgtttgttgtattgtagggaagctttgaataaaccgagctgtgaagccatccacataactgagattgatacaagtatcgactgtgatacatttattcccacggttgacacttctgcatatcagccttggtgttcgtcgtttccaatatgtgaaaatggtcttcgattttccttcacgactcatgttcgtgtaaagagttcttctgccggtgaagcctctgatgagagtgatggatcaaaggttcttcaagttgattggaagaagttttcttctgttcatcataaaatgatttttgaccggcatgaggaatatctctacttaaatctggtcaaagagataatctc

SEQ ID NO: 140568 - DNA, 1002 bp, Arabidopsis thaliana landsberg
gaagcttttaaacttaattcagattcttcaagagatgatgatgatgatagctttaaacctatttcacttgttaatttgtttacttcattggacaacaatgaaaccataccaccaccaccaccaccacctgttgctgctactactcaggatcctagttcctccggttctcatgtctccgtggatacgtgtaaagagcctagttttactggtaagtaatggtttgtttcgtgtttattggaccaatgtgagtggtggatagagtaatggaacttattattgtgggattgtgcttgttttagggacttctagagatgaactgtttggtcaactctttggtgcgcttgagaaagtacggtattttaggaatacacctgatggagatgatgatcctgctcagctggagaaagctacaaggatatttcatgattgtgtcaatgtaggtttgattttctttgacggttttacttcttctgttggttatgagtttggttataagttttgtgtttgtgtatcaggaaatggaaaagtctggatgtcagacgtttgatgtgaatagcttggcggaaacactcaagtgtcaaggtacttgtgattgcttgtagtccctttcttcgaaatcgttggaacttcttccttgttctttagttgttacaagcctatgttagaatgagatcgatgaaggtttgttttttgggtgcttgtaacctctatgtgacattctctgccttttaggtaacaaagctatgcagtccaatctttatcttgaggcagtcgagctttattcttttgcaattgcactgacggataagaacgctgttttctactgcaacaggtgagtgataagtctgtaatttgattaatatcgaaactgagtttgtagctctttggtggtcttcctgcataatatgaatttgatgtgctccgttatttcctcacttgttatcagggctgctacatatacacagatcaacatgtgctcagaagcaatcaaggactgtcttt

SEQ ID NO: 140569 - DNA, 1274 bp, Arabidopsis thaliana landsberg
tgaactcatgttccactcggattattcgagtagtaatgatacatcgaaagatagcaaagaaattgaaagactggatgttccatctccttcaatttgcttcctcaacttatacacactacaggtattatcataactccgtgaaaagatcaactaattcatttgctggtcgaaacaacctgagatctttgtcttgtaggtattccatgtgctaaagcttggtcaaggccaggatataaccgcactggctctgaacgttgacaacacgaacctcttagtttccacagaagataaacaattgataatcttcactgatccggctgtaagtttataatctactacaaaattagagggtgtttagggttagaatcctcagttgctatgatttactaccaagtctccatacaaatcagtatccttatcaaagacgcaaattttctctcattgtacatagtttttgacaaaggaagtttgttaatcactgcagttaagcttaaaggtggtggatcagatgctgaagctcgggtgggaatgagagaaaagaatcaaacctcactgatacagaatggcggaaactcacggcaaggaaaatctcatgtttgaatactcggggaagtcaaaggtgtagcaagccgtggaaatcttaaaatcagattgtggacatgtttgttcgtctgtaacatatgtaagtatggttagtcccagtaaagtgaacccgtttcatatttttgtttgttctgatttcgtcggtccatagtttttgtgaagatggtttacagatatcaaaggcttgttgagtttgttgaggtatacacacaccgaagcttcctttttctctcccccattgagtttgtttgttgggttatacgtgtgtgataaatggtgtctcactgatgattttaatataaattcatttattcatagcaattttgtttcgaagttacttcttttaactatgcattgaaaaaactcgtaataatcttttttgctcttttttggttctttcccaacaaatccagcattgtagttctacacgtctcacacaacttttacacacacacgagtttttaacttgacatagtttcccccctacaaggcaggtgggtacgcaatattactgaagttgttcgcttccgccctctgcaccgccctgtgaaccgctcttctcaagctccactcataacagaactccaaagtcagccttagagctgttcctagcccaagcacaactatgactccaataatgatgttcaccggaagcgcagagaccccaagtg

SEQ ID NO: 140570 - DNA, 410 bp, Arabidopsis thaliana landsberg
catatcagagacacaaggagatgcaactacagttttgcagaccgaaaaaagtagttttaaaccaagtatatctaagcgtaaatctgttccaagctacaaaagccagagaaagcatcacaaggtaaagaaaaaaccccacaatgcatagaagtttctgagtcccatctatctcaaacatacttacctgtctcgttttacgtttgcagcttcaggccaccaaaagtgatctgcaacaacaaacaaagaaagcaaagaaggccaaaaccacacccacaagctgcaaaacaggaaacgaatgcgaagaaacctcacataagctaaatagcagcacctaagataagcattacctgtaaatctttgcatttaaatcacaaaagtttgttctttcgaatcagataacaactttctgt

SEQ ID NO: 140571 - DNA, 1928 bp, Arabidopsis thaliana landsberg
  unsure (1)..(1928): unsure at all n locations
gaggagagtcctttgttaaatccaacagaggaaaattgcattccacgagactgtttattcctgtaccatcaaaagatgaaacaggatcagagaaatttgcttttggagtaactgatcgcattgtggactgcaattcgtcttcaaaagtggctttgccgaaaggtcacaataaaatccttgctattagggtcctcaggtggtcgttcaatgatgtgattcatgcatgtggacaatctaaaaactctgagctagcggagcagctaatgcttcaggtatctcccacttctttcccattcatccatttcatgtccttatccactcgctatgctctgtgcgtgatactgtagagttatgagaagaaaaactctttgaacatttgtagaagacnnnnnnnnnnnnnnnnnnnnnnatagtgggaattttgatcttctgtctatgaccttgatttaaatttcgaagctttcatgatcattgatacgctctttacgtcctcgttgggctataaaagtctgttatatagtccgcttcccttttgtcctttaactggttcgggtcctgctttgtggtatttggtgaaacctcatttctttctttcttcttatctgcactaaaagatgcaaaatcttgggttgctaccatcaagtcacacatatgatggtttcattagagctgttgcatttccagaaggatatgaatatggcatgacactggtaggagtttgtataatgtacaagccatctctttcaacatttctttctttctgtagtttcggttttttttataacgatttctctttatatatcatatctcgacgcagttgaaagtaatgcagcagcagaatctgaaaccatatgattcaactctagctacggttgcagcctattgcagtaaagcccttcaagttgatttagctgaacatctgctggatcaaatatctgaatgctcatactcatatcctttcaataaccttcttgctgcatatgactccttggtgagttagtttgattctacatattgaaagctatataccgtagctacctcgtttacctttcgctgtttgtgtattctgttacaagtatatttcccgaaccctcaagttcattagtttgatcctagatgccatagaaatttcaaaagaccgtacttgtgactatgttgccactctaatcataggagagtcttggaacaaagggttaatgatctgttctattagtttgtactcgaaatattcgtacaaaaataatcggcattctaagtggttgtcttgttagtatgtgtccatttttagtacataatccttgaacctaaacaactttattctgtttatttacgggtgtaactgtgagattcagcttcttactattgctttgtaggatcaaccagagcgtgctgtccgagttttggctagaatgaaagagctaaaactgcgtccagatatgaggacctatgaactgctcttttccttatttggtaatgtaaatgcaccatatgaagagggcaacatgttgtcccaagtagactgttgtaaaaggattaaccgctatagaaatggacatgatgagaaatggttttcagcacagtcctatctcaaggctgaatgtggttagtttctgctccatatagataggtcttgacctgttttaagcagattaatcaaatgtaatattaatctggaaaatcccttttaaggcgatactatcaatctttacttcttcattgtgtatgtttgtgttatatatcagaacaatggacttatcgtttacactttcctttttctttcccagcttagagctctcggagctgaaggtatggtgaatgagatgatccgacacctgcaaaaggctgagaacctcagtgctcacagcaatatgtatctaggaacgcctacatacaacatagtgcttcattcacttctcgaggcaaacgaa

SEQ ID NO: 140572 - DNA, 812 bp, Arabidopsis thaliana landsberg
cagtggccatcgaatcggaactgctgaagtagaatctgctctggttttacatcctcaatgtgcagaagcagctgttgtaggcatagaacatgaggtatgtggactgactatgcataagtagttgggatatgaagcacagtatgacactgataagagttcaagaaatgacttatgatgtttaattagttatcgaggcaggaagagtcttctagctctctataacaacctagggtttcttcatggttcttgggtttgattttgttcttgattccgcgttcttcatttaccagtcaactaaaagctgaaatcagtttgcttcttatcacacaccaaagtaactaacggtcaaggctcttgcttgtatcaggtaaaaggtcagggaatttatgcgtttgtcactcttctggaaggtgttccttacagcgaggagcttcgtaaaagcctagtactaatggtccgaaatcaggtatgatatatattaaggaaaaagtgaatgcttaagctttagagatgctaaacttttgaggaactgttctttgcacacttctgatgagtatcggtatgaattttgccatttccagattggggcttttgcagcaccggacagaatacattgggcaccagggttgccaaagacgagaagcggaaagataatgaggagaatcttgagaaagattgcttcgaggcaattagaagaactcggagatactagcacactcgcggatcctagtgtagttgatcagcttattgcacttgccgatgtgtgatgactaacattagcatatgagccaatggagagtaatggagttttg

SEQ ID NO: 140573 - DNA, 240 bp, Arabidopsis thaliana landsberg
cattttcttaccactcaaagagtgcgcactcattatcatcgtttgaaactaaacatggcgacggagaaaagcaagattctggtgatcggaggaactggttacatcggaaaattcctagtagaagcgagcgccaaagctggccactccacattcgctctcgttagagaagcaactctatccgatcctgtcaagggcaaaaccgtccagagcttcaaagatctcggcgtcacaatactacac

SEQ ID NO: 140574 - DNA, 472 bp, Arabidopsis thaliana landsberg
gggactggtcgggctggtataagtttccttaaagatctcgacataacttcctacgatgttcaggttgtgtctccccagaacttctttgcctttacgccattgttacctagcgtcacttgtggaactgttgaagctagaagcattgtggagtctgtccgtaatataaccaagaaggtaacaaaggcctctctttcaaactgtatgcaggcatcatcaccatctgctaagttcttacttaaatagtatctgttgttgttgttatcagaaaaatggggaaattgaattgtgggaagcagattgttttaagattgatcatgttaatcagaaggttcactgtcgaccagttttcaaggatgatcctgaagcaagccaagaattttcccttggatatgactacttgatcgtagcagtgggagctcaagttaacacatttggcactcctggtgtacttgagaattgccattttctcaag

SEQ ID NO: 140575 - DNA, 1741 bp, Arabidopsis thaliana landsberg
actcgtgttcgtgagaatcacagaaacgttcctcgtttatcaccacaaggtacggacaggatgggagacctttttgacctgggtattcgctattcaagtcttgtctttaaggaagttgattggtcgttttccggctttttttggccgaaagtgtccattccttgtctttattttgcagccaaaggtaagtccttttgttcaagcattttgtacagttctgaagtaaataaatgtttactgaacttttgctcgatcttctctgaatgaagttgagatcacgtatcttactctagctgtaacctttcattcagtctcgtggtcaggcagttaacattattattcattttatgaagcttatggtagtgacagagctcggagtcgttctacacattcgaaatctccagggagacctcgttatagtggatgggataagccgtatgataggcaaaagcctgaggtgagtggttataggtctgaaagatgggatcgagagagaatgggtggctccagcgatattcaggtgagtcatcagtttgaacgccctcctttcccacaaacgttagaagaactagaattggaatatacgagggatgcattggagcttgaaaagaaacgcgataaggaagaagatgaggagaacaacaagcatcgtgaggtaagagatccagtgactgaatgtgtttttcttagattcaaaaccgagtataggctggattgaattctatcacctcagaaatcgcaattcctaggagttccaactatgaaggtttcatgtttttttacattttagttgctcatagtattggatggcagtggatctctccatatgtaatatagtccccaatctcctagtgaaatgcaattcctgttgaggaatttcagcttctgacatcaatttgtgcgagtttatagacaatccgggaactgagagagagttacatgaagaaactgcctggactaaggggtatgaatgctaaacaatgggatgacttccttcaactcgatgctcagagacgtcatcagcaagcacggcagcaaaactctggtctgagttatggtaacgtatagacagtttcctccttatgctgagtttgatgatggctactcttcaaatcctcctccctatggtggaaacaatgtgccaatggattccaagggaagatatccaaatcatggagataactattcttcaaggcatcaagacaacaattatggtgggttccaacgccagagacgtgaagaatatggaaaagcctacaatcgttattagatgactgtagtcagaacttgtttggtaagttgtttctcatctatgaagatgaaagttagtaatgtgctgttcttggagtttatggttttgattgagtagcagatcgaagtgtacattgtggatttttgaagagttcatctttgtctctccctactttgtggcctaaaaaagttgtttgaaaatttcagggtctgcgactctgctgaatatgtgttacgacgaacgagcaaaccaagggttgtaggtaatctgaattcttattaggttgtacacaatgtggcttggagacaatgagcaaactaagggttgtttccttgctgttacgtcactctcatatgtagtaatgttgaataccactatcctttggcttttgtttttaaatatctaaagatttcttgtttaagagtagtgataaaaccattatgattgtactcgtagtttagcctttaaagatattgttttctttgagat

SEQ ID NO: 140576 - DNA, 639 bp, Arabidopsis thaliana landsberg
atggcagctaatatgatgagaccggcgtttgcttacactgttgtgtacgtgaaggacgtagctaaatctgtagaattctactctagagcttttggtcacaacgtccgtcgtcttgacgaatcccacaggtttgtattatgaattgttactattctctacgttggattgtcttaggtgttgttggatacgatcataggaatgtaaacgacagaatcgtattaggtcatgaaacaaaactctagggtttgagattctattggtgcgatgtcctataatcaggtccgatccgctggctaacatgctaagcaaacacaccaaatatatatgtttgatgaatgaaagaaactggtacatacaggtggggggagctagagagcgggcaaaccacgatagcgttcacaccgcttcaccagcatgagaccgacgacctaaccgggaaggttcaggctacgcagtcagcacgtgaaagagcacccatcgaagtctgcttctgttaccctgatgttgatgccgctttcaaggtagaaatcaattattatatacttatgtctatatttgcctgttactcttcaattcgtacgtgttcataaacgaataagaaactgcgttgtgcagagagcggtagagaatggtgcggag

SEQ ID NO: 140577 - DNA, 609 bp, Arabidopsis thaliana landsberg
gaaatgctatgggctatgcgtgctttcaggttaaaagcctaaaaccttggatctattttcgacctcattgagtcgtgaaatatcaaccaaaaggcttgttatttagcttttaagggtcttatcttagtagtttggttcgttgtttacgggtttaagattttgactgtatttatttcagtttatgtttgtggagaagagtgtaaacgcaatgctcaaccacgaccaggcgctgaagaaagctactgcagaaatgactaagaactgagccattacagtcattttttaatattcggtgttaagagtctctaactataaacttttgtggcaaaattagtgctcttcttaggccaaacgcagaagccaaaaagcgttgaacaacatgtattaggagtcgattggtttagtggtaaagtgtcacatttgccagtgattgtagttgcacagtttaaacaagacctcaaactcggacatccaaaccaaatgagacgacaattttttttacgtcgcgaccacttagttacgatttcttggttaagtagtttattgtgttaaatgtatttcatgatgttcataactttttcagtttttgcaatgaagattgttttacat

SEQ ID NO: 140578 - DNA, 686 bp, Arabidopsis thaliana landsberg; identical to SEQ ID NO: 18143

SEQ ID NO: 140579 - DNA, 775 bp, Arabidopsis thaliana landsberg
cacggtcgtccacgcacaaaacgccctcgtccacctgtccaggataaagatagagtcaaagacaatgtgtgcggtggtgactcgcgcctcatcattagaataccgaaacagtttctctctgatcacaacaagatgatcaacaagaagaagaagaagaaggccaagattacttcttcctcttcttcgtccgggattgatcttgaagtcaatggaaacaacgtcgattcgtattcttcagagcaatatccgcttaggaaatgtatgcactgtgaggtcaccaagactccacagtggaggcttggtccaatgggtccaaagacactttgcaatgcgtgcggtgtacgttacaaatcagggaggcttttcccggagtaccgtccagctgctagtccaacatttactccagctcttcactcaaactcacacaagaaagtggctgaaatgagaaacaagagatgcagtgatggtagctacataaacgaagagaatgatctgcaagggctgattccgaacaatgcctacattggcgtagactaaaacatagagaagatgattcgatttccatgcgttgaagtgattagatatgccaggagtaggaaagagtcagtgagaagaaaagtttttagctttagaagagatgaaggaagagagcaatcaattggagggattaaaagttagatgagaattgattgtgtttgtattattttgtatttgtagtgtgaatggtcaaaaaactcttgaaacagaggaaaagtaagttgaggaagagcagaag

SEQ ID NO: 140580 - DNA, 390 bp, Arabidopsis thaliana landsberg
agagggcattgctcttggtactgatataggcgaggtatgtgctcggattctaagtcttatacctcatgtttattttctcctttcctctgtattgaatattgattgcttgaaattttaaattgtaggcgaatctgctcaaacgttatgaagcagagagaaaacctgcaaatatagcaatgatggcggttttagacggaatccagaagatgtactcgttggatttcggaccgctgaatgctctaagagcagctgcattccacggggctcactacatttcgccgcttaaaaagcgtatcatatcttatgcttcaggagagcaatctttgccgctattttcttgaagaatgcgagggattgttcgctttgttctcaaaatactctgcatcatct

SEQ ID NO: 140581 - DNA, 1623 bp, Arabidopsis thaliana landsberg
atggagagaaactcttgggccgagcagtgggacagcaatcaacaatcgtcgggaaaaacaactcacggcggagaaggtggtggtgcatcgtctaaatacaaagagaaagtgggggctggattagggaagacgaaagcggcggcgagttcggggttaaagaaggtgaagataggaacatcgttgggtcttaattgggttaaagacaagtacaacaagaccaccactaagaattgactcatcatatctttgtttttttggatttacatattcgtcttcttcttctttttgtaaacgataaaaatctgttttgattcttgctatattcataatgatcggagatattaaagacttttgaaaaagatgatttggcttggtttgatctttttattgttccgtggaaatggggtgaatcgtttggtttgtgaataattttactaatcattttatatagttcgaatcaaaagttgaaaaactcaaaaaaaagaatctggatagtttgatcttgtgcggaatattaaactgtgatgaagaattggaatcgagtctagattcttgatgactctttaagttttaaaccggtttagctaaaaatctgcaattttgttgaatgtcccttttgattaaacaatttttacaagaaaggtaaaaaaaagacagcctcgtataggatgcatataaaaaaatgatgtaaaaatggttagaaatccaaataaatgtaaatatccatgaattaaatcaatcttatttttaaaaggtaaaaaactattttatatgagcagctatcagaaaaatgggtcagatatcattcttagaaccaaaacggaaagtcccaacgatcccattttactccttttcaccacctctagtagcagagagagggagagtatggcgattacggtgccgagacggcaactcttcatcggcggtcaatggactgagcccgttctccgtaaaactctccctgttgtcaatcccgccaccgaagacatcatcggtactttttattttttccaatcatatcttgtgttactcactttttgaacttgatcactcgattttcgcgagtttcgattcaatctatcgttatcggaactacgcatttcccgatttgctgtatacttagttcgcgaattgaaagagctttgaacttttgtctgtttgagacgatcgtcatttcttctgtgattattgtctatgaacgggagcggaagttgtttttgcgttagatctgtgggattatataggaggagaatagatagatatgtagttgaatgattggattggatctcttctcctgctgatggagttctttgtagtgttttttaaactgggattggtggtggttttaggttatattccagctgcaacttctgaagatgtggagcttgctgtggaagctgctaggaaagcatttactaggaacaacggaaaggattgggctagagcaactggtgctgttcgtgccaaatacttgcgcgctattgcagctaaggtaacaacaatgagttaatcaaatctatgttcctctcatgtttcattctctgttagctgttttgcctggcaataacataatggaaatatccaggtaatagagaggaagtctgaactagctaatcttgaggc

SEQ ID NO: 140582 - DNA, 568 bp, Arabidopsis thaliana landsberg
tgtagattgcatgcaagggtcgtgatgcagtgccagataatgtgtctgtcaacgcatttgtcaatgaggtattcttttgtagccaaaatgaatcataactgttttcctgaagttgtattttattttctcttatgttcttgtgtaagcagttttgtttactgttagtagctcactaaatgaaactgtctgcaggttaatcagtttgtcctaaatctaaaacactcgaaaaagtatattctcgtccattgtacacatggacataatcggacagggttcatgatagttcattatctcatgcgatctgggccaatgaatgttacacaggtgagtattttcacttctctcattgtatttgtgaactttatgtacctcctatgagtatagaatcttataacactatggtttctgtcaggctttgaaaatcttttccgatgcccgcccacctgggatctataaaccacattatattgatgctttatactcgttttatcacgaaataaaacctgaaagcgtcatttgcccatcaactcctgaatggaagatgtctactgagcttgatttacatggt

SEQ ID NO: 140583 - DNA, 658 bp, Arabidopsis thaliana landsberg
cgagaaaaaaaatggaagatctatggaagagagcgaaatcgtttgcagaagaagcagcgaagaaatcacaaaccataacactacaatcatcttcaacaacattcgtcaatctcgtcaccgaaaccgctaaaaaatccaaagagttcgctctcgaagcttctaagaaagctgattcgatcaatgtctccgagttcgtcgccgagacggcgaagaagtcaaaggaattcgctgctgaggtttcaacgaaagcggatcagctcaaagtcgtagcattgaaacaagctgatcagatccagaatataaaatcgattgccgacattatacctggaggattaggaggatcaggatctggtggtggttgttctgagatttctgaatctgagcttgttagttttggtattactgatgatttgagagagtttgttaaaggtttgacatctgctacgttccaggcttttcctgaacaaggtattgttgttttgttgttgttgttgctttatctttgttttggaattgaggatttgaaatgtgttatggtaaatgtggattagatgaatcgtcgaaagtttctgatttggaaacaagtgcgtcgaatgttcggaaggatctttctgagtggcaggagagacatgccactcttgttcttggttctgtcaag

SEQ ID NO: 140584 - DNA, 509 bp, Arabidopsis thaliana landsberg
ccgtcgcggtggtggatttagggtttctgtcatccgttgctccacttctccactcatttttcccacttctggtaaattttgccttcatttccgtttcaaaattgatgaaattgtgtattgtctccattgggttttagttcttgaataaagggtaaagcttggatttttcgtttgatcgagaaagtctctgtcttaagaattagtgccaaaaccttttagtgaaagttttgatttttgcacatcgtaggtgttgtggagaaaccttggacttcgtacaatgctaggcttgtgttagaagatggttctatctggcctgctaagtcttttggtgctcctggaacccgtattgctgaattggtgtttaacacttccttgacagggtatgttttgttctttgatttcattatatcacctcaaagattgttgattttagcttactgaatcttagattttgaatgtttttggaaggtatcaagaaattttaactgatcctagttatgctgggcagt

SEQ ID NO: 140585 - DNA, 1403 bp, Arabidopsis thaliana landsberg
tcttgagcagacgaagaaaacccaaaaaaaatccagatccagctgaaattgaattttcaaccaacgaagaagagatttttccaagagcaacagacaagaagaagagaatgaagtcggagctaaatttaccagctgggttccgattccatccaacggacgaggagcttgtgaaattctacttgtgccggaaatgtgcttccgagcagatctcggctccggttatcgccgagattgatctctacaagttcaatccttgggagcttccaggtacacctatgggcttcttctaattatttttcgcgaaatcatgtgtcttcgagaatcgttgtttattgagatgtttgttcttctttcagagatgtctctgtacggagagaaagagtggtacttcttctcacctagagatcggaaatacccaaacggttcgcgtcctaaccgggcagcaggaaccggttattggaaagctaccggagcagataaaccgattggtaaaccgaagacgttgggtatcaagaaagcactcgtcttctacgcagggaaagctccaaaagggattaagaccaattggataatgcatgagtatcgtctcgctaatgttgatagatcagcttctgttaacaaaaagaacaacctacgagtaagttctgtctcttattaacttatgtatcatcttttcgtgaatgatgatttacattattaactttgttgtggtgggttttgctgtacagcttgatgattgggttttatgtcgaatatacaacaagaaaggaaccatggagaagtatttccccgcggatgagaagccgaggaccacgacaatggctgaacagtcatcatcaccttttgatacatcagactcgacttacccgacattgcaagaggatgattccagcagctcaggtggtcacggtcacgtggtgtcaccggatgttttggaggttcagagcgagcctaaatggggagagcttgaggatgctttggaagcttttgatacttcaatgtttggtagttccatggagttgttgcagcctgacgcttttgtccctcagttcttgtatcagtctgattatttcacttccttccaggatccgcctgagcagaaaccattcttgaattggagttttgctccacaggggtaaaaacggaagagaccaaaaaaggtgtttgctagtagtactgtgatgtgccagagagaagagtctcatctcaactcatccctggctcttagtagtaaaagaagattgtagaatgttaatagcttttagcatcaatgtctcattagcaggcacattcttgttctttcatgagaagtttatatgaaaactaaaaatttatattcaaattcttcaagatgttgcacttatgtagatactgatattaaataacaacctaacctttatgag

SEQ ID NO: 140586 - DNA, 1088 bp, Arabidopsis thaliana landsberg
atgggtacttacttggagcttcgcaaacatgctcagtcagagcatccggattctcgtccttcagaaattgatccagcacggaagcttgactgggagaatttccagcagtcgtctgaaataatcgacgtgttgagcacaattcactcagaagttccaagaggagtggttttaggggactatgtgatcgaatatggagatgatgacacaggagatgaatttgaggatgttcccaacaatgaaggaaactggtggacatcttgtattctctatcaaatgtttgacaatataaggaatgccaggaatcgaagaagatcaagaatgagtgagagtaggagagggagtcgccgctctagctatgagaattccaactctgatgacagctcagtagcatccatagagtttccggagtatagagtagatgagatcgatgacgagttcatcagcacaagtggagctaacagaagtagctctatgcaccaaaggtcagagtaatctatagctttacaccactaattttgtattgttgctgtctgcagagatatacattcttactttcatagtttataattattctgcattgatattaaaggcttaccagtgagcctggtttttaggcacctcttgaatgacaaattagctaatcaggccccattgtgtgatatttctggcataatagcttggggtgttgacctggtttagtagctttcttgtgctatatatgatggttacttaagagacattgcttgatgccttgttttctctgatttacagttcaagaaggcgtcgaacccgcttctatgaaaattaggtattaaccttctgtttctatgcttttggtactgtcttcttgtgaatctgtaatgttccttttcgttctttctcagtcagctggaaaatgaagcgaagcaaatgatgcagaccagcctatttgtagccagtgttcttggttttggacctctttcttctttttctttttgtttctacacataaattttattttaggtttgtcttgtgacattactcgcagcagtcgcagcccttgtacaaaaactaaacaaaaagcctttttgggatattgtagtaccctt

SEQ ID NO: 140587 - DNA, 2103 bp, Arabidopsis thaliana landsberg
atgagagactttgttattgtctttggctcctcctccgccataaccaatcctcaccatcaccaccgtcgctgttacgccacagcaccagagtccaaccggaaaactaaatccaattcttctttcaccaagctacttccgtcactaccgcagcaacattcaccttctcctgcttcagtctccgcgactcattctctctctagccacttctccaatgtcgtaagatggattccagatggctcgcttgagtattacgctgattttgcctcgaagctagctgaggatggtcgaattgaggacgtcgctctcatcgccgagactttggctgcagagtccggagctaatgtggctcgtttcgcttccatggttgattatgatctcttatcgaaagggatttcgtcgaatcttcgacaaggtaagattgagagcgtcgtttacactttgaagagaattgagaaggtaggaattgcgccattggaccttgtcgatgattcgtctgtgaaattaatgaggaaacagtttcgagcaatggctaactctgtgcaagtggagaaagctattgatctaatggagatacttgccggtaaatactatatcaattcttgctgttacactgtgactatgaactcttgaattgattacctgcttcttatttcaggtctcggattcaaaatcaaagagttggtggatccttttgatgttgtaaagagttgtgttgacatttccgatcctcaattagctattaggtaaggtttgtttcccacataacgattcaggttaatggttttcaaattcagaaagttatcacaagaatgctggatattgtgagttctgctaacgatttgatgattattgaatccagatacgcatgtcttttgccgcatacagagttattgctttgtagaattattcatggtttcggaaagaaaggagatatggtctctgttatgacagcatatgaagcctgcaaacagattttggatactcctaacatgtatatatgccgaacgatgatagatgtttgtggcctgtgtggtgattacgttaaatcgaggttcatatatgaggtaattccctaattatactgtatttttgcgtaagtatcctttacgctcgattttgcctgccatcctgcatttgagattcgtagttaattcataatcttgtggcaggatcttctcaaagaaaacattaagccaaatatttatgttatgaacagtctaataaatgttaatttcccataatcttgggtacacactaaaagtatacaagaatatgcaggtatgttctttttcctgtctcttgaatacaagtatttgaattgtctagatagtatattagatttaggagtggatatggactgaccttgaaactctacatgtcatgggcagatacttaatgttcaagctgacatgacatcctacaacatactactgaaaacatgttgcctggctggacgggttgatcttgcccaggatatatacaaagaagcaaaacgaatggaatcttccggattgttgaagttggacgcctttacatattgtactattataaaggtacaatatcagtatttttggaaaactaagtttatcattagtttttgcttttatatccctaagtctctgaataatgccttaagatcaggtttttgcagatgcaaagatgtggaaatgggcactcaaagtcaaagatgatatgaaatctgttggtgtaaccccaaatactcatacatggtcatcattaatcagtgcatgtgccaatgcaggtttagtagagcaggcaaatcacctatttgaagaaatgcttgcatctggctgcgagcctaattctcaatgtttcaacatcctactgcatgcttgcgttgaagcttgccagtatgacagagcttttcgtctttttcaatcttggaaaggaagctccgttaatgaatccttatatgcagatgacatagttagtaaaggtcgcacttccagcccaaatatattgaaaaataatggtcctgggtctttggtgaatcgcaattctagttcaccttatatccaagcttcaaagagattttgcttcaagccaacaactgctacatataatatactcttgaaagcctgt

SEQ ID NO: 140588 - DNA, 733 bp, Arabidopsis thaliana landsberg
tttgtaaagacgtcaaaaagtctctcgagttctacacaaaggtattagggttcgtggagatagagcgtccagcttctttcgacttcgacggtgcgtggcttttcaactacggcgttgggatccacttggtgcaggccaaggaccaagataagttaccttctgacacggaccatttggacccaatggataaccacatctctttccagtgtgaagatatggaagctttggagaagaggctcaaggaggtgaaggtaaagtacatcaagaggacggtgggtgatgagaaagatgcagctatcgaccagctcttcttcaatgaccctgacggctttatggttgaaatctgtaactgcgagaatctcgaacttgtcccgcgccattcagccgacgccatacgcctcccagaagaccgacatgcacctcctgttgccctccctgactcctccaaccgtaggatgccccagcccaattcttaatactatttagactcgtttcgtctctagttagtactgtgttgtgctcagctcccactctattagttaatgtttgtttgggacaccaagtccttccaaccatgagtgctagtaggctggccattttggtttttgtttagattcggtttggttcagttttaataaatctctggctgaactctaaccgaagttatttcgcttttggtttggttttactttggttcggtttccatttggttaggtttgttttagtttgttcc

SEQ ID NO: 140589 - DNA, 4747 bp, Arabidopsis thaliana landsberg
atggataaccaatcagcaaaacctgttgcaaaaatatcatttgggcatttcccattgtcattcacagcgctgtcacattctcaaaagagccttaaagatgtttttctgaagcactctatctcagcttatttgtgtggccatctacactcaaggttcggcaagaatcttaaaagacatcatcactctggtggtatcagtttatcagataatgacttgtttcagctgaatatgaggcagagtggtgctgaaagtacttcgaactgctcttttggagccttaccagctgcagagttctgggaatgggagatgggtgactggagaaaaaacagggcaatgcggatcatggccattgataggggtcatgtttcatatgttgatcttgacttcaagtcaaaaccccagaagactatcatattaccgacctttccattagattcacgttttatgtcaacatcctttgcacgtcacaaatacgagtgccaacatatgatctcatcatcgtatgacgcaataagagccattgttttttctcattctctggttgtggaagttgtagctagagtttatgactcaagccctggatttgataatctggtcatggaagctccaatgagaaaacatggaggcgattcttcttcttccggggcaacattcttttcacttccatggaattatagggcctttgaagatcccttacctgatagattttggctgcaaatagaagtcactgatatcaaaggcagattaaccttatcagaaatgcgaccattttccatcaatggtctaagctctaaagtttcatggacatggaatgagttccgtgtcatgggctgccagtgggcggcattatattacccgattctttggcctgctctatatagtttgtttctcgtttttcttatccccaaatgcatcatcatcgttttcaagaagcagtacactctcaagaagttcattgccaagaaaggacctatcacacttgtactgtggattctccaagacctctgcagaatgcctgtggtttggttcggttacatggcatacttgttctatctcatattctttccttgagttctccggtgaagtgtttactgattctggagacagagcatacatgactattatgggatgggtggtgacgagctcaggcgcagataggaaacatgaatacattggacaacctgatgtaatggttgtggtgatcccacatgtggtctttgttgttatccccagtgtcttggttgtgtgttgtctggttgctgagagagaaatctacaaagatcacattcgaactgtctctggtaagaaagaggatgaccatgaccggggaaggaagaagagatcacaacgccgctcactgttattctcgaacagaagactgtttcggaaatcggtcttgctggcttcattagctctatattggaagcatttcaaggtaccacttgtatattaactaatgattcgtttatttccatcttgcattggcaaaaacctgcgatcatgttcatccgttgtctgttttcattctgcattcacttctgaagtatattttgtttttattgacagaattgctgggcattaggtagagcttatgagatgaatgtggttcattttccaggttacagccttgtagttccattgttgctactatatgttatctgcaaaacccataaagttccatgagatttgaatctatggaagttttggtgtttttatgattttgattatgaagaaacacatttatagggggttttcttatgtgttgtttgatagagttgatatactatatagatcaagaaagttagaccaaattattctgtatccttttgcttttatttttttttacagctagaccaaaaaagtacaagtggttttgctcaatttggaaaaaaaaaacattaaaaatattaaaaaacaaaaatgaataatgacgtcagcgaaagcttctgtcatagtctcacagtcgcaacaaaacagtcaatcccccaaagaattatggtagcagtcaataatcccataaataatcttcttcaacagtttttttctcttaaatttttgtttcgaaaaccgctcactacttcttaattgaaatgactgactgagagctttagcttttgatcgttcgtcttcgtgattcctttcttcttcttctctccgctactgtctgtacctgaaactactgtcctcgatcgctgctttgtctttcgaggttctctaatctgttttttcttattattatctctggggtttgcttttgcgttaatcctctttctgctcgacttacggcgatttttgatatttgcagattaaaaagttaggtttttttcgtaaatctactgtatatgttttagatgaccatggatgctgatgcgatggaaactgagaccactgatcaagtctctgcttctcctctacattttgccagaaggtttgcttatcttctgatatctctcttctaagctctgtttagaagaacccatgattgtgtaagtcttacatcttgtatattttgatgctctgttaccagttatcaggtagaggcacttgagaaagctatcaagcagaacactattgtcttcttggagactggttctggcaagacccttattgctattatgcttcttcgtagctatgcctaccttttccgcaagccttcaccatgcttctgtgtcttcttggttcctcaagtggttcttgtcactcaggtattggtgttaggattggagttgtggacaaagggattcaccaatatacggacttgtcctttgttctacaatttctgcattattacacgtgctccttttccaaatttagaaactttagtgttactttctccattatttctgcatttttccttgtgtgttttacgcagcaagcagaagccctgaagatgcatactgatctaaaagttggtatgtattggggagacatgggggtggacttttgggattcttcaacatggaaacaagaagttgataaatatgaggtctccttttcttattttgaccaattagacatacatatatttttctggtgaaagtgttatgaggatgcgtttcattattactcttttagctcaccattcataagtcttattttcataaaatcttgcttagctgcatcacagtctcttatgatttgtcaccatattgaacttgtttttcctactatctgacgctaatttccactgaaaggcactattactgtttcctgtccactctcgatgcacattcttataggcccgttctcctttggtttcataagtgcaggttctggtgatgacccctgccattttgctcgacgcgttgaggcatagttttctgagcttgagcatgatcaaggttctaatagttgatgagtgtcatcatgcagggggaaagcacccttatgcttgtatcatgagggtgagcatgaaaagatattcctagctttcgaactcagacctgaatgaaatctcattgaaacataggaaatttttttttatttaaaagaactagtttataatgtagttttccaccttttgacaacatagctccttttcatgcaggagttctatcataaggagttaaattctggaacttccaatgttccacggatatttgggatgactgcttcacttgtgaaaacaaagggtatatatgcatctaacattctttcttgattgcatttatacattatattttgtatttgctatttcaagtttggtttttcttctttgtctttcttctctcaactaaggtgaaaatctggatagctactggaaaaaaattcatgaactcgaaactctaatgaattcaaaggttgtttcttttctttatcttgaattttttgtattgtccatcctgttttgtatgatataatgaaattttttttgttctaatatgtgaaaggtgccgttaaaatcagaaacatttacttaaggttgatatttttgtttgatgtagtgaaactagtgattgcaaaatgatttttccgtttatatttcgatactatagtgaacatacatcattggtcattatttcttcgtagtatgaccacatctgatgcagaagcataatattttcttagttgctattttgaactgtacgaagactgttgatgcttgacctgtctcagtacttagaactaaaccatattttcattttcaaaaggtagaaatattataggctggttttattttgcttactccatcataataataatttgtttgattaataaaggtctatacctgtgagaatgagtctgtgctggctgggtttgtccccttttctacaccaagcttcaagtattaccagcacataaaaataccaagtcccaaacgagcaagcttggtagagaagctagaaagactaacgataaaggtacgtgaactaagaataaatgtttatatgcgagtggcgtcttttttgggttttgaaagttttttgaaatttaagaatgtagctcatatttatgatcattctttaattatgaaatgttaactgatagtagacttatttttcagcatcgcttatcccttggaaccttggatctcaactcctctactgttgattctgtagagaagagactgttgaggataagttcaactctaacatattgtttggatgatctcggaattttgctggcccagaaggtatttttgttcttggtactgctgttatcccccacataggaaagtaagaagtgttgtaataattgttttttctacaacaggctgctcagtcattgtcagccagtcaggagactt

SEQ ID NO: 140590 - DNA, 1223 bp, Arabidopsis thaliana landsberg
gctgattcactacgtgtacatggggtggcaattccaactgctgtggggatacgaaacgttcttagacacattggagctcacaaggacggtaaacaagtaaaagttctttggattagtctcagggaggaaccggtattttcactttcttgaacttctctgccaatatgcaaatcctaggcatgtgccatttattggtgcttccatattctttcttgttaacttgccatttactacacatttgtcaggtagtatacataaacgggcgaccttttgttctacgtgatgtggagaaacctttcaccaatcttgagtacacggtacaaaagccttgttctaatatgttgttgattccacactgttgttgtacattagtttgttggctacatgcaaagtacagttactaacaaagtaaatcagaaacttgattatccgtggaacctttcatttgtgaccttaagcttatgttctgatcagggaatcaacagggtaagggtagagcaaatggaagcacgattaaaagaagatattctcatggaggcgtcgaggtaaccattaggtcctttaaatgatctaactttgtttgcatcatttttttttgcgttgggtgtatttgaccatttgccttgcagatatgggaataagatacttgtcaccgatgaactgccagatggtcagatggtggaccagtgggagccagtctcaactgattctttgaagacactacttgaggtaggcaatgaaacatcatatgtacaccctttaatgggatttccaggttcatatcattgtttttgcttatacattctctggatctaggtttacgaagaactgcaagctgaaggctaccttgtcgattatgaacgtgttcctataacggatgaaaagtcaccaaaagaaacagattttgatctgttggtaagtcctatgccattcctcgtagtcgacaaccttgaatgatcttatctcttgccatttggtatttgctgggagcataacattatattgtgattaatatgttcctgtcaataaaaattttcaatacactatgatttcagattaggaagatatctcaggctgacattaatacggagatcattttcaattgtcaaatgggacgtggacgcacgacgactggaatggtgattgcaaccctggtctatttcaaacgtactggggcatcaggtacttcatcatctccaaccgctcaacttgcgaagaagcat

SEQ ID NO: 140591 - DNA, 116 bp, Arabidopsis thaliana landsberg
tgtttgtgaaagggagagagaaatggaggaaggtctaaagattcaatctttggtcatttatccgatcaaatcttgccgtggaatctctgttcctcaggctaccgttactcatactg

SEQ ID NO: 140592 - DNA, 3218 bp, Arabidopsis thaliana landsberg
gcgagctaaagccaagagcagcggtgtcaaaaacctcatccgccgcaaaacccctaaaaccctccggcaccggaactttctctttcttctatcactttcctttgactgtctctatcgagatttcaatcactgaatcgattgaatcttaagcaatgatgggccaagaagcagctccgacgggaccacccaacagagaactctacgcgctcctgaatttatcaccggaggcctccgacgaagaaatcagaaaagcttatcgtcaatgggctcaagtttatcaccctgacaagatccaatctcctcaggtttgcccgaatcaatcttctttgttttcaattcgcctctgatcttcgtgatatcaaatttggatactttacataaaggaagtagctttttcgagtgggctgatttagaatttgtgtggttagatgaaggaagtggctacggagaatttccaacggatatgtgaagcatatgagatattgtcggatgagactaagaggctaatatatgacttatatggcatggaaggattgaattcaggattagagcttggtcctaggttgagtaaggctgatgagatcaaagaggagcttgaaaggattaagaggagaaatgaagaagctaagaagatggctcattttcaacccactggttctattctcttcaatttgtctgtcccacattttttagtaggcgatggcatcatgagagggtacttattttcttcttcttttcaagttttgatgtatttttggtagcatggttcttgatttgggttcctaatttgaccttggagacacttactagtctggaaagttttgatagcaaatggtttattgagaaaagatttggtcttgtttctgttttcttcttatctagttgtgtgtattagttatcttgtgtgagaattttggttgctcaacactagccctgactactttgtttcatttgaagtagtttttgtttttgatgccttttcgtttcttttgtgcttgtatctgcaactttcagaatggttatggctagtcaagtgcagtctcagttgtcaaaagatgatgcaattgccattggtggaaatttggcggccaatgaaaagtctggtggcggagtcgctactgccatactgagacgtcagatttctccagtgtcatccatagagtttgtcgcttcaacgggtttgcagtcgcttattggagtgcagacaacacggtaggctcatgagtttttccagttatttctgggcatcttttatggtttcggtttatgtgactcttatgggtttcttgttggggcagtcagttaaccatacattcaactgccacaatcaatatttcaaagtcgttgagtgatggctccatcaatcttaccaacacgtggactcgacagctttcagaaacttcaagcggaaatgtaagttcgctctgttgttttgattaaaccttctaagatggcgagaaagcagttttctcgattttaaaatagttcatttcatccagattgaactggcactgggtatgcgatcagcaattacagttggatggaaaaagagagacgagaatgtatctgctgctggtgactttaaggtaggctgagtaccaaattgcattctgactgttcttacctcgaccacctttcttactttctctagctctaatcttgctattactagattgaatctggtggactcggagcatcagctcgttatactcgtaaactttcatccaaatctcatggtcgcattgtgggtagaataggaaggtatgttttattgacaatcccgagcaacctaatgtatgatgtgcgagaggatagaaatcattttttaagttgtctttacatgtgtggcgcaatcattgttctcattttactttggattttttttttttaacttattcagcaatgctcttgagattgagctcggtggtggaaggcaaatttctgagttcagtacagtaagaatgatgtatacagtaggactcaaggtaaactactctttaaaactttcggagccatcttagccattatgcaatctgcttatttccggtactcttatactttgtttgtagggtattttctggaaagtagagctacaccgtggtagccaaaagctgattgttcccgtgagtgttactttcttcctttcttttcttgtggtgtcatgtctgctgtcttcggataagaaccgaacagattgtgtcttaatctgtggagtagaatatattaaaaaagcataaaccaatagaaccaaagaccaatcctaaaagcctagggatggattctagagcattatccttgactctctgaaacccttacccaactcaattatggacaaagacaaacatccgtattactctggggaagtctttcacttttgacaccttcatgatgattatctttgaaacgtgcagattctactctccgcacatttagctccagtatttgcaactggagcattcattgttccaacatctctttactttttgttaaaggtgagtgattggaccctctaaatataatctacttttggtctattgttataagctgtttaccttattaaacattttcactgttccacgcagaaatttgtggtgaagccatatttgcttaaaagagaaaaacaaaaggccttggagaatatggagaaaacttggggccaggtgattgttacttccgagtttggtagccaagcgagattccttgtgattgtagatgatcttattatgaatatttgtttaaactgtgggttttaggttggggaagcaagggcaagggctgagaaagcccagcaattgctacaaaccgtagccacaaggaagaaaaaccgtcaagttgaaacagatgggctcatagtaacgaaagcgttgtatggtgacccaaaagcaatagagagaagaaacgaagaaggagtggaaggactggattcgggagtcattgacgtgacagtgccgatgaacttccttgtgagtgactcagggcagctcaagctccatgagggagtgaagaaatcagggatcatgggtttttgcgatccctgtcccggccaacctaagcagttatacattgcatacacttaccattctcagccatttgaggtaatagttggtgactatgaagagctgagtataccacaagaaggccagtgagagtatgaaaacggtactctccactttgttgtttttattaatacgaacgaatggcttctttcgaggatttgt

SEQ ID NO: 140593 - DNA, 1851 bp, Arabidopsis thaliana landsberg; identical to SEQ ID NO: 15247

SEQ ID NO: 140594 - DNA, 938 bp, Arabidopsis thaliana landsberg
gattaaaatgcctaaaacttatgtcgtgcacctaggaaatagcaaggagttgatggaagtagctgaagatagtttcgccaagaatgttctccgtgagcaagttcgagaatctcttggagtgaggaatgaagacatactatttggcattattaatagttagtcatttcttacattctttctcttccttagtttctttaagaatcataatctgcaaaagactcaaaattttggttaatttgctttctgactggtgcttctcttatgcaggtgtatctcgaggaaagggccaagatctattcctccgagcgttccatgaaagtcttaaagtaatcaaagagactaagaaacttgaggtaccaacaatgcatgcagtggtagtaggaagcgatatgagcgcacagacgaaatttgagacagagctacgcaactttgtccaagagatgaaacttcaaaaaattgtccactttgtcaacaaaacaatgaaggtagcaccatatttagcagctattgacgttcttgtccaaaactcccaagccagaggagaatgctttgggagaataacaattgaagccatggcctttaagcttcctgtacttgggactgcagcaggaggcacaatggagattgtagtgaacagaacaacaggtctattgcacaacactggtaaagatggcgtgttacctctcgccaaaaacattgtgaagctggcgactaacgtgaagatgaggaatacaatggggaagaaagggtatgagagggtaaaagagatgttcttggaacatcatatgtctcatcgaatagcttctgtgctcagagaagtgttgcaacatgcaaaaattcactcacgaacaaccaattcggatcattaaacaaaagtttagcatggaaatgccaatatgtactttattttacagcacacttctctatagaggttttcg

SEQ ID NO: 140595 - DNA, 1984 bp, Arabidopsis thaliana landsberg
  unsure (1)..(1984): unsure at all n locations
acgtatgtttcttttcttctgcatctagttttttttttgcatattcatcaccttctctcagttttcttctttcaatagaattatccagaaaacttttaagagatggcagctccgattcgattctttgaactgaacactggtgccaagttaccttgcgtcggtctaggaacctacgcaatggtcgcgacagcgatcgaacaggcgattaaggtatcaccttcggatcaaacttcgaccttattattatgccattggatataaaatttaactttgacacttttcttgtcgattattttagattggttacaggcatatcgactgtgcttcgatttacggaaacgagaaagaggtaagtttgctatctacaatatatattaatatatctctcttaaaccatagatgtcatttgactggtcatcaaatgtattctctacaagagtgtatatttatgatagttttgaagggtcatggtggancaagaatctcacagtaagtgtagcctctatgcttctaatgaaagagtttttttttttggtatgatgcttctaatgaaaaaggtatatgaatgtttagtttgtgggaactaaatgtgttctgctttcttcctattttcgttgttctcacactatgattgatttccatttattagattggtggtgtgttgaagaagctgataggtgatggttttgtgaagcgtgaggagttatttatcacttccaaactctggttggtgttctgtttctaccaagattctctctggtctgcactacacacacacacatgttcatgttttttgttttgttctgtaggagcaatgatcatttacctgaagatgtgcctaaggcactggaaaaaacgttacaggacttacagattgactatgttgatttatatctggtacataacttatagcaaatgaatcttgtttacgtgtaatttttccattttgatgtgtttttgcttttgttgaagatacattggcctgcgagcttgaagaaggaatcactaatgccaacacctgagatgctcacaaaacctgatataactagcacatggaaagcaatggaagctctctatgactctggaaaagctcgagcaatcggtgtaagcaatttctcgtcgaagaagcttacagatcttcttaacgtggcacgtgtaaccccggctgttaaccaagttgaatgtcacccagtttggcagcaacaaggtcttcatgagttatgcaaatccaaaggagttcacttatctgtgagtatacttacaaattccaaaatttactctgtttttgcaagtatgaattaacgaagatgccttttcatctgttttggattgatgatagggttactctcctttgggttcccaaagtaagggagaagtcaggctaaaggttcttcaaaacccgattgttaccgaggttgctgagaaacttggaaagaccaccgcccaagtggctctccgttggggactccaaactggtcatagtgttctaccaaagagctcgagcggggctcggctcaaggagaatcttgatgtttttgactggtccataccggaagatctgtttaccaagttctctaacattccccaggcaagttctttcatctttctttttttttctcgatgaatcaaacgacaatttcggtttggtttcttgtcattattgatcttccctcctcttcaccatcttgttttcctcgaccccatcatgttgattatagatcgtcaaataatggattttaccaatccctataaatcttgcaggagaagttttgccgagctactgagtttgcgcatgagacacacggcttctataagaccattgaggaattgtgggacggtgaaatttgagataatgtccctcctttctacttgtttaaccataaaccattaaggacattgaaataaatatgttatctttttatatttaatctttctatgagaaaacactaaacacatgcttgggatttcatgatgtttggcaaat

SEQ ID NO: 140596 - DNA, 542 bp, Arabidopsis thaliana landsberg
gaactttgagtagaagaagataatgtcacattcatggaatggtcttggggagattgcgtcagtggctcagctgactggtttagatgcggtcaagttgattggtctcatagtcaaagctgcgaatactgcttggatgcataagaagaattgtcgtcaattcgctcaacatctcaaactcattgggaatttgcttgaacagctgaagatctctgagatgaagaagtatcctgagactcgagagcctctcgaagggcttgaggatgctttgagaaggtcttaccttctggtcaatagctgtagagaccggagctatctttacttgttggctatgggttggaacattgtttaccagttcaggaaacatcaggatgagattgatcgttttcttaagatcatacctctcatcactttggtcgataacgctcgcattcgggtaattttacatgcattttggtctaacaagtttctctgcttgatgttatggtatattgaaattttgattgttatacaggagaggtttgagtatagtgaccgtgatcagc

SEQ ID NO: 140597 - DNA, 1057 bp, Arabidopsis thaliana landsberg
ttcaatttctccacttcttcttcttcgtttcgcttcttcaacgtctctccttgttcgacagttctaaattcaccatgaggaagacggtgaagcgagaatcggaagccaccggcgggaaaagagaagccgacgacgagccggagaagttgaggtctgtgaagaaagagaaacagagaaaaaccgaagctgactccgtacgacccgacgagcctcctccgcctcaggaggaagaacaaggaatatctgatcggagaattctcagatccaagtatctctctcttcaaaacgaaatcaacggtaccatttctgtctcttactcactctttctttattatgtcccatttgattcgttttaattttagggtttatcattttttgttttgaagattgtaaagatgatttgatgaagattgattctgacaaattctccagaattattaatgcagttgaaaacttgcaccaacaaggtaaaatcacatgctttaacttagtgaaattgatgtcttttgagttaacaaaggttgcaatagacgaggagcttatgattttctcaagttgtattgtattactaacgaaaagaccttttttttttggtttggttacaatgtttcttgtagttcggaagcctagggaacaaattgcagacgcagaggcacttctggatatagcaaacactttaatgtcatcggtgaagtctcagtctgctcatggggtttcaccggctgagtttgttaatgctttgatcagtgggtttggtcaaggttctttggggattgatactgatgaaactgctcaagtatctttaaagtggaaggatcttgggtttgctgtttgttctactgttttagtatcatgtggttgttctacaatgtgagttctcataataactattttatattgatttgctttgctgtaattgagtatattctgtttaaacaaaggtttgtttacctgttttgttaccaggttgggacctatggatgctgaactgaagcaaagaagaagggcacccaacagtaaacgtacaaagcctggtgaaggtgttcgtccagatgag

SEQ ID NO: 140598 - DNA, 1082 bp, Arabidopsis thaliana landsberg
atgatgtccattcttatggaaacggccagaactttgattacaatctgaagcgtggaactgatattaccacacttggtagagaattgaatggctttatgcaaacgaatagtataagaggatcggtcatagcattaccaagcaaggatattgaggttggggaaacaacagacgtgactctgaaacctcttaacagtgatacgactcttgacaatgccagctataagaaaacagcaaccatttccaaagtggaaaaatgcaccaacctatcgcaagtccgtgcaaacctcaagaaaatatataatagagttcgtgttgttgataatgtgtctagtgcaaaggaaaccgtggctctgctcatgaatcaatataggaatcttgtccatgcttgcgatacagaggtattgggtcatgtgtttgctaatacattgttgttcacatggcctagaaatgcttatgttcttgacgtatagacgcttcgtttaattctgcttttactctctgataatctattctgtaggtatccaggattgatgtgaagactgaaacacctgtagaccatggggagatgatttgtttcagtatctattgtggatcagaagcagattttggagatggtaaatcatgtatctgggtagatgtgcttggcgaaaatggaagggatatcctggctgagtttaagccatttttcgaagactcatccataaaaaaagtgagctaaaacgaaaaacaacgtgctgcgtttctatttattcagtgataatttggtgttacgaatcttgttgtgtgttttcctgaaaagatgattgactacttcttcaccttggctctcttttgtttagatgcaggcactaatgacttctgaatcatgttttaattttgtaaatcatttgaaaatgttttcatgatcaaataacgcttataagcttgacctttccttttacttataggtatggcataactacagctttgataaccacatcatcagaaattatggaatcaagctttctggttttcatggtgatacaatgcacatggcacgcttccggattcatctagacggatatcgggtgattatcgcttga

SEQ ID NO: 140599 - DNA, 969 bp, Arabidopsis thaliana landsberg
ctcgatcgtcactttttccagaaatctctcactatcgccatcgattttagcagacattgaagaagatgggagtattcacattcgtatgcaagaatggaggcggcgcgtggagcgcgaagcaacacgaaggagaacttgaatcttcagcttcttctacctacgagctccagcgtaagctcgttcaggtatctctctccgctgattcctccggtggcgttcagtcttcgttttctcttgtctcccctacctccgccgtattccaggtataagtctctcttgctcgaacaagcttacagtttgagatcgtgcatctttgaaattggcaatactgtgtgagaatcggagcttgcattttcagataaatgattcattcacagtaattatggtcgttgatcagtgatacaagtgtcatggctcactatagctctcttatcattgcatcaaatgtgattttgcgtcaatgtagcttgttttataggttaacaatgatacctaaaggttacagctttgtaatagctaaatcactcaatttgtttttggttgccttctctgtttaagtaggtgactttagtttacatggctccggaaactagtacaaatcaatatttgtgtataattcctgttttgcattgtaatttttatcaattggaatcaatttcttgtggcgtaggtaattgttggtggtggtggtggtggaggattctctgctggaggagctgcctcaagtggaggtggtgcgggtgaagctgcagctgcccctaaggaagatgagaagaagaaagaagaatcagaagaggaagaaggagacttcggattcgatctctttggttaagattgaaatagtattttggaggtgttggtttgagctttccatttttgtgtggggtgtttcttccattgtcaagtgtgatatgctacactgctttcaattatatttcgtgagtaatgacaagtttctctttcgatcct

SEQ ID NO: 140600 - DNA, 788 bp, Arabidopsis thaliana landsberg
tcaccaccaaatcgattctctccaaattccgttttttctcttacaggtgagtccatagctcgatctcacaccaaacccattttaaattagagcaatcatagaggaaaagttagggtttttacgctctttgttatatgaggaattgaaatggtagatgaagctaatttagacattgaataaacctttgaatttcgtaggtttattgaaaattagctgtaaagttatgttctttacttatctcaagatgaactttacgattcagggagatgcaaaggagacaatccctaatttcctcacagaatgtggagcttcacatctggttactgatttctctcctttacgggaaatccggcgttgtaaagatgaggttgtcaagagaacgagtgattcattagcgatacatgaagttgatgctcacaatgtagttccaatgtgggctgcttcgagtaaattggagtacagtgctagaacaattaggggtaagatcaacaagctactacctgattacctcattgagtttcctaaacttgagccgccgaagaagaaatggacggggatgatggataagaagcttgttgattgggatagcctcattgataaagttgtaaggttagttgctgtttaatgtgtttaataacgcctgcttctttatgcttatttgagttttgagttctatggtgattgtgatatgtggatagggagggtgcagaagttcctgaaattgaatggtgtgtgcctggagaagcatgcagggattgaagtattgatggggaataaagatggatttt

SEQ ID NO: 140601 - DNA, 229 bp, Arabidopsis thaliana landsberg
ggtaaagataaacaacagaaaagtcagcgtgagagactggattatcttagagccatggctggtgtccagactctcgaattagagatccaagtgaatatgaccgccgagagattcttcaagactttcaagaagaaagaaggaaatttcacggacaagacagaggcagtttatgttcatcgtgacgatcccacatccaactcctctattcagatctggaatttcatcgttg

SEQ ID NO: 140602 - DNA, 996 bp, Arabidopsis thaliana landsberg
agtccgagtcaacaatggacgtctacggcatgtcttcaccggacttgcttcgtatcgacgaccttctcgatttctccaacgacgaaatcttctcttcctcttccaccgtcacttcctccgccgcttcctccgccgcttcttccgaaaaccctttcagctttccttcttccacctacacttctcctactctcctcaccgacttcactcacgatctctgcgttcccgtacgttttcaaatttcaatttaccctaattttgattttgattttgaatttctaagttctgattttgagttttgcagagtgacgacgcagctcatctcgaatggttatcgcgattcgttgacgattcattctccgatttcccagcgaatcctttaaccatgaccgttagacccgagatttcattcaccggaaaacctagaagtcgccgatcaagagcaccagcaccttccgtagctggaacttgggctccgatgtctgaatcagagctttgtcactccgtcgctaaacctaaaccgaagaaagtctacaacgctgaatcggttacggcggatggagcgaggcggtgcacgcactgtgcctcggagaaaacgccacagtggagaactggaccgcttggacctaaaacactttgtaacgcttgtggagttcgttacaaatcagggaggcttgtaccggaatacagaccggcgtcgagtccgacgtttgtattgactcagcattcgaactctcatcggaaagttatggagctccggcgacagaaggaacaacaagaatcttgcgttcgaattccgccgtttcagccgcagtaaatttgggggttttcttttcaagggtttttgtgatttggtgacgtgtcgtaatcttaacggtgatgatcacgtgaccgacgggaggggttaaggacttaattatcagtattagtttaaagtttgcaaatctctgctaattaatttgttggtaatttctattgatttttttcttgcttttgttt

SEQ ID NO: 140603 - DNA, 2055 bp, Arabidopsis thaliana landsberg
cgggagagagaaagagaagagagtgagagagatcgaagaacatttacacacatcaatggcgtctctgcaactctgcgacggttatcttctcttcaagccctctgtttctcctcgattcctctctcaacgcatttctcatcgcctaatccctaaagcctcatcttctcctcctccatctccatcaccatcatcgtcctcttcatccttatctttcagtcggcgggagcttctgtaccaatcggcagctgtatcactctcgctttcttccattgttggaccagcgagagctgatggacagttatccgaatgggaaagagtgtttctcccaatcgatcccggtgttgttcttctcgacattgctttcgtccccgacgaacctagccgaggtaattactccttcttcttcttctttaattttccgttcttaagttcgaaattgttttacttactgattcttgcttgaaatgtcaattagggtttttacttggaacgagacagactttgttagagactaaagatggtggaagcacttggaatccacgttcgattccttcagctgaagaagaagatttcaattatagattcaattcgattagctttaaaggcaaagaaggatggattattggcaaacctgcgattttattgtacactgctgatgctggagagaattgggataggattcctctaagttctcagcttcctggagatatggtattatatcttgtttcttctggtgttttcagagatttctattgttgttgtttttgtttatgagaatgtgtttgttacaaatgttgttgtaggtgtttataaaagcgacagaagataagagtgcagagatggttactgatgaaggtgctatttatgttacttcaaacaggggatataactggaaagctgctattcaggaaactgtttcagctaccttgaacaggttcgttaccctctctttggtttatactagggaattggcattgtcttttccatccagattcaatagagatcaaagagtagaccttaattcagtatttcctatggtcttgcagaacagtatccagtggaatcagtggtgctagttactacacgggaactttcagtgctgttaatcgttcacctgatggaagatatgtcgctgtttcgagccgtggtaacttctttctgacatgggagcctgggcaggtgagactcaattaaggctatgaagaaatacatttatacttgtggtttgcttttgaactcttagtcctttttatgacatagctaggtgaagttttagcacttgcttaggctcagtcttattgctgattttgattttgattaaaaagtactttgtctaagtaaacggtattatgtgtcttacaagggactaccaatccctctctttgttcttgtgtgtggtttgcgtgctctttagactgtcattcaccatagtattggtatattgcagccttactggcaaccacacaatagagctgttgctagaagaattcagaacatgggatggagagctgatggtggtctttggcttcttgttcgtggtggaggactttatcttagcaaaggtactggggtaagtacagcagcaagactctcctcacttcttgcagttttattctctgaaaatttccttttcttctcgttttggtatttacttgcgagtttctgggttcttttgccacttagaggatgaaaccaaatctagccatgaactaagaaacacaattttcttttgttatctgctattccctggactaataacaaggaaaataaaataaaaaaactgtttccttgtgatttaaattctcttccaatgtttcaacttccaactgcatctgattttgatctcctctgttataattgctcagattacagaggagtttgaagaagttccagtacaaagccgtggctttggcattctagatgttggatatcgctcagaggtaaatgagtttccacgatgatcactcaaaactctgaatctgctccgatctttacaccatttttttttttttttgggtattgcaggaagaagcatgggcagcaggaggcagtggc

SEQ ID NO: 140604 - DNA, 1823 bp, Arabidopsis thaliana landsberg
tatctctttcccattccaaatctcaactcagagaaagccacaaaagcatcttctcattctatgtcgttcgacaccaacaccgtcacaacaaaaggcctcacagaggaagagaacaaggtacaggaaacaatacccaggagaaaacattggtataactgaggaaatgagattcgtcgccatgagattacgcaatgttaatggtaaaaaattagatctttctgaagataaaactgacaccgagaaggaagaagaagaagaagaagaagacgatgatgatgatgatgaagtaaaggaagagacttggaagcctagcaaagaagggtttcttaagtacttagttgatagcaagcttgtcttcgatactattgaacgaattgttgacgaatctgagaatgtgtcttgtaagaaccctactttggtctcgaatttgacagtttggtaatgatttgggttaatggggtttgtgttcaatgtacagatgcttactttaggagaacaggattagagagatgtgaaagtattgagaaggatctacaatggttaagagaacaagatttggttataccagaaccaagtaatgtaggagtttcttatgcaaagtatttggaagaacaagcaggagaaagtgctccttttgttctttctcatttctacagtatctacttttcacatattgctggtggtcaagttcttgtaagacaggttagtctctttggaaagctttcatagagtaacatagaagagttatatatctgcataaggtcacatccagcatattgaatggttagagctagttcgatatattaaagattagtatcgatataaatggattcagcagagttcgatttatcgggagttttgctggtgtttagtatacttttcacacattgctggtggtcaagttatttgtaagacaggttagtttctttgataagtgttcacagagtaacatagaagaaattttcaactgcataatgtcacatctaggatattgaatggtaacagctagtttgatagagttagagattgatatagatatagtggattcaggagagttgggtttatcgggagttttgcgggttatggtgggtatgagagagtggcgataagaatgagaatgagaatgtgagaagatttccattcttcttcgttgagactcaacttacaaatagaactgtgataaagaaacactcagatcctaaaccaaaaccaaccaacaccaggcttgctcaattagtttaaagcttgccccaaaagaacttgttaaccgactgttagttaggttaatgtggtattaaccaacgggtgaactatgcttttgtctttatttttgagatttatcataactgtacattctttttgttggttctgttgtgttctggttcttacttttatcaatatatcccatgatttggactgtcataattgtttggtaacccttatatgcgaggtgttcaaatgtaactgatcagttgattcattaaggtatctgagaaacttctggaaggaaaggagctggagttcaataggtgggaaggggatgcacaagacttgcttaaaggcgtccgtgagaagcttaacgtgcttggggaggtgagattgtcaatgaaaattataactcttcattccaccagttgctaaaatctgatgttttggtgatgcttttgggaaatgaagcactggagtagggacgagaagaacaaatgcttgaaggaaacggcaaaggcatttaagtatatggggcagatagttcgcttgatcatcttgtaaatatctaggttttaaagttaacagtttccggcaccagacctgtgttcactacg

SEQ ID NO: 140605 - DNA, 513 bp, Arabidopsis thaliana landsberg
gaggaagaagatcatcagagatcgaagaagaagaagaaggcaatgctcgaagatcgtttgtagaagaaaaccaaacgaagcagagtaacaatggcttcgacggtgggattagcaccgggactctcccggaaattgaagaaggtattggactgtcgtacagatagtccggatctggtggcgtcgcttaacgctttatcctcattctacgacgagaacagtgctcacgcacggcgaaatctcagatcgacgatcgagaaacgagcgcttcagatcaacagtgagttccttaacgcggctgattcgactcagatcgcattggatcgcgtggaggaggaagtgaatgctttagctgattgttgcgataagattgcggcggcgctaagtagttccgcggctaccactagcgatattattagtactactgagaggctaaagcaagagcttgaggttactactcagaggcaagagatcgttaactgttttcttcgtgattaccagctttcgaatgaagag

SEQ ID NO: 140606 - DNA, 2088 bp, Arabidopsis thaliana landsberg
atgtataatttcagcaaacttacgcggattctcaaagatggtctgagtgggaactcccagacagtgatggttgcaactatatcacctgctgatagtcagtatcatcatactgtaaacacattgaaatatgctgaccgagcaaaagagattaagacacacatccaggtgacaataattttcgttgaataattctatttcatgagacttttaattggtccagaagtacttactattcacttttcatgcaatttagaaaaatattggtaccatcgatactcatatgtcagactaccaacgaatgatcgacaatcttcaagtaagttaattacttttatctacttctgttacaaaatgaatatagtaacagtatataactcagagctttgctttcatagagtgaggtttctcagctgaagacacaactagctgaaaaagagtcgcagctaagcatcaaaccttttgaaagaggtgttgaacgtgaactttcttggttggatggtttaagccaccagatcagtgaaaatgttcaagaccgtataaacttacagaaggcgttatttgagcttgaggaaactaacctcagaaatcgcactgaacttcagcatcttgatgatgcaattgcgaaacaggttagctgctaaagcttctcctaattcagaggtcaatatgttgcattactgtaacctcttctttgttttataggcgacagagaaagatgttgtcgaagctctaagtagcagacgacaagtaatacttgataatatccgcgacaatgatgaagccggtgttaactaccagagggtaaacctttttctttatcatatatttcaactttgcacttcatcatggtcattgcttattatccttattatttttgttttacaggatattgaagaaaatgaaaaacatcgttgcgaactacaggatatgctcaatgaagcaataaataacaatggaaacaaaacgtatctgcatattcttaatcagtataagctcctggtaagtagaataaacagaacagtgccttattttcttgaccatgaagttcttacattacgattcacatttattgttgttttcaacaaatctaggggatgggtaatacggaactacagtttgaaatggcaatgagggaccaaattatttacaaccaaagggaagcccagagaaacctatggaatttgctcatgggtttaggagttgaagagaaacaagtgttcgatctcgctgcaaaacaaggaatcacaatcgaagactggagtagtatagcgtcgtttccaggacttccttaccggaaacagacaccgagtttcataccagcaaacatccctttcgtgggccactcatattctaaatcctcctgcactttccagagctatcaagacccttcttcgaaaggacaacaatgggctccaactcctactttatgcagagaagaacaccacagctcttactacttcatgagacaggagccaccagcatttgtcaatcttaggaaaagccacgatggttgggttggtggcagcagaccagcttcacggattgacacaggaggcaatcatcgccgagtctcatatccacaaactgtgaacaattcttctcctcggatggcctcaggtcctactttttaccagactcctcaaagggtacgtatcaaaacagctccattgcttctttcaagttaaacgtacctaagatgttgtttcagttactctcaacctcacttgtttggctagtaaaacaacatttttttgttctgattgcaaaatctgattaaccaggaaatgttgctcaacacaacgagtccttatagtagtccgcgagtgggactcatcaacggggccaccaccccgtccgtgcaacctttctatggaagtcctcgtgccgtgactgtgagaaacggttcatacaacactccactcgcccccgctgcagtttcaactaaaggtgcgagaaaccaacaacgagtgtttggaacgagcccactctcaggaaccaaaggcgtcaagaactcttcatatggacagaacagtcacaaaaagttgtacagaggaggaggcactaaaggtcacagtaagaggaagcaat

SEQ ID NO: 140607 - DNA, 445 bp, Arabidopsis thaliana landsberg
ctgcgttatacaactcattaatggcctctttgaagttgaagaaaagggataatggcgctgaacccgacaagaaaaagctggtcatcgccggtattcgccaccagttactccttctccttcgccgccgtcaccgtctatttccgctggtatctgccgtctccggctgtctcctcctcatcctcttctcattctccaccctctctcctcctccattgatccatcataacaatcaagtggccgtcgaacccaatccaaccactccatttcgtgtacccgtacgtaaactcttttttgtttcattgaggttttacacaaactttccaggtcattcatgatcattaatgcgtgtcacaggaaaatggcggaaggtcggatcgccagttatggagctcgagattgtccaacttgtactatgcctgcagtaatgcaactgacacctttcaag

SEQ ID NO: 140608 - DNA, 1810 bp, Arabidopsis thaliana landsberg
tacaaacacgaaagtccatgttcttggagaggaatctcttgtaataacgattctaaagtcttaactttgtctcttcccaattctcagcttcttggttcgattccttctgatttgggttctctcttaacacttcaaagtctcgatctttccaataattccttcaatgggccattaccggtttctttcttcaacgctagagagcttcgtttccttgatctctctagtaacatgatctccggcgaaatcccttccgcaattggtgatcttcacaatcttctaaccctaaatctctctgataatgccttggcgggaaagttacctacaaatttggcgtcgttgagaaacttaacggtggtttctttggagaataattacttttccggcgagattcccggcggttggagagttgttgagttcttagacctgtcgtcgaatctgatcaatggctcgcttcctccggattttggcggatatagtctccagtacttaaatgtctcgtttaaccaaatctccggcgaaattccaccggagatcggagtcaatttcccaagaaacgtcaccgttgatctctccttcaacaatttaaccggtccaatccctgattctccggttttcttaaaccaggaatcaaatttcttttcaggaaacccgggtctatgcggtgaaccgacccgaaacccgtgtcttatcccttcctcgccgtctatcgtctccgaagccgacgtaccgacgtctacaccagcaatcgccgcaataccgaacacaatcggttcaaacccggttaccgatccaaattcacaacaaaccgacccaaatccccgaaccgggttacgacccggagttataatagggatcgtagtcggagatatcgctggaatcggaatcctcgccgtgattttcctctacatctacagatgcaagaagaacaagatagtggataacaacaacaacgacaagcaaagaacagaaacagacacaattacgttatcaacattttcatcttcttcttcttcaccagaagagtcaagaagattcaggaaatggtcgtgtctacgaaaagatcctgaaacgacaccgtctgaagaagaagatgaagatgatgaagacgaagaaagcggttacaatgcaaatcaacggtcaggagataacaagttagtgaccgttgatggagagaaggagatggagattgagactctgcttaaggcttcagcttatattttaggagccacaggttcgagtataatgtataaagccgttcttgaagacggtagggttttcgcggttcgtcgactcggtgaaaacggtttatctcagcgccggtttaaggattttgagccgcacattcgagccattgggaaattggttcacccgaatttggttagactttgtgggttctattggggtaccgacgagaaactagtcatttacgattttgtccctaacggcagcctcgtcaacccccgttaccgtgagtctctttaaccaggaggcgtgctataacattgtttgctatcttacacatgtgtgtatatgagtttgctgaattttgtgtgtccttgggcaggaaaaggaggaggttcttcttcaccgtatcacctaccgtgggaaactcggctcaagatagcaaagggcattgcacgtgggctggcttatctccacgagaagaagcatgtgcatggaaacttgaagcctagcaacatacttttgggccatgacatggaacccaaaataggcgatttcggactcgaaaggcttcttacaggcgaaacaagctacattcgagctggtggatcttctaggattttcagta

SEQ ID NO: 140609 - DNA, 2115 bp, Arabidopsis thaliana landsberg
aggtcgaattttctgaaattaagattcattcctccatggaagaagctctgtttttattttccttagcttagcttagcttctactgatctgtttttgctacaaaatcccatctttttctttaaaactctttatctctgaatcttgagtttcttgtagaagaagaagcaattttgaatctttcgtaatcataaagattcgtggaggatctctactgatttgtcggaatctctcactacagaatcacttgatcttatgtccggatggaggagagagaaggaaccaacatcaacaacaacatcactagcagtttcggcttgaagcagcaacatgaagctgctgcttctgatggtggttactcaatggacccaccaccaagacccgaaaaccctaacccgtttttagtcccacccactactgtccccgttgtcgccaccgtagcagcagctgttactgagaatgcggctactccgtttagcttaacaatgccgacggagaacacttcagctgagcagctgaaaaagaagagaggtaggccgagaaagtataatcccgatgggactcttgccgtgactttatcgccgatgccaatctcgtcctctgttccgttgacgtcggagtttcctccaaggaaacgaggaagaggacgtggcaagtctaatcgatggctcaagaagtctcaaatgttccaattcgatagaagtcctggtaaatatctttttagaaccttcctttgatgtctgttaaaagttagtagtgtaactgacatggatctatatatggggttgacttgtacgatgttggaataagaagagaactttttgtgtcagaagtcataagctagtgaagagaaaggctacgactttaggggaagtagattagaatatgcacatcacaacatttcccaaaagctcagggattaggagagaacagctttaattaagtacagtcttggtcttgtgtttgtcttatagatcagttacatcttgttttagtttgatatttgtctgtcttgtgtatatcttagtgttttgttgtctcaactttgatttttgacttgtctggattcagttgataccaatttggcaggtgtaggaactgctgattttgttggtgccaactttacacctcatgtcctgatcgtcaacgccggagaggtatgtttttttctgaatgatcatatagtcttcaaatcgcttactatgatcagttattaagctaagctgttgacctgtggatttgtgtaggatgtgacgatgaagataatgacattctctcaacaaggatctcgtgctatctgcatcctttcagctaatggtcccatctccaatgttacgcttcgtcaatctatgacatccggtggtactctaacttatgaggtccacatgctctcttctatcatccatcttctccattttcatatatatatataaagaatgcattctttgtatttggtttccttctaatgttttttgtcttattgtgagcagggtcgttttgagattctctctttgacgggttcgtttatgcaaaatgactctggaggaactcgaagtagagctggtggtatgagtgtttgccttgcaggaccagatggtcgtgtctttggtggaggactcgctggtctctttcttgctgctggtcctgtccaggttcgtttaagtttccagatagtatgtggtctcagaacatgagttatattttgtgtctgacatggatttattacaggtaatggtagggacttttatagctggtcaagagcagtcacagctggagctagcaaaagaaagacggctaagatttggggttcaaccatcttctatctcctttaacatatccgcagaagaacggaaggcgagattcgagaggcttaacaagtctgttgctattcctgcaccaaccacttcatacacgcatgtaaacacaacaaatgcggttcacagttactatacaaactcggttaaccatgtcaaggatcccttctcgtctatcccagtaggaggaggaggaggtggagaggtaggagaagaagagggtgaagaagatgacgacgaattagaaggtgaagacgaagaattcggaggcgatagccaatctgacaacgagattccgagctga

SEQ ID NO: 140610 - DNA, 697 bp, Arabidopsis thaliana landsberg
gtgttcttgggtcatagtggagttcgtgatacggatggtaatgagttaccacgtctagtgtatgtttctcgtgagaagcggcctggatttgatcaccacaagaaagctggagctatgaattccttggtaagtataatgtgtttctttatttatgaatctctcttttcggagccctgacttctcataaactaaaactcatcttacttcttcttgaagatccgagtctctgctgttctatcaaacgctccttaccttcttaatgtcgattgtgatcactacatcaacaacagcaaagcaattagagaatctatgtgtttcatgatggacccgcaatcgggaaagaaagtttgttatgttcagtttccgcagagatttgatgggattgatagacatgatagatactcaaaccgtaacgttgtgttctttgatgtatgtgtccttatctcttttgctttgtttctgtttatgttttagtgcttttcctcttttctcatttgatattgttttggtgtggaaacagattaacatgaaaggtcttgatgggatacaaggaccgatatatgtcgggacaggttgtgtgtttagaagacaggctctttatggttttgatgcaccaaagaagaagaaacccccaggcaaaacctgtaagtgttggcataaatggtgttgtttgtgttgtgggttgagaaagaagagt

SEQ ID NO: 140611 - DNA, 2848 bp, Arabidopsis thaliana landsberg
gtataattcattcttagtttagttttagtctctgattggtttttgtttttgatcttttctgcaggaaaccttctgattccgcaacaatggcagttcagaatactgaaagtcctcatcttggggaaattacttgtggtaccttacttgagaagttgcaggtaaatcttgctaccatctccacctaagtattagggctttactctcaatcttgtgtaacgccaacttatttttactaaaggaaatctgggatgaagttggtgagagtgatgatgaacgagacaaactgcttcttcagatagagcaagagtgtcttgacgtttacaagagaaaagtcgagcaggctgcgaaatcccgagctgagcttcttcaaaccttgtcagatgctaatgctgaactttccagcctcacaatgtctcttggagacaaaagcttagttggcattgtaagttttgtctcaagtttagtagtagaaaatctaagtgaagtgttttttgttttttaagtgatgtaagtcttgattcttctgttgttgcagccggataagtcttcaggaacgattaaagaacaacttgctgcaatagcaccggctcttgaacaactgtggcaacagaaagaggagagagtccgagagttctctgatgtacaatcacagattcagaagatatgtggagatattgctggaggtttgagcaatgaggttcctatagtcgatgagtctgatttgtcactgaagaaattagacgatttccagagccaactccaagagctccagaaagagaaggtaaacattgagttagaaatctccgtatatgatatgttgcttatgttttccttaccaactgctctgttttggcagagtgacaggctgcgcaaggtgttagagtttgtgagtactgttcatgatctatgtgctgttcttggtttggatttcttaagcaccgtcaccgaagttcatccgagcttagatgaagataccagtgtccagtctaagagcattagcaatgagactctttcaaggttggctaaaaccgtcttgactcttaaagatgataagaagcaaagacttcaaaaggtaaagacactctgcatcgttaatttgcttaaaattgtttctgataaattacgcttttggattaatgaatctttgtcttttgttgttgcagcttcaagagctggctactcagctaattgacctgtggaatctgatggatactcctgatgaggaaagagagctttttgatcatgttacctgtaacatttcatcttcagtcgatgaggtcactgtgccaggtgctcttgcacgtgatttgattgagcaggtaatttatattgcattgatcaatcttcctatgtcctctcttagaaaccagttactgcttgctaatattcatgtaaaatttgtgaaggctgaggtggaagttgataggcttgaccagctgaaagctagccgaatgaaagaaattgcgttcaagaagcaatctgagcttgaagagatatatgctcgtgcccatgtagaagttaacccggaatctgctcgtgagagaatcatgtcgctgattgattctggaaacgttgagcctactgaattattggcagacatggatagccagatatcaaaggctaaggaagaagcatttagtagaaaagatatattggaccgagtcgagaaatggatgtcagcttgtgaggaagagagctggctagaagactacaatcgggtaatgcataatttctctcagtcactcactatgatacatcataagacattaactttaaattggatcttgagctttttcatggttttgttttctgagagcaggatcagaacaggtacagcgcaagcagaggtgcacacttgaatctcaagagagctgagaaagctcggattctggttagcaagattcctggtatgtgtagaataactaagatatatcatatacttgcaaacttctctcatgtattcacatcttataaagattggatcttttgttatgtataaagccatggttgacacattagttgccaagacccgggcttgggaagaagaacacagcatgtcctttgcctacgatggtgttcctctgctagctatgctagacgagtacggtatgcttaggcaagaacgagaagaggagaaacggaggctgagggtaagttcatcatttctactcgattaatgataaggcgaaaatgtcagtcactccctaaactcctctttgtcttaatgagcaggaacaaaagaaggttcaagaacagccacacgtagagcaagaatctgcctttagcaccaggccaagccctgcaagaccggtcagtgctaagaaaacggtggggccacgagctaacaacggaggagccaatggaacacataaccggcgtttatctttgaatgcaaaccagaatggaagcaggtctactgcaaaagaagcagggagaagggagactctcaacaggccggctgctcctacaaactacgttgccatttcgaaagaggaagctgcttcatctccagtttctggtgctgcagatcatcaagttccagcttcaccatgatgaataaaaaaatgaaaaagatgtgtaattttcagtgtttgagttggtttaggaagaaaaggctctatgaaacacctgaaagaagacaaaaagacatttgagagtagaatggtgtactagaatgtgtatgtgtgtgtgtgtttggttgatgttattttgatagttgtatcatcttcgctaaaaaaaacaacctttttctagggcttatatgggccttgagatagagagcccataaagacctttcattatctttgtccaagtttaatagcgtcctcaagtaggcaaggcatgatct

SEQ ID NO: 140612 - DNA, 3202 bp, Arabidopsis thaliana landsberg
tttcagacaattttggttctttttcttttgtatttatacattcttaatcttctacaaaacaaaagaagaaagacacatttcggtactaacattgttcttcatacctctctttaaattcatatacgtgtatatactttgtttatacgtgtgtttgtgttaattgtgttgtttaatcttaatcccaagttagtagaaatggcgggaaacggaaacgaaagtaccggtggagacttcagtttctcggctgcggcggcccgtgatgcgcttccgaggatcacgactgagaagggcggcaaatctccagggccggcagacgtctgccaggatgacatcgcaccgcgggtcaactttcagaccatcgacgagcttcacagtctccagaagaaacgatctgcccctaccactcctcttagagatggcagcgccagcggagtcagcggaactagtggcccgactactcctgtctccagcgagaccatgcttcaatccgtcaggtatatttacaattgaatatagctcaacttccaaaaaacacaatttattttcaataattaatggggaatgtaaaaagttattaggccaatctatgtttactaattttacaaatcacaaaattataaggaatcgtgatttaagcaaaaaaagatctttgatttgaagattaaacatgtgaaatagcgtaatgatatatatagtggtttctcataatcgtatgattgaattttgtttagttttgcatgcaatcataaaaataaaaataaaaaaatgaattttgagaaaacaatgatacgaatgcataatttggtgaaatattggacagtgcatcgttggcttcgttgacgagagagacaggaccgaagttaataagaggagatccgacttcggcagctaaagtagcacacgtgccagtgactcctacgtcacttccggctgctgacgtcagcgacagtggcttgaagttcactcacatccttcacaacctctctcccgccggtaacaaatccctaaaacgccaccgttttaacccaagagccctatttttaatgttgtttcatgttttgtcatcaccttctcaatttgtatgaatgcagagttgtacgagcaagcgataaagtttgagaaaggatcgtttgtgacatcgaccggtgcgttggctacattgtctggagccaaaaccggtcggtctcctaaagacaagcgtgtggttaaggatgataccactgaggccgaactctggtggggaaagtgagtcattttctatcaaacatttacattatatgtgacaaatcaagatcaccaaattatgaaaacacattcatcaaatgtgatatcccatttattgtttgtttttctagtttaaaaattcgtaaaataactatcttttttcttgcagaggatcaccaaacattgaaatggatgaaaaaacttttttggtgaaccgagagagagctgttgattacttaaactccttggacaaggtaacttgacatagactactacattcaaaatgagattgtagttaaattccatagattatatatttaaagatctttttataatttcattgttaggtgtttgtgaatgatcaatacctaaactgggatccagagaacagaatcaaagtgagaattgtttcagcaagagcttaccattcactattcatgcacaacatgtgtatccgtccaacacctgaggagttagagaatttcgggacacccgatttcacgatttacaacgcggggaaattcccgtgtaaccgtttcactcattacatgacatcttctacgagtgtggacataaacctaggaagaagagagatggtgattctaggtacacaatatgctggagaaatgaagaaaggactctttggtgtgatgcattatttgatgcctaagagaaagattttgtctcttcactctggttgtaacatgggcaaagatggagatgttgctctctttttcggactctctggtaccggaaagactacattgtcgactgatcataaccggtatttgatcggagatgatgaacattgttggagtgaggccggagtttcgaatattgaaggtggttgttacgcgaaatgcattgatttgtctagggacaaagagcctgatatctggaacgctatcaagtttggaaccggtacttaaaaacagaactcactttacaaatgttagattttacgtttttataacattttcacttttttttttttggttttgggacagttttggagaatgttgtgtttgatgagcatacacgagaagtggattacactgacaaatcagtgacggagaacacacgtgcggcttatccgatagagtacattccaaactcgaagataccgtgcgttggaccacacccgaagaacgtgatcctattggcttgtgacgcctttggtgtgttgccgccaatcagcaagctcaatcttgctcagactatgtaccatttcatcagtggctacactgctctcgtaagtcccggtttggttcggttcggttttcttgtaatcgattcgtaatgaataatgtgattttgtaggttgcaggaacagaggaaggagttaaggaacctcgagcgacattctcagcttgttttggtgctgctttcattatgcttcacccaaccaagtacgctgctatgttggctgagaaaatgcaggctcaaggagccaccggttggcttgttaacaccggttggtccggtggaaggttaaccatccatctctactgcagttataaccaactagctaaacaaacaaaaagagtattaaaattgatgataaaaatatgcagctacggaactggaagccgaatcaagttggcgtatacacgaaagattatcgatgctatacattccggtagtctattgaatgcaagttaccgtaaaacagatatttttggtttggagattccaaatgaagtagaaggagttccttctgagatactggaacctattaatgcagtaagttagatagacagcagaaaacatatatattttttttatgaaattaacccatttatttgacatctttggttatgtgtgtcttgtgcagtggcctgataaaatggcttatgaggacacattgttgaaactggctggtttgtttaaaagcaattttgagacattcacaagtcataagattggtgatgatggaaaattgactgaggagattcttgcagctggtcctaacttctaa

SEQ ID NO: 140613 - DNA, 777 bp, Arabidopsis thaliana landsberg
aggagaaacaacaatgtcgccaatttctaagattctaggaggatgcaggacactgatggcgaaggcggtgactaatgcgacggctaccggcgccggcgattgatagaagaggaggaattcataagatttttccagtctcagagtcgctggctagattcgtcggccaaagcgaagactctttttccaccgccatggagaaagtggagcagtataccgatgatcacaatctttgggttagggatttcgaaactcttctccagtttcctttcattctacttttttttttggtgatttctaggtcttttgatctgattctttctgttggagcaatgtatctgatttataggtctttgatttgtagaatccggagaatatagaggagatactgtgcgatgataacttgaagacgattttcgatggccaagacaaagtcgtcggagtcagagagatgacggagcttttgttgcgacattttcctaacgttagaactatgtcggcgaaggtgaaggctaccggtggaggtactatagaaaaatgggggttcaatgatattgtgaaagtctcagagccgctggctagattcgtcggccaaagcgaaatctcttttgacgccgccttgagaaaattgctagattatgcctttgatcacaagctcgtagatgagggtgttactctgctcgagtttccttgggttagcttttttactttccttatgatctcctctttacatgtttatgcatttagggattggagtctctagagactggagaatggtag

SEQ ID NO: 140614 - DNA, 3017 bp, Arabidopsis thaliana landsberg
atggagattcctcgccggacctttgttttcttcttctctctttgtctcttgtcgtcaacgtctctctccatcgataattttcaccaagcgtaagtctaatttcttcttctcttcttgccattccctcagatttgtattcttctaattggcaaattatcacaatttggctttaaagtcttgatttttatctttgtttctggactattatagtaccgcatcttgtagttgtagtaatggcaatgggaaataaatacacaacattgtagcaatggatctgatatttgattgaaagacaggttttttgtttttgtctacatgagaacctatgaatcttcttgataatgtattgtctattgccagttgtttctcaagtcttaggtttgttataagccacattgttgctagagaatgttaccactgtataccagtagcaatttcctgtcatcaactgtagcaaacagctcctgatgattgatcagttgtgatgggcaaacactttttggaaatcatttgtgcttgttttttatgcagttttcctattgttgaacctgctccgggtcatacaaagcttcagcttagcagagaaggtctggaagcaattagcagaattacaactcctatttctgctgttgcggtatgtgacagtgatgtttgactcattatcaattcttcgtatgttctttctatctgaacctggttttctcggaccaagatatttgttactttgtttctcacgatttgcttgttatttcctttggtgttgaaatactaggtgattggcccatatcgttctggaaaatcatttctactcaatcagcttctttctctttcttgttatgaaggtgcttcttatctcatatactcgggctctgcggtttacttactttttgctactcaacattgacttccaatattttcaaattcatcaggttttggtgttggacacatgcgtgataccaaaacaaaaggtatagcaacaatgtctagaggacactaccatctttcaactgcatatatatatttctagctaataaaggtttaactttttggttcggaatccacttcattgttgcatacaggtatttgggtctggggaacaccattagagctggagattgatggagtaaaaacttccgtaatttacctcgacactgagggattcgaaagtgttggaaagtcaaatgtttatgatgaccggtacccagacagttgcaacatatgcacatttaaacttttctttgcggaagctctgaatatctaatcaatttctgtgtaaatattcaggatttttgccctggcaacggttatgagttctgtgcttatctataatctgcctgaaactgtaagttgtcctacctctttgtttgcccagattgcttatgcttctagatacattatacttataatcaaagagagtaaatccttacaggggtttctttatatcaatatcaactatcaagtcattagtaaaaccaaagaccaaagtgttttcgaagacctaggtagttcagacctaggtagttcatatggtatcaaacaatcccttgtgatgtttagttagaagtatacaaatatggatgtgtaacagagtagctagtatttaaaagaacttcatctacaatttctctctctgatatgagctctcatcagatccgtgaagctgatatttctcggctctcctttgctgttgagcttgcggaagaattttatggaaggtttgcccaattgtactctgcatttctgtcttgtttaatatgattgcctgcctctatgaatactgactgggttctgtttgattggctcatgcaactcaattgacagagtaaaggtataccctaacggaatggctgttattcttgatccatggcatccttcaaaacttcgtttctgatttttatatatcctgtagggtgaagatgttgcttttgaaccgtcaaagcttctgtggcttatccagcgtgattttctgcgtaagtgcatggtgcttttgactacaacattcataatagttccatttaaacagtgcttatattctatgtaatctctgcctgttttgaaatgcttttctttctcttctctgatataacaagcagtatttttgtgtgctcctggtcctgtgtgatccatttcaatgttccagttttctctgtgttttatgcaagtgatctggtcatgattaacactattccaagtttccaactttatgcagaagggaaatcggtgaagcaaatggtggatgaagctctcagacatgtccctaatgaagatggttagcgctcctttttgttcttcaactaatgtctcctagacctttgttaattgtgttttcttgtttcttatgttttcaggtaacaaaaatattgaccaggtatgttctcttgtgttctgcatcgtacaggtaatcatcattattatctcagaaatcattcttgttgtctcctttttcaggttaaccagattcgggactccttggctataatgggtgacaacagcacagcctttagcttaccgcaggtaaggcatttgtgtgttctactttgcatattttccagcctttctttcagaaagaaaatacagagcatgaaactttaatcaaaatggctatctttgtgcatgaacatttatggttatctttgaatatctttgctgaatcatgcgcgaatacaaaactttcttagtgtggttgtggtggttacctttaactttaagtcatcctgaagtgtgcacaaaatccttagatttcagtgcttgtgtatccttgaagtatagcttttccaaagttcttgggaggaaattttattttttctccatgtggaacattatgaaatgattgtctgatctgactcagacgtggaatctttgttgctgccttgatagggtggtcttcgttttgataactttgttcttgtttttgttatatagcctcatctcatgcgtacgaagctgtgtgatcttgaaggatgagaacctggattctacatatgttgcaaggcgtgaccaattgaaaaagctcgttg

SEQ ID NO: 140615 - DNA, 659 bp, Arabidopsis thaliana landsberg
atgcatccaaggggtcggatgttccggtatccccaagggcgtggtggtagtggtgatgtgcctccatatgatatgggcaacaacatgccattgactattggagctttggcttcaaatctgtctaatgctactccagagcaacagaggacggtgagagaatctcttaaaaaccaaatagagagactggttttgcttggattataataatgtgaccctttgggtgtgtttgtacagatgctgggtgaggtgctgtacccgttggtggagcaggttgaggcagagtctgcagccaaagtgactgggatgcttttggagatggaccagactgaagtgctccatctgttggagtcaccagaagctctcaaggccaaagttgcagaggctatggatgttctcaggagtgtcgctgctggtggtgcaaccgagcagctcgcttccttgaacctctcttaaattgctttttatcatttgatctttggcttttgtctctcccatacaattggagttgtttctttggtattcgttttctccctgggaatttggattcctccacataactgcgtttgtgttattttaaaccttcgtttttaaaccacaaaggaaaaacctatctgctttgttcttttgatttagttgcgtgttctagcttgttcgatcta

SEQ ID NO: 140616 - DNA, 2457 bp, Arabidopsis thaliana landsberg
gtacttatcttccaattataggaataaacatttcgccagtgaaaaaaggtctcattccttccttacttgtggagatggagatctgaatctctaaagtttcgatttttatttattcacttttatgcccaaaaagaaaaatcgttactttaaagccaaaaagaagaatacacaaacttcattcactctctcccattctcggatctctctcagtgcacaggggttgtcactcttctcctttggtcggtgagttttcaatcttttttccttgcttctgcgattttcattcgttgagattcgtattttgcttccttctcattctctgagatattcgttaatcaatgagcggtttttttacttttcctgggaaattgagtgagacttttcattaaaagctctcccgataaaatggaaactctactctcagatctactactactttctatttgattgcataaagatccaatctttgacaaaaaaaataaaactttgtcggtggccatttttataacacttgtgttacttacttggtttacacttaacttgggttctgaatcaagagtgagtggtttctgacccaataaacacggatctgactctaccaagtctgaatttatcatgttctgtttattttaagtgccagtggctttttaccaaactctatgcttaaagtcatattctttataagtgttctgttcttgatttctgcagaaactctttcttggaaagtgcattttgttatcaagactctgaagagctcttttgggaggatagtaaggttggatgatgagagggagatctgatggaggcctaaagaagcggcttattgcttcggtctgtgtcgtggctctattcgtctgtttcttgtttatgtactatggttcctctagccaaggtgcatcagcattggaatatggaagatctttgagaaaactcggatcgtcttatttgagtggagatgatgataatggtgataccaaacaggatgattctgtggctaatgcagaagacagtcttgttgtcgccaaaagttttcctgtaagtttgatcagattctcaggtctggtaactggttgagatatgttaataatgttagctaacttatggtttaaatgttaaggtttgtgatgaccggcactcggaaatcatcccttgcttagataggaatttcatctaccaaatgaggttgaagcttgatctctctttaatggaacattatgaacggcattgtcctcctcccgaaagacggtttaattgtttgattcctccaccatctggatacaaggtgctatatttgctttcttgttttgctctgatttgtgattggttcctggttacattgtaaaaatattgttttgttctttgtattgatttgcgtttaggttcctattaagtggcctaagagtagagatgaagtgtggaaagcaaacatacctcacactcaccttgcaaaagagaagtctgatcagaactggatggttgagaaaggcgagaaaatttcttttcccggtggaggcactcatttccattacggtgctgataaatacattgcatcgatcgcaaatgtaagcgtcttttgctcactttttatttctagtgataacttgtctctaatgattttttgactttgcagatgcttaacttttcgaacgatgtattgaatgacgaagggagattaagaacggttcttgatgtcggatgcggagttgcgagttttggagcttaccttctcgcgtctgatataatgacaatgtcactagcccctaatgatgttcatcagaaccaaatccagtttgcgttagaaagaggaatccctgcttatcttggtgttttaggtaccaaaaggcttccttacccgagcagatcattcgagtttgctcattgttctcgatgtaggattgattggcttcaaagagacggacttcttcttcttgagctcgatcgggtactaagaccgggaggttatttcgcgtattcgtctcctgaagcttacgcacaagatgaagagaatttgaaaatctggaaggagatgagtgctcttgttgaaagaatgtgttggagaattgccgttaaaagaaaccaaactgtggtttggcagaaaccgttgagtaatgactgttacttggagagagagcccgggacacagcctcctctctgtcgctcagatgctgatcctgatgcggttgcgggtgtttcaatggaagcttgcatcactccttactccaagcgtaagtatttgcttctgttttctgttccgttggttattttgagttttgaggaattaggaccagatcttttgttttgtatgccatatgtcacagtcatgctctgttttttttaaatacagatgaccataaaaccaagggaagtgggttagctccttggccagctaggttgacttcttctcctccccgtcttgcggatttcggttattcaaccgacatgtttgagaaggacacg

SEQ ID NO: 140617 - DNA, 818 bp, Arabidopsis thaliana landsberg
atgccgactcgtaccgacggcttcgagatagccgttaaagagaaccctaaaaacggagactttctctcacttccggaggatttcacggaagaagaagagagtatcaccgtcgaagacgagcaaagaaccgccatttttgtttttctctcttctgcaaatttcttctgcaaatttcttctgctctttccgatttctcggataagattgggttctcagtaaatagtagtagtggcaacaccgtaaataatctgatgaatacgaccgaaaaataaacacaaaacgggttaaggatccgggtttttttcggagctccggattcaacccgaaatactgttttttttttttttttctcaataggagagaaaggtcttcttcggaagcaagctaagtcatggcaacgatttcgtcaactctactcttaaattcttctagatcagctttaccactaagattcccaaaattctcgggattttcttcttcctctccattcgctagatcttacagatttggacgacgtaatctggaaccactttccaacggaatgctttcgtcgggaagtagagccgacggtgctacggcggcggctgcatcgatggaaggagtgatgacggaggcgatgaaactgattcaatcggcgtcaccaacttggaaatcagctgtggctaacaatttattgatttttgttctcggttcaccgcttcttgttaccggattgtccgcttctgggatcgccgccgcgtttttgcttggtactttaacttggagagcttatggctctgctggtttcctcttagtcgctgcttacttcgtcatagtaa

SEQ ID NO: 140618 - DNA, 1180 bp, Arabidopsis thaliana landsberg
atggagataagcaagtacctgaggcagcattcaagaacaattgctgggaagtcacagcttttcatcaactcttatgcgaaggctctagaggtacacttcctggttggcttggctgttttaacttttgtacctcttaatttcacatataaataaaagctttctaattgtgttctgtgttattcggcacctatagaaaagacatatttcctgttcgcttgttgttgtgtacaataggagttagtaagcaaccaaggagggtctcaatatctttggccaggatctgaaaattgttggttcacctttgatacacaaaaatctgaattcacactgtttatggtggtactacaggttattccacgacagttatgtgacaatgctggatttgatgcaactgacgtcttgaataaacttagacaaaaacacgccatgcaaagcggtgagccttctctcacagtcacaagcttgatgtattcatcttttgatgagagctgcttaatctcattcatgatatctttgttataacaggtgaaggagcttcgtatggagtggacattaacactggtggcatagcagattcttttgctaacttcgtttgggaaccagcagttgtgaaggtatttcaagattctataaaattccactcttttttcgttcttgggactattgtgccagttatgaatatgtctatcttgtgtggatatctttcattgaaaagtttattgatagtatgattccctttgttctggtagatcaacgcaataaatgctgcgactgaagcggcttgcctcattcttagtgtcgacgaaaccgtgaagaaccctaaagtaaataacacatgctctcattttcttttgtatgttttgacaatgtatatgtattgtattgataattgttgtctattgcagtctgagagcgcacagggagacgccgcaggtgcaatggggagaggacgcggtggaggtcgtggccgtggaatgcgaaggcgataagctccgtctctaatgccaaacttgtgggattcttcttcttcttctctaatttcgattttgttgaatttttgttttgaagttaaaaaacctattattgggtttgtgtttgttcaattagaatactggttgggtatgtatgtctatacaatctgtgaaacataagttttagtgttgttttggttaaggagttt

SEQ ID NO: 140619 - DNA, 3517 bp, Arabidopsis thaliana landsberg
ctggttgcggtgaagaaagctttagcatatccagccaaacatgtttttcacatccttgcaatcggcctagcatttggttacatccggtggtggatggaatggaatccggtgttagccggctggattggtggaagagcctttccggtggtggggaatggccaatgtggcttagggtaaaagtgagggtagaaaggattgtaatgccaccattcgagctcttcagtacgtaatggaaatgaatccacattttttgctgtgacttgagatgtgacacagcttgagaagagtatcatggcaacaacaagaattgcgagattcttcatttttggattttttaggaaacttttgaggtttaagtatgtgaagtgagaagaaatgtggttttgatggtttttgagatgaaatgacgttaggatttatatagaagtattaattagggttttttagttttttttttttggttggtgataatatcgaattatgtatattattggaatattctctgatattctcgatgatattctctgaatacttgatgtttgttgtggatttgagatattttttcactaaaattaaataatcggatcatgatatttatttatttcaaaagtaagtaaatggtcattttattgaactgatatcgatatcttatgcatgctccctatatttcaggtttggggttaccactaaagaagaatatgctggaatttaagtcttaattttgggatattccaacagatatcatgaaattttgcgacgatttcttggcacacgaaactcagtggagaaaatcacgagtggcaacaaaatttgacagaatcaagggaaatgttggcaagaatcattttagttgagtgcattctctcgttaattaatatattctttttgttctttgtacaagtaattaaaaatcaatctcacaaaagtatgcacaatatatatgaattgtttcataagatcgtacctcctttcaaccagcaactaaatctctcagcataagaaaattgttagcaagcagtaataagagtattcaagtagctagaagcctagaagtactagttaattgttatcgtatatatatatcaatcctcattgcttagatattatatattacgcaacaatttcacttactaacgttagattaactttatctccacgacttagtgtgtgcattaatcttagttttgctttcacatctgtcacattgtttattgtccactaagaatattgtattaagcatcaatctcgatgtcagaaaatgattagtcaagtgggtttcactaatttattctttttgttttaatattaaaaaacagaaccgatgtgtgaacatgattgcacatctattcaatgcaccgttagaagaggcggagaccgccgtcggagtaggaaccgttggatcatcggaggccataatgttggccggtttggccttcaagcgtaaatggcagaacaagcgcaaagctgaaggcaaacccgtcgataaacccaacattgtcaccggagccaatgttcaagtaacgttttctaaataaaagatgcttactaaacataatctttttgatcaattttcttataacgattcaaatgtttaggtgtgttgggagaaattcgctaggtactttgaggttgaacttaaggaagtgaaattgagtgaaggatactatgtgatggaccctcaacaagctgttgatatggttgatgagaacaccatttgtgttgcggccattcttggttccactcttaatggagaattcgaagatgttaaactcttgaacgatctcttggtcgaaaagaacaaagaaaccgggtaattacttaatggattgtctacatgattacactatacgataaagaatatttaagttaattaaaacaactatgcatgtttttgatagatgggatacaccaatccacgtggatgcggcaagtggaggattcattgcaccgtttttgtatccggaattggaatgggactttagacttcccttggtgaagagtatcaatgtgagtggtcacaagtatggacttgtgtacgcagggattggttgggtgatctggagaaacaaagaggatttgcctgaggaactcatcttccatatcaattatcttggtgctgaccaacccacctttactctcaatttctccaaaggtaactaatatttattttaattattatttttctttgtagcttgtcttaatcttttgtgttcgacttttcattattagtcatgatctaaagtagtctaaccatcaaagtgatggagatcaaattgctttccattttaaaaatacggaaacgacaccgttttttaattcgtagtagtgtagtaattgatcaatcaatatgattagattaagcaattgtgggaaacttcacgtaaattatttccactttttgttttttccaatttgtttgactttagtttaagaaatcggtagtacattatataatcaaagggatgggaggtcgaatttgtttccatattacaattggggaaaacataattaaacgttgtcgtattcaaaaagtcttctgtcaataaacgcaggttcaagtcaagtcattgctcaatactaccaacttatccgattgggccacgaggtaagtcagtccacgattatataaatttattaatcaagctaattaattagacattactttaacaataaaaatgtatcaaacagggttacagaaatgtgatggagaattgcagagagaatatgatcgtgctaagggaaggacttgagaagacagaaaggttcaacatcgtctcaaaggacgagggagtgccacttgtcgctttctccttgaaagatagcagctgtcacactgagttcgaaatctccgacatgcttcgcaggttagttagttgtcttaactaaaaagatttcaaatactcttttcttatttaaactttggttaaagattcataaaataagtagatatttaatgactatgtatatgtaattaattactctataaatatttgatatgtaggtatggatggatagtgccggcctacacaatgcctccaaatgcacaacacatcactgttcttcgtgtggttatcagagaagatttctcgagaacactcgctgagagacttgtgatcgatatagagaaagtgatgcgtgagctcgatgagcttccttcgagagtgattcacaaaatatcacttggacaagagaagagtgaatctaacagcgataacttgatggtcacggtgaagaagagcgatatcgacaagcagagagatatcatcactggctggaagaagtttgtcgccgacaggaagaagacgagtggtatctgctaatcgaaatatatttacttcaaatgtttgaagacttttattaataatgcataattgcattgatttggatatttgaatgtttcattcccctttatcgctgaaccaagtttcatttccctttattgctgaagtaagtttcatttccctttattactgaaccaagtttcatttgactttgatttgtaatatcttttgatatt

SEQ ID NO: 140620 - DNA, 273 bp, Arabidopsis thaliana landsberg
ctgtgccgtcctgtggaaaacatcgttctttcaccaacaatggcgaagaagcgagatcgaattgtcaacactcaaccttttatctccgatgacgcctccctcgcttcttccaggaaacgatcaaaggttccaaaaacccatcagaaacaggaaaaggtgagtttcgtcattttttcaaatttcaagctttttagaatgtttcaattgattgataatttggggattttggcagttgattgaagctggtatgagcgagaagatcatgaaacaagc

SEQ ID NO: 140621 - DNA, 623 bp, Arabidopsis thaliana landsberg
atggcgtcaaagactttgattagtgatacaattgaaaaaattaacgagagggggatatttgttctctctaaaagtaaagggataaatgacgataattgttttaattttgggccagagagaaaggggtaatgtgtatatctaaaacttgacggcaaaattgacaaaaataaaatattctgactcccaaatagtaataaatatatgacttaaacctcgttttgttcttcgtcagtctaaagactatctccagtcgcaaaaccaccgccgtatatccacggccgtcttatcaccggcaacaaccgtaggtacttggatataacaatttcattcagctctattcagcttgtttgctaataggattttgaatctgacttctgtttttgtataggtttttgttttccgtcgcgatggaggtggataagaaggacgagagagaggctgaatcttcggagcaagtggtgaatccatgggaagtgtccgccaaagacggcgggaagatcgattacgacaagcttattgacaaatttggatgtcaaaggcttgacgagtcactgattgatcgtgttcagagactgacttctcgtcaaccacacgtgttcctccgccgtagtgtcttcttcgcc

SEQ ID NO: 140622 - DNA, 1314 bp, Arabidopsis thaliana landsberg
tgatggagggaggtgcattggctaaaactttgtttcaaaatgagccaacaaagcctgattataggtaacataacaatcttaacttttgatgtttaaacctttgggattttttggtgattgatgagagtttttctctgtttagtcttacatgctgcatcagtgatctataacattttataactgttgtctctgatggcttttatcctttctgtgttctataatcaactagagctgttccctgcgccgttttctcccagccacctattggaacagttggtctaactgaagagcaggtaagtaggatgatttgtcaaaaatatggtttatcatgcatgccactacatagaaatattaactacgtgtttgcaggccatagaacaatatggtgatgtggatgtttacacatcgaactttaggccattaaaggctaccctttcaggacttccagaccgagtatttatgaaactcattgtctgtgcaaacaccaataaagattctcggtgttcacatgtgtggagaagattcaccagaaatcatccaggtttcattttttaacatgattggtattctctgaaaagtaatcacggaaaacatatatgattgaatatgaattttatttttacaatttttcagggatttggggttgcagttaaagctggtttaactaaggccgactttgatgctacagtgggtgaacaccccacagcagctgaggagtttgtcactatgagggctccaaccaggaaattccgcaaagactcctctgaggtttgtttgtgaacagtcaaaacttatccatctagttatttctcgtggttttgcaacatgggaaaatgattggaactgagtgagatgtgtatgtccaatttcatttcagggaaaggcaagtcctgaagctaaaacagctgctggggtgtagagaaggttgcaaaaaagattgtatttacggcattggagctccctgataaggtattcattcaccagtttccgaagtattggtcctaattcctaaaattagaaaagacatgcaatgcattagctcataccatgcttaagtaagatgtcaattagggccaaagctttgtttctgcccaccccggaaaaatagggtagactagaattctcctccataacggcgtttgatatttgacttgcatgtttgcaggagaacattgtgtctgtgaagaagaagcttttcttttggcagagaatattttttcataatgtcgagtgaagatatgatcgctgtcctgcaatacttttgatccgttgacacacgaccaaattcctcgagagagagaggttgtaactatt

SEQ ID NO: 140623 - DNA, 1361 bp, Arabidopsis thaliana landsberg
aaaacctctatctctctctctctcagacgatggctcccggggaccagagcacgaagagaaaacaggattattgacctcaaaacgtaatctttcacacactaagtctatctgtggattagctgctaactattctcatgtgtttaattttcttcgtctaatttgttgttagcagagaccagtgaagaagaagggatcttaccctttgaagccaggtgttcaaggttttttcatctcttgcgatggcggacgcgaattccaagctgctcaggaagctattaacgtcattgattccgtaaagtttctctcttttttttgttgaaattgatttcatctcccaactagttcatattttacttagtgtcactgcttcttccataaattgatttcctgtacacgtttcagattatcttcaacaactgaacttagcccttttaatttctggtcgaattgcgttttaggtttcctagtaatatactttctctgttagctttgtcgagtttggaagtttgtgtgtttattgcaaattaatctaatctgaacaatgttgttatgtggtctgctttctcgacatcactaggcacagtgccaatgttagatttctcaagagctttgtaatgtttgagcagctcttataatcttttgagtgttcttaaatgtaatctcttttgttcttttttacagtttttcgaggagctaatacaagggactgactcgaaagtgaatcctggtttgtttggtaatccaataaacaaaaaagttacattttcgtatagcgaggatgaggatgaggaggaagatgagagtaataatggcgaggaagaggaaaacaaaggagatggggataaggcagtagtgagtgaaggcggtaatgatctagtgaatgagaaagaaatagctagtgaaggagttaatgatcaagtgaatgagaaagaaatagcaagtgaagggtcatgtgaagtcaaacaattggcagaaaatgagactgtaaaagaggaagaagataaagggaatcagaagaatggtggagatgaacctcctagaaagaagacgtgtacggaagaagcaaatcctttagcaaaagtaaacgaaaatgcagagaagtctattgataagttgattgaagctgaactaaaagaacttggagacaagagtaaggtaagctaagctattatatatgggtgaatgacaggagctctcctgaaaaacttcttgaagtcttatgtttttatttctttgcggatcataagagtcttgttgtccatttttgacagagacggttcatgaagttagatccgggttgcaacggtctggtcttcatccaaatgaaaaagagagatggtgacccaagtcccaaagaaatt

SEQ ID NO: 140624 - DNA, 1407 bp, Arabidopsis thaliana landsberg
gacgtccgccggagatgacagattggttgtgcttgaccaaactcaaaacagagaattgcatattcctggtttcggtgtttttcaaaatgtctccgccgatataaactgcgacaaaggagaacgaactcgattccgttccgacattcttgacttcaacaaggttcctcagttttacagtttcttgatatccttaaacttctaaatcacatatagatatttacattacatgtgtgtttttgttgttgttgttttggatcattcagatgtcggagtattttaaccagaggtcgtcggtgaccggaaaaataccgtcgggaaatttcaacgcgacgttcgggtttcaaagcgggtcatgggcgacagacgccgcaaacgttaaatctttaggtcttgacgcttctgttgtaacgctatttaatctccacatacacaatcctaatcgtttgcggctcactgaccgcgtccgaaacgcagttccttcatcttgggacccacaattattggctaggtcagtagtacccatttttttttttagtatatactttcattgactaagtgatagatatatagttaacattatgagcacaacaaacatattatcaaaaaattctgaacttggacaatttgttttagttgaattgtgacagaacagctgtggcatttttgactaattctatgttagtatcaattaatgtagaatatctggtttttctcctatcttttgaatatttaaattcaattgtcaacgtttccaactacgatcgtaccgaagaatggggaagtttcttgattttttctcattgaactgaagctagaaaaactaataaaaaggttgaaaaacttgaacattatttgaaaagactctgaaacaataatctaacatataacttaccagccaacttgttatcaaaaacattagctaattcgtaataatttgtcaccactatagtatctatagtaataataatagaaaacctaaattggaaaaggacaggtttatagagaggtatggaacacacgtaataacaggagtgagcgtaggaggacaagacgtggtagttgtgaggcaagacaagtcatctgatctcgacaacgacctcctccgtcaccatctctatgatcttggcgaccaattgtttaccggctcttgccttctctctacacgccggctcaataaggcctatcaccactcacactctcaacccaaggtcagctacattatagctaacttcataattttaatcgaaatttcaatttagcatttaacactacgttacaatatccattttaaattttctaactatacaaccatttacactgttaatattgcagtttccggaggctttcaacgtctttgatgacaaacaaacggttgctttcaacaatttttcgataaattctcaaaat

SEQ ID NO: 140625 - DNA, 1212 bp, Arabidopsis thaliana landsberg
  unsure (1)..(1212): unsure at all n locations
atgtcaggaaggtgtggcactatcaatttgattgtgaagaatgaatttcaccgtgcaactcctggtggtacgggaggtgttaaaaccataggcaattatgctgcagtaagtaaaagcttatttcacttattgattatattggaccagctttcgtaactcacacatacaagttatttatttaggtactgaaggcacagtcaattgcgaaagctaaaggatattccgatgttttgtaccttgattgcatttacaaaagatatcttgaggaggtctcgtcttgcaatattttcatcgtgaaggtaaataaaaatcactnnnnnnnnnnnnnnnnnnnnnntgtagagtctataagatgtctctcttcataagacgtaggagatgatgagattgagactctggcaccatgtttttttgggggcattcttacaaacatatcaagatactgattctcttacataatgattttttaaccaacacttttctttgccaggacaatgtgatatctactcctgaaataaaaggaaccattttacccggtattacacgaaaaagtatgatagacgtggctcgaacacaagggtttcaggtgacctcttccccttctttaaattccgaacatctttaaagtggatcataagtactattattggcttctgatcacagtgcatgtttatacggtatcgttcaggtggaggaacggaatgtgacagtggatgaattgttagaagcagacgaggttttctgcacaggaaccgccgtggttgtctctcctgttggaagcgtcacttacaaaggcaaaaggtaaaacgttttttctttgtatcccaatttaagtgaaaaccaaacctaccaagtggtaaagttttcccctttttccgaatacacacacagagtgtcttacggagaaggtaccttcggaactgtgtcgaagcaactctacaccgttctgacaagcttgcagatgggtctgattgaagacaacatgaaatggactgtgaatcttagttaagccaggcgaatgcattgcatcaattcgctgcttggttttgctttcttttctttggtctgtggctctgattcgtgaaactatgagttggattgtttagaatctggttgatctagaacttagctggttcaagatcattagatgttgttgcatcataccaataatattatctttagatctctgtttctgattagatggttacatcc

SEQ ID NO: 140626 - DNA, 782 bp, Arabidopsis thaliana landsberg
caaaacttccgatttcaaaaaaccaatttgaaatttgtcaaaaggaatattctgacgatcgattcttgattcgttttctcgcgtatagagagaaaaatggcgcttaatttatcgcatcagctaggagtactcgccggaactccgatcaaatccggtgaaatgacagattcatcgttgttatcaatttcaccaccatcggcgagaatgatgacacctaaagcaatgaatcgaaactacaaggctcacggaacagatccatcaccgccgatgagtccaattttaggtgcgacacgtgcggatctgtcggtggcgtgtaaagctttcgcggtggagaatggaatcgggaccattgaagaacagagaacgtatagagaaggagggattggtggaaagaaagaaggaggaggaggtgttcctgtgtttgtgatgatgccgcttgatagtgttaccatggggaacacggtgaatcgaagaaaggcgatgaaagcgagtttgcaagcgttgaagagtgctggtgttgaagggattatgattgatgtgtggtggggtttggttgagaaggaatctcctggaacttataattggggaggttataatgaattgcttgagctggctaagaagcttggtcttaaggttcaagctgttatgtcgtttcatcagtgtggtggcaacgttggtgactctgtcacgtacgtgattcttctctcttgctcaatcacttattaattcgtgtatcatttttaaggctacttgagattggaaagattagaagtaggatttga

SEQ ID NO: 140627 - DNA, 1648 bp, Arabidopsis thaliana landsberg
caactttactatgccgacatgaccttcgcgagggaatacatttctttctatgaacaagaagaagatcacaacaagatgctacttagatttgccaagatcaatttcaagttcttgcagctaaattggattcaagaattgaaaactctgaccaagtactatactctagatttttcgtgcttctagctatatgttttttgcgatacaagttgacaatagtcattgacatgttttgcagatggtggaagcagcaagaccttgcatctaaactcccaccttacttcagggatagattgatcgaatgctatttatttgcaataatgatatatttcgagccacaattttcacttgggaaagtttcactagctaagatcaacacagtcttcacccttgttgatgacacgtgtgatagatacggtaatgtttctgaagttgcagctcttgttcaatgcgtggaaaggtaacatcatccaaactttcttgtcacgaatgcgtatcttatctcaaaggccagtgccaacccaaccatgaaagaaaatcctagtgaaatagattagagatcctaagtgaaatcaaatacattaattattccaatactttacgtgactaaatatatttattctgtctatttctttaatatctatgtaaaatcataaaatatatgaacacaaaacattaagaaatcaaatttttctagaaatatggtttcatatataatagatcatagggtaaatttttttggtgaatatatatcccgtacaaatatctcagtatgcatgtacagatgggatccagattgcatggacagtttaccagattatatgaaaaccgtcttcaagttcgcttggaatactttcgaagagtgtgaaaacgcaggcataatggaagagggcttgtcttatgacgtgcaaggtgcacttgaagaggtagtgtatatatataagtaacatccaaatatcaaaaaattaaatagttagatgttgtttaacgtgcttctatatgctcctaataagcagttcaaggtatacttacgatccaacttttgctttaccaagtgggaacaaggagacgtggtgcctacatttgacgagtacttggagattggaggagtcgaagtaacaatgtatgtaagtatagcatgcagttttcttgggttgggacaaagttctagggaacaagcttataaatggctaaaatccagaccaaaatttgttgaggctcaggctaaaagggctcgtctaatgaatgacatagccggctttgaggtaccaaaaattgtatgatcaagcgtttcttcttgtttggttagtgatcaagacattatacgttaaacatgactagtaatatctaacagggtgacatgagcagagggtttgatgttaatgccatcatgtactatatgaagcaatacaaagttaccgaggaggaaactttcacaaggcttcaaaagatggctagggacttggatacaactgtgaacgaggagatattaaagacaacaaagagtgtgccgcggcaaattctaaagcgggccattgattttggaaaaatgatagagttcacttataggtctggcgaagaatacacacatcccgaaggaagatttaaggatcatatcacatctttgtttgttgatcttattcgtctttga

SEQ ID NO: 140628 - DNA, 374 bp, Arabidopsis thaliana landsberg
gccttcatagagactgctgccaagatcctccagaacattcaggatggtgtctttgatgtatccaacgaggtaatttccttgttgaatctggcaatatacttagtcttctggtgttctctaatccctcgattgtgttacaatgtgattcaattcccttggtctctctaaattttgcagtcatcaggtatcaagattggttacgggcgtactcaaggtgcagctggaggaagagatggtacgatctctcagggaggtggctgttgtggttaaaaaatcctcgagagaggtgtcacatatctgctgtaatctggtgattcagaaactactattgcttctatttacctctgcaaatggatacaccagaatgtatagtt

SEQ ID NO: 140629 - DNA, 576 bp, Arabidopsis thaliana landsberg
gcggtatgccaggtgcaggcggtggtatgcctggtggtggcggtatgcctggtggtatggacttcagcaaaatattgaatgtaagagcgactatttgtgaattaccaatatccagagtttttgaagttaaattgacattgtgagattggtttgatatttgtgagcaggatcctgagctaatgacggcatttagcgaccctgaagtcatggctgctcttcaagatggtatgatgactcagtttaaagttgcagtttattaatgttttttgaatacttttcgagtcttgaatgttgtttgaatgctataacagtgatgaagaaccctgcgaatctagcgaagcatcaggcgaatccgaaggtggctcccgtgattgcaaagatgatgggcaaatttgcaggacctcagtaaacaaaacaagaagcttgcttttctttgccaatttctgtgtttaattgcgtgagataagagatatgttggagaacttttgttttcttttatgttgtcgttgcagaggaactttaacaggaacaaaactcttttctcttcgttagtaatctaccctcttctcgtttttc

SEQ ID NO: 140630 - DNA, 1924 bp, Arabidopsis thaliana landsberg
aacaaatacatttagcagtgaggtttgacttttttttggtttttagaatctcaagcctgttttatgtttctttgtcagctacaaaattgtcatctgatcttgaagaatggcttaatgcaactggtttgaccaaatctcctgatgtacgaggcgtcattgcaccgtaagctgttcttgcttatctcatttcctcggagaagtgattacacttgcactaactttttgaaggaatccagacacgcaggttattcgtactccggtcgtgcagctgcttatgcttttgcaaacatagatcctagtaacatgtaagtaagctcgcctatattttggaagagtgtcatgagtagaccattactatttctgactagtctcatttcagttcacggatatttcttcttggtccatctcaccacttttatactccaaaatgtgccctttcgactgcaacagtttataaaacccccattggaaatctacctgttgatgtggagagtaagtttgtctagcttagcttaacttatcaaagaaagattttctttcagttggtgaggaaagatgttctcttttggttttcatatgaattcaccagtgattaaggagatacgagctatgggaaaatttggaatgatggatctacgggtcgatgaggctgagcacagcatggaaatgcacttaccgtatttggccaaagtatttgaagggtaatcacaggggtagtagtgatgttaaggttctgaataactatgaatgacatggcggaatttgctgagactggctccattttaatattttgatcaggaacaatgtgaaagttgtacccatcttggttggagcagtaagtccagagaatgaagccatgtacggtgaattgcttgctaaatatgtggacgatcccaagaactttttctcagtgtcctctgacttttgccactggggctcaaggtttgtcttagctcttcatctcctttctctcattgaagtaccacattctgatgtaacgttacttttgatggacattgcttgagaaatgatatctttttctctttatctctttctaaaattcgccttaactgcataaccagattttctgaggcccttccagtgagctaattgcgctctgttatgtttatattcatatgtttttggttataggtttaattacatgcattatgacaacactcatggtgctatacacaaatcgattgaggctctagacaagaagggaatggatataatagagacaggagatcctgatgcctttaagaagtatcttctggaatttgaaaacacgatttgtgggcgccacccgatcagtatttttctccatgtaagtagtgctagactgtttctttgcattggtcaataacttcatgaaaaaatagccttaagcttgctgccttcttatttagtatctagatacttttcttttagatgcaaccaatataatggtgaatctggtactcaccgaggctactttgcatgtatctggtttgtagatattcctcacaacttactacttctgttttatgtttgtgattgctttcagatgctaaaacattcatcaagcaagattaagatcaatttcctgcggtacgagcagtcaagccaatgccagacaatgcgagacagcagtgtcagctatgcatctgctgcagccaagttggaaacatgaactaaagatagtcaaaaacttggtgtgcaaaatttcccatttggtttcaaggtctttcagggtcgaaaagtataatcttaatgcatatatctatgcgaagaaccttagaaaaccaaaggtttcgtgtttacatttcactgtaataacaagcacaagactcttcttcattgactggtatctaaattttcatttttctcagtggactatgttcagacatgaaagcacaaatcaagtatcttgagacttgaaaca

SEQ ID NO: 140631 - DNA, 2601 bp, Arabidopsis thaliana landsberg
gttagaaaaatcattttctctttgcacataagtcaactctctctctctctctcttttacttcttcttctctttgccctctctttggattttcttccattgatgaacaatcaatctcagctttgagtgctcccaaatcctctattgactttgcgaatctaagaaaaaactgaaaattaataacgtccttgatgggtagcggagtaacaaaactgagtatatgtttcacaggcggtggaggagaacgtctccggccaaaagacatctccgttcttcttccggatcctttagacgaaggtttaggtcactccttctgctacgtccgaccagacccgactctaatcagttcctcaaaagtccattcagaggaagacacaacgacgacaacgttccgtacaatctccggcgcttccgttagcgccaacacagctactcctctctcaacttctctctacgatccctacggtcacatcgaccgcgccgccgcattcgaaagcacgacttcattttcgtcaatccctcttcaaccgatccccaaaagctccggtccgatcgttttaggctcgggtccgatcgaaagagggttcctttcaggtccgatcgaaagaggattcatgtcgggtcctcttgatcgggtcgggttattctcaggtccgcttgataagccaaactcagatcatcatcatcagttccaacgtagcttctctcatggtttagctttacgggtcgggtcaagaaaacgatctttggttcggatcctccgtagagcaatctcgaaaacgatgtcaagagggcaaaactcgatcgttgctccgatcaaatccgttaaagattccgataactggggaattaggtcagaaaagagccggaatttgcacaacgagaatctcacagtgaatagcttgaactttagcagcgaagttagcttagacgacgacgtttcactcgaaaaccagaatcttcagtgggctcagggaaaagccggtgaggatcgagtacacgtggttgtatcggaggagcacgggtggctcttcgtcggaatatacgacggattcaacggtccagatgcgccggattatcttctctctcatctctatcctgtcgttcatcgagagctcaaaggattgttatgggacgattcaaatgtcgaatccaaatctcaggatttagaaaggtctaacggagacgaatcttgttcaaatcaggaaaaggatgagacttgtgagcgatggtggagatgtgaatgggatcgtgaaagtcaagatcttgaccgtcgattaaaggaacagattagtcggagaagtggatcggatcggttaacgaatcattcggaagtattagaggctctgtcacaagctctgaggaaaacagaggaagcgtatttagatactgcagataagatgctcgacgaaaatcctgaactagctttgatgggttcttgtgttttggtcatgttaatgaaaggtgaagatatttatgtgatgaatgttggtgatagtagagctgtgcttggtcagaaatcagaaccggattactggttagctaagattagacaggatttggaacggattaacgaggaaacgatgatgaatgatttggaaggttgtgaaggagatcaatcatctttagtcccgaatttatcggcttttcagctcactgttgatcacagcacaaatatagaagaagtaagtaaacactaaacaaaacaatggtatacgttgctcagtgaatcttggtggtttttacttattgttatgttcttgtggtttcttaggaagttgagagaatcagaaacgagcatcccgatgatgttaccgcggtaacgaatgaacgggttaaaggctccttaaaggtcacaagagcgtttggtgctggtttccttaagcaggtatgaaatattcatctgactttagtcatgatgtttgagtatgtgtgatcttcagtctgatgacagtttggttatgttattttgcagcctaaatggaacaatgcacttcttgagatgttccaaattgattacgttgggaagtctccatacatcaactgcttaccgtctctctaccaccacagattagggtccaaggaccggtttctaatactatcatcggatggtctctaccaatacttcacaaacgaagaagctgtttcagaggttgagctcttcatcacattacaacctgaaggggatccagctcaacaccttgtgcaagagcttttgtttagagctgctaagaaagctggtatggtgaacattcttacattcgaaaaaatcgacttcagtaaatatatgttatcttaactgatgttttatttgtgtattataggtatggatttccatgaattgctagagataccgcaaggtgaacgaagacggtatcacgatgatgtttcaatagtagtgatctctttagaaggaagaatgtggaaatcttgtgtatagaaaacaatccctatgagcatacacacaagaacaaattggtgtgttcatggagacagagatcgatctctcatcaactctgaatcatgaactatgttgatataaacaggaaataaaaaaagttttggcaactacttagatgtccaattgtgtcataaattagaag

SEQ ID NO: 140632 - DNA, 1225 bp, Arabidopsis thaliana landsberg
atgattggtggtttcttcgccgatgttaaattcaacagatcgagagagaaaaaactctctctccctcctccgttcaccgtcgcgactcggctctacagtgtaagctttctgattctacggcgatttcgtttctgtatctatgcttgtagactgggtttgttttattggatgatttgatttggaacctgaaacagtaaagttgtgaggaatgagtagtagagtttcctatcacagaaactccaaaacgaatctgttagatagtgatgatcgacttttttgatttctggagaaattcgctttttctagggctcctgatggtgatggaaatctctctttacgatttggttttgattttctcgcagacattttgttgagcaatctcgtatttagaggattccaatgtctggcgcagaggataataaatcttcccatgctcaggtatttgttcatttagtctcatctcataatgaattcaattactgtttatatgctccacattctcgttctatgtaaaactattaagatttctcctccttgttaaagtaactgcctagtggaaactaagttagacttacgtttctttgctcttgaactttgcttgcagctttcgtcccaaatttttcttgatcttgtggattcggtgatagctgatgtagcatctgagtgtcatcgggtagcacgactaggacttgatcgtgatttggatatagtagaagaagagttgagattgtcagtggaagcgcgtgcgaagatcgctgatcctagcaacaacctcgaaaccaacaccaaatatgttgttgatatatttgggcagactcaccctcctgtagctagtgaagtgttcaattgcatgaactgtgggcgacaaattgttgcaggaaggtttgctcctcatctggaaaaatgcatgggaaaggtgatcttattgcttgcatgcctccttatctctgtcagatagtattccagaatgtgttgtttcattgaacctctagtccttactttttttttttttttggaaaccacctaacagggaagaaaggctcgtgccaagacaaccagaagcacaacggctgcacagaaccggaatgcacgacgcagccccaatccacgatattctccttatccaaattctgctagtgagaaccagttagcaagtggatcacctggtgttgcaggtgaagactgctcaaatgtcacagttcgagagaacgtgaaaggagactga

SEQ ID NO: 140633 - DNA, 1447 bp, Arabidopsis thaliana landsberg
ctcggttatttccgatgagtttgccatttacccgatcaaaggcgcatcaaatgcatttctttcatccttatcttaatccatcagttgctcctacaccttcaccaggtcagtaagggaatcctatttgtcacctaaacatagtgtcattatgtttctgtctaggagtattcattgttcattgtctttccctttttagctttttcccccaacccaagtcgcattccaccactaaggcacaagggtcatcaccgtcatcgtcgctggcatttaagacgcaatgccactgcagtgtcaccttcgtcacatggtagttcttttgcttcttgttggttatcctgcgtcctattatagtggcaacgataatgttttatatgaatactttttcttcagacttcagttgataaatcaagcgtagtaactactttttcctgtgtatttccggctttccttttgatagactgtcagcagacatgtgtggagcctctcacttcaactccctttggttcaccttgtggttgtgtcttccccatgaaagttcagcttctactaagtgtcgcacctttttctattttccccgtgaccaacgagttagaaattgaggttgctgctggaacatacttggaacaaagccaagtgaaaataatgggtgccagtgccgacagtgaaaatcaagggaaaacagtggtggatattaaccttgttccacttggggaaaagttcgacaacactacagcaacacttatttatcagagattccggcacaagaaagtacctctaaatgagactgtttttggtgattatgaggttacgcacataagttatccaggtaaactgatttcattcagatgcaagtttctactttttttttgttttatttcaaagtttgaacttcttaaccttgcttcaggaattccttcttcttcgccaaatggagatgttactggagatgctccaggaggccttccaattccgatcaatgcaacaacttttgccaacaaaagccagggaataggttttagaacgattgcaattattgcgttgtcaggttttgtcctcattctggttttggttggagctatatctataatcgtgaaatggaagaaaattgggaagtcatctaatgctgttggtccggctttggctccatcgattaacaaaaggcctggtaattttcaccctctgacttcttaacgcttctatagctttaaaagaacctgtttctgaaaaatttattcgccttgcaggtgctggatctatgttttccagtagcgccagaagctcaggctcagattctttgatgtcttccatggctacatgtgctttatcagttaagaccttcacactctccgagcttgagaaggctactgatagattcagtgccaagagggttttgggcgagggcggatttggtcgtgtttatcaggggagtatggaagatggaactgag

SEQ ID NO: 140634 - DNA, 833 bp, Arabidopsis thaliana landsberg
attgtaatcctgacagtcgatttattgatttacgggtttgtttttactttataacacaatagtttttgtattttgggacttcggaaattattaaccacaagaaaagaatcgtaaataactaatgagaatcgaaaacttttataaaggtttctgatctgatgagcgatttacaaagagaatggccaacgttgtcgtgtccgagcaatgatggtatgaagttttggacacatgagtgggagaaacacggtacgtgcgctgagtccgagcttgaccaacacgattacttcgaagctggtctcaagctcaaacagaaagctaatctccttcatgcccttaccaatgctggtacaatattcacttgttttgcccttcattttgatctccattgttagttatgtataagtggatgttcttttcttattatattttgtgttgcatgatgtagggatcaaaccggatgataaattttatgaaatgaaagatattgagaatacgatcaaacaagtagttgggtttgctccgggcattgaatgtaacaaagattcgtcacataatagccaactctatcagatttatttatgtgttgacacttcggcctccaaattcatcaactgtcctgttatgccgcatggtcgatgcgactctcgagttcaatttcccaagttctaaattttatggctacattttttctatgtatttacattctacctattaatttttatttgtgtttcttgcaaaatttagttgtaataaacagtgtataattggacgatacccgtgatttgcatggtaaaaagatgataaaggttactaatttgtttctagttaaaata

SEQ ID NO: 140635 - DNA, 2154 bp, Arabidopsis thaliana landsberg
  unsure (1)..(2154): unsure at all n locations
cgtcagcgtccataaatcagaatccttacaagaccatttgtgtctgtctccaccaaacccttcttttctccatttttcttttttgctttgtttctgtgctacgatttgtcaaaaaaaagaaacccaaatcaaaagcttcgaaatttcataagatttctttgtttttctgaagatccaaggcacacaaaaaaacagctttttttgtttcttcaatcaaggattttccagggttttgataaccccatgggttcagggttctctctgtttcaaaagaatctatcgtcttgttatggagatcgagatctgttgcagcctggtttaggagatttgcctgaaagttgtgtggctttgattctccagaatttggatcccgttgagatctgtagattctccaagctaaacacggcttttcatggcgcttcttgggctgatttcgtttgggaatcgaaacttcctccagattataaattgattctcgagaaaatccttggtagtttccctgataatttgcgtaaaagagacatctttacttttctctctcgagttaattccttcgacgagggcaacaaggttcgtctccttttagatttctttggcttcaagaaatttttttagggttcttcagaaaaaaaaaattggggatttgttttgttaaatggttcacatgaacggttttaggaaatgatttcataatatgcaaaattttcctgtgaattagagaagaaacttaatgtttttgatgttttctgcagaaagcttgggtagataaacgaacaggtgggctctgtttatgcacatcagccaagggcttatccataaccggaattgatgatcggagatactggagtcatattccgtctgatgattctcggtgagaatgtgtttctcttctgttgcttacccaaatcagattgtgtttgttaagtttgggtgtacaaagttagttgagttaaggttgtagtggatacaaatcctaactttaatctaatgttgtgtgatgctataattctttatgtttgctatgattgaaaaaatgacatattgttcattgtattggatacaatcatacgaatcctaacttttaaccgatgttttgcgttaccatgattcttaatttgacgatatcctctttgttgattcctgcagatttgcttcagtagcttatgttcaacagatctggtggtttcaagttgatggagaaattgatttcccatttccagctggaacctacagtgtttacttcaggcttcagctaggcaaaccaggcaagcggtttggttggaaggttgtnnnnnnnnnnnnnnnnnnnnnntggaacattaaacctgtgcggtttcaactctcgactgaagatggtcaacattcttcatctcaatgcatgttaaccgaagcaggaaactggagtcattaccatgctggagactttgtggtcggtaaatcgaaaagttcatcgacgaagattaagttctcgatgactcacattgattgcacgcatactaaaggcgggctatgtgtagattctgtacttgtgtatccgagctcgtgtaaggaccggttgatgcagatttaagttgcaaaccggagtttgggtgtagtttagaggtttaaaaaagctgtttttttttttaagtggttttaaaaccttttgtagaatctttgagggggtaattagaaaactcagtgtaaagagaaaaagagggtaattactaattagggttgatggtttattgtttaggtcaaatgtaaactttaagtttgaagttattaaagagttcttgagttacaattttttctgttggaggtttgtgtgtgaagtgaaacgcaacggttaatacagaccggagagataaaccacttgaaatgataaacatatgttaattgcagtttgtgctgagtaaacctattcaagacactttgacgtaactaaacaaaataaaaccaaatcgtaccggagaagagaactcaatcagagtaaaccggtcggttattaaaactggaaatgataagatgatatcttgaccgtcaaagcgagatctctccatcttcaggttaagcaacgacgaactgtgttcattttagagtttgttaaaagatccagagaagtatcacaattggaaagaagatgagtttggcgaagagattctcttcacctga

SEQ ID NO: 140636 - DNA, 825 bp, Arabidopsis thaliana landsberg
tctaaaccctaaaagaagaacgatgccggctccgacgacggagatcgaacccatcgaagcacagtcactgaaaaagctcagtctcaaatccctcaaacgatcacttgaactcttctctcccgtccatggccaattccctcctcctgacccggaagcgttagtcttcttcgatccccaattttcgattcgaatcttcattttcttcactaagtttttatgatttcttcgttttttttttttttttgcagcaagcagattcgtctcagccataaggtaaaacattgagtctctcttaccagtctttagaaatttatttcagttattcgcttttaatgtctattgattggattttggtttaaagcttcgaactttaggtttattcaggtttttccataattgttctaaatcttcaggttttgttaccaataatagtaaagatggttgatttacttagactctctctctctctctgttgtgtatgttactgattttagaagttttctttgtacagatgaaagttgcgtttggaggtgtagaacctgttgtgagtcaacctccacgtcaacctgaccgcatcaatgagcagccaggaccttcaaatgctcttgccctcgcaggtgtttttcatatcactatgtcttggtgaaagataaaaacttgtttcttgtttgctatttgcattcttatttgtattggaagggataaaatcatctgcttgatgaattctgcagctcctgaagggtctaagagtacgcaaaagggtgcgacagagagtgctattgttgttggtccaactttactgcgtccaatactgcctaaaggctt

SEQ ID NO: 140637 - DNA, 549 bp, Arabidopsis thaliana landsberg
ggtaggcacagatgggtagagtatgcttcaaaggatcgttacaacgcatctcaagtaccagctgaatggcacgggtggcttcatttcatcactgatcacactggcgatgaggtaaaaccaagagccatttcaaattcgctgtctcgttcaatcaatagataatatattgccttgtaacttgataataaataccaatgtctctgtttcaagctcttgagtttgaaaccaaaaaggtatgggcttgagcataaagagaacttctctggagaaggtgatgcatacatctaccattcgaagggacataccttgaacccgggacaaaagaactggactcggtaccaatcatgggtacccaccaagactcagtaagaagatgatattttggttttacgctctgcgagactttctctcgagtgatttgttgttttgtttctgtgtcattttaataaaagctgtcttggatctaaagctggacaattgggtttcggatctggaattgtaattgttactgtgtaataatttgctgattattaagtttcttgtttcttc

SEQ ID NO: 140638 - DNA, 429 bp, Arabidopsis thaliana landsberg
ggacgcacacaagaacttaattcgattcagagagataatggattttaaaggtataaaatgggttgggaatgtttatcagaagtttgaagcaatgtgcttagaggttgaagaaattatcgtgcaggtaaatgcttgtttgtgtaagaacctgtaattgcttacctcgttgattgtatcctttatttaaactcttgctttgcttttttgtgtttttaggacacagcaaaatatgttgagaatcaagttcagacggttggtaacagtgtcaagaaattctgttcagatgtggttcacgacttgctgcctgatgaatctgtagattcgggaaaacctttgcccgtttctatgttacatgaatacgcccctgtttattctttcaaaaaaaaaaaagatagtatgaaccggaaaactaaagatgtgacacaagag

SEQ ID NO: 140639 - DNA, 2540 bp, Arabidopsis thaliana landsberg
cctacttgagtatgtttatgattctgagcctaaaaaaggacgtagaccggatcctgctttcttcgcttgtgttttatctccaactcggtatgattcgcttatctagtttcttctagtgtttactttgtttgctcattcttattattggtttcgattcttctgtttgattctatctccagagaacttgcaatccagattgctgaacagtttgaagctcttggtgctgatataagtcttaggtgtgctgtggtaagctcatgtttacagcaatttatgtcttcctgctaacaagtattgtatggatttaaaccgaaaatgttacctaatttttgtgccagcttgttggaggtatagacaggatgcaacaaactattgctcttgggaaacggcctcatgttattgtacgctttctgttctaattgttttagcctcagcctcagcacttatccgaatctagtactaagtatggtatgttgtttcataggttgcaacacctggtcgtctttgggatcatatgtctgatacaaaaggcttttctctgaaatcattgaaatatctggtaaatttatgcttatatttgttggtcttctacgtttcggtgtaatgtgttcttagttcgtatcattttggtatttactttacattattcaacaggttcttgatgaagcagatagactgttgaatgaagattttgagaaatctcttaaccagattttggaagagatccctcgtgagcggaaaacatttcttttttcagcgactatgactaaaaaggtaggaaccttgcttgagagtgttgtcattttgatcgatcaaagtgtcactctataatcttttggagtggaagattaaaaaggaacaacgggttaatctcactgaatttgttttggctttttaggttcgaaaacttcaaagggcatgtttgaggaatcctgtgaaggtatggagacactaaatgactggaattattcttgtcacagctatcatattttgaggttataaccgttgttaatttgttggttttcttcagattgaagctgcctccaaatattccactgtcgatactcttaagcagcagtatcggtttgttgccgctaaatacaaggtaccttatttacatcacagagcggggtagatagatagtagcaatcacataagagagttttatcttttttgactataatggccctaatttcatcactgtgacaggattgctatctggtatacattctgagtgaaatgcctgaatcaacatctatgattttcacccgaacatgtgatggtactcgctttctggctttggtgcttcggagccttggttttagagctattcctatcagtggtcaaatgactcaggtaaatgatatgctcctatctctgaacattgctcgaccttttctctcaaaattttctcatttttttttaaatgttcacagtcaaagagactgggagctttaaataagttcaaagcaggggaatgtaatatcttggtttgtaccgatgtggctagtagagggctcgatatcccatcagttgatgtggttatcaattatgatattcccacaaattcaaaggttagcccttgttctgtcttcagatgaatagtttttttgtttcttgtgtctcatgaatccatgatcttgagaaccggcattgattttccaaatctggcttataggattacatccatagagtaggaagaaccgctcgtgctggacgttctggtgttgggatatcacttgtaaaccagtatgagctcgaatggtatatacaaatagaaaaactcattggtaagtaaaaaaactattggatacatttttattgtttgattctatcatggagacagacatgactatttgttgacattcaggcaagaaactacctgaatatcccgctgaggaagatgaagtcttgtcattgttggagagagttgcagaagcgaaaaagctatctgcaatggtatttttactctgcatttgtagttctaggtttattcgtttttgcgtataactttgatttatagagaactgaaatatgttttctggcaatttttgtttagaatatgaaagaatcaggaggtaggaagagaaggggagaagatgatgaagaaagtgagaggttcttgggaggtaacaaggacagaggcaacaaggaaagaggtggtaacaaagacaagaagtcttctaagaagttcaaacgataaaatagctctgtttttactgttttccgataactcaccaaagttttgaattgaagttttccatatgaactagggaaatttaatccattttgtactcgtaatttgtatgttcttttctttttgctttgtttctcaatgacagattatacaatttaagttgaaagatgtttaaaagctctggtgtctgttcttggtggctcctgcagctctttgttttatctctaatttacagttctatgctttcgagttccctaatgcattcaacgaattagataaactggtcatgttcacttctgctcacgttaacttcaaagcgaagagtaagaacatctttgcgtag

SEQ ID NO: 140640 - DNA, 2662 bp, Arabidopsis thaliana landsberg
attaaatgttgcaacttcaccttttcggatatctcgtcgtggtggtggtggatattgcagcaatgcttgtatcccttatcggttgaaattgtaagcacatttctttattcacccattttacatattttattcacaaaagtggtttttacatactgattttttgatgattacctttctatttagtatagtgggttttaagtttaagtacagtggtatgaataaacaatcgtgagaacagttgatacttatccatgtttttttagtcttatccatgatttttagtcttaaagtctctcacattgcggttttggtgtcttgaatcagtacttgttatgcaacactatctgctgtggtaaaggagcaagcatcagactttagtggaaaagaagcagctttgcttgtagatgagctcagaagcaacttcaactctggcagaacgaagagctacgagtggagaatttctcagcttcaaaacattgctaggatgattgatgagaaggagaaatgcatcaccgaagctttgtatcaagatctttttaagcctgagcttgaagcttttctagctgaggtttttttatataatttcaatgtcccgtttcttcactgcattccacttatccactgttgaatctctttggtatttttctcgttttttagatttcgaatacaaaatcatcctgtatgcttgcaatcaaagagttaaagaactggatggctccagaaacggtaactagaccgttcaagctttgctgcttcattgatatgtgtcctttctaaaaccacttgctttttctatgcttggacctttcaggtcaaaacttctgtgacaacatttccctcgtctgcacaaatagtctcagaaccgcttggagttgttttggttatttcagcctggaatttccctttctgtaagctcaattttatttattgacaattttgtctcaatttctaaactattaaagtttatatgtcttcatggtgctttgtttttttccttagtattgtctgtcgagccagtcattggagctattgcagctggtaatgcggttgtgctaaaaccttctgaaattgctccagcagcatcttctcttttagcaaagttgtttagtgaatacttggacaatacaacaatcagagttatcgagggaggagtccctgaaacaacggcactactggatcaaaaatgggacaagatctttttcactggtttgtcctctctccttttctttcaagaatctttgaaatgttgattaggatctcaggaaaacattattttaaatagtttaaagtatttctttaggtggagcaagagttgctcgcattataatggctgcggctgcgagaaatcttactccagtggttctcgaacttggtgggaagtgcccagctcttgttgattcagatgttaatctacaagttaagatctttctctgcttctaaagcataaaatagttaaattcaggtctcatactctaattgtggtgttgtggttgaaggtggctgctaggaggatcattgcagggaaatgggcttgtaacagtggacaggcttgcattggtgttgattacgtgatcacaacaaaggattttgcatcaaaattggtaatggctacttgaaataaaagccagtgaatcacaatgccttatatgtttctctcaatcttgctgatgcaaaatcatgtggtacagatagatgctctgaagactgaactggagacattttttgggcaaaacgcattagaatcaaaggacctgtcgcggattgtgaactctttccacttcaaaaggttggaaagtatgttaaaagagaatggagtagccaacaaaattgttcatggtggccgaataaccgaagataaactgtgagagaaacatgtttccattccatgacattgtttcatggtgatgaaacaaactaataactgtgttctgtactttccttttacagtaaaatatcaccaacaatactactggatgtgcctgaagcatcttccatgatgcaggaagagatatttggacctttacttcccataattacggtacaaaagattgaagatggctttcaggttatacgttcaaagccaaagcctttagcagcgtatctcttcacaaacaacaaagagttggagaaacaattcgtgcaggacgtatcagcaggaggaattaccatcaatgacactgtcttacacgtacaaaaagaagtcttttgtcatacaaaaccaatgttccataatgctagcacttattaaagatggtttgttttgtctgcaggtgactgtaaaagatctgccatttggtggggttggggagagtgggatcggtgcttaccatgggaaattctcgtatgagacgtttagccataagaaaggagttctttaccggagcttttcaggggacgcggatcttagatatcctccttacacaccaaaaaagaagatggtgcttaaggctttgctctcttcaaacatatttgctgccattttggctttctttgggttctctaaagactcatgatcacatgttataatcactgaacttgctggaatagtacaactgagaaagttgaatatttccatagagaaactaagatcaataaaactatagcctcccctatatatgtaaacagtgaataattttagttacttgaataacaaaattacata

SEQ ID NO: 140641 - DNA, 3564 bp, Arabidopsis thaliana landsberg
  unsure (1)..(3564): unsure at all n locations
gttttgtgtgatagtgtcggcgttccttgtcgaatagtcaaaggacagcaatataccggttcagatgatgtggcaatgaactccattaagactgatgatggcaggtgactttcaaattaaattcaatcgctgtgtaattttaacaatttctctatcatttggagagaaaatatatatatattgtcaccaaatgtgtgcgtgtaaaaaatgaaactatgtgcatatggacttggggtgtgtgtgctatttatagctaactcacatctctgaaaaggttagagcaaatactgaggcttgataaaagtgtaactttctttggtctaagcaacaatactctttagaaatgaaagtacgattaagcatgtttcatgctttgtacagtggttctttctattgttattgcagtctgcagttgcaaattattttccttaacgaatccaaatgtgaatttcagggagtacattgttgatctcatgggagatccaggcacgcttatccccgctgatgcagctggactacaaatggactttgatgattctgtctactctgccagtcccagagatgttgattcatctcatgtagcttcttccagcagtggggtcgagagctcaattgaagaacacacagaatcttggtcagcagaacatcgttctaggaccaagggttcccgggaggaaaaccaatctgcaggtggaggggatctcatgattccaaatattagggaagctgtgggaagtcaaaaggctcctgttcaacatctttccagcaagcctactcattctttcactcatgccagatcaccttcgtggactgaaggtgttagctctccagctggacgcaggatgaaagtcaaagatgtttcacaatatatgattgatgctgccaaagagaatccacaactagctcagaagcttcatgatgtgttacttgaaagtggagttgtagctcctcgaaatttattttcggaagtctattcagagtcaatggaggcaacaggtgaaatcaaatctgtggctgaatccaatgatgagaaagggaaagattttggaacaatccagcaaggaagaaaccagagcaaccttggccctgtgaggtttttgcctcctcttccaagaccgcaatctaaagcaattacccatgacctacgtgaacattcaggatctggactcggtcatttgtctgaacattgcaatattgatggtcactctgattcctcacattctgaaacatctactgactatcccagaaatgttcctgttgccgtagctgcagcggctgttgttgcgtcttccatggttgttgctgccgccaagtcagcaaactcggattcctccactttagaactttctgctgcagctgctgctgcagttatggcgacagctgcagcagtgagcaggcagtttgaactagattcacttagcaacggggatgctggttctggtgggcttcatggggtagattcaggaggagaacgaatatccgacagatctattggcaatgaaagttcaaaatctgatgctgcaattgatgatgtagctgaatgcgagattttgtgggaggaaattactgtggctgagcgtatcggactgggtatatgctctactatatgctttagtgtaactagtgccacaacagtaagtactttatatttatgtcttttgatgcaggatcatacggagaggtatataggggagattggcatggaactgtgagtatctcatatttctttagcttttactaattggctgacgacaagagaaacaatgtaaatttggttattattttcaatatcaatgaaactcttgatttggtaggcagtggctgtcaagaagttcattgaccaagatattactggagaggcactggaggaattcagaagtgaggtataagcctttcattctctggaaattcttgtaccctttcaagtttcacaattcgtaacatctcatttcaatttgatgcaaggtccggatgatgagaaggctcagacaccctaatattgttctcttcatgggagctgtaacccgcccaccaaatctctcaattgttacagaatttcttcctcggtatgctatgatccttttcatgatttaattgttttgacgctctatatgatttgcatatctttgatgataactaccatccattatatgattttcacgctaaacgctttatgttccatccattagtgagcagagctcagactcgtcagtctcatttctgtgtttattaacctttttttttttgcttgcgcagaggtagcttgtataggttaattcacaggcctaataaccaattagatgagcgaaagcgtctgaggatggctcttgatgctgtactattactcttttctctttcgctccttctttacctctactacgtatttgtatcttctagattgtttcttacaaaaaaaaattcaaccgttgtaggctcgtggaatgaattatttacacagctgtaatccggtaattgtccatcgtgatcttaaatctccaaaccttctagttgacaaaaattgggttgtcaaggtcagtaattcttccactcggatttcattttctctcctatgatatctctaatggcttacatatttctcaggtgtgcgattttgggttgtctagaatgaaagtaagcacatacctctcttcaaagtcaacagcaggcacggtaagctactagaagaaattcactgttctccactaggacagttaatgtcaactaaaacaatcctgtagattccagatttactttcctctcgtaatttcatcataattacaccgtcaattatcatcagaaactacctcatatcttactttccagttgattgatctaagcatgagacttgattttgtgtttgctcatttcaggctgaatggatggctccagaagtgcttagaaacgaacccgcagatgagaagtatggtttttctaaagaaaaatagttttatcgtattatattttcccatgtaacgttcccttttaagaacgaggtacataatgtgaaaacaggtgtgatgtgtacagctacggggtcattctctgggaactctttacgttacagcaaccatggggaaaaatgaacccaatgcaagtggttggcgcggttggttttcaacatcgacgacttgatatccctgaatttgtggatcctggaattgcagatatcatcaggaaatgttggcagacgtaagtttgaaaagtcacttaattgttgtatgatgaatctagctctattgttttgttcatgaattaggtgcggttatttggtagggatccaaggttaagaccaagttttggagagatcatggattctttaaagcagctacagaaacctatccagagagcagcagttcccagttcttctgcannnnnnnnnnnnnnnnnnnnnnnnnaacatcatgcttgatgaagaagatgactaaatgatgatgaaggtggggatcattctttacatattaatgttctgtggtgtgctgtccatgtgtattcaccatgttttgtttacaaattgtaaaaaaaagatgaatgcaaaacaaaacaaacaaagaaaaaaagaaaaaa

SEQ ID NO: 140642 - DNA, 575 bp, Arabidopsis thaliana landsberg
ttgcaactatagatgactctaagacttggtcagtatgaagacttttctgtttgtttttatgtggttagttggtgtcataatgctgatgaaagtttttggggatttaggcgcaaaatttatgatgaatataatgacgaggacgttgagctgactaaagaggagagcaagatcgttcagagaatactcaaaggggaagctccacatgcggactttgatccatatgcagtacgtatctgttttatgtgtagccgttttctactaatgttatgcaaatctcttcaatttgtgaccttttgattgattctcttgggaccagccttatgttgagtggttcaaacatgatgatgcaatacatccactctcaagcgcaccagagcccaagcgaagattcatcccttcaaaatgggaggccaaaaaggttgttaagattgttagagcaatacgtaaggggtggatcaagtttgataagcctgaagaagagcccaatgtataccttttatggggtgatgattcgacatctgatcaaaagagcaagcatttaacttatattcctccacccaagcttaaattgccag

SEQ ID NO: 140643 - DNA, 855 bp, Arabidopsis thaliana landsberg
tactgtatccggtggggtctaactcttccaagtagaaagttacgtgaatctgcttggaagaagctttatattgatgtgagtttctccttggtttttcgtataaacttgttagatgtttccaagtagtattacattgctgaagaatatacagtgttagtttgcgttgctagtagaagtcagatcatatatatttttaagtgattcctttctcttgtcgaattttagcgtgatgaacaggacatgattgaacttgtcagaacctgtccgtcggatttcaaggagtattacgtacatatgcaagcagcaaagagaagccaagcacctcttccgtcccaggtaactatttataattatctgtttatgttttaggacaaatcatcacgtgaagaattttctcatgttcttgtttgcaatttttagatggtggatgaccggataattcttgacaatactgtacttgaacaagtttctctatggaagaaaagcaaaggacttactgataaggctgtcactggccatatttgtttgggaaccaaatgttcataccatcagattgacgacgtgttcatatgcaaagagacgggaaatgttcatggtatgtaatgaaatgctgtaaaatgtaactttgttactgtgttttactctaaacttacatagtttttatggtctttataacagtatgcgatgataactgcaaggaagtaatactgagtccagagggtgacctcatggtgtgtactatctcaggagtttgttctgatactttacttgtacaaactgagccagacgcagatgggtgttatgaggaagaagctgaactagaagctgaagtattcacagataaaagccgattag

SEQ ID NO: 140644 - DNA, 630 bp, Arabidopsis thaliana landsberg
caggtgcccacacgattggagtgtctcattgctcctccttctcaaaccgtctcttcaatttcaccggcgttggagaccaagatccatcgctcgacagcgaatatgccgacaatctcaaatcacggagatgtttatctatcgctgacaataccacaaaagtcgaaatggatcccggtagtcgaaacaccttcgatcttagctactaccgtcttgtcctaaaacgtcgtggactttttgagtctgacgctgcattgactatgaatcctgcggcattggctcaggtcaaacgcttcgccggaggatcggagcaagagttctttgctgagttctccaactccatggagaaaatgggaaggattggggtcaaaacagggtcggatggggagattcgaagaacatgtgcatttgttaactaaaagtgtttcttactttttctttcgcaacttttttgttttgttttaaatatcttttatattggtttttatgttccttttgtcaacttttttgggtgtttggaagaatttcgagatatgtattattgtatgtggtgaatatgtgattttcaaataaatttcacgtctgtgaaaatcgttgaactaaattttccaccaatttatttttcaataaaaa

SEQ ID NO: 140645 - DNA, 910 bp, Arabidopsis thaliana landsberg; identical to SEQ ID NO: 49543

SEQ ID NO: 140646 - DNA, 1678 bp, Arabidopsis thaliana landsberg
atgaaggtaagtaggggtttttggtgattcgccgattgtgacgccggtgataggagcgattagcaccgagaagggatgaaaaaacgattctttcaattgggttatcgaaggaatcttcgtatgagcatagtgatcaagtcgggttttcgagagctagggatttgaatttattgctttgctttgactccatgttggattaaaaatagagagataatgcgtcgcagtgacagatataaaagggtacgagaaaccgtcatttcttttctctccttctctccttcaaatccgttcttccttgaaaccattttggctctctgtttacaaacttggtttgatttttcaattgcctctgtttctctctcattctctgattcatcttcatcagaatgaacaggaaggcctctgtttccaaggagctcaacgccaagcattcaaaggtcccatctttttttctcctccttttcgatttttcaccattggttttgcgtctggaaagttgaaaggttagagattttgtgtgggttatagatattggaagcacttttgaagcatccagacaatcgagaatgtgcagattgtagatcaaagtaagcatcttgataacattatctctttcatgatcatgtaacaaaaacgatttaggagcattgtgttgtttggatctatctattttacagggcaccaagatgggcaagtgtgaaccttgggatattcatttgtatgcaatgttctggaatccatcgtagccttggcgtccacatctctcaggtccctaaataatctctcttttaattgattgtgttgtaaatggatcatacaaattagggatactgatgaattttggacacaggtaaggtctataactctggatacatggcttccagatcaggttgctttcatgaaatgtaagctcctcttttgtatataatgaacacattcagtagttgaattttgtatcaatcccatagcttgatcatcttattctcggtctagctaccggtaatgctaagggaaatgagtattgggaatcagaattgcctcaacatttcgagagaagttcaagcgacacgtttataagagccaagtattgattcttttctatgttcgcttttgcttcctcatctgctacaacacaactttagcttgaatctttttttcttctgttcgtgtgtgttttagatacagtgagaagagatgggtttcaccgggagcgattcaaccggctcctatagttagccagctaagctgcaaagttagtcacttggtagagagtggatataaacctgaaactccaaagaaagctagaactctttcacttgacgaagagatccttcttcatcatgttcttcaagtaacacctccagaaacgagaactcgtgcggtatgacaacaaatctatatctttttgggttctggtatgatcactagattggaaattcattcagtttccttgtttgtccagtggcaagaattaacaaagcttttgtagaaggattttgaatcatttccataaactgttgtgcaatgcagggttcggtagatatgaaggagaatgtatatgttgtacctctaccagaattcaagaaaccaaatcaaaagaatgagaatttctccagtgaagtaaaccagaatagaagaaccaccatagcaccaccgtcgagctgggctactttcgact

SEQ ID NO: 140647 - DNA, 1373 bp, Arabidopsis thaliana landsberg
aactcaactcatagacccgaggatatacttgtgcatgcaatcaaggtaatcaatgattgatttgaaccatcaaaataaggtgttatagtgaagtataacttgtatttacgtaaaacattatggtctaaactctcttctttactcagaagcgaagatcagctagtggagatgtcaagaatgcagtgaaactcaaggtaccccatctcttcatcttttgtgatctatctatctatctatctatctatgatctttgacttgatgaatcaaaccaggaaggagaggattacttacgtgtagaagaagaaatacctcatgatgataatgttgttgttattgatgatggttgtgatcatgatcatgatgttgatgataatgatgacgatgaggaggaaaatggaagatattgtagacgtgaatttgatcatggataccatctagtgaaaggccaaatgggtcatggcatggaagacttcatcgtggctgacaccaaaaccgttaaaggccacaatcttgggttatacgctatattcgacggccactcaggcagtgatgttgcggattatctgcagaaccatctctttgataacatcttgagtcaggttttagaaacaaaaactcactcattcccctctcaagaatttctcacagaatttaatgactttgttgttgttgtttcatgaagccggatttttggagaaaccctaagaaggcaatcaaaagagcgtataaatctacggacgactacattcttcaaaacgtggttggtccacgaggtggctccacggctgtgacggctatagtaattgatgggaagaaaattgtggttgcaaacgttggagattcaagagcaatcttgtgtcgtgaaagtgatgtagtcaaacaaattacggttgatcacgaacctgacaaagagagagatcttgtcaagagcaaaggcggctttgtctcccaaaagccaggtcccttcttttgtatcttttactaagaagaaaagagaaaatgatctatttcggacttccaaggcaaagccaataaacccatgttacttataatgattaggcaatgttccgagagtggatggacaactagcgatgacgcgtgcgtttggagacggaggccttaaagagcatataagtgtgatcccgaacatagagattgccgagatccacgatgacacaaagttcttgatcttggctagcgatggactctggaaggtttctacatatgaatgccatgggacgttattaattggtgcacccaaagataggactaaatcttgattggtttctttgtcaggtgatgtcgaacgacgaggtttgggatcaaatcaaaaagagagggaatgcagaagaagctgcgaaaatgctaattga

SEQ ID NO: 140648 - DNA, 4765 bp, Arabidopsis thaliana landsberg
  unsure (1)..(4765): unsure at all n locations
gagaattaaaagatcctcctaccgtattcccgggaacattcgccggagaaacgtacggaatcaacaaccttccccgggaaagaatccattaccgccgattctatcaattcgtataccgtatttgactacccagccattgattctctctccctctcttcccttttcattgtttctaaaccagctcatctttcctgatccggacgtttttcgaagatcgggtcctaattccccgggaatgggtccttaagttctggaagaaatccgtccgctctgtctggtaatttcattgaaggacggattaagcaagcgtgtgtgagatcagaaaagacggattcaactatgagcacccagaagcaagtggtgactattcgggacctggtagatgaagccaagaaacgaattgtaatcgtggtcatatgcgtcgtcggactttcctacctcatgtcccgtaagtttggtgttgttcttatttgatcgatactatgaactcttcagttttagtttatattgaagtattggttcagtagctacttatatgaatttatctcagcaatctctaatgagtatttacgtttgtttaaacttctgcagtgacaagttcatcggttttggttaaccttactcctgctgtgttattgatcatcctttttcgttattacactctcgatagtgaaatgaaaagaaaagctgcagcttacaccaacaagccatcttcgtctctgaatgcaccaactctaaacaaaacacctgaactccctaaagcagctccacggtctgactggagaagcaaagtgaactctcaagtcgttgaggatgcaattgatcactttactcgtcacctcatttctgaatgggttctggatctttggtactctcgaattacaccggataagcaaggtcctgaagaactggtgtttattattaacgatgttcttggggaactttcacggcggtttagaaatgtaaatcttattgatctattgacaaggtctgttcttcttagtgtcttcatctcattttgagttactgataaggtagcttcttcaagaatctaaactgttgtatttgatttagggatttgattgatattatatgtcgccgtgtggagcttttccgcgagtgtcaagcaaagattgagagacaacaaaggagaagcctcagttttgaagacagagactcagaactaagacgtgtgatggccagtgaagataaattgcaccctgctttgttctctcctgaatccgagcataaggttctctgtagtctaagttgcgatgagctgttatttagatttgtttgatgttgtaccacttataactatcaggtggtgatactatggtctctatttggcaggttctgcaacatatagtgaacagtctcattttagtaacatttaggccagaggatctgcactgtgcttttttccactataccgtgagggagctttttgcttgctgtgtgatccgaccagtcctaaacctagccaatcctcggtaaactattgcttctttacatcacattttgttcctcttattctcacctcaacggtactcattttgtcttccaggttcataaatgagaggattgaagctgctgtaatgtcaaggataaagactactatcagatctagtgctgcagaagaggcttctcagtctgaagatctctcaaatgtttctcctgatcatttttctagatatatggacccctctgtcacaggtgttgagcttgtgcagttgaaaaatgaacagcaaaaaaattctaaaaagaaaagcgctacagataaacagcatgtaaaagagctctctaaagatccattgctttctatggacactcgatcttcccgatcgtggaactctttcccctcaacatccaaaataggtgatggtagtaaagatcctcaaggacatcgaggaggagagggttggggtgacgtgttagacatgatgtcacaaaggaaaactgagacccttgctcctgagcatcttgaaagcgtgtgggcaaaaggaagaaactataaaaagaaggaaggtgggaaagttgatgagcgcgtgcccccgagatggtctagcaaggctggtgactgcaatgaaaacactgtgaatgcaagagagtccagtcagcgtaaagttgtaaatacagacagtcatttatcaagttattcctctgctgaagaggatgaggagcaaacaaagagtagtcattcttatacatccgaggatgaggaaatggtaacaggtctaaacagtcctgggactcgtgtctgggatggtcgaacgaagaaaaatcttggtgtttcacggatacaccatccacttgaaaattcaggccgttctttaaaaaagaccagtaaagggcatgaacgttatcagcaagtacccggtcatcaatctggcaggaagagatccagaatttctggtcatattatagacgatgatgatagtgatgattctgaagatggttctttgactagatcatacagtggaatgtctgcaacgtcatctacatcatacgtttcagcggcagaaagtgaccttcccaatgcccctaaaagttctttgttggttgattcctttgcgaagttgagatgtgaggtacagttaaatgtcggttccaaacactcataaagctgcagacaattatgtccttatgctgtatcatacgatagataaatttaggttcttcttacaggttctgggtgccaatattgtgaagggtagttctaagatgtttgctgtgtattcagttgcagtcacagatgaaagtaatcatagctggtctatcaaaagaaggtgatcgaataatattgctacggatctgatgttggtgctttgtcttttacaatttttaattatgtgaactttcagatttcgacattttgaggagcttcaccgacggctaaaagtgtttcctgagtacaaacttcatttaccgccaaagcatttcctatcaacaggcgtggacatacctgttatccaagagcgatgtgtactacttgacgagtatatcaaggtcaaacgccatgtctcttgtttttaactatctgttcatgctttacatggtgtattgtatatggagtatgttttatttttctactggatttgcttttttgatgagtagtttaccgtgaattagtttttggttttcatactctggtagctactttggatttctgagaagctaatactgaatgttcttatgtatgaaacttcaccatctactgctctgtaattttactctgaagtctgaagtttagtcaggcttgctttgatctactgaagttatgtacctttgtagtttgatctgctcaagtagctaaggctgatagttctaatgcttgaacttttgtacacagttgcttttcaacgccttctattcttccatgttaactaaatgtgaatgtttgctttgcattgaagtgattctgctgttttccttattctgcgtattatcctttctctactttgctcagaagcttttgcagctacaacgaatttcaggatcaattgaagtttgggacttcctcagtgtggattctcaggtagattctcttctgctgattcaaagatcactagtgctgacaaattttgatatgtaacttggtgctgctgtgcagacttatgcgttctcaagttccttctcaatcattgagacgctaacaggtgagtaatccacaacgcaattagatttttgattttagttagttcgatataatttattgtcactagtaaatcgtttcagttaaacctgtcagtaagacatctactgtcgctacaaatatagcaagtttgactcaggcagcaccaggtccgcttcctcggagggaaaatctgagttctgagaatgggatatcgggtcaaaatatgaggaataacgttatggtggatgatgtaaagtcaaaagtgaaaaatcttggaaatgatcatgtgaagacacctgatgtagatgtgagaaaccgcaaagagaatggcgggctaaaagtgggtactcaacatgccgatgatgtggcctgcgctggcctgcccaccgaggtatatccacacctagcatcagccaatcgaatttttctgatattttatcttttgcatcgtgggaaagcatgaggcaagtgcttgtatttcttgcagtggnnnnnnnnnnnnnnnnnnnnnnnnnnnnnagacttagtagatgttgtctttcaactccaggagggtgggtggatcaggtacgtaattttataaccagggtccaggggacatactaattttctctatctcagtcaagaaagtggagtaattctgattatttatttttgcacgttacaaggcggaaagctttttgggttgccaaacagatacttcaacttgggatgggggacgcattggacgattgggtacttgaaaaaatttgtcttttgcggcggggaactgtagttgcttctggaattcaacgggttgaacaggtgagaacctccactagaactccttccttttgcacagtgagaggtagtggcgaaagtcacagtgaataatggaaaaagtatgcctaacagggatatatctctgtgatgtctttggtcttgttatatttcaatccgtggtgagatttgaaagagctctttggtatgacctctcagatactatggccggatggtgtattcatgacaaagcatccaaaaaggcagcaacaatccagcatttctgaagaggagcagaaacaagaagcagagagacgagcaaagtttgttcatgagctgatgatcggtaatgagcgtcctgttatctga

SEQ ID NO: 140649 - DNA, 530 bp, Arabidopsis thaliana landsberg
tgcctcaagccagtgctgcaaagccaacttcctagctttctcgtcctttgataagcctttaccaaccttagggataaaaatggtcaaatcattatataaagactggagcaatgggaacgaaaacgggtgcatcaaaccaacatagttgataggcttgatgttaccttagcagctcttgttcttgctctagaccagcgtgaaactgcagtctcttgcttctcaatttcaaaaaacgatatagaacttcttttaagttcagcaaagtcaagtaccttccacctgcaaattccatttagttactactaaacagataattttatcctctctatatataccaatgccaataatcataacaccacgaaccatctttgctcaacgactacagcacaatcagctagccttcttctggttcgaaaacttctataaactttctgtaactttaatgcagcttgatatgttccatcacctaataacaaggctaaaaattcttttgcatgttcgttttcgcaaacaggtttccatatccgcat

SEQ ID NO: 140650 - DNA, 329 bp, Arabidopsis thaliana landsberg
attcgattgaaggtgtttggagaaaatgtacgtatgaaacaactaagctccagtcggttcgagtaagctatgagctctccgatttcctttggccgaacagaggcgaaagcagcttcccaacttatgtcgatgtattggattatttggaggcttatgcaaagcattttaaccttgtaaagtttataaaattcaactccaaagtcgttgaacttaggttcatcggtgatggtaagactttgcagatgggagacctcggtgcttacggcaacttgttgcctggaaaacctgtctgggaagttgccgttaataccggggatggagacatccag

SEQ ID NO: 140651 - DNA, 769 bp, Arabidopsis thaliana landsberg
ctcactcccactttccgacgaacaaaaacaacatctgaaaaaaatcatgaatccagcagattccgatcatccacagcttccaaacatcaagatccatcaccctccatctccacgtcactctcaccatcaccactcctcatctactccctcctccgccgcaactccaacaccaaccgccggagctcgtcgtaaaatcggagtcgcagttgatctctccgaagaaagctctttcgccgttcgttgggctgtagatcactacatccgtcccggagacgccgttgttcttctccacgtttctccaacctccgtcctcttcggtgccgattggggacctctccctctgaaaactcaaattgaagatccaaacgctcaacctcaacctagtcaagaggattttgatgcttttacttcaacaaaagttgcggatctagctaaaccgttgaaggagttagggtttccttataagatccatatagtgaaagatcatgatatgagagagagattatgtcttgagattgagaggcttggtcttagtgctgtgattatgggaagtagaggttttggtgctgagaaaaaaagaggaagtgatggcaagcttggctctgttagtgattactgtgttcatcactgtgtttgtcctgttgttgtggttagatatcctgatgatcgtgatggacctgtgcctattgttactgtcaagtctggtggagatgatgatggagatgttgaagctgcttctgcttctgctcatcatgaacacatcaaaggt

SEQ ID NO: 140652 - DNA, 557 bp, Arabidopsis thaliana landsberg
tcttgagaaagaaatacaggatcggtatctcgacacagttctaaaaggaaacaaagatggcttgaaggtaaaaaagatgattctgataatgccatgatcactgtcagtcattagctcagtttttaacatttatcttcgtttttcttatcaatcagaaactcagattgcggatcgaagatccaccgagaaggaaacacatggtatacctcggaggtgctgttcttgcaggaatcatgaaggtaagagaaaagttcaatgctattctctcttttaacacgaaagcatgaaattttagtctgtgttatgatgttaagagaatttggattcgatgttgcaggacgcaccagagttctggatcaatagagaggactatatggaagaaggaattaattgtttgaataaaatgagccaagcttaataactttcaaacgcagaactcatacttgtacttgtaccccttttttttactaccgtcaggatgatttaattccgtttgtgaattcagtattttaggtttcaaagtttgagtacaattggttgcagttagggatccaaaa

SEQ ID NO: 140653 - DNA, 1000 bp, Arabidopsis thaliana landsberg
attgaaagttgatttgatcatcactgattactgtatgcctggaatgactggttatgagcttctcaagaagattaaggtctgcattttcccgccattttcctgtttcagattacggttgttttagtaacaatgttgaattttccggtcatctgaaacaggaatcgtccaatttcagagaagttccggttgtaatcatgtcgtcggagaatgtattgaccagaatcgacaggtgtgattcttattgatatcttcacagattttggagtttttagaaactgttgattggtttgataaaattttgtaaaaaaaaaaatgatttttgaacagatgccttgaggaaggtgctcaagatttcttattgaaaccggtgaaactcgccgacgtgaaacgtctgagaagtcatttaactaaagacgttaaactttccaacggaaacaaacggaagcttccggaagattctagttccgttaactcttcgcttcctccaccgtcacctccgttgactatctcgcctgaatcgtcgccgccgttgactgtttcgactgaatcgtcggattcgtctccgccgttatctccggtggagatcttttccacctcgccactttcatctccgatagacgatgaagatgatgacgtgttgacgtcgtcgtcggaggaatcgccgattcgacggcagaagatgaggagtcccggattagattagtggaactattctgggatgccgtgtaatattatctatctccgttaacttcgtttttacctctgacggtgtttttaattgcacgttgacttgacgccgtcaaattttatagatgtccctttaatctctcgcgcctccacgtgggccttttttccttttccttaaagcttttcgaatatcttttaattattttaatttctgcacaaagttacgtttttaacttttttagtctttaaacaaagggaaaattgcaatcgaaccttcgacattcaccatttattatgataacgagacttgaat

SEQ ID NO: 140654 - DNA, 972 bp, Arabidopsis thaliana landsberg; identical to SEQ ID NO: 11655

SEQ ID NO: 140655 - DNA, 2533 bp, Arabidopsis thaliana landsberg
gtaaaggtaaggcaatcaaaaaaaatatggctgcgtctcccaagataggcatcggtattgcctccgtctcatcgcctcaccgtgtctccgccgcctcatccgctctttctcctcctcctcatctcttctttctcactactactactaccacacgtcacggcggctcctatctcctccgtcaaccaacccgaactcgctcttctgattccctccgcctcagagtctccgccaccgccaattctccgtcttcttcttcttcaggaggtacttgaggagttcctctttgcttctttcttaaggtttttggcagtgtaagtaatcgagctctgtgttggttttttaataattaattgcaggcgagattatcgagaatgtagtgattataggctccggtcccgccggttatacggcggcgatatatgcagcgcgcgccaatttgaagccggtggtttttgaagggtatcagatgggcggagttcccggtggacagttgatgacaactactgaagttgagaattttccgggattcccagacggtatcacgggtcccgatttaatggagaagtgagctataacatagtctgattcttttgttagtttgtggcgtttcttatatgtttctgatgcaattatttattgtgtgaaaattgtagaatgagaaagcaagcagagaggtggggagcagagttgtatccagaagatgttgaatctcttagtgtcacaactgctccttttactgtgcaaactagtgaacgtaaggtgattatctttctttgttttctcactatttctttttcaaattctaaatagttttttttttttggcttcagctctcttctgatgtttccattttttataggtcaagtgccatagtattatatatgccactggcgctacagcaaggaggttaaggttacctcgagaggaagaattctggagtagggggataagtgcttgtgctatctgtgatggagcttcgcctttatttaaggggcaagtacttgccgtggttggaggaggagatacggctacagaggaagccttgtatctcacgaaatatgcccgtcatgttcatttgcttgttcgcagagatcagttgagagcttccaaggctatgcaagataggtgagttcttatattcatcacgtctgccttatattctactcctcttctttgatttctgaagataaacagttaaaactagataaatgctatgtccaaactaggaaatgtgttttgtcatagctatgttgagcgttctttgttgcatgtattgactgctatcccctgttccctcgcaaatccattggatatatctgggaaagcctttggttatgatttccgttgcatgtaaatttataaccaaccagtagagtgcttttttttttttgctggctatcggaattatagactaatgagcacaacgtaagttgagtcttttcaacaccctgagtgtttttttaacaggttggttatggcgaatgtttcagagtgatcaacaatccaaacatcacagtgcattacaacacggaaaccgtggacgtattgagcaacaccaagggacagatgtctggcattctactcagaagacttgatacgggtgaagaaactgagctggaggcaaaaggattgttttatggaatagggcattcgccaaacagtcagttattggaaggccaagtcgaactcgacagctccgggtacgtcttggttcgggaaggaacatcaaatacatcagttgaaggtgtatttgctgcaggagatgtgcaggtattcttcggaacttttagcaatttttcggtgttggtattaactcttttaagtcatattggttcgataattgtgtttgctatattctcctatttgtcactctaggaccacgaatggagacaagctgtaactgctgctggatcaggatgcatagctgctttgtcagccgagagatacctcacaagtaacaatcttcttgttgaatttcaccaggtaggaaatattcagaaatatcttatctcttaagcacacgtcacaaggcttactctctttcatgttcacgttacagcctcaaactgaagaggccaagaaagaattcacacaacgggatgtccaagaaaagtttgacatcactcttacaaagcacaagggacaggtttgttaacatatgaaccttaacttgttacctacaagcattttctctgcctcacatctttctccttatgttttttcccctgctttcagtatgctcttagaaaactataccatgagagtccaagagttatattggtactatacacttcaccaacatgtggcccctgtaggactctgaagcctattttgaacaaggtattcctttattagtcgaaatgaaactcatcggaagagatctttttggactgatttacttgaccatttgttcacttctccttcattttgtttcaggtggtcgatgagtataaccatgatgtgcattttgttgagattgacatcgaggaagatcaagaaattgctgaagcagctggaattatgggaaccccat

SEQ ID NO: 140656 - DNA, 1252 bp, Arabidopsis thaliana landsberg
gtctatggaaacaacgtagagatccaagctttagcagaaatgtacaataggccaatccacatttactcatatagcacaggtgcgattaagattcacattatgaaagctctttatgttctttagtgtaacaagaaatttatgaaacaaaatgtattgctttttcatacagagcctatcaacatatttcaaggaaactacagcacggatacacctcccataaggctgagttaccaccacgggaatcattataattctttggtggatccacatcggttgacagttggtgcaggacttggatttagtagccttagtggggtatgtatagttaagctatctttactttttctcttctttgttcaactgatgcaatcaagcataattcaaatttgaaagggagcggatctttgtttttttgaaattatatttcttgttttgaatccagagacacgtggacaaggaacaggtgaaagctgctataaaggctcagcaagaacatcaaattgataatgcaagttacccgttcccatccgtgattagatatactaatctgacttgagtgtgttaccgcttacgtatatgtctctgttccaggcgctgttagcagaagggagattttactctgaccttgagcttacggaaaaggaaatagagcggtcggtaatggaagcttctcgtgctgagtatcttatggaatggtctaagccacgaattggtccaaaggaatcatccacctcgaatgctgagacatcatcttctggagctagtaagtattttttttttttttttgaatctgttcacctagaatatacttgaaacaaagcattttgaggctttttaaattttgaagcaggaccttcaggcagcgattcgaaaccagcagaggcagtaaaagaaaagacggtgctgagcagcagtatcgagatggtattgtcgatgggatttagctacgcacaggccatggaagcttatagcatttttggggatgacgttgactctatggtctgttatgtactggagacgagctgtggcggcaacaaccgacgcaaaggcaaagccacggaatagagaatgtaacctgaattgctctgtattaatagtatatgatatagcaattcgtattcctatcaatggtgggcgattacccttatcagaataatgaaaaataaacttgtgcatccatgacatgatgtatgcaaatgtttgttgtttatgtacttagttgtaaaagttgaataataagagagggaaaaag

SEQ ID NO: 140657 - DNA, 1043 bp, Arabidopsis thaliana landsberg
atggcatgcaagagttctttgtcgaattcagtggacccaaagacagtaagtaactcaattcgtcccgtgaataatttaaatcatagagttttgattctgttttttcttgttctggctgctgatgatgatcatcatagggttttgtgtcaatttcaacttatcagtatcaacttgttaatttttggtgattttatctctgtgtgtttgtactatggacaggtatatatgagggaggtgtgtggaagataagagttgaacttcctgatgcttatccttataaatctccatctgttggtttcattaccaaaatataccaccctaatgtcgatgaaatgtgagttcaatcgaatcagtagatcttttggaggagtgattatgttccttctccaaatcttgagtggtgcttatttgttatccctctttgtatgtggttatgcaggtcaggttctgtttgtctagatgttattaaccagacctggagcccgatgttcggtatgatcataacaaatggaacaatatacaagattgttttaactcctgttagtttttgttatgttaattatgatttggatttagttattcatacctgttgaatgtgttcgagacatttcttccgcaacttcttctgtatccgaatccgtcagatccattgaatggtgaagcagctgcattgatgatgcgtgatcgtcctacctatgaacagagagttaaaggttagatattgagttgattagattcttgttaccctacattatcttatcttcttgctcggtttcagagtattgtgagaaatacgcaaagccaagggcggatactgaggaaatgtctagtgatgatgaaatgagtgaagatgaatatgcctcggatggtgatgatgaagatgatgttgcaatcgccggtaaacttgatccttaatcccgcattggtcttgatatgaatcatgtagctggcttaatagatggctaaaccggggatgacaaaaagaagctggggactttgaatgtatcatgtatatatgaataatcaatgaatggttaaaggtt

SEQ ID NO: 140658 - DNA, 430 bp, Arabidopsis thaliana landsberg
aaaaacaatgaagaaaacaccgtaacgaatcataaaatttctcaaaatccaaactctgttttttgttcttcctcttccagatttggtttctttttttgaaaaactctctagcttcagttttttttttctctctctctctctctctaggaatgtttttgttcgtggatactggaatcatgagaataagattttgaaggagaaagcaaggtaatgattagggttttcaagtattgggtattataaaagtgtcaaccttttttttttctctgcttcttcttcggatctaaacccacattacacgtttctctgttttttttaatggcagatccatgttctttgtcggagaatttaaggctaatatgtggatttgagcttctttgattcccaatttgtgaaagttctgaaatttttgggaaagagagaatgttta

SEQ ID NO: 140659 - DNA, 2366 bp, Arabidopsis thaliana landsberg
ctcaggcgagattccggaagcaaaacattcctaaatttcgccaagtgatccgccatgggagaagagaagtctctgcttcagttccgtagttttccttcactcaagacctctgatttcgctctcaccgaagaaccttcatggaggctggagaacaacgtgtcgtcgaatcgccggagaggaaacaagagaagcggtggcgtttttaccaattttgcgtccctttccgtagcgattaggagagatcggagagaatctacatttaacggtcgtaatggcggcggaggcggagcgttcgcgtcggtttcggtggtgattccgaaggaagaggatgaattcgcgcctacctcggcccagctgttgaaaaaccccattgctttactgtcgatagtaccgaaagacgccgcactattcttcgccggagcgttcgccggagccgccgcaaagtcagtgacggcaccgcttgaccgaataaagctcctaatgcaggtaagggctctctctcctctccttctcaacaacttttaaggttttctggcacgtgtgttttctccattttaaaaagtaaaataaaaataaaactggtgactggtgagcacaacgaatacgctgtcgtttcggctagttgttgcttgtgggacattgttgattttcctcttcttttttcttttcctaagagactcttccatgacatggtctatgataaaattgatcatgtatttatatctcattatttcaagccaagccccttgaggggaatctatggagtatttgtgattgtgttcttgttacaggcttgtagtaatgtacattgattcttaaatgatgtcttattaattcatagacacatggtgttcgagctgggcaacaaagtgctaagaaggctattggtttcattgaggtatatatactctcaatcgtgtaatttttaagaggattagttagttgttcttattgtaaaagtcttgttgatttggttttgtttgggatgactacaggccattactcttatcggaaaggaagaaggtattaaaggttattggaaaggaaatctacctcaggtacgtcacacaatttcttgcatccttttggaaagaatggtgttgaattttgtagagtttgattgcacataatcttagtctgaatgttccaggtgataaggattgtaccttatagcgcagtccagttgtttgcatatgaaacatacaaggtatataatctttctatatctgattctggtttcgtttcgaaagtttttgaaaccgtgtctaatcagtaatcactttgttctgtacattctgccttttttatgttgtttagaaactcttcagggggaaagacggtcaattgtcagtcctcggaaggctcggtgctggtgcttgtgctggcatgacgtctactctggtaagtaacgttgtttataggcctgagtgagtttgtctaatcgtaaagtaacttaagactcttactacttaatgcagattacataccctttagatgtgctgagattgaggttagctgttgaaccaggttatcgaaccatgtcccaggtatattcatcgcattatacaccaactttctgttccataaattaatcaggttttaaagcagacatgtcatatctaggttgccttgaacatgctgcgggaggaaggagttgcatcattctacaacggtctaggtccttcgcttttaagtatagctccttacattgccatcaacttctgcgtctttgatctgtaagtctactaacagttcaaacattacccctgaatatttttaactagattgtttacatattcgataatacaatatatgcacagggtaaagaaatctctgccagagaagtatcaacaaaagacacaatcatctttgttaacagcagtagtagctgctgctattgctactggtacttgctatccattggataccattagaagacagatgcaattgaagggtactccatataaatcggtattagacgctttctcaggtaggaacaaaaacatcattatctgcttttattcttccagtttccggtgactgaccttattaaacccttaaaccgttgtgcaggtatcattgcgcgtgaaggagttgttggcttgtaccgtggctttgtccccaatgcactcaaaagcatgccaaacagcaggtagttatagttttgataaaacaagttcattttttcatttttcttgtttcagtattaacattttggaatcctctttttgtattgtttcagtattaagcttacaacattcgacatcgtcaagaaactcatagcagcgagtgagaaggagatccaaagaatcgcggatgataaccgcaagaaagcaagtcctaacacaaccgatgaacaaacctga

SEQ ID NO: 140660 - DNA, 1401 bp, Arabidopsis thaliana landsberg
cgtctaaaatcgagctcaatcttcggagattcactacgactagcaccaaaatcgcaacttaaagccgcaaaggctaagagtaatggtgcttcaactgtgaccaaatgtgaaattggccaaagcttggttgagtaacaaaaaagactcaatctttattcaaattctgtatcataacgattcgatctttgattaaagtttcttacttttgaatgtataggaagagtttttggcacaagcaactcctgacaagggattgagaactttgctgatgtgtatgggagaagcattgagaacaatagcttttaaagttagaacagcttcttgcggtggaacagcttgtgttaattcctttggtgatgaacaactcgctgttgatatgcttgctgataagcttctctttgaggttttttgttacattttgaattaacttatgtcataagctttgtatcagaaaaatggttcattaggttttgatttgtgtattggttttataggctttgcaatactcgcatgtgtgcaagtatgcttgctctgaagaagtacctgagcttcaagacatgggaggtccagtggaaggttggttttacataaacttaactaacatttccgcttctttaaatcgcgcgaaaaatagttatcgaaagaatatgaaatttatttggacaggtgggtttagtgttgcgtttgatccattggatggatcaagcattgtggatacaaatttcactgtgggaaccatattcggtgtttggcctggagacaagttaaccggagtcactggaggagatcaagtggctgcagccatgggaatctacggtccacgaaccacttatgttttggctgttaagggctttccaggaactcatgagttcttgcttcttgatgaaggttttggtctagtcctgttttatcaagattccttctttggtaagcttttaaactaagctcaaaattttgcctcagggaaatggcagcatgtaaaggagacaacagagatcgcagaagggaaaatgttctcaccaggaaacttaagagccacattcgacaactccgaatacagcaaggttcttgctttggatcgatctaactttaatctttgctcaaatctaatcctcactctgaatgcttttcttgtgaaatcagctgattgattactacgtgaaagagaaatacacactgcgatacaccggaggaatggttcctgatgttaaccaggtttgttcttcttcaacactataacaggagtttttctacttgtgactggaaacttgactttagtagtaacttgggtttttggcagattattgtgaaggagaaaggaatcttcacaaatgtgacttctcctacggctaaggcaaagttgaggctgttgtttgaagtggctcctcttggcctgctcat

SEQ ID NO: 140661 - DNA, 1596 bp, Arabidopsis thaliana landsberg
atgctacctccaccattggatgcttataccagtgacagttctactggaaatccaattgcaaaagttccttctagtgtaagctctataagcttttctaatttaccgtgatataaggtgctttttggcttgtgtcatccgtatcaacgaaacttcacatttacattcttatctcatgtggctttaccaccttagttagtcatatatgggtaaatgcatggatgtgctcactataaacttgtgtcgatgtgcagcattccatagaaacttagctctgctatagctccaaattgtgaacatgtgtttttttagaatttattattttccttgactttctgttttacgaaaatgctgtattggattaatgtttagttctttcttcatttaattggtgcagacttcagttagtgctcctaagagttccccacctagtgggagctcgggtaaatcaactgctcttcctgctgcagcatcatggtaagttttttttctgcaagccgctgtctatgtgaactattttatggggtcatttaaaaaaaattgaaaatgctattacaggggggcacgtttaacaaatcaacactctttagcaacttcagctttgtcaaatggatctttggataatcaaagatcaacatcagagaatggaactttggctacgtctacagttgttacaaaggcagctaatgggcctgtatcctctagtaacagtcttcagaaagcacctctcaaggaagaaattcaatcattggctgaaaaaagcaaacctggtgtgttgaagcctttgcagcagaagattgtgttggatcccgagtccaagagaactacatcacctaatagagaccctagtagcaatcagatatcctgtttagtagagtcttcatacaatagcagagtcattgacaagccttctgctgttgagaattctcttgaacacacaagtgaaattgctgaagatgtcttcgatgttggtaaattgtctgctgatgttgcatggatggggataactacaaattctagggatgaaacccctggtgttccagtggttatcggtactcattgtgatcttggttctattacacaatctgataacgatgtacaaaatctcgagcaatgtagaaaacagtctcctacaaacacttatgcagaagctgacatatcactgaatggaattcatggttcaaggcctgagtgggattggagatcaggtttgcaatcccagatagatgttaaggaaccgttggaagtcaatgatttctcatcattcaataacaacagacgtggtattgcagaggctgttagccactcgacttctatgtttagttcatcaatctcaattctggattcaaatcatctagcttctcgttcgttccagaaccgggaaacttcttgtgggatggattcaaaaactggatcctcctttgaaataggtagtgatagattgcatcttccaaatggattttctgagaaagctatgtccaatatggagcattcattatttgctaatgaaggcagaagcaacattcagaatacagaggatgatatcatttcaaacattgtagactttgatccctgggatgaatcgttgacttcgcacac

SEQ ID NO: 140662 - DNA, 774 bp, Arabidopsis thaliana landsberg
  unsure (1)..(774): unsure at all n locations
agcatatcgtctattgactggcatcgtaaaggagactatctctcaacagtgatggcatccggggaaacacggggagtggtattgcaccaactgtcaaaacagaaaacacaaaggctcccatttaagattcgtggacttccagtctgtacactttttcatcccagcctttcttacttcttcgttgcgacaagaaaggacgtgcgtgtttacaatcttttgaagccaggcgaggccaccaaaaagcttgagacaggattgagagaaatctcatcaatggcgattcatcctggtggtgataatctgatagtaggaagcaaagaagggaagatgtgttggtttgacatggatctatcttcgaaaccatacaagactctcaagaatcatcctaaagacattacaaatgtggcagttcatcgatcatatccgttatttgcttcgtgctcggaggattcaacagcttatgttttccatggaatggtgtataatgatctgaaccagaatcctctgattgtgccattggagattctaagaggtcattcttcaaaaggaggtcagtttttacagtgtatttgattcttacaagaatacactatcgcatattaacttgtaagatcgtttatattaatgtgttttgattattttttatgactgcaggagtcttggactgcaagtttcatccgagacaaccatggctattcactgcaggcgctgactctattatcaaactctattgccactagattggtcgcanaccatattttgacaattttcatc

SEQ ID NO: 140663 - DNA, 1178 bp, Arabidopsis thaliana landsberg
atggcggcggagagatcgtccatcactctcggagggaaaggttcttctttatcttcttcctccgtttacaatgttgcttccggcgtcgctaatgttcgaattgactcttctgcgatcgagagattctccactagaaacgttccatccatcaaaaggagctcctttggtatccctcaagggttaacgaacgaagaaactcgagcttctctggctgttctcttaaacaagcttattttgtcgacttctggtcctccttcttcatccaccgctcgttctgttcttccgcttaagattgttgagattctgaatttgaaggctgagagtttggaattgggtgagattgatgtgacagaaggggaaaacattgtgttggagaagtcgtgtgcttcgttgattgggatttgttctattatagatcacaaatcgacgactctttcacagattgtggattctgttgctgcgttgagttgtgaggttacaaaggctgatatagcttcgtttagcttgttggattcaggagatgggaatggtgataaagatgtgattggtgttgctggtgatctcaaggttttgcttaacgggtataaaggtacagggaaattagaaatagaagagatttcgaaaatcccttggattcatgggaaatttaggtatgtggtgaaaagcgtgcacgcggatgctaggagagaattgaattccggtgttaaaggaggcaaaactgggtctggaaacactgggattggtgaggctttaggaacaacattgttacctttgttaacggcgattaaaaacttgggagtgtgttcgttccttcgtgctaagctttgtttgggaagattgtgaatgagaatctgaagaaatgtttatctgaaaagatctgtgttgagaatgagaatctaaagaatagctataagttagcttatactgctcatttggaagaggattactgcaggtttgctcacaaactgaatgagtgtctgggaattgtatggagaattgttggtttggaggcagttgatgccttttttgctcttgctggtggagaattgtttgttcagaagagcggagatgcggacaaagaagagtcgaagaccgataagaaaaagaagaagaatgagaaaaaagcagttgtgggaaaggggacaagcctagttatccagtttatcaaagatagattg

SEQ ID NO: 140664 - DNA, 396 bp, Arabidopsis thaliana landsberg
gcctaaggaacacatgcagaaatagcgcgacggcggcactagaccagtcgagtccattgagattcgacaaccagttcttcaagcaaatccgtaaaaggagaggagtgttgcaagttgaccaacgcctcgcatccgacccacagactcgtgggattgtggctcggtatgctaataacaacgccttcttcaagcgtcagttcgttagagcaatggtgaagatgggagccgttgatgtgcttactggtcgtaacggtgagatcagaaggaactgcaggagattcaactaatgaactacagaagcgtggatataatattacatttgatacaatatatttcaaatcttctttatattttactaattcatttttggttttggttggggttttcttgcataaa

SEQ ID NO: 140665 - DNA, 4399 bp, Arabidopsis thaliana landsberg
catctatgcgatcgtcgccatcggacttattgctcgtgccggaaatcatacatcaaggctgggagattgcagaagaggttgctacttcgtggacaaggaaacttataagtgtatagttttcagttatttccgatactagtgtctagtgctggtgtgtatcatatatctatgtgattattcaggtgatcgggaatgtgaggaccgtacaagcattcaccggtgaagaaagggcggtgagattataccgagaagcgctggagaatacgtataagtacgggagaaaagctggtttaaccaaaggattaggtcttggatcgatgcactgtgtcttgtttctatcttgggccttgctcgtatggttcacaagtgttgtggtccacaaggatatcgccgatggtggcaaatcattcactaccatgctcaacgttgtcatcgccggcctgtaaatataaatctccctaacttgttcgcttgctctccacgtttcctttgttttctctttttgtgggattatgaagtgtactctgtttttgggttttgtgtaggtctcttggacaagcggcgcccgatatttctgcgtttgtacgggcaaaagccgctgcttatccaattttcaagatgattgaacggaacacggtgacaaaaacaagtgcaaaatctggccgtaaactagggaaagtagacgggcacattcaattcaaagacgtgactttcagttacccatctcgccctgatgtggtgatcttcgacaggttaaacctagctatccctgccgggaaaattgtggcacttgttggaggaagcggatcagggaagagcacggtcatatctttgatagagcggttctacgagcctatttctggagcagtgttgctagacgggaacaatatcagtgagctggatattaagtggttaagaggacagattggtttggttaaccaagaaccagctctgtttgcaacaacgattcgtgagaacattctgtatggcaaagacgacgcaactgctgaggagatcacccgtgccgcaaagctctcggaagccatttctttcatcaacaacctccctgaaggatttgagactcaggtctgtcaataggataccttcgaatacaaaaaacaactgtagaccctagattccactttcgccttagggtaaaagaaacatcaatgtcaaaccctaaaactctgttttttcacttataggttggcgagagagggattcaactatctggcggacagaaacaaaggattgctatatcaagagcaattgtgaagaatccatcgatactcttactcgacgaagcaacaagtgctttagacgcagagtcggagaagagcgtgcaagaagcgctggatcgagtgatggttgggagaacaacggtggtggtggctcacagactctcaacggtaagaaatgctgacatcatagcagttgtacacgaaagtaaaatagttgagtttggaaaccacgagaatctcatatctaatcccgacggagcctactcttcttttttccgctccaagagactgcctcattgcagcgtaacccttcttgaatcgcacgctaagcagaccacataggtactatcgcttagcaccatcctctgtctctcaacattttcattcgaactaggtatagaaaccaaacccttaattctcatagctgttcttcgttcttttttcttttcacatctgcagtataaaatactcgcgggaactatcaagaacaagatccagcttctgttcagagagggaatcggtaactcgaccggatggggctgatccatccaaaaaagtgaaagtaacggtgggacgtctttactctatgatccgtccggactggatgtatggcgtgtgtggcacgatatgtgcctttatcgctggatctcaaatgccccttttcgcgcttggcgtctcgcaagccttagtttcctattacagtggttgggatgagactcaaaaagagatcaagaagatcgctatcctcttctgctgcgcgtccgttatcactctaattgtctacaccattgagcatatctgctttggcactatgggcgagcgtctcactctccgtgtccgcgaaaatatgttcagaggttcgtctcaaactctcaatgcaagctttaaataaatgataaatttaaaattcttcagaaattagagatcccaatttttattatcatgtgatacttattctgtttttggtttaatagcaatcttgaagaatgaaatcgggtggtttgatgaggtggacaacacaagctcaatgttggcatcgcggcttgagagcgatgcaactttgcttaaaaccatagtggtcgataggtcaacgattctactgcagaacttaggtctagttgtgacctcttttatcatagcatttatactcaactggcgtctcactcttgtcgtcttggccacatacccattggttataagcggacatatcagcgaggtaattaacgcaccgttttgccacttttaaaaattttcctttatgtttatgtttacgtttgtgtttttgttgtatttgtagaaacttttcatgcaaggatatggaggagacttgaacaaagcatacttaaaggccaacatgttggccggtgagtctgttagcaacatccgcacggtcgctgccttctgtgctgaggaaaagattctagaactttattcaagagagcttttagaaccttccaaaagttctttcaggcgaggacaaattgcaggacttttctacggtgtctctcagttcttcattttctcttcctatggcctcgccctctggtatgtctctatgtatatagaagattgtaaattaataggcctagggttcagaccaataaagaataggcatagggattcaccggttttaaatattgaattgtcaattgtttgatttgataggtacggatcaactttgatggacaaaggattagcgggcttcaaatcagtgatgaaaacattcatggttttgattgtgacggcgttagcgatgggtgagacattggctctagctccggatctgctgaaaggaaaccagatggttgcgtccgtgtttgagatcttggaccggaaaactcagatcgttggagaaaccaatgagaagctgactaatgtggaaggcacgattgagctcaaaggcgtccactttagctacccttcgagaccagatgttgtaattttccgggactttgatctgatagttcgtgctggaaagagcatggcgctcgttggacagagtggatccgggaaaagttctgttatatcactcattctccggttctatgacccgactgctggaaaagtcatgatagagggtgagtgcacttgacctatgaacaaaaaatttcttgcgtctcaagaaatctctgaacaccaaggtttcttgcgtcaaaagaaagtggttgtttagctgaaataagctgtttttttgttcttacccaaattgcaggaaaagacatcaagaaactagatttgaaagcattgaggaaacacattggtcttgttcaacaagaaccagcacttttcgccacaacaatctacgagaacattttgtatggaaacgaaggagcatctcaatctgaagtcgtcgaatcagctatgctcgcaaatgctcacagcttcattacctctctcccagaaggttactctaccaaagtcggtgaacgcggagttcaaatgtcaggcggtcagcgacagaggatcgctatcgctagagccatcctcaagaatccagcaattctattacttgacgaagccacaagcgctttggacgttgaatctgagcgtgtggtatgtttctttaccattagacttcgtaaaatttagtcacaatggactaatgagtatacaacgaatgaatattgttaggtacaacaagcattggatcggttaatggctaaccggacgactgtgatagttgctcaccggctatcgacgatcaagaacgctgacacgataagtgtattacacggaggtaagatcgtagagcaaggcagccaccgtaagctcgttctaaacaagagtggtccatattttaaacttatcagtcttcagcagcagcaacaaccttaaattaagtactatactttatttattgaaaaactctttttctttttatttttttgtggaaaatattgatcatatactcatttgatgtgattatcttaatcttcttgatttaccgttggtaaaaaaaaagttacgaaatccaaaataggaaaatgttctgaaacgttggctatgtattttcacccaaatttggatttagttatttttgagcactgtctttatcgtcagcacgtttcactgcgacattctccaaaggaaatgatcaacaaaaggacaacttgattggtttcaggaatctccagagttcatcatgtcctactaaatga

SEQ ID NO: 140666 - DNA, 1419 bp, Arabidopsis thaliana landsberg
aaacaaagcaacaagcaagattcatcaaatccttatcttctctctttcactcacaaccaattgctcatcccacctacttgttccccacaaaacactctctccctctttgttctttcatcttctctaagctctttctctgaacctacgcttctgctaagctattctaagagaagccagactagcaataaacccttcattttaagcattctgtttccttcttgagaaacctagatattttggtttcttgtatccggtgatgaagatacagtgtgatgtgtgtgagaaagctccggcgacggtgatttgttgcgccgacgaagctgctctctgtcctcaatgcgacatcgagattcacgccgctaacaaactcgctagcaagcaccaacgtcttcatcttaattccctctccaccaaattccctcgttgcgatatctgccaagtaagtttctctacagatctcattagatcttgtcaaatattttatggattcgttagtttggatctgctctgttgcaaagttgtgattttatagatcttgtagcaactgttgtatgtatgccttgttgtttaagactagggtttgctcattatgttcttatgacttgtaggagaaggcagctttcattttctgtgtagaggatagagctctgctttgcagggactgcgatgaatccatccacgtggctaattctcgatctgctaatcaccagaggttcttagccactgggatcaaagtagctctgacctcaactatatgtagtaaagaaatggagaagaatcaacctgagccttccaacaaccaacagaaggctaatcagattcctgctaaatccacaagccagcagcaacaacaaccttcttctgctactccacttccctgggctgttgacgatttctttcacttctctgatattgaatccaccgacaaggtagtgatgagaattgagattcaatgttagatcactttctttgcaagaagcttttattgacttcttggtttaaattgagcagaaaggacagcttgatcttggggcaggggagttggattggttttcagacatgggattcttcggtgatcagattaatgacaaggctcttcctgcagctgaagttcctgagctttctgtttcgcatttaggtcatgttcattcatacaaacctatgaagtcaaatgtttcacacaagaagccgaggtttgagaccagatatgatgatgatgatgaggaacacttcattgtccctgatcttggctaaaaagctatatgtaatctatgtgtagacattcttcaatgtaaaagaacaaacaagaaacctatctgcatgtgtggagttaatgtcatatacattttagttttgtcttaagttgtgtaagatatgttgagagcttataacaaatgtctgtgtttgagttttgttcat

SEQ ID NO: 140667 - DNA, 732 bp, Arabidopsis thaliana landsberg
gcgtttctagttattcggtgatggatcaaacacagaacacaatcgccggaattggtgaaatcaacggttcgataaaaaccgaaatcaatgcaattgcaaccgtcgacgattcaaatgagaagctgaaccaaattataaactcgaatcagaaaattttagaactccttcatcaattaaaactcaccgtctcttctttcacacctgcttctcagcttcacctcctccaacgcctgtaacttttcttcttctctattgatccattgttttgagtattgtgtgattgaaattttgtctctatctgcagcaattctcttgtgatggagcttgataatatggctaagttgtctgataaatgcaacattcaagtccccattgaggttcttaagtgagaacaagtccctttttagactctttagagaatttttggtgctctcttatgtttatatatctttgattgttgtagcttgattgatgatgggaagaacccagatgagtttacaaaagatgttcttaataagaactgcattgctaaaaatcaagttacaaagggaaagagtgatgcttttaaggtgactccttttgctgtactggttctctcaatttggccactcatgattttaaagtcgacattgtttggtacagggtttgagaaaacatctcttggaggagcttgaacaggcttttcctgatgaagtcgatcggtatagagacatacgtgctagttatgctgct

SEQ ID NO: 140668 - DNA, 306 bp, Arabidopsis thaliana landsberg
caagcagctgtaatatactcaaggcagagtttgatctttactctagtgtaataaagaacatcgcttccactcccatcaaaccacaagacacaaagaccaaagtcgcggaagcaggaaacgaagaccatattaaactcttggaagccaaatgagaattagctcggaaggacacctctaatggacaaaaaaatatcttaagaactggaagctaacttggtttacttttcacgtttgaaaatgtaataaatatttttaaaatgagaacattttgttgaaatttaaaattttagtaatcaaatttttatt

SEQ ID NO: 140669 - DNA, 587 bp, Arabidopsis thaliana landsberg
tcacggggttgctgcagtgctgatatccggcggatgaatgttgctctcacccgtgcgaaaagggctttatgggtatgatgtctctcgatgcacatacatattgttatggttaaataggtctggtttcattgttaaagtttctatgtctcgtttttcttcaacaggtgatgggaaatgcatctgctctgatgaagtgcgaggattgggcagcattgatcactgacgccaaagcaaggaattgttttatggagatggagtctcttcccaaggatttcccggttccaaaggtacctagctttatcccaaaagcacctaatgctagaggtttcagatcaggtgggccaagaaccagatccatcgatatgcaccctgaatccaggtcagggacaccatcagaagacgacaagaagctgagcacaacaacatttccaagaaatggaaattctcgaagggagaactcagttgatgattctgacccgcccggggatagatatagagatgcttggcaacatgggatccaaaggaggcaaaattttggacggcctttagggagaagagattaatttataattgcaactggtcctgaa

SEQ ID NO: 140670 - DNA, 1237 bp, Arabidopsis thaliana landsberg
atgattgaggaagattttgtgccttacaccaatatttcgtcgatcggttcagaagatgaggatgaagtgcttggtagtgtacaacaaaactcttcagtagtagctgtagagaatgcaggatacgtgagtgatgagtctgcccagaattcgagtttcagtatccaaagtgagaaaactatggaaccttcgaatggagctttgactgctcgggaggtgatcaaagaagccatgtttactgaggaagaaagtccagttttggttcctggattgattcctctgtctgacttggataatgaacaagtggaagttattaatgaaggtaaagcagaaacgttcccggaggtaataacctgatcagttttgaagttttatgttcctgtttttctataaaaaccttaagagctgttgttatgcacactgctgctgatggtaatgaaatctttgcatgtggattattgatgctttaagacatcatgtttgtgtgtagaataagactatgcttgtccactggttcaatgtatattgttaccccagttcatgataaaagtttccttcactatattgactattcttgtccactggtacaatgcatatctaactgttaaattattttccagcaatgtgattttcggctgcaaatgcccttcttgtgctatttgcaggtagataagaagcaagaacccaaagcagaaagaaacaagaaagcaaaagtaaaagcgatttcattattcgagaaatcggagcaagaagcagtgaaaagtgtagagcagaggcaatacaatgcagtagaggaagagcagcagcggctagagacagagccgcttggaacgccggatgtgctttttgagaatgatatccaatggggacgcagaacactttacaagcttctaagcaactttagacttttctaaactcgactaagttttgagtgcatacatacatcggcaaaagagcctcaagagtcaagaagatgtttccgacagatagtcaaaaactgctcttaaaaggtaggctaccttcttcttctatgctcatctttacgttttgtatctatgagaactgggagtagattgaaaccaatgttgtgttgtctttgtatatatgtaatgatcaaatggttttggtaaagagaaagatgaagaaagaatggactgttagtgttagctgttaagtacataggacagtatgtagcatctggatcctattctcccatataattgtattgttgctacataat

SEQ ID NO: 140671 - DNA, 1506 bp, Arabidopsis thaliana landsberg
atggcgatctcaccgtctgggataagcccaagtctgggctccaaattgtccccaggatctcctgaagctgttactcttgctcagtggatctctcaaagttacaggtgggggtgtaaatgtttactctcgtctctttcttataatcctcgaacttatcgatgatgccttatgctgatatgtttgtttttccagtcatcacttaggctcggagttgctgacgattgattcacttggaagcgacgactcggtactaaaacttctatgggatcaccaagatgccatcctgtgttgctcattaaaggtatgtgtcctacaccaaacaaaaagcagaatacacctgtagttttagacgtataatatggtctggatatgttgcagccacagccagtgttcatgtttgcgaaccaagctggtctagacatgctagagacaacacttgtagccttacaagatataacactcgaaaagatattcgatgaatcgggtcgtaaggctatctgttcggacttcgccaagctaatgcaacaggtaaagaaccaaaacaaaaacatctgcagataaatggttttgattcatttgtctgagaactatctttgcgtctacagggatttgcttgcttgccttcaggaatctgtgtgtcaacgatgggaagacatgtgagttatgaacaagctgttgcttggaaagtgtttgctgcatctgaagaaaacaacaacaatctgcactgtcttgccttctcctttgtaaactggtcttttgtgtgattcgattgacagaaggaaaaagactaatttaaatttacgttagagaactcaaatttttggttgttgtttaggtgtctctgttttgtttttttaaattattttgatcaaatgttactcactttcttctttcacaacgtatttggttttaatgttttggggaaaaaagcagagttgatcaatctctatatataaaggggatgatgtgataattttgttaaaactaagcttacaacattttttctatcgcatttgacagtttcattttcacatctctcgctatatattagtaatataaactatttcaaaaaaacaaagaatcaacaagaatccacagatgtaagaaagaaaaatcacagccaaataacttttttatttatttggccgttagataaaactaccttcagaatttcatgcatctagccggtaaacctgtctgatgattgacggcgacaatctcagagacattggtgcaacgaagaacatcttgaccaagcttagctccagcagctttaagacctgtaagcgaaaccggaatgttgaaaagattgagtgacggaagcttacaaagcggagggagtaccaggttcggaaagaagtttccgaaaccatccataagcaatggaacttcgaaatcggttttgttgtgtttcaccacattgtctttagctgcgatgtgagctcctggttccatgtggttggttgagaagcttgattggttagggaagtttgggtatagactaac

SEQ ID NO: 140672 - DNA, 644 bp, Arabidopsis thaliana landsberg
agacagtattgctcttgagatgaccaacagtggagctgattgcaacattgttcctagcttgaatttcgagactcatcacgctggcgaatcaagtcttgttggtgcttctgaagctgcaaaggtcaaggctttcgagccctgtgatggtcgttacacggattacactccttgtcaagatcagagacgtgccatgactttcccgagagatagtatgatttaccgagaaaggcattgcgctcctgagaatgagaagctccattgtcttataccggctcctaaaggatatgtgacacctttctcttggcctaagagtcgagactatgtgccttatgctaatgcgccgtataaagcattgactgttgagaaggctattcagaattggattcagtatgagggagacgtttttagattccctggtggtggaactcagttccctcaaggtgctgataagtatatcgatcagcttgcttccgtgatacctatggagaacggaactgttaggactgctttggacactggttgtggggtaatgttttatactttcttgactttcttattgaaactacaatacttacatgatggaactaaattgagacgttttgttaggttgcaagttggggagcgtactatggagcagaaatgct

SEQ ID NO: 140673 - DNA, 1774 bp, Arabidopsis thaliana landsberg
tgcaccaagtttcttcttttgaaatgagcccttcttctgagaagattccacaaagtccattccgagcaccaccaagtccatcccgcgtaccgcagagtccatctagatatgctatgtccccaaggcctagtagactgggacctttgaatctgaccatgagtcagattaatacagcaactggtaattttgcagacagtcaccaaattggtgaaggaggctttggtgtagtctttaaaggcgttctagatgatggccaggttgttgccataaaacgagccaaaaaggtactcttataatctttcagcttcaattttcttgtggtatcaaatttgtagtatagtttattcagtcatgacctataacgttgacagaagctaataatagaacctttacatgatcaactaataggcactagattcttgtagtgttaggaaatcaagttctcacactaattatatgtggtctagccttactgagtaatgttgctttgtgattccatgattaggactctaactagatatctattctttggtttttaaatcttgaagattaacgatcatttgtactaatacagtgccattgagaccttgatcactgcacaatatgaactaattaagtgttgattttacttgtcttgtaggaacactttgagaatctgcgaacggagtttaaaagtgaagttgaccttttgtctaaaattggccaccggaacctagtgaagcttcttggttatgttgacaaaggagacgagcgacttatcataactgagtatgtcagaaatggtacactccgcgatcacttggacggtaagaacttctttacatcttcccgagcttgtcatggctataaaaacatatgactaaaccataaagactccttttgttattgcaggtgctcgtggaactaaacttaatttcaatcaaaggttggagattgttattgatgtctgccatggcttaacctatctccattcttatgcaggtagagaatgttgtgcttcctcataatataagtataaatcttgaaaggatcttatttgatattttatgattcttgtctttggaacagaaagacagataattcaccgtgacataaaatcgtcgaacattctactcacagatagcatgagagccaaagtagcagacttcggctttgcgagaggcggtcctactgactcgaaccagactcacattttaactcaagtgaaaggaaccgttggttatctcgatcctgagtacatgaaaacttatcatctcactggtaaacgcgatgtttactcgttcgggattttgcttgtggagatactcacgagcacgggatcaatggaggccaggcgacttactgatgagaggattacggtccgatgggtaagccactttataatgtttcatcttcgacttacatcatactttactaaatcgagtgtgcggtatggtaggcattcgacatgggcagtgacaggcgagtttttgaactagtggatcctaacgcgagggaacgagtagatgagaagatactaaggaagatgtttagtttggcatttcaatgtgctgctcctactaaaaaagagcggcctgacatggaagctgttgggaagcagctttgggctataagatcaagttatctcaggcggtcaatggaataagacaagtgttcacacgttacaaccaccaaaatgctatagtctctctgttgttagataatatcacctcttttacattttgctatccaaccacttcttcttcagatttgaaatgagatgtcttattcatga

SEQ ID NO: 140674 - DNA, 741 bp, Arabidopsis thaliana landsberg
tttgatgagatggggaagaagaaagggaaagcgatcatagtaggaggaagtatagcaggcttatcttgcgcacactcgctcacgttagcatgctgggatgttttggttctcgagaaatcttccgaacctcctgttgggagtcctactggtgctgggctcggactcgaccctcaggctcggcagatcatcaaatcatggcttactactccacagctcttagatgaaatcaccttgcctctctcgattgatcaggtaataagaacactgagtttagttcgacaattgaaacaatcggcgtttagtttttccagctctacctaaagtttttaactttttttgtgtgttgtgggtttgttgtagaatcagacaactgatagtgagaagaaagtgacaaggattttaacaagagatgaggattttgatttccgagcagcttattggtcagatattcaatctcttctgtataacgcattgcctcagaccatgtttctttggggacataagtttctgtctttcacaatgtcacaagatgaatctaatgtaaaggttaagactttagttgtggaaactcaagaaactgttgaaattgaaggagacttacttattgcagctgatgggtgtttgtcttcgattcggaaaactttcttgcctgactttaaactgaggtttgaaataagagtgtgatcttcatttatcgatattttgtggacttgatcatataggattttgtttttttcgttt

SEQ ID NO: 140675 - DNA, 1265 bp, Arabidopsis thaliana landsberg
atcaaaactttgtctcatcgcatctttttccccaaattctcacaaaccttctcttctcaattccaccaaaccctcagattctcaatctccgatcgtcggaaattcttagcgatggccggagctggcgtcgatgatttcgttaaaggaaatgtttttccgaatggtgtcgctctcatcactctcgatcgaaccaaagctctcaacgccatgaatttaggtgacccttttgaatttttgtttcttgggtttgataaagtaagaaccttttagtgtttactgaattcaaaatcatttttttaaaaggaattggctttgaaatagttggatgtaacaaatgattgctaggctcagatataattataagaagcttcattatgatgttacagatatggatataaagtataaaagctttcttgatgaatgggaatctgatccgagagtgaaatgtgttatcgttgagggaagcacatctagggccttttgtgcaggtaattgcaagttttgttctttttatgtggaagctatgttatgtagattgtttcatttaaattgaaattgtttgttcgtttgggaagtgtgttttggagtgactatctatatgaatggtgtgcagggatggatattaaaggagttgctgcagaaatccaaaaggacaaaaacacacctcttgtgcaaaaggtttataaaataaattatgctttgtcaaacttcaaaagatgatttagcattatttcaaacttgttaagattaaatggtgtactaatttgatgaacatgcatgtgtgtgatctctttcaatttggtctttccaagagctctctagaatggtttgatttatacttccttacgtttgtctcttgaatggtttgctcttagcatttttaagagtatagcctccaaaatgtagttttttaacttcgatattttgcttccttaggtatttacagcagagtatacactgatatgtgcaattgctgcgtacaaaaagccatatatttcattgatggatggtataacaatgggatttggtcttggtctttctggacatggtcgctaccgtgtgataacagaggtacaaaaacaaaagaaaccttgttctgtacttattatgtaggtaataattggtattactctcttgactctctttcatattttttgttctattccagaggacggttcttgccatgccagaaaatggaattggcttgttccctgatgtcgggttttcatatatagcagctcatagccctggaggaggatctgttg

SEQ ID NO: 140676 - DNA, 242 bp, Arabidopsis thaliana landsberg
aagtttcacgtacccatcctagttattcaacatattccagatccctttttatatacctcaaatttttctgattttaggtatgatcttggtatagttattagagtctttttgttatttctagtctttcctagtatttttcagatttttacacgtttcgaatgtatttggaaattatggagcattctcgagaaaaactgagaacttatgctgcaaaagccatctacagatcaaaattggcgtag

SEQ ID NO: 140677 - DNA, 959 bp, Arabidopsis thaliana landsberg; identical to SEQ ID NO: 43906

SEQ ID NO: 140678 - DNA, 442 bp, Arabidopsis thaliana landsberg
  unsure (1)..(442): unsure at all n locations
ctaaatcttctgagccacctaatgtccttacacaaaatggtcatcaggtaattatttttcttcacatatgaattagttttgaccaatttntgttgtgtctattaacctcttcctttaccttttgttgttgatttagcacgcgataatgtatgtcgaagatggggttttctacggggctaaagcgaagataaatgtatggaagccggatgttgaaatgcctaatgagtttagcttagctcagatttgggttttaggtggaaatttcaactctgatcttaatagtattgaagctggctggcaggtatttttcttctttcggtttttgatagttctttcctgaaaaagaaactgtttttgattcaaagatttgtgttttcaggtcagcccacaattgtatggtgataataggaccagactcttcacttattggactgtaagtttc

SEQ ID NO: 140679 - DNA, 1291 bp, Arabidopsis thaliana landsberg
agtttccttcctgtaaggcctctgctgttgttctaccgaatgatgcaggcaagtaagagatgatacttgtgaaaatcaatagggaagtgccatttccaagtttcagatcagagattctctctccaatatatgtagtgagaacagaaccaagcgttaacaacgtaacagaagaaacaacccattccgtgctgaagtcattaacgtaaggacgaaggtaaaacacttgtccgattgcttgtactatcgcaaaaccaactgaagcatatctagtatactgaagaatcttttttctaccagcttcaccttcttttttctgaagatcttgcaactttggatagacttgagcaagaagctgaaacacaatctgagcgttgatgaaaggaacaatcccgagagaacatataccaagtctacctatgcctccaccagaaaatgtatccaaagtgctcaaaatgctattctgatccaaatttccaacaaaagcttctcgattaaccccgccgagtggtatgtaaattccaagccgagagagagctaaaaacccaagaagcttcagaaacttccctggcaatggccctttgaagaaatctccaaaatcaatggaactgtcctcaatagcagctgaagttttcaaagagtaaagcaaccatcatcaatcatgctaaaacatacaataagcaaatgtagataagccaaaacgaacctgccacgcctctaccagaagacggcttatctcgcctgttaccggaagagctttcaaatgatggtgacaaaagactcacaaagctttcccaaatgctacttaaaccagaagtttcatctggattgatccccaacggatcaaaaaccgaagcctcagagctgaaacatcaactccaatcaacaaacaatgcagcagtaagtgacaaaacatcagcatttctacgaactagtgatgaaataaccctcaaatctccacaattcaagagaaattcacatgaaaagtttcgaactttaagtcgcaatatctataacaagatcattatcttcgatttcaaatggaacccatctgaaatctgaaagaagaagtaccttctagagttgataacaagaccgagattccatgatttggctttacaagtgttcctcctggtctttgtcgaaacagagaagaagcttcctttgtaaagagaagagcttcgcaatctcgaagatgatttgtgattgagacgagacagagacgcgaagtttgaagaagaagaagagtaagaggaaacttcgcttaccgttatcatccttatccttcttctcc

SEQ ID NO: 140680 - DNA, 973 bp, Arabidopsis thaliana landsberg
ataccttcttctttagttataaaaatgttgaaagaagagagtaatgagagtggtacttgggcacgagcatgtgacacttgtcgttcagccgcctgcactgtctactgtgaagccgactctgcctacttgtgcaccacctgtgatgctcgagttcacgcagccaaccgtgttgcttctcgccatgaacgtgttcgtgtctgtcagtcatgtgagtctgccccagctgcgtttttgtgtaaagcagacgctgcgtctctttgtacagcttgtgatgcagagattcattccgcaaacccactagctagacgtcatcagcgagttccgattcttccattatctgcaaactcttgcagctccatggccccaagtgagactgatgctgataacgatgaggatgatcgagaggttgcttcgtggttactccctaatccagggaaaaacatcggtaatcagaataatgggttcttgtttggtgttgagtaccttgatcttgtggattacagctccagcatggacaaccaattcgaagataatcagtacactcactaccagaggagctttggaggagatggagttgtgccgcttcaagttgaagaatcaacaagtcacctgcaacaaagccaacaaaactttcagttgggtatcaactatggattctcctcaggagctcactacaacaacaactccttaaaggacctaaaccatagcgtaagctttttatacacttgccagctctttagttcacaataatcagtatgcatgctgtgtcatcacaagtatgcttcgctatacattgattcgttgctcctataacctcggaagattgaaactgtctttgtctctgtcattaggcatccgtttcatcaatggacatcagtgttgtgccagagtcaactgcaagtgacataacagtccaacacccaagaactactaaagagacgatagaccaacgatctggtcctcctactcaggt

SEQ ID NO: 140681 - DNA, 1364 bp, Arabidopsis thaliana landsberg
ccatcggcgtattgttgagtacaaaacagcttattactcattttatcttcctgtgagtactctgaatccctctctctctatatatatatatatagagtcacacgtaggttcagaggttgcagcataatttatttcgtaagctagacacattctgtttgaccgataccattggatgtaatgagatgatctgttaaacattgctatttgctaggcaattgataacatttaaagtctatgaaacattttaagtctgttgtgaacagaggtcctcactgattattgcactcaggttgcttgcgcattgctcatggcgggagaaaatttgaaaaaccatactgatgtgaagactgttcttgttgacatgggaatttactttcaagtacaggtagttagttagatactaatacacgagagtttatataatgggctcatttcaggatccgcgagagcaatattattaagttgatatcgtttcttttccataggatgattatctggactgttttgctgatcctgagacacttggcaaggtgaaaatttatgccaacacatttggtattcaaagctgatcttattgtatttttgtgtttatcttaccaagcatgcatcgtatatcacagatagggacagacatagaagatttcaaatgctcctggttggtagttaaggcattggaacgctgcagtgaagaacaaactaagatactatacgtgagattcagtttctttctcatgcgtatgaggatcattttctgcataagatttgtatctagttttgaagcaggatcagcatgtttactggactgaataaattttcaatgtttcaggagaactatggtaaagccgaaccatcaaacgttgctaaagtgaaagctctctacaaagagcttgatctcgaggtttgccactaagcattaactcaaaacctttcgttagttagaccaagtagaataagagaacgtaattattgcttatgaaagtagagaacatgagagatgtgatatatatgtaacaaaatctgcgtttgatcttgattattccatagggagcgttcatggaatatgagaaggaaagctatgagaagctgacaaagttgatcgaagctcaccagagtaaagcaattcaagcagtgctaaaatctttcttggctaagatctacaagaggcagaagtagagacatactcgggcctctctccgttttattcttctgacatttatgtattggtgcatgacttcttttgccttagatcttatgttcccttccaaaaatagaatttgagattcttgttcatgcttatagtatagagacttagaaaatgtctatgtttcttttaatttctgaataaaaaatgtgcaatcagtgat

SEQ ID NO: 140682 - DNA, 602 bp, Arabidopsis thaliana landsberg
gttttgaatttcagattgtgatttgaaattgcaatcaattcctcgaattgagcatctaattcttcgaaagaaatcgataatgccgaagcgaaaagcaaaggagtgtgtcaaactcactgaagaagataggaacgacgagaaacgaattcgaatcgaagagaagaaagaagacttcgtcgacgaagaaggtatcaattattccaatacccaactcagaaatttaggattatcatgatctgatttttggtgtattgggtaacattgtgtagtcgaaagacaaattgctgcgattagagcaatccgtgatgttgagattgaacaaatgttaactgcattgcggttgcttcgttcgtattttactgaggaacagctagacactcctgtgttagacttctttaaagagaatcttccggatttatcgatatcgagaaacgaagaaactggggagattgagttaaagtggagagacgaaaatggtgattcgtttgctggaaatgagaatggcgttgacatgaattattctattttgaaacgcttgtcgatgcgttttaccgatttatacagtaggtcatctcttggtggctatgatttacctgacaacg

SEQ ID NO: 140683 - DNA, 3010 bp, Arabidopsis thaliana landsberg
atgagaacgctgactcttattaagacttacaccactgtggtgcctgtaaatgctgtcgccatgtctccacttctcaaccatgtatgcactaatgcttcttgaaattcaaattcggttcccaaaagcaacaagtcttgatgttatctttgtgaatgtttctgctctcgctcttttaggttgtgcttggaggtggtcaagatgcatcagctgtgactaccactgatcatcgtgctgggaagtttgaagctaagttttacgacacggttagtgttgcagtaaaacagttttatttaaaaacttgtaacctggaaagagatatgtaactgtgtatttggtcttataatatatagattctgcaagaggaaattggtggcgtgaaaggtcattttggacctattaatgctttggcattcagtcctgatgggaagaggtaaactaacaaaatttgattttgattgattgatacaatcctcagttgatgagagtgttttttaggctttgttgctgagtgttttttggaatgtattttcagtttctctagtggaggtgaagacggctacgtgagactgcatcattttgactccaattacttcaacatcaagatttagattctttgaacatgtctttccattttttcatcattccacataatattttctctctttttaacattttcagaattgatgtactaccaaattaccaatatactactttgatgataaagcttgttgtttgtcttttcaaatagacatatgcacccacaaaaaaaaaacgtatgaaactgcttttgagaaaggaaaaaaacaaaataggcgcaacgggcgaggttcgaactcatcaaatagggaagaagctaaaaacgctgaagccactgagctttgctaaactgtggcatctcgagtaattaaaaaaattacaaaagggtaaaagtgtcaaaagagaggacaaagttgatttcctagggtttttgcacttcttcctcgtcgtctctctcgtcttcaagtgaacaggtgaagaagaaagccgttttccgtaatcgtttcttcaattatttttcttgtcttttgattgattcgatttcgtatctgtttcaaagattcgcatcaaaccctaagaaactgaagatgaggccgatcctgatgaagggacatgaacgtccattgacgtttctgaggtacaacagagaaggagatctgcttttctcctgcgccaaggaccacacacccaccctctggtttgccgataacggcgagcgccttggaacttaccgtggtcacaacggtgctgtttggtgctgtgatgtctcccgtaagtttctcaatttctcttcaaatagtatcgagtcgatgattagattcattgtttccccttagctacaagcttgtttagggtttatagtatcgagtgaattctgtcgtcttagtctttcaaagctgaatgtttagtgatttcttaggagactcgtcaagattgatcactggtagtgctgatcagactgcaaagctgtgggatgtaaaatctggaaaagaattgttcactttcaagtttaatgcccctacgaggtctgtggatttcgctgttggagatcgtcttgcagtgattaccactgatcacttcgtggaccgtaccgctgctattcatgtgaagcgtattgcggaagatcctgaggaacgtaagttgtacattcctagctgaattactacttacgttttagccaacttcttgtatgtgttaaaaggaaattgtttgtttgatgcaattgtgtagaggatgctgagtctgtgcttgtccttcattgtcctgatggaaagaagaggatcaatagagctgtttggggtcccctgaaccaaactattgttagtggtggtgaagataaagttatcagaatctgggatgccgaggtatttcaatttttcttaaggccttacttgtgtattaatttctctcttttaaggttatgaactaaaccttatgtggtgctactgccattgttactagacgggaaaattgctcaagcaatcagatgaggaagtgggtcacaagaaggacattacatcgctctgcaaagcagctgatgactctcacttccttacaggttcacttgacaaaactgcaaaggcatgtgcttctttcttttacttgtacagtatatcttgtttcaaatttttgcactatacatatagatataaatcatctaatagagtgttctcttttgttgattgtttcagctttgggacatgagaacgctgactcttcttaagacttacaccactgtggtgcccgtaaatgctgtctccctgtctccacttctcaaccatgtatgcactaatgcttcatgaaattcaatttcgaatcccagaatcagcaaggcatgatgttatctttgtgaatgtttctgctctctcttttaggttgtacttggaggtggtcaagatgcatcagctgtgactaccactgatcatcgtgctggaaagtttgaagctaagttttacgacaaggttagtgtttataataagagtgttttacttggaaacatgtaacctggaaaatacacatatttaaataaccgtgtatcattgtgtttggtataatatatagattctgcaagaggaaattggtggtgtgaaaggtcattttggacctataaatgctttggcattcaatcctgatgggaagaggtaaattaacaacatttggattttgattgattgacacaatcctcacatgatgaggttttgagtgtgtgttttggctctctcactgagtttgtggaatgtatatttcagtttctctagtggaggtgaagacggttacgtgaggctgcatcattttgactccgactacttcaacatcaagatttagattccgactacttgaacatcaaccttttagaatctttgaaaaagtctcccattccggattttgttttctctctcttttaacattttcatgtttttatttactaccaatacaaataccttgatgataaagcttttgaaatttgacagaa

SEQ ID NO: 140684 - DNA, 902 bp, Arabidopsis thaliana landsberg
gctaattcaacaagtgcctgagggtttaactcgtcaggaagctaccgatatgcggaggaaaggacgagagctcatgcccatttgcaagctaggtaagctagcagcttacctctgggtaatagtactattaattttgatatggtttcctccaagacggagaatgttaactttgtcctgtgttgggtcatatagggaagaatggtgtgtattgtgatcttgtgaaaaatgttaaagaagcatttgaagtttgtgaattggttcggatcgattgtcaagggatgaaaggcagtgattttaggaaaatcggtgccaaactcaaggtttactctaattattattcacttgagatttgttattttaaatcttgtgtacaacctcttgttgaacctgttggttgggttatgaaccgttttgcaggatcttgttccatgtgtgctcgtatcttttgaaaacgagcagattcttatctggagaggacgagaatggaaatcgtctctcacaactccagataaaaaggatgatatccttgaagatatcgaagttgatactgccttgccagaagatgacgaaccatcggtgtcaccaaatcagagtcaaactatgacccagaaccctcctctggattctatggaactgcaaaatgatccagatggtcacgatttgagcccttcaactgtagattcctcggaaatggaaggcacaatcaattctttacagagctggtctacaaaagatgtaactgagccaacggtagatagttttcttcgagaccttgaagaacctgaagacgaaccagaaacatcggaagagatcagcaaacaaagcatagagagagttctgattttgatgaaacaagctgtggagagcgggactgcacttgtgttagatgctgctgatctgga

SEQ ID NO: 140685 - DNA, 4097 bp, Arabidopsis thaliana landsberg
catctacaaccctgttaccgcccaatttcgcagtcactggttcattcctttctcttcttcctcttccactctctctctagacccaagttttgaaaccatgaaagaccacgatttcgacggcgacaaaggttacattctctcttcttctccgttctcgataatctcttccctcttttttctctgggtttgattctcactttttttttcttcttgtatatagggcttgccaagggatttctagagaatttcgccgacgccaatggcaggtctaagtacatggagattctcgtaagtctcaatttcctttatcttccaccaatttctctcttctagggttttcgcgaatctccctaattttaggggtttatgttctatttatgaatctatgtagcaagaggtttcaaatcgtaagattcgagctattcaagtcgatcttgatgacttattcaatgtgagttttttttttgtttctctctaatgttgtttctgttttggatgttgcaattgtaaaagccacttcatctcttttgatgttgtatagtataaggatgaaagtgaggagtttcttggacggttgacggaaaacactcgccgatatgtttcgatattctccgctgctgttgacgagttgttacccgaaccaacggaagcgtttccagatgatgatcatgatattctcatgactcagagagcagatgatgggactgataatccagatgtttctgatcctcatcagcagattccttctgagattaaaagatattagtaagttttgtctgagtctatttgctggacataagctttagggaatgagttttacaatagtttgctaatgaatttactttgattcagtgaggtttattttaaagctccttcaaagggaaggccatctaccatcagggaggttaaggcttcacacattgggcaacttgttaggatatctggtattgtgacccgttgttccgatgtcaagccattgatggcggttgctgtttacacatgcgaagattgtggtcatgagatttaccaggtacaactatgcttttgccagattgtagttttgtttttgttttgttaactgctatctctgatttatcttctttttttacatcaggaagttacatctagagtcttcatgcctttgtttaagtgtccctctagtcgctgtcgtcttaatagtaaagccgggaatcctattcttcagctcagagcatcaaagtttctaaagtttcaggaggttctgtttctggtcaatgagtgtcatttatgtgaatgcactgatatcaaactagtgagtaaaaaatcaatgtttttgcaggccaagatgcaagagttggctgagcacgttcccaaagggcatattccgaggtctatgactgttcatctaagaggagagttgacaagaaaggtaccttttctttacctcagtctcatgctactattggaatctatttgttctactttcagagtcagtaggtcggttgcttaggaatagtccaatgagaagttattgttccgcttaaaagcatatgctgagcagtttttaattaagaggaattttttccattgttgtactgggactctatctgtagaaattgtgatatcagcatcatttactatcgtactattgtgaatttcttacttttttccttaaacccttgtaggtatcaccaggtgatgttgttgaattctcagggatttttcttcccattccttacactgggtttaaggcacttcgagctggcttagtagcagacacctatctggaagcaacgtctgttactcatttcaagaagaaatatgaggagtaaggcatcgttacaccttaacactaacgaaatattctgatttagtaacctattccgcgtttttggcatttgcttaacttaagaagcagctttggtgtgtgcacaatatcagaaagcatctttataccttttttattatgatctacagatatgagtttcagaaagatgaggaagaacagattgcacgtttggctgaggatggtgatatatacaataagctgtcgcgatccctgtcccctgagatttatggacatgaagatattaagaaagctttgcttctccttcttgtgggtgctcctcacaggcaattaaaggatggaatgaaggtgaactttcctgtcctctaatttattctggcaaaatttccatgatattgctatctattatgataaagactgtacactaattagaaagcagttgcttgctttagttcatctccgactatattgttttaccttttgccatacactttcagtgtccgcagtcttcattgattgagttatggagctttattatttacaaacattttcagccattcaagagcacattgcacttgattggaacacattttatctgtgaagatttaaaaacaatacattcattaattatcttttgcagattagaggagatgtgcatatctgtctgatgggtgatcctggagttgccaaaagtcagcttctcaagcacattataaatgttgctccaaggggagtctacacaacaggcaaaggtagcagtggagttggtctaactgccgctgttatgagagatcaagtaacaaatgagatggttttagaaggaggagcactggtgagaaacaatgatttttcgctttggatatatattagaaaatatgatgtattgttaagagctatgtgatttagaagattgatacaatctctatctcaggtgctggctgacatgggaatctgtgcaattgatgagtttgataagatggatgaatcagatcgtactgctattcatgaagtcatggagcagcaaactgtaagcattgcaaaagctgggattaccacgtctttgaatgctcgaacagctgctcttgccgcaaccaatccagcctgtactgagaactctcatgatatgaattaaaaacttatgaaagttgagtgatcattgctatcattattgaactagatatctttgtgtttatgaaggggaagatatgatttgcgaagaactccagctgaaaacattaatcttccaccagcccttctttcaagattcgatctgctgtggttgatcttagatcgagctgacatggacagtgaccttgaattggcaaagcatgtgcttcacgtacatcagacagaagaatctcctgcgcttggtttcgagccgctggaacccaatattctccggtaagttaaaatcgcctttatagcattcctgttctgcagagttagagactttaacatgagcatctctggtcctctagtgcatacatttcagctgcaaggagattatcaccatacgtcccagcagagttggaggaatatatagcaactgcttattccagaatcaggcaagaagaagcgaaatcaaacactcctcattcttacacaacagtgaggacactgctcagcattctgcgcatatccgctgtaagtagaatttgtgtaggaacttgagtaaataagttggactattgagtgttaatatatttccgatctgttctataggcattagcaaggttgagattttcagaagcagtggctcagagtgatgtggatgaggcgcctagactaatgcagatgtcgctaatatcgttgtatactgatgaccgacaaaaggcaggactagatgcaatatcagacacatactcaatcataagagacgaagctgcaagatcaaaaaagacccatgtgagctacgcaaatgccctgaactggatctccagaaaggttagtttcttccttcatcatcatcttcatgttctttctgaaaatggatgatcactgagacgagagatttggggtgtgaaaacagggatacagtgaggctcagctaaaggagtgtttggaggaatatgcagctttgaatgtttggcagattgatcctcacacctttgacatccgttttatctgagtaacaccacccaaaaaaaaaaaaatggaaacaaaccaagtctctcttgttatgttgtgtgctttttctctattatcttatcacatttcttaacgtagagaccttagaagtggaatctgtagaagtgatctcttgattgcagaacaaactttacttttggaaatttagatgtgactttgtact

SEQ ID NO: 140686 - DNA, 698 bp, Arabidopsis thaliana landsberg
tgcctgcgacggctgtttgaggaaaaaaacccggaacaagggtacaacggactcaagtatttcttgactatagtggcggtttgcttgagaacggcttacagtatccaaaaaggtcaagtcgcttggagggttttagctgctgtcttctcatttatagctgcaatattctgtacttactgggactttgtccatgattggggtcttctaaaccggacatccaaaaaccgttggcttcgagataaactccttgttcctcaaaagaaagtatacttcatagcgatggtgagtctcatgcaaaaacacttttcattaaatcaaagatttttcacagcaactaatcttagaacatgtatcaggttttgaatgtcctgttgagatttgcgtggatccagacagttttggatttcaacttttctttcatgcatagacagacgatggttgccattgtcgctagtcttgagatcattcgtcgtggtatatggaatttcttcaggtgaaaaaaaacttcaaaactaacattacctgagtccacaagctgtgttgcattaatcccccaattagtaactctctgttttagtttggaatatggaaaacagattggagaacgagcatttgaacaatgtcgggaaaaaaccgagccttcaagtccgttcccattaccgttcaactacgatgaagatgacgataaagataactag

SEQ ID NO: 140687 - DNA, 1345 bp, Arabidopsis thaliana landsberg
aaaaaaaatattcttgtttcaaacttcaatggcgttctcgagttccatcttctctgttactcagttttcttcttcgttagcttcgcgtccttcttctgcaatcagtaggcagactcgttttcccgctcaaattgcttctccagatctatcgcctgctttgttcgatgatcgccggaagttcgtcggaggtgtaatgtctctcttgacgaagaggttaggctctttcctatttcttatgcgtcgtgtctcgctcttagatctttcctttactagaattgatggagatttatagtcttcttgctccttctgctaaatcgatttgagtaatctttgcttcgtcttttatgttcagctactattaagcttgattcgactaaaaatctttgctctgtatgtgctcgaacgatccggcaaacggaactattatactagattctcgtttagagtagttgtattggtcgttatgaatcttgaacttaagagatttgagaaagcaaaggtagattaaatttcgatttcgagattgaagttcttatggtttctttagataattagaataagttgcttggtagtttggtttctctatgtaccgattccaaattcttctttgtatgatgtatctgaggttgctgatatatctttccgtgcttgttcgttttgtatgcagtattaaaaaccgtgtatatgcttcgattaacagcattgattcggccgctactccatcgtatccggtcagtaacttgtttcagtctttttttgtttcgtcggatgtttcttggatctattgatttgacttgcatgtatgttcgctctcagaagctcagcaaggaaatgtagggagtatgtcgttatgtgttcatgtgtatgctatttgatatgtgatttgattttctcatgtttaatagggaaacggtctgcgtatgagttttgtgttcacgtgtgctttgagatgacatttgctggaaaatttgatcgcagaaatcggaagacgatgacgacgttgttccaatgccaatggttatgatagaccaggatgctgaccctgaagctactattgtacaactcagttttggaaatcgtcttggggctcttattgacacagtgagggattctatatcctgttttggttttttgttctatcttatcgatgtgaaaaaactttagcttttcttgatttgtagcgtttttactatcagaatcagatgtaaacttgccttgttttcggcttatgaatcatatgtgtgtggcagatgcgggcgctgaaagatttgggattggatgtaataaaaggaactgtctcaactgaaggatccattaagcagaccaaattttctataacgaaacg

SEQ ID NO: 140688 - DNA, 1627 bp, Arabidopsis thaliana landsberg
atttgttgcaattgcaaaaagaaaaccaaaacaaagctcaatcatggctagtcggagagaagtacggtgccggtgcggcagacggatgtgggttcaaccagacgcccgtaccgtccaatgctcaacctgccacaccgtcacgcagctctactcgctagtggacatagctcgcggtgcaaaccgcataattcatgggtttcaacagctacttagacaacaccaaccgcaacatcatgaacaacaacaacaacaacaaatgatggctcaaccgccaccacggctgcttgagcctcttccctcgccgtttgggaagaagagagcagttttatgcggcgtgaactataagggaaaaagttatagcttgaaaggttgcatcagtgatgctaagtccatgagatctttattggttcaacaaatgggtttccctattgactctattctcatgctcacaggtttttcgttttttgtttgttttccatttctctaattaaaactctctgtttctttcttcctgatgatgagtgttgtgttattgttgcagaagatgaagccagcccgcagagaataccgacgaagagaaacattaggaaggcgatgagatggttagttgaagggaacagagcaagggactcactagtgttccatttctctggtcatggatctcagcagaatgactacaacggagacgagatcgatggtcaagatgaagccttgtgccctttagaccatgaaacagaaggaaaaatcattgatgacgagattaaccggatactcgtgaggcctctcgtccatggagctaagcttcacgctgtcatcgacgcctgtaacagcgggactgtccttgatttacccttcatttgcaggatggagaggtaaacttataaatcattctgctcacttctacttagactgaatctgaaaaagaaacttgtggtgcgtttgtgaaaaatcaggaatggttcttatgaatgggaagaccatagatcagtcagagcttacaaaggaacagatggtggagcagctttctgtttcagtgcttgtgacgatgatgaatccagtggttacactcctgtatgcttccattatatcattcatcatcatgcaactaagcacacatacctctctgtatgttaactggatcatttcgtgctgtttcaggtgttcacggggaagaacacaggagccatgacttatagcttcataaaggcggtgaagacagctggaccagcacccacgtatggccacctgcttaaccttatgtgttctgcaatacgagaggcccagtctcgcctcgcctttaacggggactacacaagctctgatgcatccgcggtaagttaataaacaacttgtattatctgaaacttacattctgaatgattgaatatcgtatctcccaggagccactgctaacatcatctgaggaatttgacgtgtactcaacaaaggttgtgctctgaatgctgtacatatgatgctgcaaatagctcggaaacgtttctatgtgtatgtatcatgtaatgattatgttgcatagcctctctcttcttacgagcaataaagctatgaaataattgattcgctaagaaatttaaaatgaaatgaaatgtgtggaaagtttcacagg

SEQ ID NO: 140689 - DNA, 3825 bp, Arabidopsis thaliana landsberg
tggactttcagacatatttatcgaggtttcacctgtgtttttggtagattaccttctttaatcaatttggctattgtaaaactgttcttaggttttggatatgttgacatttatcaggtcaaccaaaaaggcacttgctaactacaggctggagtgtgtttgtcagcacgaaaaggctctttgctggagactctgttctttttataaggtatatcaatctcaatgtgccaatgctctctttcggtatttttttgtcaagatgctaactctttttttctttcaattaagagatggaaaggcgcaacttctgttggggataagacgtgcaaatagacaacagcctgcactttcttcatctgtaatatcaagtgatagcatgcacatcggagttcttgcagctgcagctcatgctaatgctaataacagtcctttcaccattttctacaacccgaggtggcgatctatgtttccttttgtctccgttaaccttactatatatgcttgtttcatggcaattgctgagagatttacaacggagttttttcagggctgctcctgctgagtttgtggttcctttagccaagtataccaaagcgatgtacgctcaagtttccctcggtatgcggtttagaatgatatttgagactgaagaatgtggagttcgtcggtatatgggtacagttaccggtatcagtgatcttgatccagtgagatggaaaaactctcagtggcggaatcttcaggtagtttgaagtaaaactcatgatgaatgtcagatttgtctatcttgatacattgcaccattcattttagttatcccttgtttctgtttctgctaaagattggatgggatgagtcagctgctggtgataggcccagtcgagtttcagtttgggacattgaaccggttttaactcctttctacatatgtcctcctccatttttccgacctcgcttttctggacaacctggaatgccaggtaaatttttgtacaatttcatttcgacacaacatctttgagtctcctcaaggacggaatttccggtgctcttgcagatgatgagactgacatggagtctgcactgaagagagcaatgccatggcttgataatagcttagagatgaaagacccttcgagtacgatatttcctggtctgagtttagttcagtggatgaatatgcagcagcagaacggccaactaccatctgctgctgcacagccaggtttcttcccatcaatgctttcgccaaccgcggcgctgcacaacaatcttggcggcactgaagatccctccaagttgctgagctttcagacgccgcaaggggggatttcttcctcaaatctccaatttaacaaaccgaatcagcaagccccaatgtctcagttgcctcagccaccaactacgttgtcccaacaacagcagctgcagcaattgttgcactcctctttgaaccatcaacaacaacaatcgcagtctcaacaacagcaacaacaacaacagttgctgcagcagcaacaacaattgcagtctcaacaacacagcaacaacaatcaatcgcagtctcagcaacaacaacaattgctccagcagcaacaacaacaacaacaacaacaacaacaacaacaactgcagcaacaacatcaacaaccgttacagcaacagactcagcagcagcagctaagaacacagccattgcaatctcactcgcatccacagccacaacagttacaacaacataagttgcagcaacttcaggttccacagaatcagctttacaatggtcaacaagcagcgcagcagcatcaggcgcaacaagcatctacacatcatttgcaaccacatttagtttcgggatcaatggcaagcagtgtcatcacgcctccgtccagctcccttaatcaaagctttcaacagcaacaacagtctaagcaacttcaacaagcacatcaccatttaggtgctagcactagccagagtagtgtaattgaaaccagcaagtcttcatccaatctgatgtccgcaccgacgcaagagacacagttttcacgacaagtagaacagcagcagcctcctggtctcaacgggcagaatcagcaaacacttttgcagcagaaagctcaccaggcacaggcccaacagatattccagcagagtctcttggaacagccgcatatacagtttcagctgttacagagattacaacagcaacagcagcagcaatttctttcgccgcagtctcagttaccacaccatcaattgcaaagccagcagttgcaacagctgcctactctctctcaaggtcatcagtttccgtcatcttgcactaacaatggcttatcgacgttgcaaccacctcaaatgctggtgagccggcctcaggaaaaacaaaacccaccggttgggggaggggtcaaagcttattcaggcatcacagatggaggagatgctccttcctcttcaacctcgccttccaccaacaattgtcagatctcttcttcaggctttctcaacagaagccaaagcgggccagcgatcttaatacctgatgcagcgattgatatgtctggtaatcttgttcaggatctttacagcaaatccgatatgcggctaaaacaagaactcgtgggtcagcaaaagtccaaagctagtttaacagatcatcaactagaagcatctgcctctggaacttcttacggtttagatggaggcgaaaacaacagacaacaaaatttcttggctccaacttttggccttgacggtgattccaggaacagcttgctcggtggagctaatgttgataatggctttgtgcctgacacgctactctcgaggggatatgactcccagaaagatcttcagaacatgctttcaaactatggaggagtgacaaatgacattggtacagagatgtctacttcagctgtaagaactcaatcttttggtgtccccaatgtgcccgccatttcgaacgatctagctgtcaacgatgctggagttcttggtggtggattgtggccagctcagactcagcgaatgcgaacttatacaaaggttcgattgtgctctgatccatgcttgttgatatttgggttttgttttcggtttgacaaatgttaaattatcctacaggtgcaaaaacgaggctcagtggggagatcaatagacgtcaaccgttacagaggttacgatgagctgaggcatgatctagcgcgcatgtttgggattgaaggacagctcgaagatcctcaaacatctgactggaaacttgtttatgtcgatcatgaaaacgacatcctcctcgtcggcgatgatccatgggagtaagtagagagcaattactttcacacatcagactgttagaagttccattatttttttgctaacctttaaaatcgtgatttttgcagggaattcgtaaactgtgttcagagcattaagatcctttcatcagctgaggttcagcagatgagcttagatgggaactttgccggtgtaccagttactaatccagcttgtagtggcggtgacagtggcaatgcttggagaggtcattatgatgataactcagccacttcgtttaaccggtgatggcagaagagttctctcacagacaaagattcttttttcttcgttttgtaatataacttctcgttgataacatgtctcaagtttccgcggggcactgtagagcatttacctgtaaaatatcttccactaagtttacaagaagattttatttgctgtgattcactgtttctaccaagtttaactgatcaacttaaaccgcttgtaaccaaaaagagaaggaaaaacatgagatca

SEQ ID NO: 140690 - DNA, 1166 bp, Arabidopsis thaliana landsberg
tggtcctcacggcttctctcttcccctttttgtgcttcggaattggctttctcctaaacacaattgccatattctatggatctcttgcggctattccttttgggacaatggtggttgtgtttgtaatttgggggttcatttccttccccttagccctcctcggaacggttgttggaagaaattggagtggtgctcctaacaatccatgccgtgtgaagactattccacgtccaatccctgagaaaaaatggtacttgactccatcagtcgtctccctgatggggggtttgctaccctttggaagcatcttcattgagatgtactttgtcttcacatccttctggaattacaaggtaaatatagtttctcttaataagaacaaagttatggaattgcaaattcttattccaattggccaacccggagagatttgattagtgagagactctcaactttcaacgaaacccctaaaaatctaccccccttcagcaatctgcctaaccagcgtttgtaatccagccctcactgaatgcatattaaccaatcacaacagctacattaagacctacgctagttgtagtagacttctagctaaagtttgagcagctgtacttctttaagtaggactaactttgtctttgctaatcatataacgacgaaagtaaattgtagtggctatttttgaaagttgtctgtttttgtttgttcgacaggtctactatgtgtatggattcatgttactggtttttgtgattctcgtcatagtgacggtgtgtgtgacaatcgtgggtacatatttcctgctgaatgcagagaactatcactggcagtggacttcatttttctctgctgcttcgacggctgtctatgtgtacttatactccatctattactactacgtaaagaccaagatgtccggattcttccagacaagcttctactttggatacaccatgatgttctgtcttggccttggaatcctttgcggtgagctcactctcttcactctcttcaaactagcgagtggtgttattgatttgactaaacctttgttatgtgaaaattttgcaggagctcgtggctacctgggatcaaatctgtttgtaaggaggatctacagaaacatcaagtgcgactagaagaggtaaacggaaaaaaagagaaaa

SEQ ID NO: 140691 - DNA, 1737 bp, Arabidopsis thaliana landsberg
gccctgcaggcttggcttaaccactggcctttttccagactaaattatgtattgctcttcttcgatgcatccaaatgcaaacaaagaaaatatctctacttcagatgtacaggagagttttgtacgaataacgagatcacgagctaaaaaagccatgggaagaggagtatcaatacctccaacaaaaccttcttttaaacaggtactgaaacatgttcttatagaaagtcatgaatttcaagagctgatgctaaactctctaatttcctgcctctggtttatcagcaaaagagacgtgcagtacttaaggatgtgagtaatacctctgcagatattatttattcagaacttcgaaagggaggcaacatcaaggtaaagatttcagatgatacgctttcattgtcttggttggtttatatcttatgttggtaatatagccttcaaactttccctttgggcttattactgttgacatcacgttgcaggcaaacagaaaatgtctaaaagagcctaaaaaagcagcaaaggaaggtgctaacagtgccatggatattctggtagatatgcatacagaaaaatcaaaattagcagaagatttgtccaagatcaggatggctgaagcccaagatgtctctctttcaaactttaaagatgaagaaattactgagcaacgtaagaactacagtgttcgtgaaaataatgatagttaccaccttctcctcatttccgaggtcatgttgatcactcgctaactttaaatcaagcattggactccagaatgctgaaattagttattcccattaaatttgtgttgtcaagggttgaaacaagtgaactctataccaacatgaatttctcaaacttacttaaggtatgtatcttatactggattgtgcagaagaagatggatcaggtgtcatggagttacttcaagttgtagatattgattccaacgtcgaagatccacagtgttgcagcttgtatgctgctgatatatatgacaacatacatgttgcagaggtattgaattacatgatccaaatatttgctttacatctttccactgttaacttcttgtaactaatctcaatataactacttatatgaagactgttggagttataacctctcttttcttgcagcttcaacaacgacccttggctaattatatggagcttgtgcagcgagatatcgacccagacatgagaaagattctgattgactggcttgtagaagttagttaccttcaaacttagctcatatatataaataacggcatcatcttattatgtttcttattgaataggacactaaaccttactatacatagctttcttacaaaaattagagcaaaaactgagagtacttttgagtaaaatagtgaagtgcgtggtattttcaggtttctgacgactacaagctggttccagatacgctttaccttacagtgaatcttatcgaccggtttctgtccaacagttacattgaaaggcaaagactccagctccttggtgtctcttgcatgcttatagcttcgtaagtccctacttaggtgggagtgagcgcttgtcaatttcaggctatagcaatgagaacagcatttacatcactgggagagcgcgaacctatatatatatgtatacttgctaagtagagaaacaacgaaggcttatcttccttatacatttttcgtgaaccttgtagaaaatatgaagagctttgcgcaccaggggtgga

SEQ ID NO: 140692 - DNA, 3434 bp, Arabidopsis thaliana landsberg
ctcaaagcgaatatggttttcaaggtttctacggtatccacatctcctattgatggccagaaaccaggaacttctggtcttcgtaagaaggttcgttgatcgatccttgtcttctgaatcaaacgaaatcgaattgttgcatctggatcagatctgtttagattttcttgagtgtgattttgaagtgagattgaccatctgattagatttgatctatgcattaatctatattgattagtgaatgatgacaaattttaaatttcgttttcgttattttatttggatcaagttcgagatcacgtttattatatttgatttgagtatatgtttgggacgcttctatgtggtgaatgttgatttgatagagcttgaaattacgttttttgagttggtgtagcgaaatggagactatatggattgaatttgtgtataattgaaactagggaagagcctagttgttattgtcagatcttcgtttaacgtatatacgatctgcaatgacgtttattgagactcactgatcagatctgtttcagatattttgataaaagaaatttgggttgatcattttatccaatcaatcgagtgtcgattgtttgttctactctctgcagatatcaaactagcatctttttgtatctctgattagtatatttttttttttttttctaactgtgtaggtgaaagtgttcaagcaacccaattatctagagaattttgtccaagcaacattcaatgctcttacggcggagaaagttaaaggtgagatttttttcatactcatcttagcttctcagagatatctgctcattcgaaaaattcatgagtgtttattgttcatatgtgcaggtgccacacttgtggtctctggtgatggtcgttattactcaaaggatgctgttcaggtaaggccgatgatattccctgtcttctggatctgggtgaatgtaattggcgtatccatagaattatgaattagtgctcatgtatttacaatgttttggagggaactcctgtgttaggaaggcctgctattatcatcaatgccttgcttatttttctttgtgttcatctctaaaatttgcatcgaaacctctatagagagattagaggtttatagaagttaaagttttgtttgactttgaaatctctgaaacttaagtttgtttgatctactcctgttacaaatccggttcatactgttacagatgaagatgttttactgcttttcatacaattctattctgtatcttaacagatcataattaagatggcagcagctaatggtgtacgacgtgtgtgggttggtaaaaacactctgttatcaactcctgctgtatcagctgtgattcgtgaaagatcaggggctgatgtgagatttctttctctatgctcatggttgtagtgacattttgttttttgttttttttggttatttgctatgtttgtgcatgacgcaaaatgtaatgatggttttgagttacttaaccccagtctccgattacagggatcgaaagcaactggagcatttatcttaacagcaagccacaatcctggtggccctactgaggtccgttctgttcttgttccatctctactgtgctatcctttcatttgaactattcgttttgtatctctttatttgttctttttttaataataagatatctagatggataataagactaagaggtgattccataccccttgtacaggattttggaatcaaatacaatatggaaaatggaggacctgctcctgaatcaatcactgataaaatttacgagaacactaagacaatcaaggagtacccaatagcacaagatctacccaatgtattcttaagaatcctcttatagatttccatcatctgtcttttgttgaatcatagttgatctggtctatctgatgaatgcgacaggttgatatttctgctgttggtgtaaccagttttgaaggacctgaaggaaaatttgatgttgaagtttttgattccgcagatgactacgttaaattaatgaagtgagtggtccctcaatttaaaagcatgattctggaatctgctccctctatggtctatgtgcaatttttatgatctttctaaagaaaaattctcgctccttcaaggtcaatcttcgattttgaagccatccggaaattgctatcatctccaaagtttacattctggtatgtaactaacattggttcccaaaccttttccatttgagttaagttttgtaatatatgttccatcactgtaatgttatattttactttgttttatgaagctatgatgcattgcatggagttgctggagcctatgcacatcgcatctttgtcgaagaactcggtgcgcaagaaagcgcattattgaactgcactcccaaggtcttatttttgtctaaccaagaaacgctattccataaatgattacaaatacacctccaggctcaatatttaccacaatacaacgatttgcaggaggactttggaggagggcatccggatcccaatttgacctatgctaaggagcttgtggcacgaatgggattaggtaaatccgacactggaggtgaacctccagagtttggcgccgctgctgatggtgatgcagaccgtaacatgatccttggtaaaaggtagcttactgacgttttcaagagagatacatccatggaactagtataccaagtacttttaaacttaaagtatctcttcatttgtaggttctttgtaactccttccgattcagttgccataattgctgcaaatgctattggtgccatcccgtacttcagctctggtttgaaaggtgttgcaaggtattatacacctgggctctttttttacttctagtagaattctgtgtatacaactcttttaatatatcttttttgtggattattttgtaacttccacttcttgttttaggagcatgccaacctcagctgctcttgatgtcgttgcaaaaagcttgaatttgaagttctttgaggtacatgtcaccgtgcaacttctatccagcttcttttctcctaactacataatttaatttcatatctctattaaatcacatatcaggttccaacaggctggaagttttttggtaatctgatggatgctgggatgtgttctgtttgtggagaagaaagttttggaactggtcagtttctatttccacactcacacatctgttcataactttaaaacaacctatacagttctgaaagaaagatctttcacaggctcggatcatatccgtgagaaagacggaatatgggcagttcttgcatggatgtctatacttgctcacaagaacaagggaaatattgacggtaacgctaaactggtgtcagttgaagacattgtccgccagcattgagacaacctacggtcgtcactaaaacactcgttacgactatgaggtaaaagtt

SEQ ID NO: 140693 - DNA, 138 bp, Arabidopsis thaliana landsberg
gacaaaactgtagagatgcacagtttgctacaaaagttgggtagaaagattgttcgtaatgaatcctttggaaatcctggaaaacgccggttcttgttggatgctgaggatatttgtgatgtatttaccgataatacc

SEQ ID NO: 140694 - DNA, 1347 bp, Arabidopsis thaliana landsberg
ctcttttcttcttccgaaatcaacggacacgctgagattaggaaacctcttattggtatccgtggaagaaccccaaccagaacaaccgcatggttcaaaacgacggtcgcagtcaccgttctattgtcgttttgctccgtcgtgctctgcgttttggccttcactggcaagcgacggactcagagaccatggaacctcatagacccgctcttttggcttattcacgccgttacacacctagtcatcgccgctctcgtcctccaccagaagagattcgctgctctaaatcatcccttatctctacgaatctactggatttccagtttcgtcctcacgtctctcttcgccgtcactgggattttccattttctctccgacgccgccacgagtctgagagcagaagacgtcgcttcattcttctccttccctttaaccgcctttcttctcatcgcctccgtcagaggaatcaccggcctcgtcacagcggagaccaacagtcctacgaaaccatccgacgccgtttcggtggagaaatccgataacgtctctctctacgcgtctgcttctgttttctcgaaaacgttctggttatggatgaatcctttactcagcaaaggctacaaatctccactgacgctcgaacaagtccccacgctttctccagagcacaaagcagagaggctcgcgcttctcttcgaatcgagttggccaaaccgtcggagaggggtgggaccctatccgtacgactctactcccatctttctggaaggagatccttttcaccgtgattctagccatcgtccgccttggcgtcatgtacattggtccccttctcatccacagcttcggcgatttcacctcctgcaagagatcctccccgtggcaaggttattacctcgtcctcatcctccttgttgccaaattcgtcgaggtcttgacgacgcatcagttcaatttcgattcccagaagcttgggatgcttataaggtcaactctaatcactgcactctacaagaaaggtttaaagctcacaggctctgcgcgtcagaaccacggggtaggacaaatcgtgaattacatggccgtagatgcacaacagctctctgacatgatgcttcagctccacgcaatctggctcatgcctttgcaagtcactgttgcactagtgcttctctacgggagcctaggcgcgtctgttataaccgcggttattgggctgactggagtgttcgtcttcatcctcctggggactcagagaaacaacggataccaattcagcttgatgggaaaccgagattctcggatgaaggccaccaaccagatgctcaattacatgcgagccatcaa

SEQ ID NO: 140695 - DNA, 2023 bp, Arabidopsis thaliana landsberg
attaattgctttttcatgtagtaaaaaagatctttttttaagctattaaattcacatcttccattccaggaagacctaaatttccttttttttttgccgttatctgcagagatgcgaagtttctggataattattcagatataggttccaagtttttagctttcatttctaacttctgttttcgtgttttttaatttccataatctggaaactcagatttgagctcatttcggccattgtttatattgcagatctggtgatagtttggttagttgttgtgcatctgagttagaaaaaagtcttttaaggaagtgagagaaaacatgtcttctcttagtagagagctcgttttcttgatcttacagtttctcgatgaagagaagtttaaagagactgttcacaagtatgtctcttttgctctgtagatttccttggatctaatttaccaactgacctgtttagctcttgtgttggttaatgcattattgctttgtcatgttcaggcttgaacaagaatctgggtttttcttcaatatgaagtattttgaggatgaggctcacaatggaaattgggatgaggttgagaagtatctctctggtttcactaaagtagatgataatagatactctatgaagatattcttcgagataagaaagcagaagtatctcgaggctttggataagtaagtcatggctggggatttgtttttttttttttcctttcagtgagatagcaaaagaaaaagagtctgatttgtgattgaccttggtgacttttttgttggtaggcatgatcgtcccaaggctgtggatatactagtgaaggatttgaaagtgttttcaacttttaatgaggagcttttcaaggaaataacacagctcttgacattggagaacttccggtaatgttatattggattaatgtagtgtccaaagcctttgttttcttagccgtagttcaaaagaaagattgatgcagagttttaagtgtttcgagtttgatcaacttttagggagaatgaacagttatccaagtatggggacaccaagtcttgcagagcgatcatgttggtggaactcaaaaagctgattgaggcgaatcctttattccgtgataaattgcagttccctactcttagaaattcaaggctgaggactttgatcaaccagaggtttattgctttgtcccttaatctttttgtcttattcacttcaagttgttgttggcatattaattcattctatcttttgttactgcataactcgcagcttaaattggcaacaccaactttgtaaaaatccaaggccaaatccagatatcaagactctttttgtggatcactcttgtggccctccaaatggcgcacgagctccatctcctgtgaacaatccactgcttggagggataccaaaggctggaggatttcctcctttaggcgcacacggggtaatttagtttctatcatttttatttatgttttcctgaggccaagtgtttgattgtctctatgtttccagccatttcaaccaacggcgtcacctgttccaacacctcttgctggttggatgtctagtccatcctctgtcccacatccagctgtctcagcaggagccattgcacttggtggtccatcaatcccaggtactacttgcttatcaaatgtgtatgtttcttcagacacactttgtgtgatctatgcaatttgcttacaatggaactcctttcctatctttggtatagcggcgttgaagcacccgagaactcctccaactaatgcttctttagactacccgtcagcagattctgaacatgtctcaaaaagaacaagaccaatgggaatctctgacgaggtgaatctaggcgtgaacatgttaccgatgtcattttcagggcaggcccatggtcattctccggctttcaaagcacctgacgacttgcccaagacagttgcgagaactttgagtcagggctcatctcccatgagcatggatttccatccaattaaacagaccctgcttctag

SEQ ID NO: 140696 - DNA, 2498 bp, Arabidopsis thaliana landsberg
atgtgccatgaacctaccaacatctcttcatcggagtctgattttacattccttgaggaagaccatctccccttgacgtcacggcggagtttattgctatcgagtgaaagagtctctcaacgtatcgctgcttatgttcctgcgtgagtactgtcattggtttacgttttcttcaatttcacttttcgtttttgttttcacatatgttttcatttgtttcttagatcgaatgttgatagtgtcttgaaaagagaagaagaagattgcttcaatgagctggtaacgaagtctttgtttttgttaaattcaatttcacttatgtaagtttagagaactgagtatctagtgtccagggtgtagtgtcaaattgtgatgctactgaatctgtaagcacggaaatattggaatctatgaacattggttgtagtcaaggtcttaaagattctggaaacataagaccacagaacaacattctaggatgttgtagtaatgctgtagagaattttaatagagtcggagaaactgaaaggagtgatgatcttgaacatctcacactgaaggagcggcgcaaaatgcttcttgaaaggtgttttattttttaacttataatgtcacaagctcggtggatggttttccacttttttttgtcgcctgcgttcatttagtgtttcacggctcttatacaccattcttgttgttgttgcagggttgctataaggttgcctgaatctaacgtagaggtaatcaaagtgacaagttcccttgggttttgaattttttttgtttggaatctatttgggctaactaggtgtttgcttacaagtacaggataatactaaagattgcgatgaaactgaactttataaaataaaagcggagatttcatgcgaaaatgggatagcttcgtcttctggagtccaattcagcggctttctagagaaaattgattctgtcctctgtagaaattttagtatatgttcagaatctggaagtcagcttggtggaattcaagagagtgatattccaatatctcctgaacggtcctttgatttgtcacctgaagccagtctacctgaggtatccagcagcaacaaaaatccaagaaaaagagtgaaaagagtccaaaggaatcctctacctttgaatgagaatgaaatacagtctactcaagtaaaggttgatcctttggctgattgcgtcatggaggacaatgacgagaaaaatcctgttacctcaaagcagataccggtcaaaagagaggtagaaacccatggtgaagctcttgatgaaaatgagctagattctgtgaaactgagctttcgcttgaatcgttgtacatctgctcctacaccttttaggtgtatgaaaaacgaagcggagaccgctagtgaaatggatgaagatattatagaccacatgaaattaattgatcgattaaagcttcgatcttttcatggctcaggtcatcatgaagatcttaattcaccgtcctcagggtttagcttctgtacatctgatgagtacgttaaaccttcgagggtatttcgtccttggaagcggaagaaaaccgccacgtgagtctctctgctgtatccatcgcctcatgtgtctctctcttttgattatctctgtttcttttgtgatcttataatatgaaataaccatttcagggactcaattgagacagctttggaggaagatgctcctggtcttttgcaggtatcatggttttcttctaaaagaaatagaatctaatggaacttctgcaaattagatttcttaaagcacatgtgttttcaggtactgattcaacaaggggtaacagttgatgaacttaggctttatgggaatgaaggtggcgatgttccctcagatgattcacttctcaatgagggtttctcggagttcgaagatgtgatctcgcaggtaaaataatccttttttgtttcaaaggtagttttttccccactgtgtcaaaagattgaatcgtcttatcagcttttctacaaacgcgagacgggcacgaaactacttaattcaagtttctcaaaagcttcaagaactagctattgcttgacctgtctattctccctcatcgaacaggttaaaatcctcatccccgtcttctcgaattgttatatatttctctttattcttaacttgcttcctcttgttttcaaggcgcggtatttgcagttccgcaaatggcctgttgagtggggctggtgccgcgatctccagtctttcatattcgttttcgagagacataaccggtaaattaactctcttttccttgtcattgcggctaaactgaaattttcatggatctttttgtgtgacacagtatagtaatggaacggcctgaatatggctttgcaacatacttcttcgagctcagcaatactgcatcaatcagatggcaggtcaaacggttagtcttggccatgaaactagcaagttgtggccgatatcagctgattgaaaacaagccgttactg

SEQ ID NO: 140697 - DNA, 9698 bp, Arabidopsis thaliana landsberg
atggctcaagcaattgcttaccttgatgacatcaagccctacaaaacgtcttggagagttcaagtccgtgttcttcatacctggaaaacgttcacaatgaagtttggtgagactttcgacatggttctgtcagatgtgagagtaagtattcatgttatttctatataaattgtccatattcccaaatgaaaacgtctattctatactaatattttgtgcttttaaatgaaagggaaagaagatccatgcctcagttaagagagagcatttgaacaggttcgagaggctcattgttccaggagagtggaggtctattgaaaactttggattgacctatgcaacaggtcaatacaaagcaactgatcatcgttacaaaatgggattcatgtctcaaacccgtgttgtgagaattgatccattgtcagattcttattttctctctttgactgctttcaatgatgttctaaatggtggtctcaaccaaaacgtcctgattggtatgtttattgcttcttatttcgtttccatttaaataagaaactttcacgtgattacttttttttgagctgtgattcgtttttgaattagatgtggttggtcagatcgtgaatgttggagaaatggagactattgatgtccacaataaaccaacaaagaagattgatttcgaactgagggatcaaacgtaagtttacttggatatgagtaatagaatacacaatattaaatagaatacaaaatattaagtttgattaacatagggatgaaaggttgccatgtactctctggggttcatttgctgaacaagttttcactgcctgtgaaactgctaatggtgaaatgatcatatgtttggtcagatttgccaagctcaagacttacaaaggttatatagcaagacttacatatgtttcaaagtttatatatgttttggtctacggatataatgacatggatacttttgttttgttttgtagatgttaggagtatctccaatgctttcaatacatctcagatcttgatcaatcctgatatccctgagattctggaatttaaagacgctttaccaaaagatggtcttgctcttactctcattgagtctaaaccaaaatcggaagtggctgagtttcctactgggaatttttatcttcagtttgctaaaaagaccattaaagaagtctctgagatgtttgatgtaatatcctgctcctttatctaatgaagttggtttagacttatcattgttttaatcgtgcttataattgtttaatctcaggttggtagggtgaaggtcctctgtacaatttatgacattgacagggattggtcttggtactatattgcctgcaagaagtgcaataaaaaagtgactaaggtagtcacgacctccttgaaagcacagttctggtgtgaaacttgccgagcagcagtaaacaatgtgcttgcaaggtatgtctcataatcttgatttaatgaaaaatgttaagatgatattgcctgttatttagtggattaaatattgtgacctatataggtacaagctacatgttaaagtgatggattcaagtggtgagatgaagctgatgctctttgatgctatggcttctgagattgttggttgtccagcaaataacctgcttgatggatctttcgaagagattgaagacccagacaacatcccaggttcaatcaagaatctgattggcaaaacttatcagtatctggtttgtgttgagaatgagaatgtgtggaatggactcgatacttataaggtatctagagttcttgcttatgatggtcttggagaagaagagataccagatgattcaattgatcaggtatggattattttaaattgtttgtttttcataaagaaatgccacttattagtaaaaaaactcactaatgtcaattgacttatagactcagggtagcctcatgctaacctactctgaagagccttttgaggctacaactccatcttcaaaaaggagtggtgaaacttgcatttcacctgctgataattcttcatcaactaagaaactgtgccttgactcaatcaagattgtgaagataaaacaggagatggttgaaaagaataatgaagctaaagttgttgatgagaagctcatttctctgaatggtaagcagaagagggagtacgcagatgaagttaatggagttaatgtgaagccgacggagtaaacataagattagtttgataggttacatttgtttctgcttagtttttttagttttaataagtggtttttagtttttttagttttaataagtggtttttagtttttttagttttaataagtggttttctttgatgtttccacatttgtttcagttccttaaatgataattggtttcccttttgagttttaatcttcttagtttctcaaaatcatataatactaaactcctatcagctttcattatctaaacaaataaagattccaaattcttttcgtaattgatgaatctctctcagataaggaatcagttgtctctgttggtttattgtggagaacagcatggccctagcatttgtgacgttattttctataatttaattgccaaagttgatataaaatgcgaaatgaatctaaatttgtctaagttatatagttgtacttaatagctctagattctctacagcatcaaatcaagattttatgaagatgaagaactaacctttaaaatcggcccacattcgttagattgacatcttgattatatgatagcctacaaattaacctgaaattaaaataacaacaacaacattattagatgcagagaatataatagatacttaacaatgatattctgatttggtaatctatataacaataatatatgattgcaatcttatcaattcgatatcttaacaaaagattatatagttactactcatcgttgactcttaatttagactccattatttagaaaaattacagttctatcgtctaacaaacaatagcttgatgaagaaaagaagtgcattggttgataaaggtgaaacccacatcactccatctgctaagaggaagtgttcatcgagcaaaaacagttaccatagtcaacacaaagctaaatcatctagaaatgggtttgtcgttccactgaaatctatatttgctcggttaattacagacataactaaatccaaccacgtggttttagaagagtctctttgtcctacagggaaaattgtagcacagtcttatacaggtatatcgttatattctacaatatgctaattgatatgaacctgtagttaagacttcactactttgttatgtgtacaaaatggcttcagtggttttggaagagtttccttctcctttagttaaaaatctatcagtgactgatacaagtaaagcattctctcgaataagagtataacaaatagttctattcaatattgacttttgatattttcatcaattttgtttgtgtcttttcttattttttcaggctcaattgatgagaactcatatctaacacctgtttctgttagacaatcattgtcttatcaaaaaccatattctttatgctctatgcctgtgactccatctaatgtctctcaatggagtcaatatataaattcttctggtatgtttatctcattgatattttttgtttttattggttaacccatgaattatgttcaaacgatacttatcaatgtatgcagagcctcttgaatgtttaaccactgatggatcaatattatctgatataccaattaaacagtcaacttcagaacttggcagcaacgactttctaacttcaatcagatcagaaacaatcaaatgtgagcataatttgtctacactagcatttatgaagtcaattcaaagcaactgaaatatatgagtttttgtatatgagttttgtgtagataccattgtttttcattcttacataaataattcaatcctgttttcagcatacattgcaacagaaaatcatccaaatataaagactatcagaataagccaatcttattctcaacttggttcagacaccttcttatccgacataagaagagacgctactaaacgtgagtttctgttttatatagtttctgactttaagcttttattcatcttaattctaatatgaaattacactctaaacctttgttcttttttttttgttagattcgtttaaccaggtttctaaacttgatacattgaaagtgaattcaaatacgaatagaactaagaaaagggttttaggggacatatcaaaccaacctgatagaagaggacgagctgagccacttagaagcaggattcaatatactgcacaaaacaaagaaaatgtcatacccaaccgtaagtatacaattatcatccatcacgaaaataataatgattgtattctatcaatatttatatgacttcagacgtaagttattaatcttcctgaatttgcaacagtcgaaaaatcacagcaatctcataatcaaagaaaaactaagaagactaaagatttggatgactgtcaagtaaatctgtttgaaagcatccctttagatggtaataatcgtgatttatagatttctgctttgaattatgtattcaatttttactaataacatattgttttcaaacagaagaagaagatatctctgatctcgaacaggaatatgatgttagtagtcaagaagatttggcttctgatagcagttctggatatgaaactgaaacctctgttgaaacacatgaaacaatgcatccacagaatcaaagatcaccatgtattaaacgtagaaaaggtataagtcttaagcgaagtagatatactagaggagcacatatcaacaggaaaaagaaaataggtcagtatgatcatttaattagttttagtttcagaatgaacatataaataacattttaaaagtcgagtttgatttctgtttttttttttgcagatcctctcattgacattccttatttagatcacggtgatccaaaatggaaatgtcaatactgtggtgctatgagttggtacgatgagcgagtcaacaaaagaaggaatagcaagaaaccaaaattctctctatgttgtcttcagggatcagttaaattgccatttcttaaagaatcacctgatcttataagagaattgttaagttgtgatgatgcactcagcagacatttccgggagaatatccgagcatataacatgctattcagcatgacttcccttggtggtaaagttgatagatctaatccacagggaaaaggtcctaaccagtttcagctacatggagccaattatcatttgactggtagtatgttgcctggtgaaggagattatgctaaattctcacagctttatattgttgatactgagaatgaagtggaaaacagatctactgtgatggggtaccttttatattttattttcttacattttattcttcgttgtgtattgaagtttatggtattttcactaatatgatttgttaacaattctgtgtttagcaagggaaagaatccgaagaaagcaacagccaaaaatcaagtgagaaaggatcttattgaaaagctcatcagaatgttggatgcttgcaatccatacgttgaaaatttcatgctagcaaaagataagttggatagtaataatggggaaccattctacatgcagattgttagtgatagggtaggaaaggatggcagaacctattgtaaccctacaacgtctgaagttgcagctttgattcctggagactttcgtcctgaaatgcctacacgtgatattatcgttcaagataagaaaacaggacagctatcaagaataagcgaagttcatccttcttatgtcccaatgcaacatcctctcatatttaattatggtgaagatggttttagaccaggaatacagaagggatatacaggcagaacaggaaaacaagcaaacaagtgtataagtatgaggcaatggtatgcttttagaatacaagagagatcagatgaagctcagaccctactgcgttcgaagcgtttgttccaacaattcttggtagatggatacacaacaatagaaagcaacaggttggcctatattaagtttaaccaatctaatctcagatgtgagaattatgatactgttaaggctgcgagagaagctggaaacactaacatgagtgaacaagggaaatcaatccgaattccacaatcttttactggtggacctcgctatatgttgaactcttactatgatgctatggctatatgtaaaatgtatggtttcccggacctttttattacatttacatgtaaccctaagtggccagagataactagatattgtaaagagcgtaaacttaatgctgaagatagaccagatgttgtgtgtcggatattcaagatgaagcttgactctcttatgaaagatttaacagaagaacatcttctaggcaaaactgtttctggtaattaattctctcatcttctttataagtttagattctgtttatttgattcgctgtgactataatgaagagagcttaaaatcgtttttaatatgcagctatgtacacagtggagtttcagaagagaggactaccacatgctcatatactcttattcatggataagagttgcaaattcccaacctctgatgatattgacaacataatatctgctgagattccagataaatttaaggaccctaagttatatgaagttgtaaaggattgtatgatacatggtccatgtggtgctgccaacaaagagtcaccatgtatggttgatggtaagtgttctaagttttttcctaagaaactggttgagcaaacaacagttggtaaagacgggtatccaatatatagaagacgagaatctgaacattttgttgaaaaagggggtattaagtgtgacaactcttatgttgttccttataatcgtcttttatcattgcgttatagggctcacataaacgttgagtggtgtaaccaatccggttctataaaatacttatttaagtatattaataaaggacaagatcgtgtagctattgttgttgaacctaaggacaagacatctaatatgcagactggctcagaaactcgcagtaaagaaaaaagtacagatgaaatcaaagattacttcgattgcaggtatgatatacttttttaacttggaatatatcgttctctaattgttttcttggatagttttactaatatttttcttactaaatagatatgtgtcagcctctgaagcagtttggaggatattcaaatttcccattcagtatagaactacacctgtaatgaagctttcatatcatctaccaggaaaacaaccactatgttttgaagacactcagaatatagatgaacttttggaaagaaaagccaacgaagattctatgtttatggctttcctgaaactgaatcaagagtgtgagtttgctagacagttcacttacacagagattcctcaatatttcacatgggatggacagaataagcagtggaagcttagggaaagaggttttctgtataggaagaatgaactacgcctccataaagatggaaccagaatattacatgaggatacttctccggattgtatctcgtccaacaagtgatgaagatatcagaacatacaaagatgttgtgtatgagacatacaaggaggcatgtttggcacgtggtattctcacagatgatcaagcatatattgatactatagtcgaaggaagtttatttttttttggggatcatcttcggaatttattttctatgatgcttctggataaatgtcttgctagaccagagtatgtgtgggaaatatgttcttgaattttaatcgaagacattgaaacaaagaaaagaaaacagtacgacaatccaggttcgttgatatacatttattccctatagttcgttgggtttttttctgttctaattaaattatattcttctccattttcagatttagtactaactgatgctgagaagagaaattatgctcttttagagatagaagatatgttgttgtgtaatggaagtactttacaagacttcaaagacatgcctaaacctactaaagaaggtaccgatcattcaaaccgtttcattacagaagagaaaaattacaacatcgaaaaattgagagaagatcatgatgattggtttaataagatgacttctgagcaaaaagggatttatgatgagatcatgaaagctgttttagaaaacagtggtggaattttttttgtttacggttttggaggaaccggtaaaactttcatgtggaaaaatttatctgctgcagttagaatgagaggtttaatttctgttaacgtcgcgtctagcggaattgcttctttgttgttacaaggtgggagaactgctcattctaggtttggtatacctattaatcctgatgatttcacaacctgtcatatagtgcctgattcagaccttgctaatatgctaaaggaagcatctcttatcatatgggatgaagctcctatgatgagtcgttactgctttgaatcattggatagaagtctaaatgatgttattggaaatattgatggaaagccatttggtgggaaggtcgttgtcttcggaggagatttcagacaagtacttcctgtgatacatggtgctggtagggcagagatcgttttagctgctttaaattcatcttatctttgggaacattgcaaggtactcactttgacaaagaatatgcgtcttatgtctaatgatttggataaagatgaggcagaggaaataaaagaattctctaattggctccttgccgttggagatggaagagtttcagagccaaatgatggtgaagttctcatcgatattcctgaagagttacttattaaagatgccaatgatcctattgaagctattaccaaagctgtttatggagatcttgatttgttgcagcctaataatgatcctaaatttttccaacagaaagctatattgtgtccacggaatactgatgttaacaccatcaatgacatcatgctcgagaaacttaatggtaagctaagtttataattgtcgtgtactatgactattttgttgtaagaattctaacaattgttttcaaacaggtgaatcagttacttatttaagtgcggatagtattgatcctcaagatgcagcgtcattgaacaatcctgtcttcacacctgatttcctcaatagtataaagctttctggtttgccaaatcacaatctcactcttaagattggtacaccggttatgttattaaggaatattgatccaaaaggtggcctatgtaatggtactagattgcaagtaacacagatgggtaatcatatactagaagctagagttattactggagatagagtcggagacaaggtgataatcataaaatcacagatatcaccttcagatacaaaattgcctttccagatgaggagaaggcagtttcctatagctgtggcttttgctatgacaataaacaaaagccaaggacaatcactcaacgaagttggaatttatcttcctagaccagtattttctcatggccagctatatgttgccttatcaagagtcacttccaaaaaaggattgaaagttcttattgtggacaaagaaggaaacacgcagagtcaaacaatgaatgttgttttcaaagagatctttcagaatctaaggagttag

SEQ ID NO: 140698 - DNA, 1353 bp, Arabidopsis thaliana landsberg
ccatgggttatctctcttgcaacggcgaatccgccgtcgcaatctgcgatacttataactggaatcctcgtcgacgatctaaagtaccggagaaacgtcatcctcctaagcttcgggttttcaactacgacgaactcgccgtcgctactaacggcttctccgccaataacttcctcggaaaaggaagtcacggcagagtttacaaagcagttctcgacgacggaaagcttctcgccgccgtcaagagaacaacaatcaccactaccgttggtaataacaataacaacgtgagtcaggtagacaatgagatcgagattctttcacgggttcgtcaccgttggatggtcaacttaatcggttactgcgttgaccaccggaggaaaacaaagctgttagtcgtcgagtacatgcctaacggtacgcttcacgatcagttacattctcgtagttcgttagattcacggttaagtagttggaatcggagaattaaacacgcgcttcagatcgcgattgctgtccacgctcttcacaccgcagagactcaagtgatccaccgtgacattaaatcgtgtaacgttttaatagacggtgacggtaacgctaggttagctgatttcggattagcattgatcggaaacgttgacgatgagcgtttgaaatatactccgccggcgggtacgttgggatatttagatccgtcgtacttagcaccggcggacttgacggctaagagcgatgttttcagctttgggatattgttgttggagattattagtggtagagaagccattgatttgaattatagtccgtcgtgtatcgttgattgggcggtgccgcttatcaaaagcggcgattacgacgcgatttgtgatttgaagattaagaaccgtccttattacgccgtgattcggaagttggccgttatggcggctaggtgtgttagatcgacggcgaagaaacgtccagatatgttagaggttgttgagtgtttgaaaacggtgaggaagttatctccggcgtggaataaactgcggcggaggagtgaagagagatcggaaaatgttttggcggttgaggaagagaaggaagagattcatgtgaggattgtgagaggaggaagcaggaagaatcggaaggtatcgaacgtgacgacgagtgtggatgatgtttacgagagattagttccggaggaaacgctgccgtttcgtcgtcggaattttgtgctgagatcgagatcagtaggagcgaaagttggaccggatccatacgacgggtttggtgatgagacggtggttacaatgagattacttattgagaaagaaagaccggtgacgacggcagcgatgaggctca

SEQ ID NO: 140699 - DNA, 987 bp, Arabidopsis thaliana landsberg; identical to SEQ ID NO: 16824

SEQ ID NO: 140700 - DNA, 1800 bp, Arabidopsis thaliana landsberg; identical to SEQ ID NO: 27149

SEQ ID NO: 140701 - DNA, 874 bp, Arabidopsis thaliana landsberg
gaaaatggatcagttcaaaggtgagcctcgtctacccaagttcgccgtccccaagcgctacgatctccgcctcaatcccgatctcatcgcctgcaccttcactggaactgtagccatcgatctcgacatagtcgccgatactcgtttcatcgttctcaacgcagctgatctctccgtcaacgatgcctccgtttccttcactcctccttcctcctctaaggtctctctatcgcgtttcttttttgctgttatggattccgattttagcaatgtgattggagttatggttttgagctaattagcgccttggagatattcattttcatgattagcttcttgatctgagtatttggatatcatcatctatgatttttgattccaatggtaaattaactagagagatacaatcacgtttcagccagacttttctgttcgactgaaaaaccaatcctcaactttagaaaactgtcatggattggaattgaatctggaatcagcaaagatttagcttgttgttgcttcttatgttttgttaagcaggcgcttgcagctccaaaagttgtcttgtttgaggaggatgagattctcgtgcttgagtttggtgagattcttccccatggagtgggagttctgaaacttggtttcaatggagtactaaatgacaaaatgaagggattctacagaaggtaaagcaatgagtttcgatctttttttactgttagatagctcgagattaatgctagaacgatcttgtatttgtcttggtcgcagtacttatgaacataacggtgagaagaagaatatggcagttacccagtttgaatcagctgatgctatgagatgctttccatgttgggatgaacctgcttgcaag

SEQ ID NO: 140702 - DNA, 1246 bp, Arabidopsis thaliana landsberg
aaaaatcgccagaagtgacgaaattgaaaatctcagatttctcttaatcggcgacggagtaacgaaacaaggagaagaagaagaagaagaaaaatgacgactcgaatcgctcctggtgttggagctaatcttctcggccaacactccgctgagaggaaccaagacgccactgtttacgtcggtggtctcgatgctcaggttttttaacttttaggtttcgtgaaatgattctgaattttctcatcttcctctgtgagttggtgaaattgatttaaatttcctgtttgaatctcagctttctgaagaattgctttgggaattgttcgttcaagctggacctgttggtaagttcatatctatatctccttaagtttcttcaatagctaatggcttttgattagtggaacaatgatattgttcttggcctgtatcagttaatgtctatgtaccgaaagatagagtgacaaatcttcatcagaactatggattcattgaatatcgtagtgaggaagatgctgattatgtaagtgttgctctttttcacttactgtgagaagttaatagacttttttttgtgtacaatgttgaaaagatttcgatgtttctgtgcaggcgattaaggttcttaacatgattaagctccacgggaagcctatacgtgttaacaaggtatcgaattgtttctgtaacttacattgtttagtatcgagcggatgggttttgtgagttttgatgctgagacttgtttaatctatcttctatgagtttgctaacattttgtttgctggttaaatttgtattaggcatctcaagataagaagagcctggatgttggtgctaaccttttcattggaaaccttgaccctgtaagtatcttttgtggtagactctgattttgatactctacaaaggtcatttaatctcttagctgaccaggttttgttttcttttataggatgtggatgagaagctcttgtatgatactttcagtgcatttggtgtgattgcttctaatcctaaggtagtattttttatttcattagattgtagttcatgattcttgatctctttatctgtctcctgtcaccgattcgatagtaaattaggattcatcggtattccactgtggagaataaatgttagaaacttttcatttcagataatgagagatcccgatactggaaattcacgaggttttggtttcatcagctatgactcctttgaagcatctgatgctgctattgag

SEQ ID NO: 140703 - DNA, 1247 bp, Arabidopsis thaliana landsberg
atcgaaaacttggaaatgttgctattacaagcaccgaaccagtcggtgcggatggcagacagcaggatacttagtcagatgttaagtcagaagcttagaccggcaaaagagagcaaccctttattgagatggtcggagaaaatcaaatatttcatacttgataattggcagagattatggatcatgatgttatggcttggcatctgtggtggcctctttacttataaattcattcagtacaagaacaaagctgcctatggtgtgatgggttattgtgtttgtgtcgccaaaggaggcgccgagactctcaaattcaacatggctctcatattgttgcctgtttgtcgaaacaccatcacttggcttaggaacaagaccaagcttggtactgtcgttccttttgatgatagtcttaacttccacaaggttattgcaagcgggatagtcgtcggtgttttgctccatgcgggtgcccatttaacgtgtgattttccacgtttaattgccgcggatgaggacacctatgagccgatggaaaaatactttggggatcaaccgactagctactggtggtttgtgaaaggagtggaaggatggactggcattgtgatggttgtgctaatggctatagcctttacactcgctacgccttggtttcgacgtagcaagcttaacttacctaactttctcaggaagcttaccggtttcaacgccttctggtacacccaccatttggtcatcattgtttatgctcttctcattgtccatggtatcaagctctacctcacaaagatttggtatcagaagacggtactctcttcaaacctcattttatctgttttaatttcttattttctttcctttttccggttaataacatttcttacctgtttatatgattcttgtagacatggatgtatcttgctgtacccatccttctatatgcatctgagaggctgctccgtgctttcagatcaagcatcaaaccggttaagatgatcaaggtcagatatatttctatttatctcttgaaaaccttatgtttcaagaaatattcaactaatacttttaaaccatcttattttatagttctttttgataaaagtttgaaaattgcctttgaacttaatctatatatatgtaacaacaggtggctgtttaccccgggaacgtgttgtctctacacatgacgaagccacaaggattcaaatacaaaagtggacagttcatgttggtgaactgccgag

SEQ ID NO: 140704 - DNA, 2606 bp, Arabidopsis thaliana landsberg
atggagtacttgatactcagttcccaggacagagttctggtcaggctactggtacgttgacaatgttgtacttactgtgtcagatttgacacaatcttatgtttgctttctaagaagcttgcattgccaatccattacaatgtttccttaaagttaatttccgtttcaggtgatgtgcaagaagaaaaccttgtggcacacagtaacggtggtgtatcccacattaggaaagatgttaaaggagactggaaatttccaagtgatgggaagcatgtgggtcaccaaattgatgaaagcatgccccagttccctgctcgaaattttgagctacataatagtaatggacgttctccagaaactagtgatgcttacaaccgtttacttagagatggaaggtaataagttttatctggtttgaatcttggctttcctttccttcctcttctgtcactgctaattctttacttggatgttttagtaccaatgagaagttctagattgtttgactttgagagtgttaatatttattataacaggataaaggattgcataagcttgctcgaagatttggaccaaagggatctattggacatggacaaggtacgactgctttcctcagcaatatggatgaaacctttagtattgcttctattgggagtttgtcactgatctgtttttcccaatttcctcacatcagatttatcatgcgagtttctttaaagcctgcaagaagcaaagggctgtcaaggaagcatttcgctttaccaagttgattctaaatccaaccatgagcacattcaatatgttaatgtctgtctgcgcaagctcccaggacatagaaggtgatatttcatatttccagtattaaatcactggtcttattcattttttattctcctagatgttgaattgttacttatgtaggagctcggggagtgttacgtctggtacaagagagcggtatgactgctgattgcaaactttacacaactttaatatcaagttgtgctaaaagtggaaaagttgatgcaatgttcgaggtatagaaaccttcctgtgccggaaagttattttggacaaagatacatatttggctggttctttgaatctctgtcaaaatcatgatgcatgatagatttctggggaaaatcactgatactagtctaatgtttgtctgaatggttctgtatgttattcttggttcccgacagaggaaatgttattattgtctaatcaagcttcaaaatatgactgcactcaaactccatagctctaactctctttctctctgtgtggttatattgtcaggtgttccaccagatgtcaaattctggagtggaagccaatcttcacacatttggtgcacttattgatggctgtgctagagctggacaagtagctaaggcatttggtgcgtatggaattttaaggtctaaggtaagcatgccacaagtttggatgccctcctatcatgtgtttagatttcaaaaaataccctatttcttcatggctacagttttttttttttttaattctgcttatatgttcatttctgctttggaatctcaaatcaattattacattgatgacatgttcgatgcagtagaatgttaagccagaccgggttgtattcaatgccctcatctctgcatgtggtcaatcaggagctgtcgaccgtgcttttgatgtgttagctgaaatgaaggctgagacgcaccctatagaccctgatcatatctcgatcggtgcattgatgaaagcatgctgtaatgctggtcaggtgtgtggctttttttttcctgttacttcttctgttttttgctctttccatctgattgagaataagtttcttgcaggtcgaacgagcaaaagaagtttaccagatgatccataaatatggaatcaggggtactccagaagtgtataccattgctgtgaatagttgcagcaagtctggggactgggattttgcgtgtagcatatacaaggacatgaaagaaaaagacgtgacccctgacgaggtatgtctaacaaattcatttttgagttaaaataagacatatctgctaaaactcatgaaagtcgctgaggcaagtgtttaattacaagaatttatacatacatatttattgaatcttggttttcatcttatgcaggtgttttttagtgcattgattgatgttgcaggacatgcaaaaatgttagacgaggcttttggcattctttatgatgcaaaatctcaagggatacgtcttggaactatatcatatagctcactgatgggagcttgttgtaacgtatgtgccttttattgctgtagcaggagtttttattattacttacaagttttgagctttctacgtcaaatcattagaatacgtggtggattaaggagaaacagaactttggtgaacatgtagcatcaaaagatccttatttgatcaaagtagtttttgagatgtagtttacattatcttagggttttggaaagttgcgattgcattgactttcttggattaaacttttatggagaaaatactgataatcttattttggtttttacttaagcgaaagattggaagaaagcactggagctctttgaaaaa

SEQ ID NO: 140705 - DNA, 935 bp, Arabidopsis thaliana landsberg
tcagcaattaaacaatttcttcactgcaattcacaagcaaccttcaaactaaaactcgagagacaagaaatcctcagaatctttaacttaatggcgctcgaggctcttacatcaccaagattagcttctccgattcctcctttgttcgaagattcttcagtcttccatggagtcgagcactggacaaagggtaagcgatctaagagatcaagatccgatttccaccaccaaaacctcactgaggaagagtatctagctttttgcctcatgcttctcgctcgcgacaaccgtcagcctcctcctcctccggcggtggagaagttgagctacaagtgtagcgtctgcgacaagacgttctcttcttaccaagctctcggtggtcacaaggcaagccaccgtaagaacttatcacagactctctccggcggaggagatgatcattcaacctcgtcggcgacaaccacatccgccgtgactactggaagtgggaaatcacacgtttgcaccatctgtaacaagtcttttccttccggtcaagctctcggcggacacaagcggtgccactacgaaggaaacaacaacatcaacactagtagcgtgtccaactccgaaggtgcggggtccactagccacgttagcagtagccaccgtgggtttgacctcaacatccctccgatccctgaattctcgatggtcaacggagacgacgaagtcatgagccctatgccggcgaagaagcctcggtttgactttccggtcaaacttcaactttaaggaaatttacttagacgataagatttcgtttgtaaactgttgagagttgtgtaggaatttgttgactgtacataccaaattggactttgactgattccaattcttcttgttctttcattttaaaaattattaaaccgattctttaccacatattttacaaa

SEQ ID NO: 140706 - DNA, 246 bp, Arabidopsis thaliana landsberg
tgctcactggcatcttagaaagtttgtcagaatgcagaattctactaagcctagtgaaaagaaatctagttctgagggtgccgatggagtacatggatcgaaggagccatctgtttctctctccaatggcgaggcaaaggcagatagtgcagaaactaaagacttgtctcagattgtgtcgtttcagaaagagaattttgttcaaacccgaaatcttgacgacaatcgttatgatacaattctatg

SEQ ID NO: 140707 - DNA, 439 bp, Arabidopsis thaliana landsberg
tgctagtaatccgaagagcagccagatttctgcggagtccttgtataatccatcaagagaacattttcaccaacaagctttcaaaccgagagatgctgaagagacacagttccatcctcaaaggaatggtttccctttccagacatttgtgcaccaacctgttcacgggatgatgaacggaggataccaaccatttcaaaacaaccgaccaattgttttccctcagatggctgccccaacttctgatttctcaagattccatgtccagtctcaatggcgaggaggcattactccacaagtccagttgaagcagagacaagagaatttcaatctcccaccagatttgaacatcggagttcattcgcctgattctcctgcaaaacaatcttctggtgttcgtgtcgattcccaacagcctgatttggcgctacagctctaa

SEQ ID NO: 140708 - DNA, 1717 bp, Arabidopsis thaliana landsberg
ggagggggctctgtctctgggagtatcttttttaggctcgttatgggagccgagtgtgatctgtggggttccgggtgcggttgtgccttccttgtgatgttgtctgccccaacggtgttctccatgagcttcgtgagtgacgcagcaggcttcataacggtgaggttcatgattggtttttgcctggcgacgtttgtgtcttgtcaatactggatgagcactatgttcaacagtcagatcattggtctggtgaatgggacagcagccggatggggaaacatgggtggcggcataacgcagttgctcatgcccattgtgtatgaaatcattaggcgctgcggttccacacgcttcacggcctggaggatcgccttctttgtacccggttggttgcacatcatcatgggaatcttggtgctcaatctaggtcaagatctgccagatggaaatcgagctaccttggagaaagcgggagaagttgccaaagacaaattcggaaaggtatatttatctatataaatatatattccttaataatttaggctgcttatgttacagatggatcaaaagattaactcgtgatatcgtataaatgttgtagattctgtggtatgccgttacaaactacaggacttggatcttcgttcttctctacggatactccatgggagttgagttgagcactgataatgttatcgccgagtacttctttgacaggtttgttttttatctcgattggaaaatagaagaattaaattataacataagagtaaaactaatgtatacatcatacatggtttgtccaggtttcacttgaagctccacacagcagggctcatagcagcatgtttcggaatggccaatttctttgctcgtccagcaggaggctacgcatctgactttgcagccaagtacttcgggatgagagggaggttgtggacgttgtggatcatacagacggctggtggcctcttctgtgtgtggctcggccgcgccaacacccttgtaactgccgttgtggctatggtgctcttctctatgggggcacaagctgcttgcggagccacctttgcaattgtgccctttgtctcccggcgagctctaggcatcatctcgggtttaaccggggctggagggaactttggatcagggctcacacaactcctcttcttctcgacctcacacttcacaactgaacaagggctaacgtggatgggagtgatgatagtcgcttgcacgttacctgtgaccttagttcactttcctcaatggggaagcatgttcttgcctccttccacagatccagtgaaaggtacagaggctcattattatggttctgagtggaatgagcaggagaagcagaagaacatgcatcaaggaagcctccggtttgccgagaacgccaagtcagagggtggacgccgcgtccgctctgctgctacgccgcctgagaacacacccaacaatgtttgatcatacattccacccacggtggaatggtgaaggatgatcgcatataagaatatgtcacacagtgaaaaaaaaaaatgcaaatgttatcaatgcttgcataacattactatctatctttcatttactaaacaaaccttttgctttttgccttgaaatctttttattatatatcaaaatatatctctatgtcttgaggtttgattattttgcatatatcattaatgatttgataatattggaactg

SEQ ID NO: 140709 - DNA, 2953 bp, Arabidopsis thaliana landsberg
gattggatgtcaagccattgctgaagctcttgggcttgctgcagtcaaagcagcagtggctattactgcaataattgctggtggccgtctagtgagtctcagatactttaacttttgagggttcagatatcaaaataagttaattattaccaaagttgttaggtgaaatgttttagatttgctacaaaaggaagaggcatgtttccatgaactaatcatgaaagttaactgtgctatcactgctacttccggtactcaatttatatgtttcaatggagttataatataaggaatttacactcttgttgcatatagcttcttcgaccaatctacaagcaaattgcagaaaatcgaaacgccgagatattctctgccaacacgcttctcgttattcttgggactagtttactgacagctagggtatgaccgtgaccttgttggcattgagtagtttactgacataccagtacttcccgtctgctaatttttccgtttctataaatcaggctggactttccatggcattaggagcgtttttggctggtctactccttgcagagacagaattttcgttgcaagtagaatcagatattgctccatatcgtggtcttctgttgggactcttcttcatgacggtaatatgagtttcctaataactttttgcatagtttatcatttctgaaaagaatgaggaactatagatggaaaaggaaaccttttacttgtgttctagttagatcctgatattgttgtcaactgtaagcaaactaacaaaaagagttccattgatttcaggttggaatgtcaattgatccgaaattacttctctccaacttccctgtcatagtgggaactttgggactcttgatagtgggcaaaactatgttagtcgtgattatgggaaaattgttcggcatatcaataatatctgcaattcgggtcggtctactattggccccaggcggagagtttgcatttgttgctttcggagaagctgttaatcaggtttgttatcaacatggcgtatttttttgcttttttccaatgaggtatataatcagcaatgttgttttaatggtttacccttacacattacatatatttctgtcaactgtttttccctagaaggcctaatctgtggttcttccagggtataatgtctcctcagttatcctcgttgctattccttgtcgtgggaatctaaatggctatcacaccctggttagctgctggtggccagttaattgcatctcgttttgagttgcatgatgttcgaagtttattgcccgtcgagagtgaggtaggaatcttaatgattcaaatatagaatttacctctattaggcaataatttatcaatcatggaaccacttgtagctcacacattctctagttgaggaaatcattacaaggccgactgatgagaatttttcttgtctgattttatttgcagacagatgatttgcagggtcacataattatttgtggatttggtcgagttggtcaggtttatatattatctgaacttcttcagtttatgctcttatatgagaacctctctgtagacattcagcttcacatgatagctcgaagtttctaacctcgtgaccattttctgtttgttaattgtagataattgctcaacttctctcggaaagacttatcccatttgttgcccttgatgtcagcaggtaacataacattgcttattctttgcctctattgttgaagaatctttgtgggctaaagtggtttcaaatattttgttctcatatcgaaccgaaaatgtggggactatcagtaacttccacactcaatgagataacatttcaacctatctgatttataagtcttttttcaagactctttgtattgcaccaaccagtttccatacctcttcctcgcatgctatgcttacctgaaaacctccttttttttacagtgatagagtgactatcgggcgttccttggatcttcctgtttatttcggagacgctggtagtaaagaggtaggtacacacaaaaacagaaaaatatagattacaccagcatgtgaatattacttcacttgtgtgaacaaacaggttctccacaaaattggagctgggagagcatgtgctgctgtggttgccttagacgcaccaggagcaaactacagatgtgtttgggctttgagcaagttttaccccaatgtcaaaacttttgtccgtgctcacgatgttgttcatggtcttaatctagaaaaagccggtgctactgcagtaatactcacagaccccttcactctcatctagactatagatatgctttgtcaatcgtacactaataatacctcgatcacaaaaacttttaggttgtcccggagactctggagcctagtctacagttggcagctgctgttcttgctcaggtaaaacataaatgtttccttatttagttgaagtagtaatcctaaacagtgtatgatccttttttgggttgaaacatgtcaggcaaaattaccgacatcggaaattgcaaacacgattaacgagttcagaacccgtcacttgtctgaactgaccgaggtgtgtttcattgtcgatatatccatctatatttatgagaatctggtttggtctgattgatgtgtattgggaaatggtgtaatgataatggcagctatgtgaagcaagcggaagctctctaggctatgggtactcgaggacgagtaagcctaaacctcaaccatcggatgcatctggcgataaccagataatcgaaggaggcacagtcgtaatctgatgacgttctccattctggtgagaaaaagaagagtatttctcctttggtgttcttcttaaaccaccatcaccaacttgggttgcagtgcgtggtgaagtgatggatccatcagatgatgtgtagtgtgactaatatattaattatatgttcagtacatatctctcatttaa

SEQ ID NO: 140710 - DNA, 3921 bp, Arabidopsis thaliana landsberg
aacaaattgattgtgaatccggcgtcatttttgatggaccaagagtatcgaaactctagaacgacggtgacgcaccaccaacatcatcatcaaatgagaatgacggttccaccaccaccgtctcctcaaccatcgccaccggttcttcctcatgctgaaagtgatcagagtacctcggagcttcgttctctcgattgtaatcttacttctttatgcgatcatattcaatccgaaggtttcggctctggtgcgttttctgacgttgttgttaaagctatgggatccagttaccatctccaccgcttgattctatctcgcagctcctacttcaggtgaattttttgaatattgaatttctgtgggaggattttgatattcaggttttgcaatttgttttaaactatgcaattttgcttaaggactatgctgcaaggtccatggaaagaagctagctctcctgttgtgaacttacttgtggatgataaaaatgttaatggagacgcaatttctgttgctttagcttatctgtatgggtatcatcctaagctggatgatgataatgcctttcgtgttttagctgctgcttcttttcttgaccttcaggtatgattaattcttatgattgcatcaaaagatagtttcttttggatcaattgatctaataactagtggcttttgtctgacaggatttgtgtgcgatatgcactgattttattatttctgagctgaggacttcaaacttcctggcatatcaggtttgagaatctcagtcatgtgtttattttagcctcattggtctccgtgattcttgagtatacagagcttcttcgacttgtgacttaggtatttgctgagagccaagactatggcattcatggagaacgtgtaaggaatgcttgctggggttatctctgtcaaagtggtgccgtggaactgagagaggtaatataatgtctatgctttagactgacattatgatttttatgtagttagtgatggcctcgtttcttttgggtgtatgtcaaaaaagcaaaagtatccccattttagaaatatgccgttctacctatgtcttgaacgtcttccatcctatatgtcattctatctcgaaagcatctgataatgaaaacgaagagtgttcaacctagtgtttagttagaataaaaaagtattctagttctgaattgctacttatttagttattttatcacattttatggtcagatgctgccgaaactctcagcacagactctatgtgcattgctgacatctgatgaactatgggtgcctagtgaagaaaaacggtatagtgaattgcatactctaactgtattatggtttcatactgtatttgcatctagaaatttctataaaccgtttctttccatgtcaaaaaggtttgaactggcattgtacgccttcatagcaaatagtgctctctccaactcagatcattccaatcaagattccagatttgagagagagacaagctttcctttggattctgctatatcaaaggggaaaaatgtgatggatgatttctctttcaggagtttggactgtaagttaggtcatttagatatagaagccgacctacgagatgctagtgatgatgtgattgttccactcacagaaggtgttattgatttccaaagaggtgtttcaggttcaaacctcgtgtttcagcaatcttctaactcacaaacgaattttggtcgtccttgcaccagtgttgttgataagacagaaggcagtgtggtggcaattgaaggaccttctgaagaagcataccatttgagtaatgatagttggttatcaggagcagactctagaaattctcctactttaggttcttcctctgatggtttcgttgtcaatgagtggggtaactgtggtgtttctgctctaacctggggtggacgggttgtggggacaagacagggtagaggctctgttaaaggaaaatatggatttactgaggaagaatacagtgcatttgtcaacacttttgaaggtggttcacttctgtattgcaatatgtcttttgaaatactattgaacgcaagaaaagaacttgaagagttgggtttcccttgtaaagccgtgaatgatggcctctggttgcaggttcgttgtccttaaacttgctttgctttctcattcagccagttgtagaaatgttgggatggttgatgtgcttagcgttgatacatttgacttaaggcatttacatgagcaattctagtctagtgtttcatgttagattacaaatgcaataatattgttaataaatgcaataatgtttatgtgtttgactacatttcagatgcttctcagtcaaagggtgcaggaagttgctgccaacacatgcaaaaggtgttgccttatcagtattgcatgtgcgtgtaaacaaggatttggggtttcacatggtgcaaccttcaacaattattattgccaagacaacgtgcagaacaatatgatgggagacatggataacgtatatgtgccggaatcttctcaaggcgatgggataggcatctttaagcctgtcaggatcagtgtcagaggacaacatattgatggacttgccggcattggatgcgaagctacatttgtaccaccacctgcttggcctcctactccttttgtgtactctcgtgtccctattaacagaaatggtcagcaatctattgctagtgatggttctgaaggtagaattgatcagagtggagaaatttcaaaagatgggctgacagctcttgttgggttgagccaagggacaagcggtgttggtaacaatcctcgtggagaacaaactgagggagggcgtggcagtggagctactgttggaatgtcagaacctaaggaaccttcagtaggtactgagtgggagaacgcaagttgtaccatatcacttgatacaaagacacctttgtgtcactttcctccctttcgttttgggtaacgtttccagccttatttacttgtaaacaacactcttggtttattccaattgcggtgactccttgatttgtcctgtttggcaaatagttcctctcagatgtgtctttttcattgctgcagagttgaatttgaagatgtccacagactcgctaacggtcatgtagagcattctcctgaattcttctatgctggttctctgtggaaggtatcagaaactcacaactaagtcgtcaagctttctcttggagctgttcttgctttctaagaatgaaatatgggttttgataagatgttttaataccatatccagattagcatacaggctttcaatgatgaagatcctcaaggacgccgaactatcggtaacccgagttaacacaatgacaagatcacatgttttcctcacgttagattggtctgtcatagtatacataactttgataatcaatatctacaggattatttcttcaccgccgcaaagcagagatagtggattcagtaaggaaggttagttttctgtggtctattgttataaaagagctgtttagagctacttaaattgtcatgtcttgtgaaataacaatctcttctgccacattcaggtccatgtttacatagatcctcgtgacaaagtgactgcacgttaccaggtatgttacaaatatctatttgcaagttctcgttgaaattcatataagattccatttctaagcccttgttttgatgcatctagtcatggtttcctcataagttatatcattttcattgttcttgtagcttatctgcccgtcgaaaagagaagtgatgttgtttgggagctttaaacagagaggaactcttctgcctaaagctcccaaagggtggggatggcgcaccgcactgctctttgatgagctctcggaacttctccagaacggtgctctgagagtggctgctgttgttcagctcgtttag

SEQ ID NO: 140711 - DNA, 4538 bp, Arabidopsis thaliana landsberg
gccaccgccggtgagattgtcgctgtgaatcatcagatgcagatgggtgttcgtaaaaactcaaactttgctccaagacctggatttggaacacttggaactaaatgcattgttaaagctaaccactttctcgctgatttgcctaccaaggatttgaatcagtatgatgtaagtttttattagaaaaagttaagattttttttgccttttttttagtttttgctgtaatgagaaacaaagcttgaaccttagatggtttcctgaaaaaaggtttgaaatttaatgaaggagagagagttagattttaatgttgttcttattgcttatttgggtccattgacatttggttaatgttttgcaggttacaattactcctgaagtgtcatcaaagagtgttaacagagctataattgctgagttagttagactttacaaagagtctgatctcgggaggagacttccggcttacgatggccggaaaagtctttacactgctggagaacttccttttacttggaaggagttcagtgttaagattgttgatgaagatgacggtatcatcaatggccctaagtaagtgtctaaggttctttaggtgattgattttgttatgtgtagttttatattgaaattgacacattttgctttgtagaagggagagatcatataaggtggcaatcaagtttgttgcacgggcaaatatgcatcacttaggcgagtttctagctggtaaacgggcagattgtccgcaagaggcggtgcagattcttgatattgtactcagggagttgtcggttaacaggttttgtcccgttggaagatctttcttttcgcctgatattaaaacaccgcagcgactcggtgaagggttagagtcatggtgtgggttttaccagagtattagcccaactcaaatgggtttatcactaaatatcggtaaagatttgacttaagagattgttacagttttggttttattttataagtcagcccaatcttaatgttattctccttactttgtagatatggcttcagctgcattcatcgagcctcttccagtgatagagtttgtagcacagcttcttggaaaggatgtcttgtcgaagccattgtcggattctgatcgcgtcaaggtacacaagtctcttcatcttattatatcttgtctcaagtccttgattgtttcctcaagaatgttttttttcttgggaatttttaacagattaagaagggtcttagaggagtgaaagtagaggttactcacagagcgaatgtaagaaggaaataccgtgttgcgggtttaacaactcaaccaacaagagagctaatgtgagtattttctttttacttactctctgattactaaggcttgtttcattgagattaatttctggtttatattcttaggtttccagtagatgagaactgtactatgaagtcagttattgagtatttccaagagatgtatggattcacgatccagcacacgcatttgccatgtctccaagttggaaaccaaaagaaggcaagctatttgccgatggaggtaaaccgtaaactgctggtttgtttgtttcaagacttcacatttcagctcttggctattttcgctgattcaatttccaatgtaggcatgcaaaattgtcgagggacaacggtacacgaaaaggttgaatgagaagcagattactgctctcttgaaagttacatgccaaaggccgagggacagagaaaacgatattttgcgggtaattttttagtcatgtatcttatatggttctttgtgagttagaacttagaagtgaggattaatcttgttgtcaaaaatgttttatagactgtccaacacaacgcatatgatcaagatccatatgcaaaggagtttggcatgaacataagcgaaaagttagcttctgttgaagctcgtattcttccagctccatgggtaaaaaacctaaacagatctctgaatgctcatactatgagaatactgttatgttaattcgtctctctttgcttgctacagcttaagtatcacgagaacgggaaagaaaaagattgtctcccgcaagttggtcagtggaatatgatgaacaagaaaatgatcaacgggatgactgtgagcagatgggcctgtgttaacttctcacgcagcgttcaagaaaacgttgctcgtggattttgtaatgaacttggtcagatgtgtgaagtctcaggcatggtaataatattcatctttttttcttttcttgctgcattgtttgaattctcttttaactcgatgtgattcttatcagaaagctttgcttcgtttatcattgtaggagtttaatccagaacccgtgataccaatatatagtgcgaggcccgatcaagtcgagaaagctctaaagcatgtttatcacacttcaatgaacaaaaccaaaggcaaagagttagagcttctgctggcaatattacctgataacaacggttcactttatggtattatttcgacatccataaacttaacccttttgccttctttagtaatggttttgatgaaaacgaaatgtttcttgtaatctcaggtgatcttaagagaatctgtgaaaccgagcttggtttgatatctcaatgttgtctcacaaaacatgtgttcaagattagcaaacagtatctggcaaatgtatcccttaaaatcaacgtaaaggtaaatagtttttactgctgtatcgaagattttcgattgtttttagtattatgaatctcagatctttctatgtttggtttcagatgggaggaaggaacacagttctagtagacgccataagctgtagaattccactggttagcgatataccgacaatcatttttggcgcagacgtgactcacccagagaacggggaagagtcaagcccttcaatcgctgctgtaaggattatacacttttatcaagtagtggagcatcgaaattcattatactcagtttttttcttttgttttctttaggttgttgcttctcaagactggcctgaagtgacaaaatatgcgggtttagtttgtgctcaagctcacaggcaagaacttatacaagatttgtataaaacatggcaagatcctgttcgcggtactgttagtggcggtatgatcaggtaataactcgcaatatttcggtttttgtagtttgattttatcggtgtatctcaaggtttttttgcttgctttctacagggaccttcttatctcatttagaaaagcaacagggcaaaaaccgcttcgaattatcttttatcggtaagtctctttttgctcatttaagtaaaagaattatatctaaaacccacaattagttctcatggttgttttattcgcgcagtgatggagtaagcgaagggcaattctatcaagttttactctatgagttggatgcaattcgaaaggtaaaaacttttgtgcatagcatgaaatgaatccgccacaaagttagcaaaacattttacataatcggaaacgggtttgtgtttgtttaggcttgtgcatcgcttgaaccgaattatcagccaccggtgacattcatagttgtacagaagcgtcaccacactcgtttgtttgctaataatcaccgagacaaaaacagtactgaccgaagcggaaatatcttaccaggttagttcttaaaaacggttgaaagaagatcataacagaaataattaactaactaactaactgcttctttgccaccttttgtttcaggtactgtagttgacactaaaatatgtcatccaactgaattcgacttctacctttgtagccatgcgggtattcaggtacgaaacaactatcgaaatatccgttaatatgacctttttccgtaactatacagataaaatggcactgtttgtgtttgttgtatgatctagggaacaagcaggcctgcacattaccatgttctttgggacgagaacaatttcacagcagatggtattcaatctctgactaacaatctctgttatacctatgcgcggtgcactcggtcggtctctataggtaaataacaacatttcttcttcttcttcgtgtacccgcaaatatgacgaaaatcagcaaactcatatgttcttttattttctgatgttgtacagttcctccagcgtattatgctcatcttgcagcatttcgagcacgtttctacctggaaccggagataatgcaagacaacggatcaccgggtaaaaagaacacgaaaacaacaactgtcggagacgtaggtgtgaagcctttaccagccttgaaggagaatgtgaagagagtaatgttaaaatgctaaaaatccaaacattccttaatcagttttaataagtagtttggttgtttgcttgtagttcggctttagattcaccaatgtttttcttatgtaaattttgtcggtttggtttaagcctttaggaattagtgtattagggtttttctacagttgtactttagctgatgataacgttgatgcagtgactttgttaaaacctcctcttctacagtagtgtttacgtcggttcctc

SEQ ID NO: 140712 - DNA, 597 bp, Arabidopsis thaliana landsberg; identical to SEQ ID NO: 25478

SEQ ID NO: 140713 - DNA, 1188 bp, Arabidopsis thaliana landsberg
aacacttctacttgaatcgcattggaagagcatcgtcacgactccatcacagttatatattttgtttattcaaatcttctttcagatttttatacaaaaaatataaattaaataaagaatcccataaatatctctctatcgaactctctctgcttttacaaatctcagaatctccttcagcgaattcacatctcagctgcttttgaatccgccgtaactaaaaacaatcctccttttctcgattcgttaaactatggccccgccggcaggacaaagggcggcggtggctgaagcggctggcgccgatggtgctccaccgcagcagcagcgtggatttggttccacgatttccggcatcgttagaatcgccgtcttttggtattttgcttctaagttcttttctcctaagcagaaacctatggatcccactgctccgtctcagctcatgactaatctcttccacaagggcgaatcattggtaaacttttgttctatagatgatgaatttgaacttcaatttatattcttacttcttctacaaatggattttaataaatcgtgtgtagttctgtaaacatgtttatagtgtctgctttagagttgtgtatgactagtgttggattactgtttgattggagaattagggtttcaagattttttttgttcatgaatctaaattcgaccgatgttttttctccaggatatgtggttttatctatcagagcaggagaagttcaatgactttggcaatgatcgtgcgctatattggcatgagacgaatataccttatgctgtatggacaccagagagtattaggaccaagtcacttacgtattatccatctgaggtataaaatcacttgcttgactttttaatatattttggtttctatcatatattgcttcctccaatattattctattactaagctgcattgagttactatgttgtttttgttcgcagacactacagaataatggaagtctgtatgctcatatcttttttgctcgatctggatttcccattgaccccactgatcctgaatatcaacctcttaatagttttagtaggacgcatggtaaggctcttttggacaacaattaattattcggtttctgtaatagctgatttggactggtcttttcactatttcagctgtggcgacttactttccaaagcagaaaaaaa

SEQ ID NO: 140714 - DNA, 432 bp, Arabidopsis thaliana landsberg
ttctcttactcgtatgagaaagaaagcccacccgggaatctccgacccgaccgagaaatgggatcgtcagcgaatacagaaaccaacggcaacgcaccgccaccgtcgtcgaatcaaaagcctccggctacgaacggcgttgatgggtctcatcctcctcctcctcctttaactcctgatcaagctattatagagtcggatccgtcgaagaagaggaaaatggggatgcttcctctagaagtgggtactcgtgtgatgtgtcggtggagagacgggaaacaccatccggtgaaagtaattgagcgccggcggatacataacggcggtcaaaatgattacgagtattacgttcattacactgagtgtatgtcgtttaattccttatcaagttttgatgtagggttttcaattttggttgattcgtactgttga

SEQ ID NO: 140715 - DNA, 3451 bp, Arabidopsis thaliana landsberg
aaaaaaaaacgtttcttttctcttcgattcccgattacggcttttgattttgtgggactcttctcagtttttctgggcttttggtttttggattctatcttctttcatttttcagattttttattttattttgttgtatttctatattgggaaacaaaatcatgcagaggatcgtcgataatgctcttgctatcacaaaagagtgagtccctctctcttttcgatttcaccattagtctgtgcacgcttattgattttgtgatttctgatttgtttttttagttgcatgtttagtggttttagtaatttgatatgtgatttcaactgttttgtttccttaatttggattttaattcgattagattttctcaaatagtaattagatttgctttagatatggaagttgccaaattttgagccagtggttttatagtggagctaggagctaagtctatatcttatatcttctgatttacattaatcttgagatttagtggtatatagttttactaatttggggatacatttctgatttaccatttttagttagttgttgaaggtttgttgtctctttgaagaaagtatacatattgactctttgtcctgtaataattacagcgattctcgttgtatctgcggatagttttctttgtttaatgcttgtctgtttgggtttttggtgttcgttgtgggtttttgattggtattaggattgtttgtgttagtctaaaatagttttaagctaactaatgattttggtttttagtgcaggtcagtgaaaactctgacttatgagtctttgaacaacattgcaagatgcattaatggattttctgcgcttctcttgacacttttgcccggaaagtccaatgttcttgaaggtcttcatggatgggagcttaggcctacattgcgtggacctcgtttaccacgctggatgcataagtaaaactctcttcaactctctaatacttctttgtggttaccttatagcagcttattcgactctcttttgatttctgtggttttgcagtggagtctcttctttcaaccacttcattcacgaactctctgtggattctgatacttctagcttggactattcctctggtgatgatgatagtgatggcatgtccacgcctccatcacccttgtctcaaagctcactccgctcttgggctagtcttcctgccaattacgaaagccattggacagactggataaccttcattgtctggtgggctttactacctgcccggatccttctatgggtaccattatatcttttacgtcttttagctagaagaaattcaagaatgcagcctctgagcccaggaaggtaccaacattcgtctagaccttgttttagcaaagctatcccagggaaagagcatgacgtgcccaaccgaactactgataaaagacgcggagtcattgaggttagtgttgatgggcatacttaaatcacatttcttgtttttgagttttcttacgcaattatgtgttctactttggcaggatcttcagcttggtatcgagatctttatagaaacaatatttgatttctttcacaaggcggcacatcttcttctttctccatcagaaacttttggaatagttttatcatggttctcttcctccagtcacagctctaaaggaaactatggtgacgtttcggatgatgagatcgttcagactgccattctaggagataacgattcatctcttacagaaagaagaaccacaacgagcttatacaatacagatacccggacctgtcaagatgttataacagagcttgggtaaggggggaatgtgtagaagatatttcgtgcatagttgttttttacttctgctgttactcaactatttgccctttcgatttaacttctcttataatcttgataggtatccatatgaagctattcgtgttgttacatctgatggatatggtcttctcttggaaaggataccaaggtatagaatctattatggttgagtaagtttctctatagtctgttatgtttctgtaagttcctttaaaatgtaatcatcatgtctttccagacgagatgcgaggaaagctgtttatttgcagcatggtgtaatggattcttcaatggggtgagtttcattgtctttttcgttgatgacttgtcaggaaatgttttgccttggtttctcatctggacctttatcttcagatgggtatcaaatggtgttgttggatcaccagcttttgcagcttatgatcaaggtccgtgccaaaatattcctagtttcccaagttactgtatgataaatatgaagttaagatttaccgatgttttactctgcttttcttgccaggctacgatgttttcctagggaactttcgtggtttagtttcaagagatcatgtgaaaaaaaacatatcctcaaaagagtgagtagtatagaataaacggcttctttatggatttgatatttgtatagttcttattgatgaatcctcaaaacatgcagtttctggcgttactccatcaatgaacatgcaacggaagatatcccagcaatgatagagaagattcacgaaatcaaaacttcagaactgaaactttatcagcctactatggaagaggtagtaaacgaggatcaaccgtataagctttgtgttgtatctcacagtttaggcggtgccgcggttctgatgtatgtaatcacccgtaaaatcgaagagaaaccgcacagactctcgagactgatccttctttcgcctgctgggtttcactatgactccaacatgtgtttcacgttgatggagtacacgttccttttcttgggtcctgtactatctcggattgttcctgctttctacatccccactaaattcttccggatgcttctcaacaagttagctcgagatttccataactatcctgctgttggtggattagtccaaacattgatgagttatgtagttggcggagatagctcaaactgggttggagtcatgggattgcctcactataacatgaacgatatgccaggtatatccttccgtgtggctcagcatcttgcacagattaaacatagcggtaagttcaagatgtttgattacggtagcagttcagctaatatggatgtttacgggtcccctgagccgctcgatcttggggagttttatgggttgatcgatgtgcctgtggatttagtagctggaaagaaagacaaagtgattagaccttcaatggttaggaaacattacagggtgatgagagattcaggagtagatgtttcttacaatgagtttgagtatgctcatttggattttaccttctctcaccgtgaagagcttttggcgtatgtgatgtcgcggttacttctcgtggagccaacgcagactcagacggttcataagaaggggatgaagctgaagacgaaaatggaaacaggcaaacctcatctgtga

SEQ ID NO: 140716 - DNA, 2263 bp, Arabidopsis thaliana landsberg
  unsure (1)..(2263): unsure at all n locations
gcaatttctgaattttgaacgaattctctttcacttcacaggttcggaatcatgttttcatatcgtaactgagtttgttttcgtatgaattatataactggttcaataactattttgaaattgcataaagtttttgggtttgagctatgaaattgcataaaggtcatagcttgtttgtgtgtttttgaatttttttatcttgtttatgaattcgcagtactgaagtttctattttagcttagtgatgggtaggagaaagcaatccaagccccagcgtgcagtgggtttgatcactccaactggttctgaatccgatagaaatcaattacccggcgacgaagctgagggttcaggggacaagaatgttgaagatatcgataagccgtattatgtgaacatatgtttaagtagtcgagtttcggagcagcagcagaactttgatttagctgaagttgttctaacgaattttagtgtaagagaacgtgtaggaagtagtagtacattcacaaaacctattgaggttgatcatgatctggattgctcgttacggtttcggctttgcaatgtgactaattttgttgatcggattaagcttggtcactggccggttttgtcttcgagtgatataactttggaattggttgataataaggtgtctgatgatgaggttgggtcagtgatttggtctgcaagttttgatggtccaggtgaaggggtttcgggtcttgctcatttggcaagtataaagtttttgactttaaggctcatgcctggtaatgagggattgttgtctcctagagttagagttgagatgcttcagcaggcttttgatgcatgtgattctcttcttgagaatacaaggcagatttggaaaaagagtatgattcatgtcatgtcttggttgaggccagaggtaatgacatcagaggctaggtatgggacaagattcaacgtcaaggatattgagtcatcagttgtgacggaagatgaaactttggactctagtaagcagtctagttttgatgctgctgctttttatgaagccataaagccatcaaagtgagtgaacaactttttttctctctttatgtgccttaatatctgattttatctttccaacttattagcacaatatcgattcaggacggatgcgatgcttggagatgacataactgatttgctcccagaacttaggccgtaccaacgacgggcagcttattggatggttcagcgagagagaggcgatccaataacgttgggagacaaggaagacaaccaattcatttcacctttgtctatctccgtgggattccttgactctgctacaaaaatgttcttgaacccattcaggttagtagaaaagaatctaagtagtcctttttaattttattttgaactataagctcctctcatcgtcaacaaatagtgtatgttctgctcagtgaagttccgccatttacagaagaactaatttgttctggtcaatttgtcatgttttggttgtttttagtgggaatatctcattgacaccagagtatttttcacctcgaattcagggcggtatccttgctggtatgaacaatttgcggcttcattttgcctccatgtactatataatcagaaaattatttacaaggataattttgttttgacttgctttcacaaagaatattttcagaaatatatgttttaagtcgtcttaaatgctagatggtgtatatggctttgtctacctctaatatttctcatgcgtttcgttcttaatgtggtaaagtacgaatgctgcagatgaaatgggattgggaaaaacggtggaactacttgcttgtatcttttctcatcgaaaaccagcggaggatgaaatttctgtgtctaatggttcatcagttactgatgttttgaacgctggcttgagaagattgaaaagagaacgtgttgagtgcatatgtggagctgtcagtgaaagtcacaaatacaaaggagtttgggtannnnnnnnnnnnnnnnnnnnnnngcagcatgccgactgtgtaggttattcacctaaagggaaaggtaagaaggatagtcaacatattgatgaaaaagcatctcaaaagaagagcaaaaaggatgcaacggaaattattgtcagagaaggtgaatatatttgccaaatgtgctctgaacttctacaagtgactgcctctcccatctctacgggtgccactcttattgtctgtccagctcctatattaccgcaatggcattccgagattacacg

SEQ ID NO: 140717 - DNA, 3293 bp, Arabidopsis thaliana landsberg
ctccctgcaaattttcttctctccctctcccatggtggttcctctatttcaatcatgccctctcaccccaacttcatcttcaggtttttataccacacaattcccaatttttttcatatctatattcgttcattaatggtgctttcacgctaaaacactcccgaattctgaatatgtattttgtgtcttttgctgtttacccagaggttacaagctttacctgagattgattattttccccgagaaacacttttcccggaaaattcactcgttttttgaactgttctatagctaacaagtcaccatgcaattccttataatcgcttgagtatgcgaaatcgttcatctagcaacgaaatcgattttcaaaattgtgtactatataacgaatgtgagatgattctgaatgatttttggcgatagattgctaattcctgcttacaatttgaatatttcaggtggattggactgttttccgataagttccgtcgacaaacgactggaatcgatgaaaacagtaacctccaaatcaacggtggagattcgagcagcagcggcagcgatgagacgccggtgctaagctccgtcgagtgttacgcctgcacacaagtcggcgtcccagctttccattcaactagctgcgatcaagctcacgcgccggagtggcgtgcctccgccggctcttctctagttccgatccaggaaggatctgtccctaacccagcccgaaccagattccgacgtctcaaaggtccgtttggtgaagttctcgatcctaggagcaagcgcgtgcagagatggaaccgcgcgttgcttttagctcgtgggatggctttagcggtggatccgcttttcttctacgcgctttccatcggccgaaccaccgggccggcgtgtctttacatggatggtgcgttcgccgctgtggtcacggtgctccgcacgtgtctagacgctgttcatctttggcacgtgtggcttcaattcagactggcctacgtctctcgagagtcgcttgtcgttggttgtgggaagctcgtttgggatccacgcgccatcgcgtctcattacgcacgctctctcactggcttctggtttgatgttatcgtcatcctccctgtccctcaggtgacatttcaaaagaaccttccaactattccaatattatgaaattaaccctaaagtttttattactatcaataaagcccacatttacatttgaaagtgttacctgttgatgaatcatgatttgagatgcagataagatgtgaactttgtgtttttgcttgtttgcaggcagtgttttggttagttgtgccgaaactgataagagaagagaaggttaagctgataatgacgattctgctgctaatattcttgttccagttcctccccaagatttatcactgcatctgtttgatgagaaggatgcagaaggtcactggttacatttttggaactatttggtggggttttgctcttaatctcatcgcatatttcatcgcttctcatgtaagtcctctcaagctagatattgtatttctgcctgaatataatgtcctgcaacataggttatattcaggtcctaaagcaaatgcaatataacaaatcccatgtgtatatatatagtactactaaggtctgtcctaagatatgaaattaaagtttgttgtttatggaaattctggtggtttcaggttgctgggggatgttggtatgttctcgcaatacagcgtgttgcttcttgcataagacatcaatgtatgagaaccgggaactgcaatctgagtctggcttgcaaagaagaggtctgttaccaatttgtgtcaccgacaagcacagttggatatccatgcttatctggaaaccttaccagtgtggtcaataagcctatgtgcttagactcaaacggaccattccgatatggtatctaccgttgggcacttccagtcatctccagcaactctcttgcggttaagatcctttaccccatcttctggggcctaatgactctcaggtagttgctttgtttctgagcttaaggtttacatcttggatatataaaaatctctgattgacatactgaatctgttttgggtgtcgctttttacagcacatttgcgaatgatcttgagcccacaagcaactggctcgaggttattttcagtatagttatggttctaagtggcttgttactcttcacgctgttgataggaaacattcaggtaaactatgcaagaatatgtcttttctatgatattgtgttttcatggaatgtaagagtttaacaagctttttactttacaatattttgaaggtgtttttgcatgcggtaatggcgaaaaaaaggaaaatgcagatacggtgtagggatatggaatggtggatgaaacgtaggcagttaccttcccggttaagacagagggttaggcgatttgagcggcagagatggaatgccttgggtggtgaagacgagctagaacttatacatgatttgcctccgggtcttcgaagagatatcaaacgatatctttgctttgatctcattaacaaggtactaggaagcagactttatacaatcttgttaagacttgtgaaagcagtaagtgttaagtctctgacatgtttgatctttctcaggtgccattgttcaggggcatggacgacttgatcctcgacaacatttgcgatcgggctaagcctcgagtcttctctaaagacgaaaaggtactcatcccatcatttctaaaaatttatatttccaatattttgcttcggtttcggtttaagagtttacttgaagagtaaaatctgaggttcttcgattttgttgattgtcacagatcatccgtgaaggagatcctgtacagagaatgatattcatcatgcgtggacgagtcaaacgtatacagagcctaagcaaaggcgtcctagccactagtactctagaaccaggcggttacttgggcgacgagctactctcatggtgcctacgtcgcccgtttctggaccgtcttcccccttcctcagcaacatttgtctgcctagaaaacatcgaggcattctccctcggatccgaagatcttaggtacattaccgatcatttccgttataaattcgcgaacgagcggcttaagcggaccgcaagatactattcctcaaactggaggacgtgggcagcggtaaatattcagatggcgtggcgccggcgtagaaaaagaacccgtggtgaaaacatcggcggttcgatgagtcctgtgtcggagatagcattgaaggaacagtgaacgccg

SEQ ID NO: 140718 - DNA, 2138 bp, Arabidopsis thaliana landsberg
tgcaaaacctgggttcttccatgaagatagccgtgctaacctttttgaggtggaacctcagtctggaatgcttattaatactgacaatggaacacctatggctcaggtttggtttaatgaattgtgacatccattcactgtcttcaacaagctatattgctatttcttatttaaatgatccttgtgtatccgttcaaggtgggagatccttcaccaaaaatcttactgaagagtaaagataaaggttgtcgagtttttcaaggtggaaatgttgggcatcttcacagtttgctctcaattgagtcaagttcacaggtagagagcactagctattttacaaagaaaattttgcttgctctattacatatatcagattagtttgaaatgacagatattcctcagaactctatagtgactgactgcagatttactatgcatcattcgtcacttattcagctattgtatttgttaggtactttatgttggggatcatatatacggtgatatcttgcgcagcaaaaaaatacttggtaaggttttcatttccagttatagactctttttttatgttttgttgtgtgaagtaacttaaacaaatcttcatgggtttaactgaactatgtatggattctgagaagaaatatatggtatattatatccctaattacttgtgaatggggagcttagtatgtaagtaggctagtagcacttgcatgttgatgaagaaactgttcaaagtgtcctgtgtttgcgccagttactttggatcttgatcttcttctttcttcaggctggagaactatgcttgtagttccagaattagaaaaagaggttgaacttttatgggaactgaggaatatgcgtaaggtgaatggatcctctctatataactgttattattctcagagatctattaagttgaaaaaaatcaagtttgttgaagtatcttttattaaactaaataatcaattcctttgtgaaaggccttcatgcatttgtgcggcaagtcttcgaattgtccttgacgaaattggatctaaaactgcttatgatcataatttataattgtatacattattcttccttttcaattcagtattttctttggtctgcaggatcttattttgatgagaaatgagcgtgattcagttgaagacaaaattcatcacttgaattggtctctaaagtgagtgttctttaaattaggtcctggccgaagaagctgtgttgcatagagtagaattcttaattgttaaagccattttacacacaacttgtttatatcgtaaccaattctatcaatcaggtttgaggatatcaacgagaataataagcacgaaatgttatcagcgctcaaggacttagaggtaagatagaacaagtataattcctagatcttcaacagttggatgagtgattctaagtcaagtttttgtgaaattcaacagtctaaaagagataaagtacgacagagtcatcaacaagctcaaagagaatgtcaccaaaaggtaaatctagcctcgttaatctgagtgtgtattggtgtaacagctagtttcagtttcaatctgttacgacttctcatgttatgtgggccttggaaactgcagtttcacaaggtctgggggcaactgatgaaaactggctaccagagttctcgatttgctcatcaggtaaatacggtttatattttgctttcttatgtggtgttttgcgattgtggggaataactttttccaaactgcattatcttcgaatcatcaggtggaaagattcgcatgcctgtacacaagccaagtctcaaacctacgcttgtactcaccagacaagtattacagacccagtgaagacttcatgtcccatgaatttcaccttcttcctctgtgattcagcccaatgacctctatagcagtgagagagtaaatccagtaatggtctggtttggtgcttattcttagtgtctataaacatttcttagtttctcttgcctatttgcatttcaatttcacttggtacaagcttgcgactctagtgacatgttatcttttggaaatttgtattgaatgtcgatgatattccttaaagaggcatttcagtgtttacaaaacttcatattgattgatcatatttggaccaaa

SEQ ID NO: 140719 - DNA, 1452 bp, Arabidopsis thaliana landsberg
atgtttggagctagtagcagtggggttcaagctcctcctgggtttttggatgagtttttcaaagactcggattttgatagcttggactcgattctaaaggagctgtatgaggatttgaggtctacggttataaatgtatcagtgcttggagatttccagccaccactgagggcactcaagtatcttgttagcttaccagtaggagctaaatctctggttagtcatgagtggtgggttccacggggtgcctatatgaacggccgagcaatggagttgactagcattcttgggcctttcttccatattagtgcgctgccagataatacactattcaagagtcaacctgatgttgggtgagttccaacttatttatgggtttctattactgagaatcatgtagtctttggggctcttttcttattgagaaagtttggatagtaagaattattgattagcttttactcatagtagagagacttgatcaaaaaaggaaaaaagcagatatatttggcttatatatgatgccactgttaggttgtatacatattttaagcatgattatataaatttagcatagttagatgatcagtagaggcgaaaccaacagaaatattagtaagcactatgttaagttagaatattgtggatgaaatccattattttgagcattttttctggtctgtactgaagaatcttgattgtccatttagtatttgacaaggcttaattgtgcgaacataagagttttcctgatccacctcagaggatatactttacctgttatgaaaatgctgatatatgtctattgtttttgtgaatatcaggcagcagtgtttctctgaagcatcggaacgtcgtcccgcagatttattatcatccttctccacgattaaaaatttcatgaacattttgtacagcgggctgcatgatatattgatgattttacttaaaagtactgatacccgtgagcgtgttctacagtttcttgcagaggtgatcaatgcaaatgcgtctagagcccatatacaggtaatcatccgtttataagatgcatatatacttcggatctttattcatgaattgctattgtctcctctcggttttatcaagttggtatttgtcttttttgctcaaatcagcattctgtaatatgtttatcttgtatgacaggttgatccagtctcttgtgctagctcaggcatgtttgttaaccttagtgcagtaatgctccggctctgtgaaccatttttagacccacatttaacgaaaagggataagattgatccaaaatacgcattctgtggccatcgcttaaaattaaggtatggtcctcaagatgattctacttgtatttcctcactgattttaatggtttcattgatgagcaatattatttatgatccccaccagcgacttgaccgatctccatgcatcatccgaagaagttactga

SEQ ID NO: 140720 - DNA, 4425 bp, Arabidopsis thaliana landsberg
atgatacagttctggagtgagctgtcgtcgaaagctaggcatgagcttcttaggattgacaagcagacactgtttgagcaagctcgcaagaacatgtgctgttccagatgccttggactgttgcttgaaggcttcgcccagattctttctgctgggagggccgcgtacgaaaaaagaatgatgggaccctccaaagataactgtaaatctaatggcactaggaaatgtacggttgcgtaccagagccctcctgttcatcgatggggaggtctcactacaacacgctcgggatgtatcactcttcttgactgctttttgactgcaaaaactttcaaagggcttcaaaatgtaagttcatcaaaggtttccctatatttggtcggtcctgttttacctagctaatctattagttctagcaggtctttgaaagtaaccgtgctcgagagagggaacgtgagttgctttatcctgatgcttgtggtggcggtggtcgggtatggcttagtcaagggattgctggttttggtaaaggtcatggaacaagagaaacatgtaatttgcatacgcgcgaggctctcttgtgatacattagtggatttttggtctgcacttgaagagcatagtcgacagtcacttttgagaatgaaagaagaggattttgtggaaagactaacttacaggtttgttatttgctgattcggtattcttggattttctgtcacaagattagttgagaaagtttttggatatgatcttgtttctcctactaggctgtagtgtgtattatgaactcttactacttaagctagtatatttaaaattgaataatgattagggattctgtattttcgattttggggatatgcctatcaagtcattgcattacttagttgttatgttctccttctcttctcttcgttgtcttgttactttttctcctttccttataactagttgacatttcaaactacagattcgactgcaagaagttttgtagagactgccgaagaaatgtcattcgggagtttaaagaacttaaggaacttaaacgaatacagagagatccaagatgtaccgactggttttgtgttgccgatacagcctttcagtatgaggtcttttatcttttttaaccttttcttcttactttgtagattcctatattctatacaacaagatcactggttttcaagagtaaatttatcaatataccttagaggcttatattgcaaggtagaatcaaaagtgtaattgcaatttctcaggtggacattgattctgtccgagcagattggagtcaatattttacagagaatgctggatatcatcatttcgagtgggctattggaacaggagaaggcgaatctgatatcctcgagttcaaatatgtaggcaatgatcggagtgcccgagtcaatggcctagaccttcgtggattacatgaatgctacattactcttagggcatttaaaaaaaatggccgcccctcagaaatatctgtcaaagcccatgcattgagaggccaacagtgcgttcactccaggcttgtggttggggatggctttgtttcaattaaaagaggggaatgcattcgaatgttttttgagcatgctgaagaggctgaggaagaagaggtaaattgaagatttataagctttgtgactgaaaagcgttcagatatttacagttttgcagatatgatatctccttgctgaaatataattattttgtttccaatgcttctataaggatgaagtcctgatagacaaagatggaaatgaacttgatggtgagtgcttgcgtccacaaaagcatgctaagagttcagaacttgctcgagagtttcttctagatgctgcaacggttattttcaaggaacaggtttgttatagattcctcctctaagttcaccttccattcattgttattttgggctttattaaggtgtattcatttctatctattcataataatatcttaggttgaaaaggcatttagggatggtacagcccgtcaaaatgcacacagtatatttgtctgcctttcatcggaactgttagagcaacgtgttcatattgcctgcaaagaaattgttaccttggagaagcaggttcggtcgccatcttgattggattatttttgacaatctatgcaatttaacaagacatttacacttttatctgtccaacaacttcatcatctcaacacttgcagaacaaacttctcgaggaagaagagaaagaaaagcgtgaagaagaggagcgaaaagaaaggaaacgaattaaagaaagggagaaaaaacttcgtagaaaggagagattgaaggaaaaagaacgcgaaaaagagcagaagaatccaaaatttagtgataaagcaatactgccaattatgtcaagggaagaagaaggctctcgaaatcttgatgaggacactaacaataccataagatgcgaggagtccggaattgaaaatggagatgtagatttgtcttcacctggttctcctgatgatcaagatgaagagtgtttggatggttgcatttctccaagagttgaaacccactcttgtgatagcactgataaggagattatagatcatgaagatgaaaacggctgctttacaccaagacctgctcataagacggcgagattatggaaagaggttcagactgatcattctttgaggttgtcagaaaaacgcagatttacagagaaaacttcttttgtcagtagttctgaggcaggatactgtaatgatagattagaaatgtcttcgggacacttcaatggctcagataaaaatgtgagagtgaaagcttcgaaagctggtggtagcccaaatagcagtaggtctcatgaggagtttcagtgttcagatggcaggactggtgagaggtatgattaccattcttgcagttgcaaacccattaatggttaccgggaaaaggtagagtctaatacatctgcaaccagaggcatgcgagaaccgaaatcagtattcaaatctgactctgatctggatgtctccaagcttaaccgagccaataggtatactcaatcaggctatagacgagagataagaagcaaaatgaataatagtcgaaacgcttgtaagatggatccagtaaatgtgagaaaggtcttggactctgtggagccgaagcattcacgaaacagctcaacctctgacgtattatcacttacaacatacaaagcagaagagattaaagatgtaagtcccactgtgaagccagctggcacaccgtctctatgcaaggctacagataagttgggaaatgggagttttaataattcgacggaggtagacaagaagatggaagttcacataacactgaagaatgattacctgtactcgaaagatcctatgatgagtagaagttctagttcaaacaatggaaacatcgaatcctcctcgatgtctgattccgaagttgccagtcagcaatctgaaggaagagagaatctagtggatactcagaacgatatgcccgactgtcacgagaagatggtagagaaagtgacagagatgagtatggatgaaagagatgttttaaagattaagaatatatctaaccttccagcagacaacggggaaagtaaattatcaggaactccttttatggttcctagccaaaacatggaaaatatggtaccaggtcttaatactggttcctacctgtcccagccacaaaacatgatactcccccagatgcttaaccagagtataccattgccagtcttccaggctccttcaacaatgggttactatcatcaagctccagtctcttggtcttcagcttcaaccaacggattaatgcaattccctcatcctaaccactatgtatacactggtccccttggatacagtctgaatggagagtctcctttatgcatgcagtacgggaccccattgaaccattcagcagctcctttcttcaattccgggccagttccaattttccatccgtttgctgaaaccaacacaatgaacactgttgaccaagctcaacctcttgagccattggaacacagttttttgaaggaagcaaatgagaggagatttaacgaaatgcctttaatggaaactccaaggaaaagatgtccacaaactgatagtgatgagaacttctccttgttccactttggtggcccggttgctctgtccacaggaagtaaagcgaatcctgctcgatccaaagatgggattttggaggatttctcgttgcagttctcaggagatcatgtttttggtgatccaaccggcaatagcaagaaggagaaagagaacacagttggtgaagagtacaacttgtttgcgacaagtaacagtttgaggttttctatcttctaaagtttttttatacaatttcttggattgtttggcgtcatggagaacgcagtaaaa

SEQ ID NO: 140721 - DNA, 192 bp, Arabidopsis thaliana landsberg
aacatcgtataccacggcagagatcagcgcagaaaccgcccaccgatccggcgatacgtattgaagaaggacaacgtggttcagatgatgaacgagaagaagagttttgacgtctcggacttccctaaggtttacttgaccaccacagtcgaggaggatttggatacgcgtggtggaggctacgagaaataa

SEQ ID NO: 140722 - DNA, 874 bp, Arabidopsis thaliana landsberg
acaatgttatttctggcctgtttggtaagggtttgatttttacgtcaaatgatgtttttttttttttttgtagaatagttgctgacattgttccactcttgattttgttttcggcgtgttagattacctgcaagagcgtgcgaaaggtagcacattttatgggttcaagggtggtccagctggtatcatgaaatgcaaatatgttgagttgaatgctgaatatattcagccttacagaaaccaggtacttggattcagatccttccacaagatttgaatttacactccactagatgtggagcattagtccttggttaaatatacttgtctttttaagtcgatgtggttataattctttttttggtctcaacagggtggttttgacatgatctgcagtggaagagacaagattgaaacacctgaccaggttgaatatttttttgtggtttgaaaagatatttgttactgcttccaaagcctctatttcgtgcagtgagtaattatatatgcctctcatgtgcagtttaaacaagctgaagaaacagcaaagaagcttgatttggatgggttggtggttatcggtggagatgattccaacaccaatgcttgccttcttgctgaaaacttcaggtaaaccttgcagttgaatctgttatgttgaaacttatttatcttaggcgaaagtagttgttcttgaagatccatgtgaccagaatctttaatatttgctgattcagcatttgacttattatctacttgtataattaggagtaagaacttgaaaacccgagtcattgggtgccccaagaccattgatggtgatttgaaatgcaaagaggttcctactagttttgggtttgatacagcttgcaag

SEQ ID NO: 140723 - DNA, 1216 bp, Arabidopsis thaliana landsberg
atgagaaaaaaattccaagcacgatctccaaccactcgaatcttcactgtcggaaacaaacggccaatgttttaccacgtcgcattcttaattggatgtaagtctttacaagcacttaaaacattaaactcttttttctcattcgtccacgtttctttttaaattaatactgttaacagataattattcacaaaaaaataatatctgaagaacaaaaaaaaaggtttcagggccttaaaatggctgctcgtgtcgaggcggcagcaacacacttgtcgtctctccctgtagcttctctggagttttcgcagtcacgaatcttgttgtgaagaaattaatttggtaaaacatattttcgagctcctttctcttttattatccgttttctgacttctggatctgtctttgtcggatcatccaatttttttgttgtctttcctctgtttcgtttatgaatcatgatgatgtacatgttgtaactgaagtaacttttggttatcaaattagagttaaagagagaatttttacgagatatttgttataaatttatcgatttgattcttgttgctattagggttttgtctatttgattcgatcgggttttttttaagagaaatgggttgtggaatctggaatagatccttctcatgcttgttgggttttgctgattttctcgtttttggttttatgagtaaactctgtatctggtgtgaattcgttttccatcaaaaaaagtcatcaaattacgtttttttataaacattatccaaagatctgacctttattgattgactttactgtgcttttacatttgttcgcacgcatttatgtggtttgtccagtttcactttagtattctttctcttatatggatgtgaacatgcattagtgacacatagttcactcctttttattttcctcggaagttctctttttcatggattcttagcattatgtaatatacactctaactgctttactttgattttagaacaagggttttagggcttggatgctttgttttcattgaaaaagaagtagaaggagtgtatacaaggattatgggaactcacatcaatttcaacaacttaggaggtggtggtcatcctggaggggaagggagtagtaaccagatgaagccaacgggtagtgtcatgcccttggctaggcagtcctcggtctactcccttacctttgatgagttacagaacacact

SEQ ID NO: 140724 - DNA, 6852 bp, Arabidopsis thaliana landsberg
taggttggaatcagtaacggaagaacagggtcctgaaattaattgtgttaagaaggtcaggtttccgttttgcaacttttcatgttagagtttgacatccaaagtaatttatttacaggaggcaatcttcagggtggttgctgcaattttcattcttggtaacattgattttggaaagggggaagagatagattcatctgtcatcaaggataaggattcccgaagtcatcttaatatggcggcagagttacttatgtatggtcctttttcttactatatttgaatctgtttatccattttcgttttagtggattatatattcgtagtaaatgctgttttttatattgtgcacttgttttgacaggtgtaacgcccagagcctagaagatgctcttattaggcgtgtgatggttacacctgaagagattatcacaagaactcttgatcccgataatgcaattgcgagtagggataccctggccaagacaatatactctcacttgtttgactggtgaagctatttaagcgaacttcctcttccatttcctcatctcgcatttttatatatatttgcataatacattttattctatcatttacaggattgtgaacaaaattaatacctccatcgggcaggacccacggtcaaagtcgattattggagttctggatatctatgggtttgaaagtttcaaatgcaataggtactgttatacgtaaaacattctttgttatcacctttaccccatttcattccaggggtgcatggaagaccaatctagacatgcttggatagctttaaaagaataattccttgtcatcttctgctatttcaactgaaagttaccaatgtctctatatcttctgcagcgtctcagagtattaagtgggtgttaaatatagtttcatataatgtgtcaagatgttgaaggaaattgctaaccgtggaaagttagtagatttatctgttatcgaagagttgtagttgatcttttgtttggcttatgatacagttttgagcaattctgcatcaatttcacgaatgaaaaactgcaacagcattttaatcaggttagtcgtttactcatgtttatattgatcagcgcttttgcttttggataagtagattggacttatttctggtatcactcttttgcagcatgtcttcaaaatggagcaggaagagtacaccaaagaagagattgcttggagttacatagagtttattgataaccaagatgttcttgagttaattgaaaaagtatgtttctccttataatttaagagacttacattccactttgtgatatttattgcttgatgataaccatatttaggtttaggagcagagatcttgtttactgcacaattgtcttatgctttcccttttcttatgttaaaattgcgtgtcttcaatcagaaaccaggagggattatttcacttctagatgaagcctggtatgctttatctttctcagattaacttgcatgcctttctcatagtactatccgttcatgtattttggttgattcaactcagtatgtttcccaagtctacacatgaaaccttctcccaaaagttgttccagacgtttaaagaacacgagagatttgccaaaccgaagctctcgcgcactgattttaccatatcgcattatgcaggagaggtacagtattgtttcttcatatttgtctatttctaaatgaattgaagttgaagctttctgttcttgatgtgtatcctacatttgcaaggttacttatcaatcaaaccatttcatcgacaagaacaaagattatatagttgctgaacatcaagcactatttactgcatctaattgcaagtttgtggcgggtttgttccatgcgcttcatgaagactcatccaggtcatcaaaattttcttccattgggtcacggttcaaggtattgcatataaaattgctagttatgcactgcaagttttgaaaggaagtttattgatatcacttatctatgttgcagcaacaacttcactcgctgatggaatcactgaatggtacagaacctcattacatcagatgtataaagccgaacaatgttcttaaacctggtatctttgagaatttcaacgtcattcatcaattacgttgtggggtaaggatgtcctgtctaaatctaacgggtgtatctacatctcttattagacctagaatacactttcccgtttgtattaatattaaacgattagtgcgataaccaacgcagtttttgaataacatactaaaatacgacgtttctttatatgcttactattcattaaatgtcgtatcttcccagaaaataacaattagtttcatttgcagggtgttcttgaggccattcggatcagttgcgctggctatcctaccaggcttgccttctatgactttctcgatcgttttggtctccttgctccagaagttttggaaggaaagtaagtctctctctgaggtttctgcatctctatgaaaacacttttgtcgaaacaaacatcagtttaataagcaattctatcacaccttcttttacagttatgatgataaagtagcttgccaaatgattcttgataagaaaagtctgacggactaccaggtgtgatatgcattttcattctggtttgttgctttctttcaaagttgttttcttaccaaattcatggataattttagcgtcatggtcatgatccccgatgggatcatccacaagaaaaaaaaatctcccttccttgttccatcattctcactatcggcattttcagtatttgttcatgtatcatatacgtacctttaccatgttgttcccagataggaaagacaaagattttccttcgagctggtcagatggctgaactagatgcgaggagagcagaggtgcttgggaatgctgccagagtcattcagaggcaattccgcacatgtatggctagaaagaattaccgttctattcgcaatgctgcaattgttttgcaatccttcctacgaggtattttctgcactcagtaaggtttctccatggcgtatgctgttcagtcagaattatagtgcttacccatccttttctcatcgcatcctattgttttcatcatttggagcttaaccatttcttctttaccagatggttgttttctggtttgatcatctgttctccttttctatgcttggttaattgcaggcgaaattgcccgggcagtgcacaagaaactgagaatagaagctgcagctctaagagtccagaagaatttccgccggtacgttgacaggaaatcttttgtcaccacaagatcatctacaatcgtgttgcagactggcttaagggccatgattgcacgtagtgaattcaggctaagaaggcaaagaaaagccgccattgtacttcaggtagatcacagtttccttgttactgggagggaactagacaaccttcttaggacagaaataggaaaactttgttaactgttctctttgatggataaaaaattcccctttttcaggctcattggcgtggtcgccaagcattctcatattacacaagacttcagaaggcggcaatagtcacacaatgtgcctggagatgcagacttgctagaagagagcttagaatgctgaaaatggttggattccttgctttatgacttttcattgcgttctaacacagtgtgcatgaattttcttattcagctgtttacttccatatgtacattgatgtaggctgcaagagacaccggtgctcttaaagatgctaagaataaattggagcagcgggtagaagagctttccttgcgtttgcatttggagaagcggttaagggtaacttagatgtcaattttctttggaaatatctttaggttaaaccaatttggagattgtggtcttcaaagtcagttgcaaattttggattatattgctatctttttactgataaacagactgatcttgaggaggcaaacgtgcaagaagttgcaaagctgcaagaggcattgcataccatgcggttacaattgaaagaaactactgcaatggtcgtaaaggaacaggaggcggctctagtagcacttgaagaagcaagttcagctaataaggaacctgctgttgttgaagatacagagaagatcgattctttgagcaacgcaattgacaggctaaaggtaaaaaactgacatattttaatccaaataattttggttcaagatgacaagatgtaattgtttctacaccatagatgtgtaaatttaataatgagatttttttctgtttctggatttaaaaaagataatgctttatgtgaaagtctccattatttgattgttcatgccactgatctacaatctcgacatggtcctaatgcagggactgttgtcatcagaaacacataaggcagatgaagcacagcatgcttatcagagtgccttggtccaaaatgaggaattatgtaagaaacttgaagaagctggaagaaaaatagatcagctccaagattctgttcagaggtttgtattcatttgcaaatttgagatcatgatgcatttgtttttccatgtgagacttttatctttctttatacaaatattttccccttgaaaataaatttttacgttctcaggtcatgcatttagaggtttaattagtatcagatattgcatttagggcccagttttttctctgaaataagacgactaacaatatccacttcctatatattagattccaagaaaaagtctttagcttggagtcagagaataaagtactccggcaacaaactcttaccatctcaccgactactagagctttggccctaagaccaaaaactaccataatccaggtactggtggacaccggctatgtctttacattgaatttcttaacggggaatttgacctttttgatatttccgcggaatttcagagaactccggagaaggatactttctccaatggagaaacaacacaacttcaggtatgttgataaacaaaatcagccccttgtgtaattaccatttacattgatggagatctaatatttaatgatatgctccaggaacctgaaactgaggataggccccagaaatcgcttaatcagaaacagcaggtagctatcactttgaagccttgtcacatatttcacttgcgggcataatatgttctgtttttttgtcagtatgcattttgcatactcattatgttcggtttttcatcttgcaggaaaatcaagagctgttactaaaatctatttcggaagatataggattttctgaaggcaagcctgttgctgcctgtctgatatacaagtgtctgatacactggagatcttttgaagtagaaagaaccagtatatttaatcgtataatcgagacaatagcatctgccattgaggtagttttgatgttctttcataccaacacaaatgttctttcctgctccaggggtagtctcatgctaaatttacatctttgcagatgcaggaaaacagcgatgtactatgctattggttatccaattccgccacattattaatgtttcttcaacgcactctgaaagccggtgctacaggaagcataactactcccagacgtcggggaatgccttcatctttgtttggacgggtatctcaggtagttagaagtgtttacgtgtctctcaagaatgctttgattccattaatctcacttttctcatgaaattacttgtataatagagtttccgaggttctccacaaagtgctggattcccatttatgactggaagggcaattggcggtgggctagacgaactacgtcaagttgaagctaaatatcctgctttgctttttaagcagcaactcacagctttcctagaaaagatatatggaatgatccgtgacaagatgaagaaagagatttcccctctgcttgcttcttgcattcaggtagacattcttttgaattgccttttgttccacagaaaataatcgttgatatattattgtggtattaaagcccctgagtctggttctggttttgtggtttgatgaaaacaggttccaaggacaccgcggtctggtttagtaaaaggacgttcacaaaatacgcccaataatgttgttgctccaaacccgatgattgctcattggcaaaacattgttacttgtctaaccggccacttgaggactatgagggccaattatgtgagtgaaataaactataaattccgccaaagctgaaataaagtttattttcaacttcttttttctttcttcttacaaattttgaacctatccaaaactgcaggtgccttccttgctaatttctaaagtgttcgggcagatattttcatttatcaatgttcagctgtttaacaggtaattctgatatggttgcaactgtcaagtcgctatataatacagatccgcttatgtttttcccgtttaatcaaccgtgtagccttcttttaagacgtgaatgctgctcgtttagcaatggagagtatgtaaaaacagggcttgctgagctggaaaagtggtgccatgatgcaacggaggaggtaatagatgtttcaaatcctctctggagttttcggacagttagcttattagaagatgctttttttgttgtgttctagtttgttggttcggcttgggatgaactaaagcacattagacaagctgttggcttcttggttatacatcagaagcctaagaagagcttaaaagagataactactgaactttgtccggttagttcaacgttttgaatttgtctcttcatttgttcgtctcatgtaaatctaacgaaattttgtatttctctgcaggtgcttagcattcagcaactgtataggatcagtacaatgtattggga

SEQ ID NO: 140725 - DNA, 832 bp, Arabidopsis thaliana landsberg
ttccaatcgccgccatgaacgaagaccttctccacaacattctcttgagattgccggcaaaatcgtttgctttcgcttcatgtgttaaccgattctggagcagcgtctgcaatcgaattctctctcgccccaaaatgatatctgctttctctcgtaatcctgatcaacttgtaagtttcctgtttagttgaattttgattttccagatcgaaaaaaaaactcaaaacttctcttcatgctagttcttagagctcttcacaaggcttggccaattgtaatgtctagtatgtgttcttcctaaagaatgaaacttttgaatttggtaaacagagagctggagaagaagtacttgataaggttttgtctgagccaattcgaccacagtttgtgatcgcaaacattacatgtgggaacatggaagaaactttgacactggtttggttcttctttctatttcatctgtttgttattatttctaaagagtctatttttaagttccttacactcattgtaatgcacatgatgtagataacagaaagagtgggatcaagggttcctatcattgtatctgttgttactggaatcttaggaaaggaagcatgcaatgacaaggctggagaggttttattgttttcttatcgttaagtattgtggatttttgtttctctaagtttttttagcttatgttcgtgttatattacgtttacaggtcagactgcattccacaagtgatgatgaattgttcgatgttgcaaattttgctatactgttgacgattggctacttaccaggaatgaaagtcgacattattcctgtaattcaggccaaaccg

SEQ ID NO: 140726 - DNA, 2021 bp, Arabidopsis thaliana landsberg
gctgctttatcaaatcataaccaagagaacaattgaagttcacaatgtgagagctactggttctccagatttgatctcattcgagaacgatttggagtttaacatcaccgctgtttcggatatgagttgctctaatttacgcggtattgggaacgtggtcatgggtaatcccgggtttagcgagttcaaagttgctgctctttctagtttaggaagctatacttgtaagaatacaacttcaggaccaacagtgaatttcaaatgtaccaaatgtcgtctcaccaacgattacatatatatctcgtggcatttcgttgatcttcctgattcgcctgctgctgctgttggatttcagtttaactttacgtctaagaatggacctaacgagaagcatatgagttttgttagtggcactctgagaaacggaagcattctcgatgaaagtccggttactttccgtggaaccgaagggaatatattgaagtttaatctgtttcctcggatttaccatcatttgcatgatctaaagctaatccaacctctctttcacgagtttatccctggctctgtttaccgagacactactcagcttcaggcatctatgggaaggtcaacagatggcatactcaatacgacattgttcatcaactatctctctgcttatattgttgagatagaccatgaaaatatactcggtcctggtaagtaaatttactttgtccaatcacttcttgtgaatcattccagtatgtgcaagtagagaatactagagtagcttcagttctaacttaagtttctttttccttttctggttgctgtttaacagttagcttccttgccgatcttggtggtttgtattgcatcagtattggcatatttttctacctactagtgcaggtttgaaaccttttcatctcctttacttaatgtttattggtattcatgatctatgaatataagaaagagcattaagcattattaacgggtgtgtactatagtgtttgaaagttttctagtccttcctaagcatatcctgatggcggtaaattggctctttgaatagtgtgagtacaggatcaagaagctgcgaaatgaagatactgttttcaggaagataaggaatcgtcgtaaagctctagatcactgggataaagtaattgttttcccctttctcttttttggtttttcttcttgcaatggcttcttttcttattacaagttgctctttcaataatcctcatttagctgagaagatatgttgcatacacatgggattgcagcatattggtcgatgatgccatcaaaacgacaaaggtatcaggaatgtgtggtttaacgagacctccaacatcttctaatagctcggaacacggggaatcgatcatggcgaacaagaagcctaacttaagtattgagaaggtgagctaactatctgtttttgggttcccctttccttttttttgacccttttgagttgttaattttctctttttatccagaatgtgatttcacaacctgcaagtttagaactgagctcttttgattcggcttcttctctggctcatggagataatttctcaaataaaaagagtataactcatccaatttctcatagtgaagacgtttcaatccctccacctcctccaatgggtatggcttataacttaacatccacattgtacctagtgatttatgattcggtagcagtagctatgtcatatggtttaggttttagaagtagaagtgaagaatagatgtatctcaattgagcttaattggtttataatagtaatatgatctcaaacctgaaacctccaaccactactgtcactattgcagagttcattgaaggatcttctggttcagaagtggacgcaatggatatcaagaataaatttcaacttctttacgactacaatgtattgcttagggaaaaacttttagagactcagtctttgcttaatactttggcacccaaaccaatagcatcatcatcttcaaccgtggaacgcagtgcctag

SEQ ID NO: 140727 - DNA, 1299 bp, Arabidopsis thaliana landsberg
  unsure (1)..(1299): unsure at all n locations
ctagtttgtagcactgcataaacgtctaatctctccttcagcaccgattttcactccgatagcacccatctttatcatggctttagtgaaatccgcagcaaaattagcctttgaactttgattagtttctaagtatgaatcaatgattttcttcatattattgtcttggtataaaacagagtccgatagaatgacacctctgccatttttgatgttttggaagatttggttatcaaacacaaattggctatcccagtccaacggaatcctgacattaacatcaccgccttggggacactttgacctcaggatttgaaaaaattccgggtttatcgtaggatcttgagcatctaaacgtggtatgacaaagaagcaagccgttgtaccaatagtatgtgcacctttaacaaaaataaaattcgagtaagcaagatagtgtttttttttgtcttttcaaaatagtatttaatcaagttgttgagattatgataaataccagcactaagaagtacaagatcttgatctgaaagccctttttctctaaattttgatttcaaagtatttatggaatcttgaacatctggcaagttcttagcatgatcaacatttgcaatcagaccgtctctccgaccggttggaacttcataaaatggtccttttgcctaataagttaatatttaacatcaaaggatcttatttaacccaacacatatacatcgtacgtgtattaaaaaaaaagttctataaagaagtattaaagtgttacctcagcaatagcgtctctagcagcaagagcaacgatgtcagcgcaagacacaacgcccggacaaaaacgttcaagctctgatttggcttcgtctataacatcgaaaccagccacccccgcgttacccgcagcaaacctttcgtcatcgttcccaccatgcttgattagtattgacccatcacaaccctacaacatacaaccaaaccaatttatgtcactagctagttataaaaaaagagattttacttcgtttttntttggcccttgcattggacctcgacaaagcaatcgtggaactggagacggagtaagacagcagccttccctgggtcgttggtcaccgcctgttgaacaacatcacgaacgattgactctgctgatggacatgtttccgagtagaatccaaactgaagttgtgccgctgaataacctaattgatcatgaaaatataacaaaactagaaataatgcaatagtgatcattttgggatcaaacaaacgaattgatatatcttctcgtattctacggctcat

SEQ ID NO: 140728 - DNA, 230 bp, Arabidopsis thaliana landsberg
agcgtgagatgaagaagttgctgattaagatcgatgacgaagatgatttgggtgttcagacgattgatcagttacaggacgctttgtctgcgttgagagaagcgacgatgaggaagatggcgaaatcttcctcgttagagatgctcgagactgtgtcttgtcctgaggagtttcgttgtcctctctctaatgagcttatgagggatcccgtcgttttggcttctggtcag

SEQ ID NO: 140729 - DNA, 1750 bp, Arabidopsis thaliana landsberg
  unsure (1)..(1750): unsure at all n locations
gagggtccgtggtggtaatggctgcaagattggtgatgaaagtggcagcttgtgagttttttttggtgtctttatatccttcctctgctttttagtacaagagagacagaaacagagcagctctgttttagactttctgaaactgtttttgtctgtgatgattaattaaaaaggatgttgatgtgggaagatgggttttgtggtggaggaagaagtgaagatctttgtctggaaacagacattgaaggtcatgaagaagatcttgtcagaaaagctttcagcaagatgtccattcagttatataattatggagaagggtgggtactgggtaggtgttatatataagtaattatggaccaaaagataattagattatataaacacaccctaatcacttaacttatgattaaagatataattatttacaacacangttattatgatcttgtgatgttcatgtgatatatctgcagattgatgggtaaagttgcttctgataaatgtcacaagtgggttttcaaagaaccatctgaatctgaaccaaatcttgctaattactggcaaagttcttttgatgctgtacgttttcaatcttaaattttattttttggttagatgtagaaatttatgatcctgatggctaccttacacttaaaagtcaaaaatttattgcagcttcctgcagaatggaccgaccaattcgaatcaggcattcaggtaaatataatcaaacttcttttggttatatactggtcttgatcttaccttaacagtgttttatttgaccagacaattgctgtgattcaagctggacatggtctgttacagctaggttcttgcaagattgtgagttctttctcttacggtttcatattatcgctttttcgactcggttatgcggtgtgtgtgtgatcagtcgttgttttgtttcttcagattccagaagatcttcattttgtgctaaggatgaggcaaatgtttgaatcaattggttacagatcaggtttttacctctcacagctcttctcttcaaaccgaaccgcgactccatcttcttccacggttccaaaccagatacctcagtctcaaggttttaactggggatcacactcacctttgttaccttcccctagctttcagaaccaactacctgcttcagctagattcggtttccttcaagataacaatgttcctcctcagatgcttcctccaatggaagagcatgaagacgatatcaaatggcctaatggtttgtcgttgttcaatgcgttgactggacgtgcagatgaagctagtaggcttttgtttaaccaggagcagaacccgatgaatgtcgaaaaccagagcgagttcttgaaccttgaaggtcatcatcctaacaagtttagaagaagctatacattgccagctcgaatggattcttcgtcatcatcaacctcgcttgatcagcaacaaccactggagtttaggaacaataactctggaagcaactcgggtttgttccctgacgttatggagacgttcttgaggtgattgacatgttcaagattcaggtttaaggacagattaaactaaaagctctcgatgctagttattagcttatgcttgttataaatacatgaaactctctgttcgttgtttcttccttcttgttgttgttgttgttgttgttgttattgtaccatattgtctgattgtttctccttttatgtcaacactcttttaacatttgaagatactttaaaaacac

SEQ ID NO: 140730 - DNA, 1461 bp, Arabidopsis thaliana landsberg
  unsure (1)..(1461): unsure at all n locations
gtcaattcgatgttttcgcttagggtggccaatgcgggctgatgctgatttcttttgtcagacagctgaagaacttcgacttgagagaagtgaggtatgagtaatagagacaaaataatgggccgtataagaagttttctgcttatgttagcaaatcttgcattaattagtcttatggattataaacttgtaatcttatcatgttcattataaatctcgctgtatcaggttagactgatcctcctgtcttatagagttattttaacctgtacattttctttttatgtcatttgcctcaagatttctgtatctttaatttcttgattcnnnnnnnnnnnnnnnnnnnnnaaatcaaacagtggagatcggtggatgggcaaagtcaattttgtggagatacgctcgttctggcatatatttagaagttttgatagaatgtggagcttttatatcctgtgtttgcaggtaccaatatcttttagttagtacatttgtctttcaaatttgtatttcctttttgttatttaatgtattattcttctttaggcaatgattgttattgcatggaatggatccggagagttaagcgccatttttcagggtgatgtcttcctaaaggttttgagcgtcttcattacagcagctatactaaagcttgcacaaggtaatgatgcatagtatagctgtttagcatcctccgttatgagtgggcaatagttgatttagtgtcctcttgaatatgatgttttcctaccaattattggtttgacctttgcgatcttctggtttcatgacaattttccttacattttctgactgtttgtcataatatttcagctgtccttgacatagccctcagctggaaggcaagacatagtatgtcactctatgtgaaactcagatacgtcatgaaggtaggtgcggctgcagtatgggttgtagtcatggcagttacttatgcgtacagctggaaaaacgcctccggtttttctcagaccataaagaattggtttgggggacacagccataattcaccttctcttttcatagtggcaattcttatctacttatccccgaacatgctttctgcgttgctgtttttgtttccattcattcggcgctatcttgaaaggtctgactataagataatgatgctgatgatgtggtggtctcaggtagtttattcatgtgcttatatcttgaaaaatgctagtccatgaatgttaaagtgaaaagatggtcttatcatggttctttgtgatacagcctcgtctgtatataggaaggggtatgcatgagagcgctttgtcacttttcaagtaaggaccctaaaacttataggttcgaatgtaggttgtttttttcagcactgcttaacgatgatgcacaaaatgactactaggtacacaatgttttggatcgttctgctgatttcaaagctggcattcagttattacgctg

SEQ ID NO: 140731 - DNA, 1062 bp, Arabidopsis thaliana landsberg
cgattcatcgactgagagagaagaagaattgagaaatgatgaagcgtgtgatcccaacgttcaaccgcatcttggtgcagagagtcatccagcccgctaaaaccgaaagcggcattctcctacctgagaaatccttcaaggtaaaagagctttgatttcacgatttgattcttctgattttcgcctcttagatctgaaaaatgaacatatttttgggtgattgcagctgaactcaggcaaggtgatagctgttggacctggatcaagggataaggacgggaaattgattccggtctctgtgaaggaaggcgacactgttcttcttccagagtacggtggtacacaggtcaagctcggcgagaacgagtaagttaaacccgcttctttcttattattgccctaatattctgataaagttctgatttgatctaattgaacctttatgtttagctaatcatgttcaggaatcattatccattaattagattaatggatggaactaagggaattacttgtaagactgtgaagatattgaaaattttgtaacagaggatttaaaaacattttgatcaatgtttaataatgccaatttgaacaccagatttacatattaattggtgggttgattttagaaacgaataagaatttacaaatgaagaagaatttgactcaaagtgagtaacttttgtgtttgtgtgatggacgcaggtaccatctcttccgggacgaggatgttttgggaactttgcacgaggattgaaaaggctaagcttgccaacttaaccacgagggttcatgttggtgtttgtgttatgaggagaagtcatttataaattagtttatcttgaagatgtggttggactttgttgtcgtttatcattgaatctacctttatgaacctgtctttgaatttttacaaatgggcatcaatcacatggataacccaagtgttgcatcttctcgttttgtgcttttccgtaatctgtggatgcttttcgtttacgtttaggcagcaacttcaatagccaatgtagacgatagcgtagttgactttgcttattc

SEQ ID NO: 140732 - DNA, 1852 bp, Arabidopsis thaliana landsberg
atggtgtgtggactctttgggtttcaggctcaggttcatagacatgttcataacttcagggaggtacaacaatgtaccctcctctccataaagactggtggctgtagtgaagactgttcatattgtcctcagtcttcgagatatagcactggagttaaggcacaaacactcatgtctaaggacgctgtcattgatgctgctaagaaggtttgcacttttcttgtgaatgtttatttttgctgaatgtagaatccttagcagaatgtatcaagaagaaggggacatgcattactatgtaccaaaacgttgtttttatcaatccgagctctatctctatccaaaagactctaattgtttaatgaagcattttgacgatgtaatgagctcttctgatttgaattaacaaatttgatgtgttgttaggcaaaagaagctgggagcacacgtttttgcatgggtgctgcttggcgagatacaattggacggaaaaccaacttcagccagattcttgaatacatcaaagaaataaggtaccttactattatgctttttaagttgaactttgaatttccttgtttatactacattatatgatccctttttcagctgcttctgaatctaagctaacttaaaagataacccaccgaaccgatcattaatggttctagaatgaacatttttgcatgtcaaactaaagtgaaaatttcaaagtgtacttgatgtatccgtgagcagaatgaatatgatgttgatgatggtgtctggctgaatgtgtttactaactttctgggctctcactttaaaacagaggcatggggatggaagtttgctgcaccttaggcatgattgagaaacaacaagcactagagctaaagaaggctggcctcactgcttataaccacaatcttgatacttcaagagagtactacccaaacgtcatcactactagaagttatgacgatcgccttgaaactcttagccatgttcgtgatgctggaatcaacgtttgttcaggtaactttgatatgaaaatagtattcttgtatgcctcaattctatagaactaaaggattgaaacctgtcttcagcttggtcattagactcacagttttgtaatattcgttgattttgataaatccatagatacgacatgttctcaagtgttttcttttaccgataaacaggaggaatcatagggcttggtgaggcagaggaagacagaataggtttattacacacgctggcaacacttccttctcaccctgagagtgttcccattaatgctctacttgcagtgaaaggcactcctcttgaagaccagaaggtatatctccacaatctaaaatcacaaattgcaagtcatagcagctacttagtaggaaatggctttgagaaccgtttgtgtttttgcagccagttgagatatgggagatgatcaggatgattggaaccgcacgtattgtaatgccaaaagcgatggtgagactgtctgctggtagagtccggttctcaatgtccgaacaagctctctgtttccttgctggtgcaaactctatcttcaccggagagaagcttttaaccacaccaaacaatgattttgacgctgaccagctcatgttcaagacattaggcctcattcctaaaccgccaagtttctctgaagatgattctgaatcagaaaactgcgagaaagttgcttccgcttctcactaatatcattatccactttttttttttgtttggagtcgggacactatagagcagtcccttttactatgtagcatggtttgacgattttgtgatatcatttttcgttaatcgttattcgaagatgtctagatttctcatctga

SEQ ID NO: 140733 - DNA, 1896 bp, Arabidopsis thaliana landsberg
atgcaaacaataataatttctccacttgtttctcatcgtctctgtcttgctcgtgcttgttccttgcaaccgtcttctcaacaaccaccacgtgctcctccttcgatccgcctctcaaaccaccgttcaaccacctcactccgcctcttctcttccgccggtagaccccaccaccttctatttcccttttaaactttttgtttccttttgaaaaagatattttgcttgcgtggggcaattccgtcaaagcgttaccattcgggataaattggtcattttttcatcactgtgtctctctattgagtctttagggtctctctgtgtttgcaaatctgacgccgagtattttgctaaagcagcagccagtcgggacagtgaaatggcgactgaagatgtgcaagatcccagaatcgctaagattgcctcttccattagagtcatccccgacttccctaaaccaggtctccattttttccatttataccgattaatatcgtctctagtcttgatctgcgttgggatcttaaggttttaatttggatacttggcaggaatcatgtttcaggacataacgacgcttcttctcgacactgaggcctttaaggatactattgctttgtttgttgatagatacaaagataaaggcatatctgttgttgcaggtaacaactcgtatggttctgtttggtacttcaatcgattaacagcttgtggatttagtttcttttggcctttttagatactgagtgctttagcttaaactgaaaagttgaaatgaattggtggatgatttttggttctgcctaaattgatgttgtggtaaatgcaggtgttgaagctagaggtttcatttttggccctcctattgcgttggctattggtgccaaatttgttcccatgaggaagcccaagaagctacctggtacatttttatttcttcctctagttgcttgtgattttgacattaagttacatgaaaggtctcaattaggaagttgttagtttaaatggcttcttgctccaagtctacactttatcattatctcgaacattagcaaggtgacttttatcttgcagtgtctttgatcaatatgatgctactcatttgctagatcatttttctttgtggtaacttgcagtaacttaagtggttgttattttttctgttacatatcaatggacttagttgtgtatcttgaccagttacaagaaatgtattaagccatttggaaacttatgagcagtgtcaaataattgtcgcattccttgtttatccatggacgttaatttctaaactgcctctgcatttggttcctttaacagggaaggttatttcggaggagtattcgttggagtatggaacagatacgattgagatgcacgtaggtgcagtagagcctggtgagcgtgctattattattgatgacctcattgccacgggtgggactctcgctgctgcaatccgactacttggtaagtccaagatttgataatgcagcatatgcagttcagttaaacttgactatttctcactcccacaattggttggttttgcagaacgagtaggagtgaagattgttgaatgtgcttgcgtaattgagttaccagagcttaaggtttagcttatttatctctgttttactatctgcttccaatctcttacactgatttgcttataaagagatatgtgggctgcaatggttttgtagggaaaggagaaactaggagagacgtcgctatttgttcttgtaaagtcggctgcttaacaagaaactggaagagaaggttattggatcgagtgttgatgctatttttcatgtatggtgagacattttgcgtgggatttgatccttgaatgtttcaacttatcataattggttcagactagaaaagggc

SEQ ID NO: 140734 - DNA, 342 bp, Arabidopsis thaliana landsberg
atgacgttgatcagtcagcacaattagaagccatggccaaggaaaataagtggtttggtcctggaagttggattatcatcaccacgcaagatcgaagacttttgaaagcacatggaatcaaagatgtgtacaaggtggatttaccaccacctgatgatgcttttcaaatcttctgcatgtatgcttttggtaaaacctctccaaaacatggtttcgaggagcttgcatgggaagctacatacctttctggtatacacccttcgggaataaaaagtatgggctcttatttccggaaaatgtcaaaaccggagtgggtaaacgcgttacaaaggttaaggacta

SEQ ID NO: 140735 - DNA, 3106 bp, Arabidopsis thaliana landsberg
gttctggagcctcattccaggcgtgtggatgaaggttttagtgaagcacgtgttcttgcggaaatcactcttttgcctgacaagatccgtgttgcgtcagggagacgtgctgtggccatggccacaggtgttattgataggtactataaaaatggaactccccagaagcaggttgtggtcgttgttacctcaggttggtctgtgctctgctttgatcacaacctgaaaaagctgtgggaaacgaatctgcaggtttttatcttcttcgttctttgtctaacgttctgcataaaagtttgtcttggttcagtagtattgattctccttttgcttacctttgttggtggaatgacaggaggatttcccacataatgcacaccatagagagatagcaatttcgataagcaattacacattgaagcatggtgatacgggtttggttattgttggtggacggatggagatgcagccatatgtatgtaggatgaaaaattcctctgttgatttcctatgtatcttccatatgttaccaatagattattcttttcgttttagaatcacatggacccatttgaggaacttggcatgacagcacaaaatgctgatcaacacagaagaagtgctactgagaatcaggtacgactatatgataatttccttggactgtttcgtagctgtgtatatttatagtttccttatacattttctctagaactgaacaattctgaagaaagagctattcgtttgtagttatacatgttccaatgtgcataagaactttgtttggacagtttagaagaattttaagcttcctttcaggcctctgaagattctggagccataaacttgcgtcacttttctgtctatgcatttgctggcaagactggccttcttcgatggagtaaaaagactgatgtcagttatttattcttttctgctcacttctttatctacatattccttaactacattcgtacctgcaacaaatttggtggtcagattgatagatttttttcgttcttctcatctaggatgttgaagctcacacctcagatgcatcacaattaattccacaacacaattacaagcttgatgtgcatgctctaaatagccgtcacccaggagaggtaaaattaattcgttctccattgattattgagcgaaatagttaacctttccttcgttctttcggaagagatttctattgcactatcataatttgaaagctttgctggactgaagtttgagtgcagggaatttagagaatcaattcttagtgtcatgccccatcgctgggtaagtcttatgcctcctactacatgcttcgttagtgtaatatattagaaaaattgtttcaaagtacactgttgtctttgcatcaggaccgacgtgaagatacattattgaagcttgctcatttcaggcgacacaagaggaaaacattgaagaagcaggctggtagtaagtctacagcttatccgtttcacaaacctgaggaacacacacccgctggaaaggacttgtcaagaaagattccaaaattgattggaaaggctgcacgctatgctggctcggcaaaacccaagaaggtgaagctcttataaaacgtgaactacccgcatcaaaaataccaatatttgtttatgatagcaaagcaacatgttgatgcagggtatgcaatacattccgacgataactaattacacgaagctttggtgggttcctaatgttgttgtggctcatcaaaaggaaggaattgaagctattcatttgcctactggtcgaacactttgcaaggttggtcctagtggctgttccttcagatcatgaacaaggttactatttcacgtacctattacttacttagtcagcgtttataaattcttcctgttcgcagctttctctacttgaaggtggacttcacgccgacataaacggagatggtgttctcgatcatgtccaggtacacacatcaaacactactcccgcttttggttcattagccttctcatggatcttcaatttttacgaccataaatattctctatccaccttagactgtcggaggcaatgttggagagagaactgtagtgagcgggtcaatggaagtgttgaagccttgctgggcagtggcaacctcaggcgttcccatccgggaacagctctttaacgtctcgatctgccatcactccgcttttaacttcttgcactatggaggagattactcacgacacttcgcccaggcaagagacacctctactctggagatcgcaactcccattctcatccccagagatgatggacacaaacaccgcaaaggcagtcacggagatgtaatcttcttgacaaaccgtggagaggtacttttttcctttctatatatgccgatacaatctcttaatttcttcaactttgaatttcgtttaataatagctcatcactgctccgtatcaggtgacatcatacacgcctgatgtgcacggccacgacgcagtctggcaatggcagcttcagacagaagccacatggtcgaatctcccgtctccatcgggtttaactgaatcagggacggtggtcccaaccctgaaaccattctcgttgcgcattcatgataaccagcctatgatcctcgccgggggagatcaagcagcggtcatcatctctccgggaggaagcatattggcttccatcgaattaccgtctcaaccgactcatgcacttatcactgatgacttctcgaacgatggtctaacggatgtgattgtgatgacctcaaatggggtttacgggtttgttcaaaccagacagccaggggctctgttcttcagttcgttggtgggttgtctcttagtagttatggcagttattttcgttactcagcacttaaactccattcaaggtaagcctcgaccatcatctagcttttaatagaaatctcgtagagttttcttcctctctacggaagttaaaccggcaggtccgctttagcagcttcacccacatcggttttggtaaaccggaaatattactgatataccagtgtagattcagtgccttatttcctggtttcagctgtataactttatactttgtagaattcaagtaa

SEQ ID NO: 140736 - DNA, 2655 bp, Arabidopsis thaliana landsberg
atggtgagtaccaaccattcagctcactcgactctccggcaagacttacgcttctctccggtaaggaggtttatctacactgatccgtcgttgagagtgtcctaatacttcgaaggagaaagatgacgcttaaactcaaagaggctcgaagcctattagttatataattgggctagcccattaaggtccatcagcccactatccgaaaaataatatatttaaaccgtggaatccaaggagagacacagtggcaaaaagggtaattatagggacatttcttggggtgttgtccaagctgcttttatataaggaagggatattgttctctcgcttctcgaaagatccattcaccaactctttataccagcctctgtaacgttcgatcatcttgtatttcatttcaaccactcatgtaagtatattctttcttcagattccgattgttttcttcgattaagttttgagctagattctctagatctgtttcaccgatttggttgatttctccgtcaatctgaactcgcggtgtgcatcttgttgtttgcagtgtttttagtttgttttacgaagaatcaactatggcgacgaagagaagcgttggaactttgaaggaagcggatctgaagggaaagagtgtgttcgtgagggttgatctcaacgttcctttggatgataactctaacatcaccgatgacaccaggattcgtgccgctgttcccaccatcaagtacttgatgggtaatggatctagggttgttctctgcagtcacttggtatgatatcttatctcagttctcacttcactacttgcttatctgttgtaattttggtgtgggaattttgatctgatctgtttatccggagagccatgcgtataagaagagtctctttgcatgttaggatgtagatatagtattcttgtttttcaatatgttcattgactctatcggttgattttctggtgttgtatgggtaattgttttagtaagtttacttggatatgtttatactcaagttcaattggatgatgctgttgaattaatggatgtatctgatctcaatttatgtttcaggtccgcccaaaaggtgttactcctaagtacagcttaaagcctcttgtgcccagattgtctgaacttcttggtgttgaggtttgttcctcttcctcttctagacttgcaaggtttctgaacattagcttttaaaagaacactgttctcactctgtttgtgttaataggttgtaatggcaaatgactctattggtgaggaagtccagaagttggttgcaggactacctgaaggtggtgttttgctcttggagaatgtgaggttctacgccgaggaagagaagaatgatcctgaatttgcaaagaagcttgctgctcttgccgatgtttacgttaatgatgccttcggaactgctcacagagctcatgcttccactgagggagttgccaaattcttgaagccttcagttgctggtttcctcatgcagaaggtatttaaaatttgcagcataaagagtatcttcttagatgagtctctttattttactgatcagactattacttgttttattgtgtcaggaacttgattaccttgtcggagctgtggcaaaccccaagaagccttttgctgccattgttggaggctcaaaggtttcaacaaagattggtgtcattgagtctctcttgaacacagttgacatcctcctgctcggtggaggtatgatttttactttctacaaggcacaaggactctcagtcggatcttcccttgtggaggaggacaagcttgacttggcaaagtcactcatggagaaagcaaaggccaaaggtgtctctctcttgctcccaaccgatgtggttattgctgacaagtttgctcccgatgctaacagcaaggtaactatcacagtcattgtggttgactctcaatgggccatgtatgaaagtaaaacatttaagcgtctggtctggtctctttaaagctgacacatatgactcttgcagatagtgccagccactgccatccctgatggctggatgggtctagatattggtccagactccatcaagacattcagcgaagctctggacacaaccaaaaccatcatctggaatggtcccatgggtgtgtttgaattcgataagtttgctgctggaactgaggtatgagcaactaaacacatataaacacaagttttagtctcacttttgtctaaatccatttgtcttcaacatgtttgttaatcatctgtcttcaacatgtttgttaatcggagaaacccaacttaactaacccaatctcttgtcttgtttcaccatcaggccgtagcaaagcagcttgcagaactaagcggaaagggagtaaccacaatcattggaggaggtgactctgttgctgccgtcgagaaggttggtttggcagacaagatgagccacatctctaccggaggcggtgctagtttggagcttcttgagggtaagccacttccaggagtcctcgctctcgacgaagcttgaaaatcctcacgttggatttcatcgctattttgtgttgttatatgtataacaagtcgtctggttatcttgtgaccagacgagcaagccattatttatcagcttgagattttcgtctacggctctcttgt

SEQ ID NO: 140737 - DNA, 1813 bp, Arabidopsis thaliana landsberg
cggaacggaaagtttgtttgtgtggaaatcagcggtggagaaagggttggtccggtgaagggtattttcgtcagagactcctctttttcgttgtactttcaattcagcctcatcctcaaccaaaacgtcgtcgtcttcttcttcttttgagaagtcaagcaagtcgtcgacggagaaatcatcgccattttgagcgccgccggttagggttttgtctttcatgttactgttcttcaacgtcaattcaacactctccattatttcctatcaaaccccaccaacacaaattaggttttcttcttttcttttggcttcctcagaattatcaaaaactctccaaaaattatctttaaaaaaaaaactccccccgaaaaaaaaaacgttcctttatttttccaaattcaaacagaaaaacccaaaagaaaaatcacgaaaacccagaaccacaccttggtgaaacgaaccatgatttgactaagccacagataaaaattcatcttttttcaacaaatgtgacgagtaagtacctttcaaaaaaaactaaaatgggaattacctgagatgagaagagccagagagtgaagagaggagatatgtcggtgaatgagaagaagaagaagagtggtgagaatttagaagaagaggtgagtttggtaaagcattgaatatgatagtgactccagaccaaagccctcttctcctaaaactaaaaaagttgtgagtttctcttctttattctttctcaatctcttattttcccaagaaccaaaaaaaaaagataaaaattgaaatattttgctttggtgggaactatttttttttacctttttactcaaccggcaaaaattcataaaaatgtctactttttgtaaattcaaagcgtacatacgcgctactgtgaaactagagatgactgaaaaaagaacggtctcgttttcgttacccaatcacatatatatttgggctgtattgggctatgttgggctgggctttctgaaattttacgatttgggtatctcattaacaatggcttttctcctcccgtcttcttcaattcaaaactgtttgtgatgattactcagcaatatgcgattaaaagcttcaaatttgcagaaacccatcttcttcagctcctactctgcccatgatgtcagattctcttctttcttaacctctcttttgaattcatatgtgggcttaagattgttggtttcatttcatgtctactttattccttttgtaatttgacttttcgctacctgtcaatagcttatggtgaatttggcttgtggtatcgctaaagcatcataatctcttcttcattactgctatgtttctacttgttggaacaaaatttcatttattggtgtgccttacttttcccagtgaaatgattcatagccttacaagagaatatcataaccatgttaaaaaaagcaatatgaagtaaggaaaacaaaaatgttctaattagtctatatagtttaagaagactaaagctatttcttatactgacaaattcttttggggattatagatatgagtagtgtgttgtattataatgatgcttctgctactttcaaatgcagattctcagagcgtctttcattgagaagtttctggtctccagaatcctttttgtgcacttaagattccttcttggtgtttggagaaagttaagtgaacatcccagtgcagtgacttcaacatgttctcaacttctcttatcacatttgattcgtcacgaactattagtttacctcctggtcttactattctatccacttctgccattactggaacaagattgcac

SEQ ID NO: 140738 - DNA, 555 bp, Arabidopsis thaliana landsberg
gatgaaaaaatactatgacgaagatgagtgggagaggcaagataaactttggacagctgcagagaagaagcatccatggaaagatgcccctcctaaggttaaggtagtaataacaaaatcagctaacaaaatctcaagaacattttaaggaatttgtagaattcaaaataagattgacaaaacaccttttttttgtttgattgaaggtgacaacaaaaaagggtatatgccatatgcacatagaattgacattggggttgcctcctgatggagtcttcgaacttttcactaatccacataacggaccaaacaccgaaccacttctggttttatttcttatcattgaatgattcaaatgtggtattaattgtagcaatacttgaaagtgtactctttttgttaattatgaagaaaagcaaatcaagaaaggttttgaaggacgatggaccgaggcagatcgcgaaggtgaagaaagctgtggcctggaacttcagtgggaggtctattgctatccccataagtctaattgtcgatgaaaacagaagagatcttaca

SEQ ID NO: 140739 - DNA, 598 bp, Arabidopsis thaliana landsberg
cttttgataagttgcatactggtgttggcatgatctttcttccacaagatgatacctttatgcaagaagccaagcaaggtgactccttaatcatagatggcactagcaatacggattcagtatgttgctaacgaagtttgttccctttttgtagttattgaaaacatatttgagaaagaaggattacaagttcttgggtggagggaagttcctgttaatgttcctatagttggtaaaaatgctagggagacaatgcctaacattcaacaagtgtttgtgaaaatcgcaaaggaagatagtactgatgatattgaaagggaactttacatctgccggaaactaatcgaaagggccgtagctactgagagttggggaacagagctttacttctgttcactgtccaatcaaaccatagtgtacaagggcatgcttcgatctgaagctcttggattgttttatctagatcttcagaatgagctttatgagtctccttttgctatttatcatcgaaggtacagtacaaacactagtcctaggtggcctcttgctcaaccaatgaggtttcttggacataacggggagatcaatacccttcagg

SEQ ID NO: 140740 - DNA, 1254 bp, Arabidopsis thaliana landsberg
ttttcccttctctctttctatttctccctcatacctttgtttattctgatgaagttgtgagcactgaaagaaaagaagagaggagaagagagatatgcacaagaagaattaaacttagggacacaaaacaacatgacttggtgcaatgaccgtagcgatgttcagaccgttgaaagaatcattccctccccgggggcggctgagtcccccgtagcctcacttccggtctcttgtcacaaaacttgcccttcttgtggccataacttcaagtttcacgaacaggttcttgtttctctttctacctatatcaagtttaaactttagatgatattggatatttgaatataatatattaatatgtaatgtaggctgggatccatgacttgccgggacttcctgctggagtaaaatttgatccgacggatcaagaggtcttggagcatcttgaaggcaaggtaagagatgacgcaaaaaagcttcatcctctcattgatgagtttatccgtaccatcgatggtgaaaacggcatttgttatacccatcctgaaaaattgccaggtgattctatgttgcatgttcaatcatcaattaatcggttacaaattgagactatagttacaaattttccgtcttcaaatgatcttctagttatgcttattgaaaactacaaaaatacgttgaaaaaacaatttaatcatattttaatacgatggaaattgtcatatagaaaaagaaaatgtagctaatccaatttcttaattaaattaagtttgatgaatgctaattagtcgttgaatacatatataggagtgaacaaggacgggacggtgcgtcatttcttccaccgaccgtcgaaggcatacacgacgggaacaagaaagcgacgtaaagtccacactgattctgacgtcggtggagagacacggtggcacaagacaggaaaaacacggccagttcttgctggaggaagagtgagaggctacaagaaaatcctagtgctctacacaaactacggcaaacaaaaaaaacccgagaagactaattgggtaatgcatcaatatcatcttggcactagcgaggaagagaaagaaggtgagctcgtcgtctccaaagtcttttaccagactcaaccacgtcaatgcggtggctccgttgctgctgcagccaccgctaaggaccgaccttacctccacggcctcggtggaggtggtgaacaccaccttcattaccatcttcatcataacaacggtaacg

SEQ ID NO: 140741 - DNA, 1309 bp, Arabidopsis thaliana landsberg
atttcatgctagcacaaccgatactttggactatgtcgtgagtcaagcgaatctcacgtcagaaaacctcaggaatgtgtcagattatcttaatgcagctaagaaggttgatgtgcaatccagcattttgccacaagatgttctctcgagtatcgacaacatacagggaaagataaactcgtccgccacaactctttctgtgaaaacaatggagaaccaagacaagatacaaaatgtcttggacatcatgtaaatattctgtaccatatctttatctttcatctgtttttcacctttttgcttatgattttttgtctctaattgttgtaggagacttgctctcgtcatcatcgctgctgtgatgcttttccttgcgtttatcggatttcgtaagtcttcatgttatatgcattagcaaattctttaacttgcagaacttaacttgcattattctcatacagttctctctatttttggactgcaatgccttgtatatacgtaagtgaagtctcattttcttatgttctgttttacattggttccactatatgctgaaaaggttgttgtgattatcaatggacaggttggtgatccttggttggattctcgtcacggttaccttcgtcttatgtggtggatttttacttctacacaagtgagttctcttctctcactaccattatttgtctactcaagaattgatagctttcttagaagagataaatggcttctgctttgtcagcgttgtagtggatacgtgtgttgcgatggaccaatgggtccaaaacccaacagctcacacggctctagacgatattctaccgtgtgttgataatgcaaccgcgagagaaacattgactcggactaagcttgtaacataccagttggtcaatcttcttgacaatgccattagcaacatgaccaacaggaatttcccgcctcaattccggcctctttattacaaccagtcaggtccactaatgcctctactctgtaaccccttcaacgctgatctctctgaccgccaatgccagcctggtcaggtccatctgaataatgcaaccgaggtaatccgaggattccatcataatatgatatataaattcccaagtcatatcagtctgtcttatgatttgtttttatgcaggtgtggaagaacttcacttgccaaattgtaacaccgggaacatgtagtacaccgggacggttgacaccaaagctttacagccagatggctgcagcggttaatgtaagctatggtttgaacaagtacggaccgttcttggcagacctacaagggtgtgacttc

SEQ ID NO: 140742 - DNA, 1486 bp, Arabidopsis thaliana landsberg
aacaaacgtactcaaatggctctttcttcaccttcaagaatcctctgttttgctcttgccttatccgctgcttctctctccctctctttcgcttcttcccacgattactccatcgttggatactcccccgaggatttggaatctcatgacaaactcatagaactcttcgaaaactggatctcaaattttgagaaagcttatgaaaccgttgaagagaagtttcttaggttcgaagttttcaaggataatctaaagcacatcgatgagactaacaagaaagggaaaagctactggctcgggctcaacgagtttgcggatttgagccatgaggagttcaagaaaatgtatttagggctcaagactgatatagtgagacgcgatgaagaaagatcttacgcagagttcgcttacagggacgtcgaagctgttcctaagtctgttgactggagaaagaaaggagctgtggcggaagttaagaaccagggctcttgtggtaatatcaaatcttggtctctgatctgttaatggaagttttgactcttaactaaaccatttaactttaaaaaacttgtttcgcaagaagttgttgggcgttttcgacagtagcagctgtcgaaggtataaacaagattgtgacaggaaacttgacaacattgtcagaacaagaactcatagactgtgacacgacctacaacaatggctgcaacggtggtctcatggactatgcctttgagtacattgttaagaacggaggtctacgcaaggaagaagattatccttactctatggaagaaggaacttgcgagatgcaaaaggtcccattctaatatcaactcttggtctctgatgtgttaatgaaaggtggtcccattctaattatctctgttttgaaaacaggatgaatctgaaacagtaaccattaatggacaccaagacgtacctactaatgatgagaagagtctcttgaaggcattggctcatcagcctctcagtgtcgccattgatgcatctggtagagagttccagttctatagcggcgtaagtacattataaacctataaataaagaaaatggttgttagttaattgctcttgttgatgttgaatcattttgtatttggtatatgaagggcgtgtttgatgggcggtgcggggttgatcttgaccacggtgtggctgcggttgggtatggatcaagcaagggttcagattacatcattgtgaagaattcttggggaccaaaatggggagaaaaaggttacatcaggctgaagaggaacactgggaaaccagagggtctctgtggaatcaacaagatggcttctttccccaccaaaactaagtgatcatcagatcattctctcttatctgcatttgatcagcatcttacagtgtcttcgttttttctcttttgatttatcaacggaagtcttgtaacaactatgtgcaataatacctatatataagaagcagagaattgacaaatt

SEQ ID NO: 140743 - DNA, 2283 bp, Arabidopsis thaliana landsberg
cgcgttacagaatttagacaaaaaaataaatatggagctcgagacctcagtttatcgaccaaacgtcgccgtttatgattctccggatggtgtggaggttcgaggacggtacgaccaaatcttcgccaagattttgacgagagaagctcttagctttgtggctgagttacagagagagtttcgtggccatgtgaagtatgccatggagtgccggagagaggcaagacggcgttataactccggtgccgttcctgggtttgatccttccactaagttcatcagagacggtgattggagctgtgcctccgtccctcctgccgttgctgaccggagagttgagatcaccggtccggtcgagaggaagatgatcatcaacgctcttaactccggagctaaagtctttatggtccattttctttcactctctctttatacaacacattagttggtttggattggatttgaccgacattggtgaaacttttgaataatactgtaacaaacttttaattggaccgcgttcaatttggtatcagtttaaatttggttttgttatatttatgtctgaatttactattcagaggaattgaccaaatttagttggtctggcaggctagttaatatcaaatttgtttggtttggtgtatttcgatccggttctgtttttatctatgttcgatacaagtcgatttggtttggtttggtatgttctgctgtatataatatccggtttaaattaaccaaattaagtaaattttgtgttggggtttgaacaggctgatttcgaggacgctttgtctccaagctgggagaatctgatgagagggcatgtgaacctgaaagatgcagtggatggatccattacgttccacgacaagtcaaggaacagagtttacaagctcaacgaccaaaccgctaagctttttgtccggccaagaggttggcatctcccggaggctcacatcctcatcgacggtgaacccgccactggatgtcttgtcgattttggcctttacttcttccacaactacgccaaatttagacagactcaaggttccggtttcggtccattcttctatctccccaaaatggaacattctaggtaccttcctggttcggtcatcaaattgatgtttttcggtctagggttaattaggttacttggtttcttgtcagggaagcaaagatatggaacagtgtttttgagcgtgctgagaagatggctgggatagagagaggaagcattagagcaactgtgcttatcgagaccctcccggctgtcttccagatgaatgagatactctatgaactacgtgatcactcagtcggtttaaactgtggaagatgggattatatcttcagctatgtcaaaaccttccaagctcaccctgaccggctcttaccagaccgtgtcctagttggcatgggccagcatttcatgagaagttactctgatcttctcatccgtacttgtcataagcgcggtgtccacgccatgggtggcatggttagtcccctcttaacactagttcactatatgtctctttcaaactacatgaatgctctgtgaaaacattataaataaagttgaaaatgttttgatttgttcggtggtatgatgatcaggcggctcagattccgataagagatgacccaaaagcgaatgagatggcattggatctagtgaggaaagacaagctgagagaggtaagagcagggcatgatggaacatgggcggctcatccaggactcatcccaatctgcatggaagcattcactggtcacatgggaaaaagtccaaaccaaatcaaatcagtgaagcgcgaggacgcagccgcaataacagaggaagatctgcttcaaataccgcgaggagtgcgtacactcgagggtttaaggctgaacacacgtgtaggaattcaatacttagccgcatggttaacaggatcaggatctgtcccactctataacctaatggaagatgctgctacggctgagataagccgtgtccagaattggcaatggattaggtatggagtggaacttgatggagacgggcttggagttcgagtgagtaaagagttgtttgggagagttgtcgaagaagagatggaaagaattgagaaagaagttgggaaagacaagtttaagaatggaatgtataaggaagcttgcaagatgtttacaaagcagtgtactgcacctgagcttgatgattttcttacacttgctgtttataatcacattgtagctcactaccctatcaatgtctcaaggctctga

SEQ ID NO: 140744 - DNA, 689 bp, Arabidopsis thaliana landsberg
gctggtagaggtgaatttcacgaaaacccatccacgtgcatatgcgaagatacagaggctaaggcaaaggcgcaattagaatctagaaaacttggaaagaaaaacaaatccactaataaagacgcagcagtaactgtaaccaatgatgatcaaaccgaagaggatgacccagattggtcggagccagactatgaggaagaacagagtgatcttcaggacagaggattatacaacgggacaagtttagattacgatgatccatctacctctgatgagcctgagcttgaagcaatgctatcagattagttagatacgcatcagtgaccttcacatcactacactgaatctgtcctctgcttgggcacttcacagtgagttttccaaccttggtgctaagccttgttgtcaccattttgcatgtaatgtctcctgtacatagaaccacgcgatagagcattgttttgtttatcaggatctgaggacagatcaatttttttcagtcatattttagtactcggaattgtggctttaccagagaaagtagctatagaaaaagggaaaacaagtaggcatgtgtagcattatgacaccggtgattacttgatcccgatattttctttacaataaactgaattatagcagcaggttcattgactttgtaccaaagtattttcacgagggttggtttt

SEQ ID NO: 140745 - DNA, 674 bp, Arabidopsis thaliana landsberg
gatgatgcaaaaaggcaaaagcattgcatcttaaagccaatgaaatggttaagaagctagagagtaaacagatttcccctcttgatgcttctaacttcatcattcagttcttcaactgtaagttcctaatttctacttgtataagattctatagattgaagtttgattatatccttctcttatcacaatttcttgcagatgctgagtcaataccagaaattcccgacccaccgagagagctaaccgttgcagcggaaacgagctacagaaaagacgaggcatctgtgacgccttcaacatcaaaggatcaaaagaagaagagctttgcgttaacagatgcaatgatgaacagttttgatagtttagagagcatggtgagaatcaaggaggctgaaacaagaatgttccagaagaaagcagacgaggccagaatagaggcagagagtttcaagagaatgatagaaatgaagacggagaagatggaggaggagtacacagagaaactagcgcgtctgtgtctgcaggagacggaggagagaaggaggaataagctggaggagctcaagaagcttgagaattcgcactgcgattacaggaacatgaagctgagaatggaggctgagattgctggattgttgaagagaatggaagttacaagacaacaattggtatga

SEQ ID NO: 140746 - DNA, 756 bp, Arabidopsis thaliana landsberg
atgctcttcgatactttagagaaaggcaagaagctcactgacaaagtccttagctctaagcgatggaatttatatcgacagctaaccctagccagaaaaatggagaagctagagaagaccatctctaatttccttaaaaatgaggtctttacacatatcctcgctgacgttcatcatctccgggccgataccagtgtgcgtttggatcgggttgacatgagcctcgacagggtgattcagcaagtgggttccatgaaaattgggggaggtggcttgatatcagaggccatgaagagagccgaggctatggagattgagaccaacgacgattcggagaaatttggggttggattggaattgggaaaggttaaggttaagaagatgatgttcgaatctcaaggaggggtttttgggatcagtggaatgggcggtgttggtaaaaccactcttgccaaagaacttcaacgggaccatgaagtccaatgtaagtcttactctcatcttcttcttcttctcttctcttgtcccgactctgattctatgttagtgactcgaaacagtagtctcttgtttagtgagtgacatggtgaatttacacttgtttttcttcaggtcactttgagaaccggattttgtttctgactgtatcacaatctccgcttcttgaggagctgagggaacttatatggggtttcttatctggttgtgaagctggaaatcctggtcctgactgtaatttttccgttgatggcgcgc

SEQ ID NO: 140747 - DNA, 2280 bp, Arabidopsis thaliana landsberg
cgagaaaggcaaatcggagacgatgagcgaaaccgaagcaaccggcgttaccgatgattcggctccagcgattgagactgaaactgtttctgatgcgatggagcatacagcgatcggagtggttgaatcggtggaaggagccatagaaggagcagagaaatgggtgggtgatttgcaacggacggtgaaggaatcgaaggataccgcaatgcgttctgctcgttccctccgtgaaaattctacctctcagttccgctctatacaggttagttaatctctcttttgttcaccaaacaatttttgcgaatcgagattgtttaccaaaaaacattttcaggatttcaaaccatggatatggtggaatttagtatctcgtaagctataatttctagaaatgagctcgattcagaacagatatttctccaattagcagttttatgtattgaatggtgctagtttttgttcatatgggtaaaatcttgttgaatcataccattataacttattggcaatgatcttagtctcttcctgggttctgattctgcttcaaatggttgtttagaagactgtaatgtatcgctgaggcattcttgattattctctaaacaatgtttttatatgatatcagatattcatgtagcttaatgatgtgtgatatggagtagaccctatctggctgaaatcacagttccattagatgtatgtatatgtcttcgtcttctctcatacaatcttacatttgattctgaaattgcaggatttcattccacatgctttgactcagtataagacctatgagaatgctttcttcagtaaagttacaggtatcttgcagccaattttcgtgaaaaagttatactggtagactactgtaatgcttaggaacgagtattttagatcaaactgagatataacagatagctgcccaaaacttttatatatacttgtagtgcatcttatagtgttctgaaactagaatcttcatgtcattccgattaatcaatcctcgtatcctctgctgcttttgttatcctcgcagacgaattgatatacgcaaaagagcatccggctgctgctattgggattggtgtcgctgctagtctcgttctgatgcgaggtataacctctactctcttatcacttttacaacttacaagattccttcccgtaggagcatccaaatggtattacatctgttttacttatatgtgtcttgtatgaatttggttttctattgttcgacttacaggcccaagaagattcttgtttcgtaatacactaggccgatttcagagcgaagaggtatatactataccagcttcaaatttatttcttaacgttgttatgcttagttgccctggtctgtgtcccttcccttatttttacatccacttcaaaatcatcgtcgcttcaggcacaattcttgaaagctgagaagcatgttcaggagttaaacatgtctgtagacttgatgaaaaaggagagcaggaaattgcttgagaggacggctttagcagagaaggatatgaaacgtggtctctctgagctcatgtatgccccaacatggacgctcccacttcttttattaagttattgacatcatttatgttaatatgggtactactgttatatctataggaactctggaaacgatatacatcgtcttgctaagtccgtccacaaagctgaatgtgaagctgcaggtaatcttgaacaagatttatttttactcacttctcccttctcccttcaaatggtatctttgataatgccactacgtcagatttcaacttacacaaagagttctattcgctgcagatttgatggacggacttcggcaaattcctggaagggatgctatcaagcttagagctgaagtgagtctgacttttttcttctcgcccattgtttgagcttcattgctatgaacgtctcattaaattcttttgtcgtaaatcattaggtggcttccatgacttcgcttttgaggcagaagaggattgcattgaacaaaaggatcatgggtatgtcggacctaggagtttccgtctgatatatccaacacaaatccacaatttattgggttttcgcaaccaaagtttgttaggtattttccaattgaatcgcagtgtactctcgtccatcgaacatctaactctgtctgaaaccaaaatctgagcttgagacagaacttgtatactgtgtttttgcctgcttcaaaagatttctcgctcagagagaattaattgagtcacaaaaatgtgtgtgcttggttggaaa

SEQ ID NO: 140748 - DNA, 1821 bp, Arabidopsis thaliana landsberg
atcctccgcaatttcgcaattttgagaaggagccgccggctaaatttgatggcagaccaaagttcggagatcgtcaatgctctgtcgtcggagatggaagctgtttccgtttcatcaactcaggcatcttcttcgtccgatggattccagtgagttttcttaccaatcattaatttttttcattttcgcgcttcaattttgatttggattatattatttgattagagtggaagagatgaaaaagctatagcaatttagaagtatggaatttaaaattgaaaaagatcttgttatctgcttattggtctggtagatattgaaattttactaattcttcaggatgagtgaagaagttgagaagagatacaaaattgttaggagtatcggtgaggaatgtatacaagaggaagagctaaagaatcttcttgctaagaaggctgctccgatttgctacgacggctttgaaccatcaggaagaatgcacattgctcaggtctgttagttttcctttgttccattaccatatgtgggaaggaagcgttggctaatctattttggttctgttgttttcttaatagggagtgatgaaagtcatcaatgtgaacaaaatgacttcagctggttgcagagtgaagatttggattgctgattggtttgctcagttgaacaacaaaatgggtggtgacttgaagaaaatcagagtggttggagaatactttcaagagatatggaaggctgctgggatggataatgacaaagtagagtttttgtggtcgtccgaagaaattaattctaaggcagataagtattggcctcttgtgatggacattgctcgcaaaaacaagctccctagaatcttaaggttacttttttaaatcttctccattcttgggacgttgtaattatgtgagggaaatgatgggacctgaatgactctggttcttgtccttgaaggtgtgtgcagattatgggacgtagtgagactgatgaactgagtgctgcccagatcctttacccatgcatgcaatgtgcagatatttttttccttgaggtactgttaagcctttgcttgcttataaactgtctttgattctgctgctagttactcggaatcaaaaatttagcttaagcgttacatcagcagaaagtctattatattgttgataaaacacctgataaaagctccaggctagaaataagctgtatatgattgcagattttatcaatgtaatgttacattttgtgtatctggctgatgagttctgtgactactgttaaaccattttcgttacatatgtaggctgatatttgccagcttgggatggatcaaagaaaagtaaatgtgctagcgagagaatactgtgatgacataaagaggaaaaacaaaccgataatcttgtcacaccgtatgctctgcattttcctatttgacttctgttataccacgttttaactggtctagcgtgttgttaatcatttatcattgttaactacttgcagatatgcttcctggtctccaacaaggacaagaaaagatgtccaaaagtgatccattatctgctatctttatggaagatgaagaggtaactataacttagccaaaattctaagtttacaaaagtagataagagttatcacagttgttgacttgttttgaatgtctggatgtcctcaggctgaagttaatgtgaagatcaagaaagcttactgccctccaaaagtcgtgaagggcaatccatgcctcgaatacatcaaatacatcattctaccatggtttgatgagttcacagttgagagaaatgaagaatatggcggtaacaa

SEQ ID NO: 140749 - DNA, 1393 bp, Arabidopsis thaliana landsberg
attctctcgagaaaacaaactgaatttttttgatcgaagaagatctaaaaaaaaagatggagagacgacaagcgaagatccatgtctttgtattgataggtctaattctattgaattcaatcaatcaaatctcatctctctctgtaacggagaacgacgaagaatgtgtccaagagtacgtcctttacgaagagcgacactgtttccggtaacttcgtcgtcgtcgatcatgatatcttctggggatccgatcatcctggtttggatttcacggttagcgatctttcaatttacctttttaccccaaaagttcttaactttgatacgtttccttcgataatcccaatgtttgatttatcgtgaaattggtgtttctcatgcttaattttgacctgatctgatctttgtaaggatgtgacaatttagggtttggttgggattgtggaaatttgctatctttgattggattggattggattttggttagggttaatgtgttgattgattcattggattgtgtttgtgtaggtgacgtcaccagctgggaacattgtacagactttaaagggaacatctggagataagtttgagtttaaggctccaaaaagtgcaatgtccaaattttgtttccacaatccttattctactcctgaaactgtctccttttatattcatgttggtcatattcctaatgagcatgacttagccaaagatggttcgtttccattccccttatatatgatcatcttcattgatgcaatctgtattttgtgcattgagcttgagctgttttgtgatgttatgttctttctgttttgttgtttggttcttagaacatttggacccggtaaatgttaagatagctgagttgagagaggctttggaatctgttgttgctgagcagaagtatttgaaagctcgtgacactcgtcaccgtcatagtaagttttctccattcgtcttacaagcctcattcccttgattacccgagtaacttgcttagatgcagtatgacaatataatgagtttttagacagacatcattgaatggcgaaagatgcaacctttatacgatctaacattgttctgtgtttggtgcagcgaatgagagcacgagaaagcgagtgatattctacacagtaggagagtacattttccttgccgcagctagtggacttcaagttctctacatccgcaagctcttcagcaagtcggtagcatacaacagagtttgaacatagcaaaacctcagagcgaggtcttgtgtccagtttatgtttgaatcggtgatcaaaacacaatcctaaacagtgttagttaatttaaaagcttcaatagcgaaagacttactttttgtttttggtttctacacttttataagtttactaatgca

SEQ ID NO: 140750 - DNA, 618 bp, Arabidopsis thaliana landsberg
gtcaagaggttgctaagaagtatccaagcattgcttacaatgaaatcattgttgataattgttgtatgcaacttgtggctagaccagagcaattcgatgtcatggtaaatgtttttcagcacttgttgatgcttgggctagcttccttctattttggtttatttacttgtatctgctttgcaggtgacgcctaatctctatggtaatctagtggcaaacactgctgctggtattgctggaggtactggagtcatgcctggaggtaataataaaattcattttaccttgatctaatgtacaagcactatagagaagtagattctcttgcttatgctatgaaattttctgtaggaaatgttggggcggagtatgcggtctttgagcaaggtgcatcagcgggaaacgtggggaaggatacaacggaagagcaaaagaatgcaaaccctgtggctttgttgctgtcatcagccatgatgcttagacaccttcagttcccttcttttgctgacaggcttgaaaccgctgtgaagcgtgttatcgctgaagggaattgtcggactgaagatcttggtggaaacagtaccactcaagaggtcgttgacgctgtcattgcaaatt

SEQ ID NO: 140751 - DNA, 1480 bp, Arabidopsis thaliana landsberg
agaactctatgcgagtggccttagaggacctattccagactccatttttcatctggagaatttgatcgacgtgtaagttttttatcctctttagatatttgttgaagcaataattttgtaagttgcagaagcctatgttcttttttgaaacgaaattgtggccttttctttctatgcaggagaatcagtgacacggttgcaggattgggacatgttcctcagataactagcaagagcctgaaatatttgtatgtaatagtacatttttatgtctcaggtccagatacgatcatatggtcaattacttgtgtttagactttagactgatgttgatcattttcagggttttgagaaacataaacttatctggaccaattccaaccagtatctgggatctgcccagtttaatgactctgtaagtctcatgttttatcaccacgcatcttgctaaacactgtccagtctcttataatgccttttttttttacagggatctttcctttaataggctgactggagaaataccagcatatgcaactgccccaaaatacacgtaagtcttaaagtgtcagatgatcaaaaggattaggtatgctattaaaatttactatagctgttgaactcatctcctggtttcatttttcagatatttagctggaaacatgttgtctggaaaggttgaaacaggagctttccttactgcaagcacaaatatgtatgaccattcttattttatagcagtcatatatgtcaagtcatttctcggtattacactaatctctccttttaccaatattcatatgtgcagtgatctttcctataataatttcacgtggtctccaatgtgcaaagagagaaagtgtgttttttctgttgttaactaccgcctttcatctgcttaaattttctggatcctttaaacatagttccctggcgggaatttaacccttttgaaagctccactcaaaaaaacgtttggaaaacctttggcaaattatttaaaaccactcgctactggggtgctgttataactcattgttctgtatacagaaccagactctttccatgttccgccataaagcaatgccaaaattgtaggttcttttgctttttattgatttccaaataccattgttcgagtttctgcatatgaactggaaattgtttactttccacagatagtagatcgctgcatataaactgcggtggacctgatgtaaccatcgaaaattctcgaggaaggtttctgtatgaaggtgatagctatggacttaccggatcagctacgaactattatgggaaaaattggggattcagcaatactggtgactttatggatgatgcaataacagaagatacatacacagtttcatcagaatctgcagtttcagcaaaatatccagacctttaccagaatgctcggcgctctcccctcagtttggcttactttgcattttgcttaaaaaatggaagctacaac

SEQ ID NO: 140752 - DNA, 1410 bp, Arabidopsis thaliana landsberg
  unsure (1)..(1410): unsure at all n locations
gacgaatgatagatttgtgggtggtgaggagacgaaaagtgnaggagaagaagcggaggttagtaatggagtaacggaaggtaaggaggaagatcagaagaagagcaagtttaggattgtggtgttgatgatggcactatggcgggctataaagagagctatagagaaggtaatggagtgggaatggttaagctggtggcctttctctcgccaggagaagcggctcgagaaacttattgctgaggctgatgctaatccaaaggacgcagctttgcagggtgctttattggctgagctcaataagcatatgtacgtaatttcaccaacctctaattgattggtttcgtaggtgttgttgaattcaatttgttcttagttgattctatgtggtagctaatattttcttttaatttagtcctgaggctgtagttcaacggtttgaacaaagggaacacacagtggatagtagaggagttgctgaatatattcgagctcttgtcattacaaatgctatctcggagtatcttcctgatgaacaaacggggaagccatctagtcttcccgcactggtattgttaccatgactacttctagaatctctggttcggttatctgtttttagttggtctatacttcggtcgctgaatttgattagcctgctgtttcttattgtttctactgtctatatccctaaaaacgttattcaaaaatccagttgatatgaatatttctgtatgtagccggtgcttttttctgttcaaaggactcaagcttatagagtgttcttagttttctttgtttctaaatttgtgttgttgtatttgtagtaaattattggtttatgtgcagctgcaagagctgaagcatcgtgcatcaggcaatatggacgaatcatttgtgaaccctggtatatctgagaagcaaccactgcatgttaccatggtatgtttcttttatattaccatctggtgaggtatattttcataggttcgcgatggttccctatattgttagttcttaacgcatgtttttactttgttaggttaatcctaaagtttcaaacaaatcaagatttgcgcaagagcttgtctctacgatcttgttcactgttgcggtgggattagtgtggtatgtatcacctatattttagttgagatcaagtttatgatgatagattcatttagatagcacaggcagaaatgttgcttcttatacatagtggaacttgtgattgcttctctattttagtactgttgttcctgttaaaatggaagttccttgtttaggattatgggtgcagctgctctgcaaaagtatattggaagtcttggaggaattggaacttcgggtgttggttcaagctcttcatattccccaaaagagctgaacaaagaaataacgccagaaaag

SEQ ID NO: 140753 - DNA, 939 bp, Arabidopsis thaliana landsberg
atgctaatgtactgcaggtaagtgttattgtaaatgtatactggaaggaactgggacttctcgtgtttgtctggattgtgttcctggcgctgcagatatccaaggatatttagtggtctttatcaaccaattcacatatatattgttcatgtgcaaactttgctgatatttttcattttctactatggaaacagcaaaatctggctaactgttcagtagcatattgggtcatcaatctgttacaggtatggagtcactaacattttcttgtacactgctttcagatacttacgctttcctacactcatgcagattccggttgcagttggtgtatcaggctatgaagcagtagctttgtaccagggtagaagaatcgttgcgtctaaggcacaaggagactcgaatttcaccgttggtcagcttgttatgtattgtacatttggcataatagcaggcatagtcggtggtttacttggtttaggcggaggtttcatcatgggtccattgttcttggagctcggtgtcccaccacaggtgtgaatgaatttattacaacattataatttagaatcacttgttcttgtacaacagttgtgtttttttttgtgtgtaggtctcaagtgccacagccacttttgcaatgactttctcatcatccatgtctgttgtagaatactatcttctcaaacgattccctgttccatatggtgagttctgtgtcattcattctattcaataaggccacggagtccattaaagtttcacgatatcctcactatttgtttacgtttgtgcagctttgtaccttgtgggagtggcaacaattgcagcttgggttggacagcatgtagtcagaaggctaatcgcagccatcggccgcgcatctctcatcatcttcatcctcgcgtccatgatctttatcagtgcgatatcgcttgg

SEQ ID NO: 140754 - DNA, 696 bp, Arabidopsis thaliana landsberg
aagcgtttaagagaagtaaagagtatacacaagggctcgtggagagaggtgtggttgtggtggcttatgctacggatgggaattcaccggttttggagtttgatgaaactgacattgcggatgaagaaatgagccagagaaggaagaaactgtggcgggtgactccggtttttgtcccggaatgggaaaagtaagaatctttccttaaagatagtgaaacccgagttgaaaaaatcgaatttgagagtgttcatattttttgttgcgtgaacaggtggttaaatgagcagaagaagcttgccaatgtttcctcagactctccagtgtaagtagttctttgcatttgctctgaaaccggtttaaactgaatattgcaccggttcttgagctgaatatgagtgtttttgcgtaaagacaatcgatttaaaccgcgttttgcaatcggtgatacggaattgttgttgatattaggtatttgtctctgcgtttggatgggcgtgtaagggcaagtggagtgggttatcctccatggcaagccttcgttgcacagcttcctccggttaagggaatctggaccggtcttcttgacggtatggatggtagagtgtaaatactctaatacttagggataaagtcatatgttttttagtctcctataaattttataaaatgtatagttatgaaaagattttgact

SEQ ID NO: 140755 - DNA, 1313 bp, Arabidopsis thaliana landsberg
tgtcatgctctgccaatttggatgtcagcagaaacttcaggtgaacatcttcagtcttaaattaatttcatggagtaagacttacaatgtaaaattatcttctttgattacagggatttatccgcgatgagtgttttgaacccaaaggttggatggttccaggtcaatcatctgcagcttattcacttgtaaacgatactctacccgagtctagaaacatatacgttgctagtaggaggaatctgaaacgcaagagtgtggccgatgttgtagaatcattaattggagcatatctcagcgagggaggtgaacttgcagctttgatgttcatgaattgggttggtataaaggtcgactttacaactacgaagatccagagagattccccaatacaagcagagaagcttgtgaatgtaggttatatggagtcgctgttgaattacagttttgaggataagtctcttctagttgaagcattgactcatggttcatacatgatgcctgaaattccaagatgctatcaggtccggtcacttctccatgaagttaatcatatacatgttattcttttagcatttcatatattaaactaatttgactctactgcagcggttggagttcctcggtgactctgtattggattatctcataaccaagcatctatacgacaaatatccttgtctgtcccctggactattaaccgacatgcgatcagcttctgttaacaatgaatgttatgccctagtggcggtgaaagcaaacctgcacaaacacatcctgtacgcctctcatcatctccataagcacatctctagaactgtcagtgagtttgaacagtcttctttgcaatccactttcggatgggaatccgatatatcttttcctaaggtaacagagtttaatctaaccacatatagtaactctactcgactgtgtacacaaatcctttaacggcttaccttttttggtctcgctatcaggttcttggagatgtgatagaatctctagcaggcgcgatatttgttgactcaggttacaacaaggaagtagtgtttgcaagtattaaaccacttttgggttgtatgataactccagagactgtcaagttgcatcctgtgagagagttgacagaattatgtcagaagtggcagttcgagttgagtaaagctaaagatttcgattctttcacggttgaggtgaaagctaaggagatgagttttgctcacacagcaaaggcctctgataagaaaatggccaagaaattggcttacaaagaagtcttgaacttacttaagaacagcctggactactaa

SEQ ID NO: 140756 - DNA, 1925 bp, Arabidopsis thaliana landsberg
caaaaccaaaaagagacaaagaaaaagtaaagagaagtgcgctctctcttactctcatcgattttacaaaatatcagccatctccaaattacagagttctttctcaaacccaggttatcattttccaaagtttgaaggtttgttgtctttgatttttaaaatcttccttttctgtataatctgtagtctgctttcaccgacacttggttatcttcctcgaattcttcctgggtttgtttattttggtttctccatcaatgaatcttttgctgtctaaatttcttctgtgattataagagctcaaaacagctgttacgagtctgaatctagtgttttgtcttaaatattgcgttagtttaatttatatgcatcctcaaatactgttgtttccattttgtctcagatgtgttcctgtccctgtagagatggcttggtacttatgaatgtgtttatactaatcactaaactcggggattttggctgtataatcaagaatttcatttattaagtaagattacaatcattaacttagctttccacagtgtttacaagttacaaaaagaagactttggtttcaactgaaatcattcttcaagtctcttccttttggcagcattgtttggccttcaaggcggtgaggataaaccagagctcaaaacgggtgcactctgttgtattgtggcctcaaggccactggttacaacaaaatcatcaccccgcagcggaagggatattcctcaatcaagtcaagctgatgccttgcaatggcggacaaatttcagcttttcacctgctgctggctatactagagatggtttggaacaggatatgagtgatgagagtcccgcttttgcattgcactcgggcagcagtagacaaagaaaaagtttggaattcagatttcagcagtcgccaagatgggctccatactcatctgcttctgatgggaacgaacagaaaacctccttggttaataatagtctaacaagaccaaatagctcaaatcctcaatgcttaaacgaggtaattttggtcttctttacatatcaagtcattaatcttcaagatgggcttttcttggtttcatctttggctgaaccttgtcgctctttgatgtaattacggctcaggagaacggttttgatagagacagtaccgccatctcaacgagtttcagatcgttgctgtcactttcagagtcatctgtcccatgggagactcggaccaacaagcagtcttccagccttactcactgctcttaccctcgagtcttctgcaacccggtttcagtttgtgagaatcctgaacctgatcatacgcaagaagactcgtccacaaatactggttccagtatcatgatgtccacaagaaaccaccaaggctcaccagtagaggaagaagtatcaccaaactcaagcagcaatgacatgctactagatgttgaaagatccaatgacacagaagccgcaaacccgagatctgaaccaggttcaatgacacatcaaagatgcgggatttgcaagaagcttttgtctcagaaatctccatggagctcatacaagatcttgagatccagagacatgccagccactggtgttttcccctgccatcacgtctaccatgttgagtgtttagacaaagcaaccccaacagctcaaaccagagacccgtcttgtcctgtttgctcaaacaccattggagtaatggaacagccactgatagcacctgaaacattgcaaatggctctaagatctctcagaagaagccgcacagctctagaattagagacagtaagagtcccttccaatgacaatcaaagaagacacaataccagaagaagccataaatgggacaaactcagctgctgtttgaatataagcttctcatcttcttcctagaaatccaacatgacccgattaaattag

SEQ ID NO: 140757 - DNA, 1579 bp, Arabidopsis thaliana landsberg
acaaattcattctaaatacatttcttttcactcaagaaattaaaatttcgaaaagtttgttaaaatgaatgcacacatgctcaatctccttgtcatagtcatttttgtagtttctttcgatgtccaagcactcagtcctcactactacgaccatacttgtccacaagccgaccacattgtaaccaatgcagtcaagaaagccatgtcaaacgaccaaactgtccctgctgcgcttttgaggatgcatttccacgactgtttcgtcagagtaacaacttcttacacacaacattgttgtcatctttcggtctttttatgtctttatactctaaataatgttgttggtgatacttttgatcattaaagggatgtgatggctcagttctcttagactctaaggggaagaacaaagcagagaaagatggacctcctaacatctcactccatgcattttatgtgattgacaatgcaaagaaggcattagaagaacaatgtcccggtatcgtctcttgcgccgacattctttcacttgcggcaagagatgctgtcgctctcgtaagtctctctccatctcaaattccaagtactacttttatttgatgattctaatgatccacctaaaatattatttgtggatgttactatagtcaggagggcctacatgggcagtgccaaaagggagaaaagatggaagaatatcaaaggcaatagaaacaagacaactaccagctcctactttcaacatttctcaattgcgtcaaaattttggccaaagaggcctctctatgcatgatcttgttgctctctctggtattaaacattctcgcactcacttaaaatatatctacaaagattcctaaaatatctttcttaaactatgctaaaagatgcaacataaatctcaattttaaaaataattggcaaaagacaaatatagttccaatgcttataatggtttaaattccgaatgttgaatgaaatggcaggaggtcatacactaggattcgcccactgttcatcgttccagaataggctccataaattcaacacacaaaaggaggttgacccaacactaaacccctcattcgcagccaggttggagggagtgtgcccggcccataacacggtgaagaatgctggatcgaacatggatggaaccgtgacgtcattcgacaatatctactacaagatgcttatccaaggcaagtcactattctcatccgacgaatcgcttcttgcagtaccctctactaagaaactcgtggccaaatatgcaaattccaacgaagagttcgagagggcttttgtgaaatcgatgatcaagatgagtagtatcagtgggaatggcaatgaggtcagacttaactgcagaagggttcgctagaatctcaatctacgcttccaacatcacgttactactacatttttatgtctttcgttttctttcgtcacattgattacttgtgaatgggcctttctaaagattaaggcagaggttcttgtatcagaattatctatcaatctctcgtgtgtgcttgtataggcatttatttacaagtaataagatcttttctctttc

SEQ ID NO: 140758 - DNA, 1233 bp, Arabidopsis thaliana landsberg
  unsure (1)..(1233): unsure at all n locations
aaaaccatggcgttaaagtgtctgtcaatgacatagttattaaagcagtggcagtcgcactgaggaatgttcgacaagctaatggtgagaaattattttctcctcgtaaatgatttcattaaaaataactaaactatggtttgttcccatccctaactatgcgctagattcaaaccttagttcatcctctttaaggaaactcggcttccatgttggattattcttgcaaatgccgtttacctccgttgagagtatttagtaaagatgttttgagattgtaatactgtaacattcaatatgactggtaatgcattttagactcggttttagtcgttacaagtaggacattttttggtgtgagtttgatgtaatgatttgtggattggaatcggnggttgttttttctcttctgctttctcaaacctttcttatggttgcttaaagttctctttctcaatgtctggcagctttctgggatgctgagaaaggagatatcgttatgtgtgacagtgttgacatatcaattgcagttgcaactgagaaggtacacttgtgtgtttgattttctgatcatttcaacagtttatccctcatcatcttggcattttttgcagggcttaatgactccaattatcaagaatgcagaccagaaatctatttctgctatttccttagaggtaattttattctctctgaagttaaacgaatatggaaggctatagaggcacatatgtttgatcagttcttaccatattccatgtgttgttgatcgctatagttatgaattttaatatgtcaaatgatttttggatcaggttaaggagctggcacaaaaggctcgatctggaaagcttgctcctcatgagtttcaaggagggacattcaggtattcatcatttttaagttattaagcatagtacggaattatcaatcatgtgtaacttttcctacttaacgagaaaaccatactttatcgttttgcagcatatcaaatctaggaatgtatcctgtggataatttctgcgcaatcattaacccccctcaggtaatcatagccttaacgatgcaccctgaatcacagattgaagattaagttttgctgtttgtaatttgtggtgtagaggatttagtttaatatttatagagatgcagatgtgtttttttggataataaacttcaggactatcaattgtcttgcaggctgggattctagcagttggtagaggaaacaaa

SEQ ID NO: 140759 - DNA, 1496 bp, Arabidopsis thaliana landsberg
taccggagaaatggcaagcccacataagccgtggagggcggagtatgcaaagtcgtcgaggtcttcatgtaaaacttgcaagtccgtcattaacaaggagaactttcgtcttggaaagttggttcaatctactcacttcgatggcatcatgcccgtatgactctcttttctctcccagaatttggaactgtctctgtactatactctcgtgcttgttagtgtgcgttctaatgtttctttctgattttgaggacaaaattgattcttttagaattattgtcagacaaattgggtttatttggttgaaattggttatttttgagggttcaatcctgttctctctgcttccactgttctacattccttgcaaatttgtgtgtgtgtgtgtgtgtgtcaagcttgttttctatctcaaaattggaacttttttaacttcttaaatagatgttaaccttcctcacattatgttctttcctccttttgtgcctaatcgaatgtgataaaagagcatttgaagcttaaatttgagtcacttgtgtgtttatttagtacttgatgattgccaaaaggttcgtgcttttctgcaatgacgtatgtgaactcctattattccctttggaactctgacgttattctgtttggatgatcataatcgtttgttttagctgtgttttgatatctttatgccgccaatgctatgattgcaatcagctgtgtttttcatgagcttttatgcttgttgtttaatggaatggcagtggtcattcttctcttcttcttttcactatgtagttccttcttcatgctgcttcacttcaccatgttaattatatgttgcttttagctccagttgacatgaagttttcctagctgactatcctctttgtacttttatttttctcacacagatgtggaaccatgcttcttgtatactgaagaagacgaagcagataaaatcgtatgtaaaaccaatgtcactttgtacaaatatttaaagtgtttggctattaactcgtttttgtctcttgattttgctagagttgatgatgttgaaggcatagaatcacttcgttgggaagatcagcaaaagattagaaaatatgtcgaatctggagcagggagtaacacaagcacaagcacaggcacaagcacgagcagtaccgctaataatgccaaactagaatatgggattgaagtgtcacaaacttctcgtgccggttgcagaaagtgtagcgaaaagatcttgaaaggagaggtaaattgttgttctacttcatctgtcatggttgtagcgttttatatgaactggttcgatatgcattagggttttgttttgcatttttgttttccaggtacgtatattctccaagcctgaaggcccgggtaacaaaggtttgatgtggcatcacgctaaatgtttccttgaaatgtcttcctctactgaactggaaagtttgtctggatggagaagtataccagactcagaccaagaagct

SEQ ID NO: 140760 - DNA, 505 bp, Arabidopsis thaliana landsberg
gcgcgtgacgttcacctgtgaatcagctgatagaaatcattatccaatatccagttatgagtgggtgactccaaatagatccaactggcaacgcattattgacacgtgtcttttcatttctcttcttccggcgttttctctccgccgtttcgccaccgtacgtgacaatggctgtttctctctccgccgcctctcacttactctgttcctccaccagagtctctctttcccccgccgtcacctcttcgtcctcgtcccctgtcgttgctctttcttcctctacatcgccacattctcttggaagcgtcgcatcttcttctctgtttcctcactcctccttcgtgcttcaggtattcgtacttcattcatactttttgtaaatttctctccgaacataacattttctgttgattttagaaaaaacatccgatcaatgggacgagcacgaggatgatttcaccaaaatgtgccgcttctgatgcagctcaattgataagcgctaaag

SEQ ID NO: 140761 - DNA, 438 bp, Arabidopsis thaliana landsberg
gattctgtgttggcttaacagggttgacgaatggaaggacccatcggaggaagctctcgccggcggcagaggaatgtaagtcaaaacctttctgtttccattggaaaggtttgttctttgaaactgaagtatctggtggaacaggttttgtgtagttcccttgacgaaaactctgtttcagacagcttcacaatcagtaagctttcttcttcccaattccatggaaagtttcgacttttttaatcagcttttgaccttcttacagatgaactcagctgtcaaatttctggatatgaagtttcagaaattggcaaatcctatgcacaatccaagtggagatttagggtcaaaatcaaatgtgttggattaacaagtacatgtgtttagtgttggattatacgtctagatctcatctatgtactttgttcaaagtttttg

SEQ ID NO: 140762 - DNA, 1693 bp, Arabidopsis thaliana landsberg
gagtaggctcgaccggaggagtcggattagaaggcggcggaagcgccgtgtaagaaggatgagcagcgggaggtggcggcatcatggacccgccagtaccaggaggagctaagggcataccatcgttgttgttccacatagcttagggttccaaatcgaaacgccgagcgtagtcgcggaggaaaaaaaccctaaatccaccgcgccagtgtcgatctctaactacgttgcgaagaactagtgagcttaatcgagtaaagaaaaaccctaaaacattttcgggtgagtcgcttcttccttttttttttttttattcccgttcggccttatatcagcagatcaggaggagtaagtaaaaaaaaaaaataggcggtgtcgaacagatgcttaggcggttatccaaacccgctaagtattgtcgaatcaagttattgggcctttgattattagatttgggccgtgatgcccattgacaaactttaatttgattttttgttttggcatttattggggagctatatagcagtaattgcggtttttccccggaaaacaaactctcccgattctctcgctcgctcgctcagctcctcaacagtcacctgaaggctgaagaagaagagcaaagagagcagaatcttgtcggtgaaaatccgggagaatcggcaatgcgagaagagcatagtccggttagggacggtcgtcgaagtggaggactgaggtcgttgatagatccacgcttcttgtcatcgtttgctttaaacgacggtggttcgatttctggacggagatcttcctacctgaaacttcctcctcagggtcgtatcaagctttccgtcgttaagctcaacggctcccttttcggtacgattttgcttatccagtttccgaaatagcaattttaagagtttagtttacaatcaagctcaacggttccctcagttggtgataccctaatcgatctctaatccggaattttttgttgctgttagaaatcattgtttaagagccttaatagacataattttggatgaagtatcaactagttttttggttactgtttctgatttggcctctcaagaagttaaatggtttccaacgaatcaatagatgtggaagttgcaaaggattgctcagtggcagagctcaaaagagctgtggaacaagtattcaccatttctcctctggaaggtcacggcatgatttcatggtatatcatcatttcatatgaaaattctcacagcttaagctttctggtacagtcgttcactttgatctttgcctacaggtctcacgtctggggtcatttttgcttgtgttatcgagaccagagattagtcaatgacaagactagcatccgttatctcggtctcaatgatggagaccaagttcgttaaactccttctcacttctatataagaatcgtatgcacgcaatctcattcctttgaaagtcttaacatccctttcactctatttcagttacatttcgtaaggcatttgtcgatagaccactctcctatgaacaaaagatccaagagcccgagttgcaagcggtacctcgagtaagtactttggaacaatcttcctatatcgtctctgcatttcaatgctctgctaaagaatccttgttggtaggttggatgtgtcatccattgtcaacgaaatccaaatacaaaaccaaaaccgaacggtgt

SEQ ID NO: 140763 - DNA, 632 bp, Arabidopsis thaliana landsberg
tctaaacttcattcatagatctttgaaatgatgagctatcactacataaacaccttatgcattgtaatttctctcttgtcttgtctcttcatcacctcttcttttgcaggaccagttccaaaccaggaaaatggatctcagaaaattttccccactcagatatcatcacgtgatagtaaggtttctctatcgagcacggtgaagggtctgagagaacgtcctccatcgtcttactctctcaagatggagtctttcaacacactcatgaagtctgtttacactgagagatacgaatctcgtccttttagggtcggtagatacaactggtacgttacgtaccatctttgttttttcttctattttattagctaaaagattaggaacctttgtcccaaaatctatctagctccatgataaaactattgtttgtgactggactacaaaacgttgatcaatccctatattcctaatggaggaccttggcctatctttgttcaagccacttcattatgtactatagttgtttgctgaatcgtgttgaacaaattgaaacaggacgcttgtgtgtatccgagggaaacaagaacgataacgtacagggcacatttcgctatcgtcgcttagacactcac

SEQ ID NO: 140764 - DNA, 1732 bp, Arabidopsis thaliana landsberg
tggagatatggatggagatggttctagctttgagcagtgttaccgttgttatcctgtcacattcattgacaaggtctgatattttttgtatctaagctctctttgatgtatttatcaagattataaagaaattctaatatgagacattttatatgcaggcacatcttgagaagggtgacaaaagtaaattactactctcttcccttagtctctatagatagtttctttatgatatatatctctgagaagacttgtgatctctgcagttatcatgcctccttccgctctcgatcgtcttggtgagccattaatactgtatcttctactgttatatcaatagtgtttggtctctgactccatcttttcagcttctttgcatattgaatacccaatgctgtttcaactgagtaatgtttctgttgagaagacctcacattgtggtgtactagaattcactgcagacgaaggcctagtttacttgccatattgggtatacttcttctttctctttgtttctttcattagtttcttacatctgatcttactttgttttgttggcattacttacagatgatgcaaaacatgtctcttgaagagggagacgttatgcaagttaagaatatcagcttggtaaaagggacttacatcaagctgcagcctcacactcaagatttcttggatatttccaacccaaaagccatgtttgtagttttgaaactgaatagttttcgttctattgaatatggttttgaagaatgtgtttcttatcattcctcttttgcagcttggagactacgcttaggagttactcttgcttaaccacgggtgatacaattatggttccgtataacaacaagcaatattacatcaatgtggtggaggcaaaaccttcttcagctgtgagtattatccaaacggattgtgaggttgattttgctcctcctcttgattacaaagaacctgagaagccacagaagttgactccttcaaacaaacgacctctccaaggtttgctcatttggaaactctctattgatattcgataccgttctttctagaagtattagcctcaagttgtacctctattttcctttttgttcattgtagttaaagaagaagaagaacctgcaagcaaagttcccaaattcacgccgttcactggatcaggaaaacgtttagatggaaaagcacaaacacaaactgaaccagaagatacaaaacagcaagaaaagccgactgagaatgggaaagacgatgagaagttgtcagtcactacaccaaggcaaatatcaggaaagctcgtttttggttcaaacagcaaatcagctgcaaaagaaacagcgaacgtattgtctctcttctctggattattccatttatgtgattcactttaataaacccattgaagatatcttatcctgtttgtatggcttcttaatgtatataggttgatgatccaaagaacattgtgcaagagagctcaacaaaatccgatgaagctaagttcaaagtgttcacagggaagaaatactcactcaatggttaaaaacggttctgctgaagatatttatctttttaagcatttatacattctctcgtcaatatattggatggaacctaagcgacaatgaccctaaggataacacagatgtgtctgaaagcttgattctttaacttagatgtgtcgaactataggttattgatatgatcctatctaatatgttttggagac

SEQ ID NO: 140765 - DNA, 1113 bp, Arabidopsis thaliana landsberg
  unsure (1)..(1113): unsure at all n locations
cgggatagaatttctctatgatggtgtatgnagtctcaatatctctattggtttcnngtttaattgagtatctattatttcatggctgccattttttttctgtgtctagatccgtctcctttctatgcttgaggagtataacatactcaggcaggaaagagaagaagaacaccgtcggcaacgggtacgtataagtcctctatttattgtttccagaaacttttgacccaatatcatcttcctaatccaactctatgtgatgcaacttttttctacatattaaaggatcagaaaaagcttcaaggacagctcatagcagaacaagaggcactttacgggtccaaacccagcccatctaaaccccttggtggtaaaaaggctccaagaatgtcgaccggtggtgcatctaacagaagactttccttaggagcagcaatgcatcagactcctaagcctaacaagaaagcagatcaccgacataatgatggagctttatcaaatggtaactaagactcttaatcaaatgtaaatcattggttatcatcatagtatgaatagatttcctaattgcattggcaaatgaatcttattcctgcaggaagaagagggcttgacattgcaggactaccctcaaggaaacaatcaatgaatccttctgaaatgttgcaatccccattagttcgcaaaccgttttcccccatatcgaccacggtggttgcatcaaaggccaacatagcaacaacaacaacacaacaacttccgaaaaacaacgcagtgaatgagatctcatcatttgcaactcctatcaagaacaacaacattctcaggaacttggaagaagagaagatgatgactatgatgatgcaaacaccgaaaaatgttgctgcaatgattccaatcccgtcgacaccagcaacagtctctgtcccaatgcacaccgcaccaacaccattcaccaacaatgcaagattgatgtctgaaaagcctgaagttgttgagtactcgtttgaggaacgaagactcgccttcatgctacagtctgaatgtcgtttggtttgatcatcaatccgttggattcaacttaagttcttttatttgtaaaactcaaattga

SEQ ID NO: 140766 - DNA, 389 bp, Arabidopsis thaliana landsberg
tctttctcttctcattcatttgttctttcttcagagaaaaacagaaaaacagagcattttttttggtcaagagcaagaaaaaacagagcatacttttgcaaaaagcagagcttggagcgctttcttgtcatctaaaattcaaaggcagagacgatgggagatgtagttttgttcatagatgaaacatatttgaaatcgagttttaatcgctgtagaatctgtcacgaagaagaagctgagagctactttgaagctccttgttcttgttcaggaaccatcaaggtaaatatcgaattctagatttatttttttgtttgattcttttgaaaaccgatattgattgttttggtttcgttggatttagttcgctcacagagaatgcatacaac

SEQ ID NO: 140767 - DNA, 1106 bp, Arabidopsis thaliana landsberg
atggcgaccaggtccacatttggaactgcttgcctttgggacttgagaagcatgggagccaaaacaccgaaaacattgtctactgttaatcatcctagggctgtgcactctgcttatttctcaccttctggcctttcacttgcaactacaaggtatcttgtcattttttccacagcctattcaatacacttcattaagaactacaagtataatctccttgatttaagtcacatcaaatgttgtttgtcattattgtggagagattaagtaatatatgttctagttttgttgaggtcataaagtctgtgcatttcggtttaaaagttgcacatatttgaaaaaacaccactgccttgaagcaattatgtctgggaactttacttagctagaaaactttgtgccttgatggttttgagacgggaaataaatacatctcataaacttttagcaacgtagacaagagtaaacatgtgtagagagagtgaaactgatgtataatgtaggtccctatgtgcatctctggggtttgctgaactcttgttttgttttgttttccttgtagccttgacaactacattggtgttctaagcggcgctaattttgagaacacttgcatgatatatcacaataataacaccaacagatggatctccaaattcaagtatgttccagtatcttgtaccttaataagcctctcagttccaatacacttcttgcttaatgtactgtgttctgacaaaagaatccacaagtaattgttatgagtctttcactatttctctgaccaatacactctttttccactcttttttgttatgagaaatgaaaagaagtaggaattgatttcgtctatttgtcgaaaaactgaagttggtaatgattttgattgcagggcagtatgggggtgggatgattcatacatctatgtgggcaatttgtcaaagaagattgatgtgatcaatccaaaactaaagcgaacagtgatggaactgcataaccctctgcagagagctataccatgcagaatccattgccatccttataatgttggaacgcttgcaggatccacagctggaggacaagtctatgtttggacaacaaagtag

SEQ ID NO: 140768 - DNA, 1505 bp, Arabidopsis thaliana landsberg
ggttttgctatacctaaagaggcacaagaaaaagtggtaaatttttcgttcgatggacaaccagcagagcttaaacatggaagtgtggtgattgctgcaatcacaagctgtactaatacatcaaatcccagcgtcatgcttggtgctggtcttgttgcaaagaaggcttgtgaccttgggctacaggttggtttcacgagagcaaactagaaatctatctgatgcctcgacattttctgatccctttttcaaaaacttgcctctgtaggttaagccttggataaagacaagtcttgctccaggctcaggagttgttacaaaatacttattaaagaggtatgtcgtatttttatctagttcttcgttgttaaaggctaattctttcttatgtgatggtaaatttaagtgtaacatcttactccatgcagtggattgcaagaatatctgaatgaacagggtttcaatattgtcggctacgggtgcactacatgcatcgggaattctggggaaattaatgaatcagtgggagctgctattaccgaaaatggtattattgagattcccaactaaacttactttggactttccatcctttatattactattatatataagtaagtagctgatttgttttcaatatttgtgttgcttggttttagacattgtggcggctgctgtgctatccggtaacaggaactttgaggggcgtgttcatccactaacaagagccaattaccttgcatctcctccgttggtggttgcctatgctcttgctggcacggtaataaatcttgagaacttgtcaaagttcaacttacattttgtatgagataatgacacatgactgattatcacattggtaattttggcgttcttctttcttattttccaggttaacattgactttgaaacggagcctattggcaaaggaaagaatggcaaggacgtcttcttaagagatatctggccaaccacggaagaaattgctgaggtatatacgacttaaccagagaacaataacatcttttttatacacaaatattaaactaatcttttgacatatggatcaggttgttcaatccagtgttttgcctgacatgttccgagcaacgtacgagtcaatcaccaagggtaaccccatgtggaataagctgtctgttcctgagaataccctctactcatgggatcccaactcaacttacattcacgagcctccatacttcaaggacatgaccatggatcctcctggtccacacaatgtgaaggatgcttactgtttactcaattttggggacagtatcaccactgatcacatctcaccagctggaaacatccaaaaggacagtcctgctgcaaagtttctcatggagcgtggcgttgaccgtaaggacttcaactcatatggaagtcgccgtgggaatgatgaaataatggccagaggtacttttgctaatatccgtatcgttaacaagctcatgaatggtgaaagttggccctaagactgt

SEQ ID NO: 140769 - DNA, 1732 bp, Arabidopsis thaliana landsberg
  unsure (1)..(1732): unsure at all n locations
aagaagaagaagaagagcttcaagaagacaaatacactattttttatcgtctgcaatgcccttaccctttgaagagtttcaagggaaggggatttcttgtttctcttctttctcgtcttccttcccccaaccaccgtcgtctccgcttttgagccaccgcaaagcaagaggcggcgaagaagaagaggaagaagttcccgcggcggagcctacctctgttctggactccctcataagcccaacctcttcctccacggtgtcttcctctcacggcggaaacagcgccgtcggaggcggcggcgacgccaccaccgatgagcaatgcggagccattgggttgggtgattgggaggagcaagttcctcatgaccacgaacagagcattctcggactcatcatgggagattccacagatccctctcttgaactcaacagcattctccaaacatctcccaccttccacgactctgactactcatcacccggtttcggagtcgtcgacaccggcttcggtttagactaccactctgttccgccgtcacatgtttccggtcttctgatcaaccaaagtcaaacccactacacacagaatcctgcggctatcttctacggccaccaccaccatacacctccgccggcaaagcggctcaaccctggtcccgtggggataacagagcagctggttaaggcagcagaggtcatagagagcgacacgtgtctagctcaggggatattggcgcggctcaatcaacagctctcttctcccgtcgggaagccattagaaagagcagctttttacttcaaagaagctctcaataatctccttcacaacgtctcccaaaccctaaacccttattccctcatcttcaagatcgctgcttacaaatccttctcagagatctctcccgttcttcagttcgccaactttacctccaaccaagccctcttagagtccttccatggcttccaccgtctccacatcatcgacttcgatatcggctacggtggccaatgggcttccctcatgcaagagcttgttctccgcgacaacgccgctcctctctccctnnnnnnnnnnnnnnnnnnnnntccggcgaaccacgaccagctcgaacttggcttcactcaagacaacctcaagcacttcgcctctgagatcaacatctcccttgacatccaagttttgagcttagacctcctcggctccatctcgtggcctaactcgtcggagaaagaagctgtcgccgttaacatctccgccgcgtccttctcgcacctccctttggtcctccgtttcgtgaagcatctatctccgacgatcatcgtctgctccgacagaggatgcgagaggacggatctgcccttctctcaacagctcgcccactcgctgcactcacacaccgctctcttcgaatccctcgacgccgtcaacgccaacctcgacgcaatgcagaagatcgagaggtttcttatacagccggagatagagaagctggtgttggatcgtagccgtccgatagaaaggccgatgatgacgtggcaagcgatgtttctacagatgggtttctcaccggtgacgcacagtaacttcacggagtctcaagccgagtgtttagtccaacggacgccagtgagaggctttcacgtcgagaagaaacataactcacttctcctatgttggcaaaggacagaactcgtcggagtttcagcatggagatgtcgctcctcctga

SEQ ID NO: 140770 - DNA, 1601 bp, Arabidopsis thaliana landsberg
gattaacaaaatcgaatcgaaaaaaaaaattagggttcttctctcttccgtctctcgttatcgatttcgttttgatttcgcgccacaaagaagaagtttcattaggcgcgaatctgaaacctaggttcgatttagttctgtccgaattactgtccgttgtcttgtccgttagtcgattcgatctgagaaagaaagaaagagaagaagaaaaaacgatgtcacgatatttcacatccccaccgcctgtgtatgcgaggaactgggcgaacggtcaaaacttggtcgaatggactaaggttcgtcgagcactcaattcttgtgattgattcgctacggtgtcctcttgtctgaacatgggtttctgtgttcggtcagagttaaatttccttataatatcctctttgtagccagatctctaggttgcatataagttattgattggttaaattgtaggaaaatatcttcagcatagatctatgaattgaatctacactatacatgttttagcataatgaatttcgttcttaacgatgtcgtgtagacatgtatgttagtttggtttggtctccaattataaagtcaaccataaagacgcgttgtagatatatgttttgagtaattaacattatgtgtgtttgtggttgaatgatgttacccacgtatatgggtatctggttgtttgcctgataaatccttcctctagtctaaatcctttattctgattggattataaagatcgaaagaccaatagttgattctaaaaagctgcatcggaaagagaagaaggagaaaaagaaagaaaagaaattaaagaaagagaagaaatcccttgaacagaagtattccacaaccaagacagtctcatatgaatccgaacagcttgagaaatcttgtttaacagaagaatatgagcaacctcaggttggatatttgtctgatggtagccagaacagtaagaagagaagaagggaaacttctcctgctgttgttgagagtcaaatcaaaggtttgtgctttgtttcttcccggattagatgaatatctttattgtgtttgaatacatatactgaaacagagacgtttaatcatttgcagctacacctgtagctggtaaaccactacggattcgtattgttttcaagaaaccgaaagaagctgaagctgtacctcaagaggatcctgtttgttccacttcagggactcagagacctagcgaattaccaagttctgtctctcttccaagtatctgtgatcatgatgtggctgtaccctcaacttctcttgagagtggcaaggtagcaattatttccgaatcaaagaagagaaagaaacataagcctagcaaagaatcccggtacaattcattgtttgatgaattagttcctccctgtatttccttggaggaagatgatagcagcagcgatgactggctttttggaacaagtcggaaagaaaatgtttcttctgccaagtcttcttataagactgatgaagacacgatcatgagcttgcagacgtcaagagattgttcctctttgcctagagctatgttattgtctgaagttggaattttttcattaccatatactgtcccgttttag

SEQ ID NO: 140771 - DNA, 2247 bp, Arabidopsis thaliana landsberg
  unsure (1)..(2247): unsure at all n locations
agaaaatgctgacgcgattcctcagagatatcgccgcgataggcggcagccattggatttcacgatggctggtagcttaatcaagagaagcatgatgcctactggtgctgtgactcttgacgatgatgatttacatcaagttagtgtggactatgtcatcaactgtgctcagaaaggtactactagcttctctcgtcatttgcattcgtgatcagtctgtgatttttctttcaaaggaataccgactattgggacaatacaggtgggatgctcgaactagctgcagcgattctggactatcatgatcacatcggattgccttatatggtgtgtacatgtaacatattgctttcttaattgatacttctaacttttggtaagcattactaggagttgcttgcaacagtttctaggataatgcctgttcatttctggaaaaccttttgctattaacatataacggactccttctncatcgacttatataagtcattttctaaatgcttgagtcttatgtatatttcagaacagcgtgggtactgcttgatgaattctttttggctacaattcctgaatcttctggctcacctccaaaaagggccccaccgcctattcctgtattaatttcctcatcttctcccatggttacaaatcccgagtggtgtgagtcaccatctgcgccaccattgatgcgatcagaatcttttgattcaccaaaagctcaagagctgactgttgatgacattgatgattttgaagacgatgatgatcttgatgaagttggtaatttcaggatctctaggcggactgcaaatgatgctgctgatcttgtgccaagactgccctcctttgcgactggtaatatttttggaaaatgcatatctttaagaagtaaatttgataaaggaatactattgttactgtcattccattgaaaaacctcatagaattattcagatcatacgtgcatttgtagacttggtaatttattatttatggacagggcattttagttcgagaaactaaaggagtacttgtaaaattatcattgcttataccatccagtagccagagctaactacgactggaccataagtagtacacccacacctatgaaaagtcaaggccctgctgatttattaagaaagttgcaatgtatttctgtttcaggtattaccgatgatgatctccgtgaaactgcatttgaaatacttttggcttgcgctggagcttcagggtatacagaatattgtcttgcttactttttactttctttgttcagttgaggtgtgcttataatattagtcacatccttactgatataatttctctttcatatgttttcaacatgtattttttcatcatgtagaggtctcatagtaccatcaaaagagaaaaagaaggagaaaagcaggtctaggctgattaagaagcttggtcgcaaaagtgagagtgtttctcaatctcagagctcatcaggattggtttctcttttagaaatgatgcggggccaaatggaggtcactccctctctctttctctcttactgttacttttttatctctgttgttgaggcatatatggtttgtcagagcatggaattacatatttactactctatcttttcttgtaaagttgttcttatgtaattaccatgttaagatgccctcatttttgtatgccaaatgtctctgcttcattgattttttagtatgcgcttggacatttttcgcttcgtttgtcagtttactctttccatatgtcaatgtattgtattatgtttttggcgctgttgcctgcactaccatatgattctcagttagcctactttatgtgtttgttctgtatacgacaattaatattttcggctcatacagatttctgaggccatggacatcagaacaagacaagggttgcttaatgccctagcgggaaaagttggcaaaagaatggacagcctcctggtgcctttagaattgctatgttgcgtgtctcgtaccgagttctctgacaagaaagcatacttacgctggcagaaaaggcaggtaaagaccaccttttcacatctgagtgtaatattgagtactttcttttagtatttggtcctatcatctattaatgttttggtatttcagttaaacatgttagcagaggggctcattaacaatccagttgttggatttggagaatcaggtcgtaaggcaactgacctgaagagtcttctgctaaggattgaagaatcagagg

SEQ ID NO: 140772 - DNA, 1528 bp, Arabidopsis thaliana landsberg
ccttgtactcatgacaaggtctccggctcaggtttcaatccaagaaggaatacttgtttggtaagatcgacatgaagctcaagcttgtcgctggaactctgctggcaccgtcaccgcctactacgtacagaatctacttgtgaaattaattgatttcgaatcttatatattagagtatcttttcatctcaaaaccaatcggtaataaatgtaatatttttaactcctaatgttatacatgttgtggcagctatcgtcaaaaggcacggcatgggatgagattgacttcgagtttttgggaaatcgcacaggacatccttacactatccacaccaatgtgttcaccggaggtaaaggcgaccgtgagatgcagttccgtctctggttcgatcccactgcggatttccacacctacaccgtccactggaaccctgttaacatcatgtgagtatatagtctatcaggaaaccctaaattgatagtaaattatacaatataatccagtatattaacaaacgttttattaattagttcatttattatcaattggtttttatataataagcttatgaacattgacagcgtctaatctcatatatttcctcttttgatgtgatcccttacattgagcactataaaaaaaaaaacgagttctcttgacatctatagacatatttgatatatatttcttgacattcatgttggtttcttgtgtctgaagcttccttgtggatgggatcccaattcgggtgttcaagaacaacgagaaaaatggggtggcttaccctaagaaccagccgatgaggatatactcaagcctttgggaagccgatgactgggctacagaaggcggtcgcgtgaagatcgactggagcaacgcaccattcaaggcctcttacagaaacttcaacgaccaaagctcatgcagcaggacatcaagctcaaaatgggtgacttgcgagccaaacagcaactcgtggatgtggacgactctcaatcctgcccagtacggaaaaatgatgtgggtgcaacgagacttcatgatctacaactattgtaccgattttaagagattccctcaaggcctccccaaggagtgtaaactttgattctattatgggaattttcaagcatttttctttccgttttgtttcatcttgtgatgttactttgatttattttgttctttcttttggtgtttctgagatacgatattacatgtatacgtattcttcctgagaaaataagaagttgtattactcgataatacattttatctctcaatgtggtgtgattgtttattgggtttggcgtacaatgaaagctacatcaatgtgctttagaaaaatgcatacgaaaagaaaaacacaacaatcaaaaacccgtgaggtaactaaattatctccatttacaaatatactaacaatactactaatttattgttaagctgtcagctgtcacgaccatgataatgaaaaaaaaatcatctctgttttcttctaaactttagagtttctcgaattttccca

SEQ ID NO: 140773 - DNA, 2949 bp, Arabidopsis thaliana landsberg
ctccagtagagttgcctccttccttctcttccaatggcgacttctgctttcaattcaacgatgaagcgaacgacgtctctagccaaatcctccgagagtggcgacgactcttcttactctacacggaggtcagcttctaggagacaccggagtttgagccgtttctctcaccgcatgccggatccagacattgaagtgactccgatgaggaagggaaagtttgttaacaccgtgagaggttctggattcggtgaaattagcctcgatgatttagctgtcgagttttttgaatcgttctccggcgagagcgagattagtagcggagaaagaggacgatctggtttaagaaattccggcggcggtaccggcggagaggttacgaattcgcaaaggaggggaaggtctgtttctagggttggttctggtggtggtaacggtggtttacggaggttagatgctgatactgaaagctcgaggcgacggaggtcgttgtctagacagccggctagtaataatcgtggtggttcaagtaaggttgattcggtgagcaacaattcgagccggcggaggtcggtttctagacaaccgaatgagagggttaaggtcgagaacagtggtggtgtaattgagggagatcgtgagaacgcgaattcgcggcgacgacggtcgctttctgttgtccgtcgtcggattgagaattctgaggtattacacttttgtgattgcttactttgtatcttcttattgtatagtttctcttgggccctcttgagtggtgtgatgtgatgcaatctattaggaactttttacctttttagttacatttggaactttattagaaagctataattatcaagccattataattttagctgtgattatgagataactttgtagcaacaggaccatgcttgcttggtttgttaggtctgattttgatatattcaatttattgtgcgtatttatgagtcgtataaacagttgtatcatttaccatcttgaattagtagaagctgcgtatgaacatttttcattgttgtgtgcatttggcttgttgatatgagtagtgatttgtatttgtatattggaggagtgtgatcgacatgaattattttacatttgcagagtgatgtagatcaagttcagtattcaagcagttcaagggatgtgaagagcttcatgagtggaaagagtcaaaatagtggttctcagaaatctgctgcttcagataatagacaaggtcttaggaggtcttttagccagaatccaatcaaataccatgatggctactctgtaagtctaaatataatttggtttaaagattctttttttgtttaaaaatcgttttgttgtgcgtgtttgtgtttctgtttaggggattcgttaatctttttgtgtatgatatatatttggtgtaactccataagctggaaatgttataattcttgttactaattggagaaaaattgtttggaatgttacagagccagtcttctgcagtcacagatgatgaaggaaaggattccagctccagcaagcatggaactgagaggataattcgaacagtatatgcccaaaataaggtttgtggtttcaaccaacgattatttctttatttttctcagaactatattaacttaattatatgagtgtccactctctgcttgaaaccaacctagtcctataaaaagggcagatctttctggatgtttcatttaactgagggaatctatatgaataagattttagaatggtttattagagatgatgactaaagtagaacaatatcctacaactgttaattgatgtattattattgttgctttaatgaacaacgtcaatacaggcaacaccaaagaaaagagaatctttggggaactctggttatggttcccagcggaaatctcttgatgataaccgtggtgtctccacatctacgaaaggttatgcaacaaaattgcaagaggtacaacttctctttgcgtctatttgctaggttctttcattgaagaattgaccaaatatacaacacttcgtttccccttaaattggcagtctgaggagcgcaagcgagagttgctggctgagattatgttggaggagcagcgtggtagagagctctctgtgaacttgaaagaaatactcactgaaaatagctctgaagctgaggaaaagccattgcggacgcgaaaggtgagtattacaactctcagaacagcatatgtttcctcttctggtttattctttgcataaaaagataaaattacattcttttattttgacagaggagcaaggaccggagcaggaggatgtccatgtgtttgacagatgaagcagagcaattcatcgacgaattcatttcaaacatagaagacacagacttttcatcactggaggatgagaggagcgaaagtagttcaagttttggaatgataaaaacacaaagctctcaaagcaccagtgctctgaagagtacttctgttgaaatggacggtgttatgctcccttggttgcaatgggaaactccagacgtgtctgctgcagtggcatgccttatcaagtcgccgcccaccccaaattcaaaatctcttgtctgggagtcggatacaactcaggtaacaatactttttgcactgaccgtactccttacgggtctaaaactatagccggttagatagatgactcgtagaaagtttctctgacatgaatgtatgctgataggatgcatcgagtgggcgagggacgagcattggtaccataagtagcagaggaagctggagcccatatgactcggtcacgaagcctgtgatgcccacaaaaacactaaagatagatgtagcggagtatctgaagcgacctaacagctcagatattctaaatgagacgtggaagctaaggcatagaatcagttcgggaagtcttgtgctatgtagccgctcattgatctaa

SEQ ID NO: 140774 - DNA, 339 bp, Arabidopsis thaliana landsberg
gatggtcatgattctgaggatactaagcagagcactgctgatatgactgcttttgtgagtattctcgttctctttgtttggtatttttgtgactttgagacaatttcacttggtttatcactgaatccttgaatttttatatgcaggtccaaaatcttctccagcagatggtaggtttttcagcttttatgtcttcgtaggccttggaattattacttcaataggtagattttgattaaatttggtcacatttgtgtgtttcagcaaaccaggttccagacaatgtcggactccatcatcacaaagaatatccttatatcaatctgtggttttacttga

SEQ ID NO: 140775 - DNA, 520 bp, Arabidopsis thaliana landsberg
aatcatggcggatacaatggttgctcatatggaccgacataataagataggtaagctgagaaaattgccaatcttttttttttgtatgaaagccagacgttatataaaagtaagaatcttgcagatgttgagatctcagaagatgacaagagattaacaaagctttgctctctaaagaagaaggctataaatgcgacgaacaagtttaagcactcaatgaccaagaaaggtcgaaggcatagccgtgtggcgtgtgtctcaatcgtcgatgaaatcgatacagaagagttgcaagcggttgatgctttccgtcaagctcttattttagacgaactacttccctctaagcatgatgatcatcacatgatgcttaggttaggtccttcctcttgatcttttgattttcttcttctccattgctctgatcaatcgaaatatatcaggttcttgagggcaagaaagtttgatctcgaaaaggctaagcaaatgtggtctgatatgcttaactggaggaaagaac

SEQ ID NO: 140776 - DNA, 763 bp, Arabidopsis thaliana landsberg
gagactatttccgaggatttttcgaagagaacgattcgataatgaggctcaatcattatcctccatgccaaacaccagatctcacgttaggtacaggacctcattgtgatccaagttctttgaccatccttcatcaagaccatgtcaatggccttcaagtctttgtcgacaatcaatggcaatccattcgtcccaatcccaaggctttcgttgtcaatattggtgacactttcatggtaattgaaaacattctaagaaagtaaacacattttggttactcatacagaaatggttaatcaactttggttttgtaggctctatcgaacgggatattcaagagctgtttgcatagagcggttgtgaatagagagagcgcgagaaaatcgatggcgtttttcttgtgtccgaagaaagacaaagtggtgaaaccaccaagtgatattttggagaagatgaaaacaagaaaataccctgacttcacttggtctatgttccttgagttcactcaaaaacattaccgagcagatgtgaatactctcgattccttttctaattgggttattaccaacaacaatcccatctaagaaacaaaattatttactatctcaatcttttgtttttctttaggtactttgtgtcctttgttctcatggagaaatgcattaaattgcatttcaaagttttaaacgtttgtatatcgattgttccaagctttagaccaatccctaccgtatgagctcgttcaatgaataatttgaatgaa

SEQ ID NO: 140777 - DNA, 1404 bp, Arabidopsis thaliana landsberg
cgctcgagagtgagaactctgctcttcttcttcttcctccgccatagctacaatgcttagtctctcaatagctacgccggggacggcggcgatttttcgtagaggaactgcttcggcgacttcaacttcgtcttcattccatggtgtcagaatccagcaccaggtttctgctcgcgtccccgcggcggcgacgatatcgtcgtcgtctcctaaaccgtcggtggtgatgatgtcgaaaagagaggcggaattgaaagagataagatcgaagacgacggagcagttacaagaggaggttgttgaccttaaaggtgagctctttatgcttcgtctccagaaatcggcaaggaatgagttcaaatctagcgactttcgtcgtatgaagaaacaagtaagcttttttcttactctttaatgcagaattattccaaattgtgaaatctactttgtgttatctggtcgattttggcagtctttgaaagggtttaacaaaattgggatatgtggtttattgatggaaacattgaaatcatcaccatggaaaataggattatttaatatgaagttgtagaagatgttagcgaactctataagcaatgttttgtgttgtttgttctacacattatagttgattctaaactctaacaatggcaacattgtaagttactgttttgtgatatctaatactgtttttggtaggtggtggaatggaattagagatttaatattgagttcaatccatccccttttatagattcttgcacacaagcttcgaatatgttcttaggatattacggtttcagttagacatgaatgttgagctttgcgatatcgtttgtttagtcttttaagtgtgccaatgcaccaaactagctttagatgagaatttacttgctttggttttactgattgctgggatttcaatcagacatgaatcttgagctctaagtgactaatccacccaacttagctgtagatgacactaaattcaagtagaaatttcttggtttttttggcttacgtccgtctcttttctggtactgaagatgtgatcttttggttgtgggtgatttaggttgctcggatgttgacggttaaaagagagagggagatcaaagaagggataaagaaaaggttgtcgaggaaacttgacagacaatggaagaaaagcatagtaccaagaccacctccgtctctgaagaaacttcaagaagaagaagctgcagaagaagcagctgaagctgctaaatctgcttgaaaaaacccgctattgatttatggtctcttccttgttgtttcctcgagatgttgttaacctctgttatttgttgctgaaccatcttgtatttgtttttcttttggtgtaaacactttccttatcaagtagtttacatgaatccctta

SEQ ID NO: 140778 - DNA, 1596 bp, Arabidopsis thaliana landsberg
cacacacaatcaaaagaagatcaagccaaaaacagaggcattgcgaattttaattgatcgctctctctctctatctctgttcacacatctctcccaaaggtatttcgaatcgaaattcttttgatttctttctatgatttgtttacattttttcgtggtgttcttgatttttttctttgatcaaaactagtagaaattttccaatttcgtcctgccttgtgattagtagtagatattttggaatttgattagtaggtagaagaagatggggacgacgttagatgtatcaagagcagagctagcacttgtggtaatgtatttgaacaaagcagaggcaagagataagttatgcagagctatacagtatggttccaagttcttgagtggtggacaacctggtactgctcaaaatgttgacaaatctactagcttagccagaaaagtcttccgtcttttcaaggttaatccttttgattttgattagagtgtgtttttacctctttgtttaattaactaaatattatcattgttgcagtttgtgaatgacttgcatggtcttatcagtcctgtgcctaaaggaactcctcttcctcttgttttacttggaaaggtaggtgctttagagatcaaagctcagagttcgtttcggttttatatctttgttctgtatcaatctttgttgttattttcagtcgaagaacgcacttttatctacattcttgttcctggatcaaattgtctggcttgggagatcaggaatatataaggtgagagagagagagatcatcaagtttatgttccactggtgtattctagttttgtgtgtttggctaatgtcttatatgtgttatctcaacacagaacaaagaacgagctgagttacttggacggatatctcttttctgctggatgggatcttctgtctgcacaactttagtcgaggtccgcctcttctttcgcttttccgatcgattcctcatgtcatcttggcctttttcgccagcttatgtatcgtttttcactgttatcaggttggtgagatgggaaggctttcttcatcaatgaagaagatcgaaaagggactcaagaatggaagcaagtatcaggtaaagttttctcctttgttaagaaacttctaattctacaaaatcttattataagagactcaattcaaattgtataaaaatgtaggatgaggagtatcgtgctaagctaaaaaaatcaaacgagaggtcacttgctttgatcaaatcagctatggacattgttgtagcagctggtcttcttcagttagctccaacgaagatcactcctcgtgtcaccggagcttttggattcatcacctccatcatttcttgttaccaggtaacacttgtttcatccacaagaccttactttccaatttcgtagctttcttctttctgaattctgatatttacatgattcacattgttctccacaaacacagttgcttccgacacgccccaagatcaaaacaccctgaagtcaatcgaggaagctggtgttaaggagaaagtcatttcagaaagtttctgttcttcttattattaaggaaattcactgctgttataaaac

SEQ ID NO: 140779 - DNA, 1092 bp, Arabidopsis thaliana landsberg
gtctccgataactagtggatgatgattcaccctaaatccttccttgtctcgaggtaattctgagaaatttctcaaattcaaaatcaaacggcatggtttccggagtcgggggtagtggcggtggccgtggcggtggccgtggcggagaagaagaaccgtcgtcaagtcacactcctaataaccgaagaggaggagaacaagctcaatcgtcgggaacgaaatctctcagaccaagaagcaacactgaatcaatgagcaaagcaattcaacagtacaccgtcgacgcaagactccacgccgttttcgaacaatccggcgaatcagggaaatcattcgactactcacaatcactcaaaacgacgacgtacggttcctctgtacctgagcaacagatcacagcttatctctctcgaatccagcgaggtggttacattcagcctttcggatgtatgatcgccgtcgatgaatccagtttccggatcatcggttacagtgaaaacgccagagaaatgttagggattatgcctcaatctgttcctactcttgagaaacctgagattctagctatgggaactgatgtgagatctttgttcacttcttcgagctcgattctactcgagcgtgctttcgttgctcgagagattaccttgttaaatccggtttggatccattccaagaatactggtaaaccgttttacgccattcttcataggattgatgttggtgttgttattgatttagagccagctagaactgaagatcctgcgctttctattgctggtgctgttcaatcgcagaaactcgcggttcgtgcgatttctcagttacaggctcttcctggtggagatattaagcttttgtgtgacactgtcgtggaaagtgtgagggacttgactggttatgatcgtgttatggtttataagtttcatgaagatgagcatggagaagttgtagctgagagtaaacgagatgatttagagccttatattggactgcattatcctgctactgatattcctcaagcgtcaaggttcttgtttaagcagaaccgtgtccgaatgatagcagattgccaccccacacctgttcttg

SEQ ID NO: 140780 - DNA, 758 bp, Arabidopsis thaliana landsberg
atggcacggtcaaattcacaaagagctcgtagtcagcttttcgagacacatcttgcaaaactgttcaagcaaaaagtagaaatattcaccaaggttgaatttacccaggtaaaaacgaaagaggttcccttatagttatatcaaacacgcactgccacacgctcatcatctcctgatctgttttcgtgctaaatatttgtaggaatccgttgttacaacaacagtaaaactttgtctgaagagtttgcaagaatatgtccgtctccaaacgtttaaccggagcgggttccagcagattcagctagacattcagttcttaaaagctccattgaaggaagcagttgaggacgaagctgcaatagacttcttgctcgacgaggtggttacacctaaagctccttcctttacttttcttcttattaccatcaagcagaggcgctatgtctatcttttgcaactgaccattgattctccgaccatgatgtgtgtttgtattgacaggtgatcgttgcggcttcggagagatgtcttgatgtgattccattggagccaccgatcttggacaaactcatacaagctaaactcgctaaatcaaaggagcacaaccacaacacagtttcttcttaaaagttttcataactcaaacaaagtatacatgatttttgccaatttatttccgcttcttgttatcatccgtagtgtaaatcaaaaccattgaattgtactctctagcattgaaccagtaaaatctacaccgt

SEQ ID NO: 140781 - DNA, 1140 bp, Arabidopsis thaliana landsberg
atgtggcggatattgcatttggatctacttgttggtgaaagaagtggccccattaaacttgaagtgacaagacggcatatccttggagatgatttagagcgtcgaatgtccgtggcagaaaatccattcacaattttatatgcggtgctccatgagctgtgcgttgccattgtcatggacacagtcataagacaggtccgagctcttctgcaggggagatggaaagatgcaattcgcttcgacttaatttcagatactggtaccacaccagcgaaccaagaaggagaggcagattctgttagtcttcgaacgccaggaatgaaacttttttactggtcagattctgataaaaattctggcccatttattaaaattgaaccagggtcagatctccagattaaatgttctcacagcacatttgtaattgacccacttactggcaaggaagctgagttttctctcgaccagagctgcattgacgtggagaagcttctgcttaaagctatatgctgtaatagatatacccgtcttcttgaaattcagaaagagcttttgaggaatactcgtatttgtcgaactccaagtgatgtgatccttcaagccctcctgaatgagcctggtattgaggtaaagaaagagttgttttcggcttaatgttgaatattttgttccttgaaagttgtaggactttttcccaggtcagagctacttacactagttggacatttagtatgtcacttgcatgtcaatagatagatttctgtttatgacacatagcccttgctaaataatgcatagctttcatgctatagaccatgagattaagcattaataatcgcaaatttaaatttcagagatggccgaacctaggtttcgataatttatattttttcgaaaaagtagtttaattttttcagttcacatggcctattgcctagcttcttttggctggggagctagtatagttaggccatatttctcttgctgtctcaacaactaattgaatttaattggatcattttctctttcgccattcttttagggagataacatggtagactctaaagagcgagtagagccagaggtcttacgagtgcgagcctatggatcttcatttttcacactggggataaatataag

SEQ ID NO: 140782 - DNA, 966 bp, Arabidopsis thaliana landsberg
tccgtcgctaaaccgccatttcccccgccgcatctcgaacccttactcgagagttaagcaacgaaggccatggctgccaccaggagacgcgacccttttcaattctcgccggaattgggattcccatctgtttgtttacgcttcctcttcttcttctccgtagtcgtcgcctccgtctccaaattcaccgacggatgatctcacggcagagttgtgcgtcaatactggtcttgatctctttaagagaggacgggtaagtactagagttcgattcgaatggttttgtggtcgtaggtgaatatgtttcagtcggttttgggttttctatgtcttactctttttggctgctcctgtcttctattgcgacgcttgtatgattatgtataatgggtaagccctaaaatttagttactttccagtcgctagtaattttaaaagggatactttttgtctgatcgttgctagtttcttgatcttaatgtttgaaacttggaaacaaaattagcaattctctgcatacgcttgtactagttataatgttgacacttggagctagcaaaagagtctttgcttggaacaatttagttgatttgtcatgttggattctttcaggtgaaagatgctcttgttcagtttgaaactgcactgagtttggctccaaatcctattgagtcacaagctgcttactataacaaagcatgttgtcatgcttaccggtaagaacctcgaaccatgtactaatgaaactgtcttatatctactgatttgaaagatcctgatgagattatgttttctttcatttcatcctattgtttatcgatttgaggtaggggcgaaggaaaaaaagctgtggattgcttgcgaattgcgttgagagattataatctgaagtttgccacgattcttaacgatcctgatttagcatcctttcgcgcattacccgagtttaaggagctgcaagaagag

SEQ ID NO: 140783 - DNA, 1354 bp, Arabidopsis thaliana landsberg
gatctccagttgcagaagatgccataaaggaagtccgacaggtcgaatgtacttgacaagaagacgctccttgctaggttcaatgtcagcgaggtaggacaaagttatattgaaccggtaagatttggtctagagctcctgagccagtgtttgaatttaaccatcgatttatctagaagtttgtttctttatgtttggtttgttaccagtggcgaaggaaaaatgcagagacagtttagaatgaactgtatcggttgtgagctttttgtttgttatcgtgctaaaaagaatctggaaacagcgtctttcatttacattgttgatggagcacttagtgctgttgctgcagtaaccaacccccaggcacaattggattcttataatcttttcaattccaagatcaaaaactagatcactaatctgttgtggcggcacacaggatgcaccagtacctccctgcatttcacaactcgacggtggacttgttcaggttgcaatagaagtggaagaccgtgcacaacgttcagcaatcacaagtaaaacatagtattatggcacaaaatctattttcttactcacttgacatggatcttcgattaaacaattgccatactcttttttctctctgcaggggtaaatgctgatgatgttcgtgtgactgttgctgcaccagcagcccgtggggaagctaacaacgagcttctggaattcatgggaagggtaccaaatcaatccgttattaatcactttttaagatttattctctagtcacggcgtttcatattttgtatgtgaaaatgaggttttttgaccaacgcgacacgacctctgtgtttttactctttcaggttcttggtttaaggttgagccagatgactctccaaagaggttggaatagcaaatcaaaactcctcgtggtacgttgatccttcctttgagtctcttgagaagactttgtgaagattcatctctaaaaactcttattgtttttcttagctctagatgataaggttttggcttttatactaatggcacaaggacctctaatagtggtgatcaaaaataggttgtcgcattgaatgaataacccattctgatttttgttcccctgaaccaggtcgaggatttatcagctagacaagtgtatgagaagcttctcgaggccgttgtaccgtaaaaactgcggtttgtggttggtgaacgacattagctgaaatctctgcaactccttagttaacaccctttattggtatgaagaacgagttttcgtattttacttgagaaagatagctataaacaaattgctttcttctttgttttcatgcttatgcgacaactaactctttttatacaa

SEQ ID NO: 140784 - DNA, 1125 bp, Arabidopsis thaliana landsberg
acgttgcttctgagaatctcaaaccattttcagatcctgaatcttctgtccaggtaattaaatttctcaattgattctgaatttatgtgtagtaatttgtttttgatgattattgattcaatctatcacagagattacttgaagaattagcatcaaaggattggattaaagtatgtgactcattgatcaacacaaggagatttgcaattcatcactcttctctgttgctaccaattctgtgagtattttttattttttgaccagaatctgaaatcttatggagtttcttggtgatgattttgtttttgtcaatttgtagagaaaagcttatagttgtgatggtgaaggcgatgaagaatcctagaagtgcattgtgcaagacttcgattatgacttgttctgatatcttcactgcttatggagaaaagttgctggaaggacctcatttgaaatctatggacgatctggtaaaattgatttttgttttttgttttttccggttagtttagctttttgattggctatggattgttgatttaataataaagtttgattttggtatcttgatggtgaaaataacagctgttgcagttgctgatgaaagcttcacaagacaagaagtttgtgtgtgaagaagcagagaaagcgctgaacacgatggttaactcggtggctcgcttcccgcttctgcgtaagcttcagagttatgtccgtcacagtaaccctcgtgtcagggccaaagctgctgtgtctacttccaactgcgtttctaaaatggtattttgaattcttcaacaatgattaaaatgctcagagcaaagttattattttcttgaattgtgtgattgatatatttgtctctatgtttgttatcaggaggtaaatgaaatggaagaatttgggatggttctgctcgcacaaatggctgcggatcagttgagtgacaagttgccagaggcaagggaagctgcaaggagtatggtgaactcgcttttcgagaaatttacatggaatgaagaagaagacgaagaaggaagcaagcaagaagcttggaagaagttttgtgagaagaatgtaacagggcttaatgcacaagccatgatcaagatcgttgcatctcaataa

SEQ ID NO: 140785 - DNA, 1113 bp, Arabidopsis thaliana landsberg
gataaggtgtacacgagccgtatagctatagcgcattccttagacgacacaaaaacagcggttaagcagttaatcaaacttgtgacagcaatcttgatggtggtcaccgttgtcatttggctgctccttctagaagtacagcggtctaaggtttagctgttcttctccactcaactcgtggctctggcttttataatcggaagcacatgcaaaaacctctttgaatccattgtgttcgtattcgtcatgcatccttatgatgtcggtgatcgatgtgttgttgacggtgtcgcggtaattaaacttcaacatcaaagatcctttaaactcatatatatgtttttatactctatacaaacacattcttgtgggggtttttcagatgctggtggaagaaatgaatctcttaacgacagtgttcttgaagcttaacaacgagaaagtgtattatccgaacgctgttttggccacgaaaccgataagcaattacttcagaagtccgaatatgggagaaacagtggaattctctatctctttctcgacaccagtctctaagatagcacatctcaaagaaagaatcgccgagtaagtaccttgaatctgttttgttaaccactgagcctaaagatcttgtctttgaatgagtttctttggtttgtggatcaggtacttggagcagaacccgcaacattgggcaccggttcactcggtggtggtgaaggagatagagaacatgaacaagctgaagatggccctatacagtgaccacaccatcacgtttcaggaaaacagagagaggaatcttagaagaaccgaactttctttggccattaagagaatgttggaggaccttcacatcgactacactctccttcctcaagacattaatctcacaaagaagaactgatgagaaccaatttaaaaccggtttggtgttttttctaaaccgttgttataagacattattattaccaaacgttgtgatactgttttgtttaaggcttttagagtagatgatgaaatcaattttctaaaccgactcaacttttatggattttacaaaattaggcattttatggataaaaatcttagtctttgaaaatctgaataaaa

SEQ ID NO: 140786 - DNA, 240 bp, Arabidopsis thaliana landsberg
tgtgggatttgagcatcttttacattctcccaaaatctctgctttctagggttttgtgagttttggtgggatgagtagtgtgttcagtgatcagatcctgattgataagctcgctaagctcaatagcagtcaacagtctatcgaaaagtatcctccttttaaccacttcacctccgagttaataatgaaagttttaaccttaatgcctaagacttggaaatgtgccttaaaatttccaag

SEQ ID NO: 140787 - DNA, 1370 bp, Arabidopsis thaliana landsberg
attatagatacgagtttagaagtacttactgatcggcagttgtctttttcagcccacaagaatcaaacttcggtagagaagaaagcaacagagaagcgaagggtcatgcaagagaaaaaaaacaagctttcttcagtttctggtggtgtgtgtgactgttgaacaaaatgggcctttaattgggccgagagctaaattatactaaacgacgccgcgtggctcgctgtttactttcgtctgtgatctttgaaacacacgcatcgtcgtcacttagctccggagctctctatctttggtcatcctcctatcggaatcggcagcgcaggtattgttttttaggttttgaactttgtgttatctgttatcaatcctcgtttgatctgaaagttctcatttttgttaaattaaattcacctagaatcgttaatcgtaatttcgtaggttttgtttagtgaaattagtcatgggtttgctgaaaagaatgcactttttgggagttttatcgcttttgtttccgccatgaaactcaattcaatccacatgctcctgattgtttcatcattgaattagtagccaatgtagatgccgtgaatgagttctcatcgattctcaattttgttgctcctactgaatccttttgtcgattgatgtaagatgtgatctctggttttaacttgttatattcagggaagagggcagattatgaataatgatacatcaaaaaagctgggaactttggtttctgatgatggaccagtgaatgtatatgtatgggacatggacgagactcttatcttacttagatctctgttaaatggaacttatgctgagtcttttaatggctccaaagatgttaaaagaggtgtagagattgggaggatgtgggagaaacacatacttaagatctgtgacgattttttcttatacgagcaagtaagtcttctcttaacgataagttcagaacgggaatgatgagatgccctcgtaaactctgtcacctacaaagcattagtcttgtgttctttgcaggttgaggaatgcaatgagccatttcttgattcattgagacagtatgatgatggaaaggatctttctcggtatgagttcaaacaagacgactttagtactcctactgatgacttgaacaagaggaaacttgcgtacaggcatcgagctgttgcggagagatacgaaaaggtactgatatgtttttacatgttttttgttgctgatgttatatgactcaagtacaaatgtcatctctttataattgcagggtttgtgtccattcattgacagcgaatcgatgagtgggttggatgagttgtataatgtgactgatgaatacacagaccggtggctttcttcgg

SEQ ID NO: 140788 - DNA, 3169 bp, Arabidopsis thaliana landsberg
  unsure (1)..(3169): unsure at all n locations
atgcaaaataagaaggatgtgggccaaatatcatctattaacatgatttcgcccaaaaatccggacaaaaaaagcgggtaaaacccaaaaaaaaaacccgacccattgggttgctctaaatttcctcttttaccctcctttcatactttggtaaacccataaatatccctaacaaccttcacttcttttttgtctctttctttcttcttccctgcgccagagtccgaatccgatctaccaccactactcgtaccgccggtcatttactgccgccgatttcaaactatccgatcatttccggcgatatccaattgcaaactgaggttgttagtaagtttcttttgtttacttccgccgataaattccatatttatgaaagcaatctagagaattttcaaggtcgctcgacttctaggtgtactttattgatatagataagttcgatagttcttcgtctgtgtagatacattgaatttgtgcatgcgctgtgattttatctggcttttgcttcaagaaaattgcaatttgtttgatcgtaggtgaatctgtggttttgatcagcgattatctttgtcactctttgaaaatggctgtgtaagttcttcttttgccctattttctcgggatattattagaaatctctcatctataaaaggtatcaatattagtgaattctgtgtgtttaaaaattccttgatgcagtgttgcttctgctcctgggaaagttttgatgactggaggctaccttgtactcgagaagccaaatgcagggcttgtgttgagtacaaatgcacggttttacgcgattgagaagccaatcaacgaagaagtcaagcttgaaagttgggcatgggtatgtatcctcttctcatttatgtgttattgggaagtaatattgttgcagcattgaggggttattatgttgtgtgagacaattgttggtttgtttgtttgcttattttgccagaaatggacagatgtcaaattaacatcaccacagctctcgagagaaagcatgtataagctgtcactgaatcatttgactcttcagtctgtgtctgcaaggcaagatccgagagacttctttagatgcgctgcatattttttttttaatctcgataatataagattttttttgttcatatcaagacgtgtctgtgagatttcattttacaaatataagtgatggagcacttacactatttcttttttttcttaaaaaataaacagtgattcaagaaacccctttgtagagcatgcgatacagtatgctatagctgctgctcatttggcaaccgagaaggacaaagaatcattgcacaaactcttattgcaaggcaatcttcaagtccttgcttttttttttaatcatttttgttcatgaagaagagattgtatgagtaaccatttctttaaatgtgtgtttgcaggtcttgatataacaatattaggctccaatgacttttactcatatcggaaccaggttttctatctttttctttgctgaaactgtctaaagtacacttgggtttgttgatatttcctttgattattcaaatcctcttgagatgcttgtacaaaatgttgatattcttgtttattctgatagatagaattggctgggcttccactgacaccagaatcgctgggtacccttgcaccgtttgcatcaataacattcaatgctacggagtcaaatggtgttaattccaagcctgaagtagcaaaaactggcttaggttcttctgcagcaatgacaacagctgtggttgcagctatgttacattatcttggagtggttgacctatctgatccatgtaaagaaggaaagtttggttgttctgatctagatgttatccatatgatagcacaaacgtctcattgtcttgcacaagggaaggtcggaagtgggtttgatgtcagctgtgctgtctatgggagtcagcgttatgttcgcttctctccagaagtcttgtcatttgctcaggttcataacgagaagtttgttgtatataaattctccactaaggatgggaattttttactgactcccaagttttgtaggttgcagtaacgggtctgccattaaatgaagttattggtacaattttgaagggaaaatgggacaatgagagaactgagttctctttaccaccactgatgaatcttgtaagcaaacaatcagaccaaaattcttacttgggaaaacctgttgtgaacttcaccaacttcttatttctttgacctctatgaaatcttgtgtactaacaagatgttgtcttatttagttccttggagaacctggaagtggtggatcctccacaccatccatggtaggtgctgtaaagaagtggcaaatgtctgatccagagaaggcacgagaaaattggcagaagttgtcagatgcaaatttagaactggaaactaagctaaacgttctaagcaaattagctaaagaccactgggatgtttatctaggagtcattaagtcttgtagtgtgcttacttctgaaaaggtatgtttcctttctctgagtattgatttcgtaagatattttacatgaaggggcagtttggttcattttgactcttgtatctcatgtttagtgggtgttacatgctactgaaccaatcaacgaagccatcattaaagaactcttagaggcaagagaagctatgttgaggatcaaaattcttatgcgtcagatgggtgaggctgctagcgttccggtaagtgatttttattctgttttgatgcttgcttcagatctcaactgaccatttgtgcatgattacttagtgatgttgcataataatactcgtctggctgtagaatcttagcagcatacatgatataagggttccacaaatcccgcatttagaacaaattgacttgctatatcattgaccttgagggaccatggatttgcagatagagcctgaatctcaaactcaacttatggattctacaatgaatgctgaaggagttctactggctggggttcctggagctggtggatctgatgccatatttgcnnnnnnnnnnnnnnnnnnnnnnnnnnnnntgactcaggcgtggagttcacacaatgttttggccttgttggttagagaaaatccacacggtgtttgcctagaaagtggtgatccacgcaccacatgtattact

SEQ ID NO: 140789 - DNA, 1205 bp, Arabidopsis thaliana landsberg
atgattgaccaagagaagggtagtacacctgtttcagaacttgtagatgggcagattacatcacaagatgatgagagaggtgagggaagaagattggctccaagtgctctcgataattttcaaactgctgaagtggtgactaacgcgggtaaggagttggaagctagcagtggtatgacaactggtccagctacagagaagaagagaaagcgaacgaagggctcaaaagatcacatcaaacaatctactgctgctgctactacaaattcaagaaaaattgtgaatgagataaatgaattacctggaaatggagattgtgttgatgctacttctaaatctcttccaatcccagaaagagaaactcttcaaaatcctcttgtagaagcaatacaaaaaggtaatctcaattctttattgaatttagttattctctacaattatgtttcagggaattttgttaactctgtgtagaaactgagttgggtgtgaaaactgtcgaagatgtgggaacaaataatatggaaactgatactctagtgagccacccggaaaatcatttggtggccaacagtgagttgacatctactccagttactgagaagaagaaaaggcaaaagaagagctcaaaagatcaaatcaatctatctgctactgccgctactgctaccacagcttcaagagaaattgtgaacgagataaacggagcacctggaaatgtagatcgtgttgatgctacttctgaatcttgtctaatatcacaaagagaaaatcttggcaaaggtaatttcagttccttactgaatttagttatcctctacctttacagtgagacttcagggtttttttcgttcgtgtagaaaatgagattggtgagaagattaaggaagatgtgggaagcggaaaagctataccaagttctgcagataatatccagaccgataaacgggtgagctacccagataatcagttggaggttagcagtggtttgacaaccgggccaactacagagaagaagaaaaggcaaaagacgtcctcaaagaatgacatcaataaatctactgctgctactacaacatcaaagataattgtgaatgagagggagaaggtatctggaagtatagattgtgttgatgctacttctgaatctattcctaactcgaaaggagagaagctttccgatactgttgtagatgcaagacaaaatg

SEQ ID NO: 140790 - DNA, 2557 bp, Arabidopsis thaliana landsberg
attgcttcgtcatctcaatccagtttcttcttctaattcttctcttaaacatgaaccttctcttctgtctgtaagtttagttgtcttaatccgtgagtcttaattagacattgaaattgtttgtggaagctgatgatctttaactctgttttattatgtgactcacttgtgtttttgttaattttagcctgtgaattgtgtttctgaagtttccccaatggctgcttttggagatgacattgtgattgtagcgtaagtatactcattgagtttgcttcactttcactttctttagttttctttgtttcctgattcttcttcttcttcagggcatatcgtaccgccatttgcaaagcgagacgtggaggtttcaaagacactcttcctgatgatcttcttgcttctgttcttaaggtaagtcatcaattaaaccttgtgcatgcatggagtagtagtatcaatgatttcttatgtttcatggtttgttctgattaggctgtagtggaaagaacatctttggatccaagtgaagttggtgatatcgctgttggtaccgtgatagcgcctggttctcagagagcaatggagtgtagagttgcagcttattttgctggttttcctggtactaaatctcattcaagaatcaagataaacttaatatctcacaagttgttgatatgtttcttcatccttctcttttacgagctagactccgtgccagttagaactgtcaatagacaatgctcatcaggactacaagcagttgctgatgttgctgcttccattagagctggttattacgacattggtaagatgctgctgcatcagttttttgtagtctctagctgcttgtataggccatgggattgattctctcaactttgtgaattgcataggtattggtgctggagtggaatcaatgtcaactgatcatattcctggaggcggctttcatggctctaatccaagagtaagctatcacaatgagtgtataaatttactcaacaagaagagttttgtgatgatcttgtaaactctacatgggaataggcacaggatttcccaaaagcccgtgattgtttgcttccaatgggaattacttctgaaaacgttgcagaaaggttcggtgtcacaagagaagagcaagatatggctgcggttagttagttattctcttcacttttttcctctctagttcatataagtactgattcagtaataatcaggtggagtctcacaaacgcgctgcagctgcaatcgcgtctggtaaactcaaggatgaaatcattcctgttgctactaaggtaaaacaagaacctcccaaacttcctttaaagcccttttggtagagctttctcagtaaatgatattgttcttgacagattgtggaccctgagactaaagcagagaaggcaatcgtcgtatctgttgatgacggtgtacgtccaaactcaaacatggcagatttggcaaagctgaagactgtctttaaacagaacggttccaccacagctggttagaaacaactctcttaactatcactggcataagtgagatcatagattgaagcatttaagtatatgtgttttgtgtaggcaatgctagtcagatcagtgatggtgctggagcagtactgctaatgaagagaagtttggctatgaagaagggacttcccattcttggagtattcaggtaaaatgaatatacaacattttgccagttcaagaaaccgagcaaatctgattccggaacaatgcaggagttttgctgttactggtgtggaaccatctgtaatgggtattggtccagctgttgccattcccgctgcaactaagctcgcagggctcaacgtcagcgatattgatctattcgagatcaatgaggtaacaaaatatttcacattggtttttttcctgtttcggaataatacatacatataaatctttattgttgcattgttaaacaggcatttgcatctcagtatgtgtactcttgcaagaagttagagctggatatggaaaaggtcaatgttaatggaggagccattgctattggccatcccctgggtgctacaggttactacttaccaagcttgtcgtaactaaataaaatgcaacatttgttacaggctaatagagttcttttctatatgttcaggagctcgatgtgttgcgacattgttgcacgagatgaagcggagaggaaaagattgccgctttggagtaatctcaatgtgcataggtatatatataagattttttttcagattgaattggatcaatgattacctatgttaatggtatatgtaaaatgcgaacgtcacaggcactggaatgggagctgcagctgtttttgagaggggagactctgttgataacttgtccaacgctcgtgtggctaacggggatagtcattagaacatcgaagagagcttgaataagtagaagtaatgatgcattgagtctaataaatatgatgctttagctctttcacattgctgaacaatgaaaacttttgtcattctgagtttaaaatcaactacttttctctgaacaaa

SEQ ID NO: 140791 - DNA, 1298 bp, Arabidopsis thaliana landsberg
tttgatttaacccatacacacatctttctgttccacgattctcttcctcagcctccacgtggtctctaaactcagcaaaaaccaatgtcgacggtgagaaaaatcactctcaagagttcggatggcgaaaacttcgaaattgacgaagcggtggcgctagagtcacaaaccatcaaacatatgattgaagatgactgtaccgataatggtatccctctccctaatgtcacaagcaagatcctttcgaaggtgattgagtactgtaagagacatgtcgaagctgctgagaaatccgaaaccacggccgatgctgctgctgctactactaccaccaccgtcgcgtcgggttctagtgatgaagatctcaagacttgggattctgagtttatcaaagttgatcagggcactctcttcgatcttatcctggtttgtcaaacttatttttaattgctttggttttcaaagtttgcgatttcatttctagggtttgagatcttgatttctgtttgagatctaattttagggttcaggttttgtttagattgccaatttcacagtttaaactatgatcatgtctgattgaaatatatggtctgatagagaaaaaagtgtcaagagatttcttttgagtttgttggatttgtttatagctgaagaccactttacatccaaactcatgttttttatgttctgtcttaaacattggataatgtttaatttctttgggatttgcttgaatctagatttgtttttctgagaaaccttttggatgctaacatgacatgttttgttctgtctgaaacgagtgataaagttgattttctttggaatcgtagttcaatatgtttgatttgcttgaacaataaagttccatttttatctgaaagttgaagagcttgaatctaagttggtttccctgtgacaccttttaggctgctaactacttgaatatcaagggactgttggacttgacttgccagacagtggctgatatgattaaaggaaaaaccccagaagaaatccgcaagacgttcaatatcaagaacgacttcacgccagaggaagaagaagaggttcgccgtgagaatcagtgggcgtttgaatgaagaaaaatgaagacctaggttgctgtcatgtcctcgacccatttgtgtctccctgtcttatcttctttctttgactatatatccattctcttctacgtgatggtccagctaagacagtgggtcggatgttaatgttatgttatgtatgtcaaattaaagacttaactacgaaacatattgaagttgttgctc

SEQ ID NO: 140792 - DNA, 1249 bp, Arabidopsis thaliana landsberg
tggtgttgatgtgtacaccgcatgtgctggagctgttggggctctttatggtccacttcatggtggcgcgaacgaggccgtgcttaagatgttagcagagattgggactgctgaaaatattccagatttcattgaaggcgtgaagaacaggtaactcaatgcttaataactacaagcaccaagtactctgaattgtggtgagtcatgccggtaatgttatatcccttttctatgttctcagaaagaggaagatgtcaggttttggacatcgtgtttacaaaaactatgacccccgagcaaaagttataaaaaaactggcagatgaagtgttctccattgttggtagggatcctctcatcgaggtactgtagatccttgtgctcacgtatctctcctagtatttggttgtcaaaaaaattcttatataacatgactgtgggttaaattttgttttgacggatgatgttttcaggtagcagttgctctagagaaggcggcactgtctgatgaatattttgttaagagaaagctgtacccaaatgttgatttctactctggattaatctataggtaagacattgctgattcatctgacatagaccctgtaaccattaagttctttacctgaaccttgtgttggtaattgaaatgggggaaaaacacagggcaatgggattcccaccagaattcttcacagtcctgttcgcagtcccgcgtatggctggatacttgtcacactggcgtgagtcgttagatgatcctgacactaggatcatgagaccccaacaggtaaaatacataacttgtttgatagatcaaaaggtttatagtttgagctcactgaattgtgtggctgcatataggcctatactggagtgtggatgaggcattacgagccagtgagagaacgaacgttatcaagtgattcggataaggataagtttggtcaagtttccatttcgaatgcatcaagaaggcgtttagctggatcatctgccctttagtctcaatcctaatactcaccaataaagaagaaaacattgggatacctctgggaaaacaagagagtcttttcaacaacatgtgttgttttctttctcttattcttaaacacttaataatacaaccctattcttattgtttgtctgttattttaaaatgttatgatttaataataataatcttgttatagggaacgacatgtacttttgataaattgcgcttttattcctgttaatgttaatttctg

SEQ ID NO: 140793 - DNA, 1152 bp, Arabidopsis thaliana landsberg
gtacattcgaaagaaaggatctggatatttcagagagcacatcaaaatgccttttggtggatccttggatgttgttttcgtagacactggctcagtgaagcaggtaggatcagtttgtatctgtgagtttgatagaaatgtattgttaggcttttcttctgattttgttgtttcattatgtatgattaattgaaactgaaggaagtgcttggtggagcagtgaatgcctatatgatcagtcaattgaaagggttgacaaggattctaaaagcagtagacggagactggtaagttggcttttttcagcgatagattgtcttgatctctcattaacttgtataaaataccgtctctgtcgttatttggtgaccaagtttgctttctgctctccaaaatcagtccttataatctgtgccatgtgcttgatattacaggcgtattgtggttggatcagacccgttactcgcctatactctaactaaggaaccagaggaacctaagagagtggcaaggacatttcatcaaatcatgaccaaatatggagtggtaagacattaaatatcttgcattgccgagaaatttgatggaatgaatcaagtatatgattgatctgagaggaaaaactttgatgaatacaagaacttatatataagcgaaaaaggctgcacaaggggaggcagcaacgagagcttgacttgcattacggttcctaatcaacaagagaaccaaggtccaacgaatgatagtaagaggtaacaagatctcttatcatgacattataatcataaactatgaaagctcaatcttaatgactgagagaagatgcatttttttttgtgtcagagaaagggaagatgggtttcttcttcacagagttagcttctcagagtttgtaagtcccctagtttctttcttgtgttaagatatgtttatcaagaccaagaaaaacataagaaaaaaggtcaataacgtcttctttgttttaccatatacaggttacttatactatcaactcatcaggagaagtcattgacacaaaattagttaagcagaaaggcaaagagaccatctaaggtttcattactccattgctgtgaagcgcacaaacatttcgtattctttgcttaatgaccgaactaccctttgagtggt

SEQ ID NO: 140794 - DNA, 2762 bp, Arabidopsis thaliana landsberg
ggacagtgaaatcgaagaattgaagcacaagcttctccatctctgcaatctctctatccatctctcgtcatcgcatgtttcgcttcccaattcggaagaaagagagacgacgcgtctgaagcatatctccgtaatcggggtgaagaaaaacgcggcgagaagaagaggcagattttcgttttgggagggtagacaaatctggcgaaagtggagggcctaagggcgaggccgtggcttaagccaggagcttgtataaatggagatcaatatgactacgacggttcggaagacgaccattccaggccttggtggcgccgtcgtctcagatccttgtatatggcagccatgtcctttactccgtccacttttcgaatcgctatctcgttgctccttcttgttgctatcgtctccgccgtcatttttctcccggtcgaacaggcaatttctccctccctcctcattcgcgtgtagctttagtgataatgtagcaacgatagtttctgtatattctaagtttagaaattgatacaacggagtatttctggagctcgctagatcactagagaaactgtcctagatcaggcgaatggtactttatatatgatttagaatcatcattaatcatcattgttatgatccctttctgcagaaattgaaggacttcttgttatggattaaggaagatcttggaccttttggtccacttgcattgtaagtttttcatgtttgctactcatttttgtttctaccacttattggtttgttttggtgacactgttttctggctgccgtaaaaaatcttgtgatgagccttttttaccttattgaaatttttcagggctttggcttatattcctctcacaattgtggcggttcctgcttctgtactcacggtagttctggattcataactatgtagtgaaatttagggtgcttttctaagatgtttgtccaaagttttcattacaagataggatacttagacttttaatccggttctgatagtcttgattgtttctctctgcagttaggtggtggttaccttttctggcctgccagtaggatttgtagccgactctcttggagctacattaggtgcaacagcggcatttctgctcggtagaacggtatgtctcttatggttccatctgttttaatatatttcgcttgcaattgtgttgcttgccataaccacagaagtactgattcctgttttgtgcgtcctcacatctaggcattttatctaagtgttgcatcttggctgtctcattgttgctaatgatatatcttttgtctttctggtatcatgcagattggtaaatcttatgtcacttcaaaaataaagcattacccaaagtttcaagctgtttccgttgcaattcaaaaatctggcttcaaggcatgaaaatctagtaacactctctataataattgacagtttgttttccttcagagatctactatgcgtatggcaaagtacctcaatttcctggctacatttaattgattgactactaactaaatgatgatattttcttcctgtgcagatagtcttgctgctacgcgttgtccccatactgcccttcaatatgttgaattacctcctatctgtaactcctgttcgcttaggggaatacatgctggccacttggttgggaatgatggtactgacatttctttaaaatccgcttgtatattggccatttatactttaataatggtggaagaagttagcatgcatgttaaagtgctgattgctaacattatacataatagtaattctaatcttctgaattgttttgatgtagcagcccattacatttgcgctagtatatgttggaactactctgaaagatctttctgatattacacatggatggcatgaggtgtcagtatttcgttgggtaagttttcgctcatttacttccacttgactagtagattggaaatgattgtagatgagcttgaatgaagtcagaagaatgaagatagttttgtgtttctgctgtaatgcataattacttatcacttatcatttatactgagattactaggtttagaagtttgtagtattagaaaaataacaacttgtctgaaatgaagtttgaagtatgccttattttatgaggtttattggaaacatcttggtgtatatccctcaatataatgtagagttgcttattttccataatatgatagacatttctgggatctgaaatattgagaatgtagcttaaaaatcctgaggatgaggatttataaccaagtccaaagcatcctatgtgtagggaagaacattgtgatagtctcgcatctgcatttatttagttggtattttgtagctttgattgaagtatctgagtgcccttgcattgtaagtctgatttctcgtttcttctgcattgtcatttgtggatgcaggtaattatgatggttggcgtagctctagctggtaagtctcttctgcagtcatgtccaaatatatatctagctagcttcactacattgtgagaagtggaatgacaccatgtggtctgtgttttaacccgtctttttttgggtttttgaatgatgtgggtgcagtaattctgataatatgcataacaagagtggcgaaatcatccttggacaaagcattggctgagaatggtactgaattagatgggaagaagaatgacgacgcttccgtactcccgatcgcagagccaccaccggatctacaagagcctctcgttatcagaatcgacccatccaatacttga

SEQ ID NO: 140795 - DNA, 1553 bp, Arabidopsis thaliana landsberg
agatcgatttctctctatatcggagccgtcataaatcatcgtcggagctcgatcgtactattgatcctctcaattttatctcccgtgacactctctatacgatacgagctactttctgggcacacgaaatgcatctcagaggagattcacgcaaacgctatgaccatcggaaaatacagcattataaaccctcacgaggatcatcctcttccttcttcccataaagtcaccgtcagggtaataatcatccgatcggatcgcatttcccttcaatttcttcttccggcgatttcagtataatgcaatgtgtttgatttttaaggtcacatcgccacaagggacggcttatcacgaatcggacggagtagaatcgggacaattctcgtttgtagctgtggaaacaggggattacataagttgcttctccgccgtcgatcacaaaccagagacgacgctgatcattgactttgattggaggacgggtattcataccaaggattggtcgaatgtggcaaagaagagccaagtcgaagtaagtttttcgctttttctttactcttgaagtcttaacttagtcaaactaatctctttagaggaaatagattttgatgcttctaatgacatgaacaatagagcattgcgccggatgtgtgagaatttgatagctgcctaagttacaccaagacatagtgctggaaagtggaaagttatatctgaagtgagaaatgctatgtagtcttggtttataggttatgttggtgcattggtttggttagaacaaggccatgaattaagctgacagggctcgtgtgttactgacctgtgtctgcagtcttgcatatgagaaaatagcttcattagtttcacctttgaaccccatcgatttcttcagctcattcaggagttctttccctgctaaatgaaggtggataggactaggatttaacagacgcagaaaattactatcttgaaatgtggtagataggactaggctttaacatactacagagcaagactagcttgaaatgtaacatagcctcttaaagagattgcagaagtttttgaaggaatgttttgttaaccttgttatggttggatcttgttttatttattggccagacgatggagtttgaggttaagaagttatttgaaaccgtgaatggaatccacgacgagatgttctatctccgcgccaggtaatgacaacaaaacctgtcttcccttgaagtcacttgatcagaggatgagagtgaatcaaaactcaaaacccttcttcatttggtatattacagggaagaagaaatgcacaatctgaacatagcgacaaattcgaagatggcatggttgagttttgtgtcgcttgcagtttgtttatcggtcgcaggtcttcagttttggcacttgaagactttcttccagaaaaagaagcttatctgaaaaccattaccatctcctgagggcagagattgtattgaaaaccctatgactatagctttatatacactactgaactcatttttcattttgttactgaatttttcggaaacagacat

SEQ ID NO: 140796 - DNA, 1101 bp, Arabidopsis thaliana landsberg
cgaaacccaaagaatccacaaaaatggagattctccgcaaattcaaaattcccgggagatccaagtctccgatctttgctttcacagtcaccgccggcctagctctaaccgccgtcactggcagcgccgccgccgtgtccatcttccgagactcaccttccaataaaatagcgacggctgtagaaggcgtcgtccgttcttctcgcgctatctactccgttcgtatcttccttatctctctattgatttcaccatttcctcattccaattcattcattgaatctcttattctctacttgtagatcactctcactgtcgctgattacaagtatactttgcgtagattaccagcagattccgatgagtatcttcagagattaacagaggtgtacaattacatatcttacattcgtgtttaagttttggtttcatggaattgtagttatcaatggcattaggccgattttcttgtagtttgaattacattctaatcggcttattcgtcattggtgaaggcaagttattagagtagtgatacgattgcttgtttaaagtttgcagtatacttcactagtactatgtgatatggtaacatttggtcgttttgattgtgtaggttcattcacggtctgctaaacgaattcttaaactgtgtgaaagtaataaaggtttctatgtgaaagctggtcagtttgtggctacgttgaagctcgttccgaaagagtactcgttggctctttcctcgttgcaggacaaggtaagaatactgttatagttgagtctgtaaacattttcggattgtttgttctattcctaatttgtttatcttgtaggcagttccttgtaactttcaagaaataaagcaagttctgacaagtaacttgggtcaaaatctcacagagatgtaagtcttttagagttaaatgtcagatttgttttttgacgtctgtttttggaagaggttttgacattgctattagttaaaatgtcagatatttatcttttgatgaggaaccaattgcggcagcatctattgctcaagtacatcatgctgtattgaagaatcaccaggaagtagcagtaaaggttaactcctcataa

SEQ ID NO: 140797 - DNA, 991 bp, Arabidopsis thaliana landsberg; identical to SEQ ID NO: 52029

SEQ ID NO: 140798 - DNA, 1064 bp, Arabidopsis thaliana landsberg
aggtttcaggtcggttatcagagcttaaaactaccataggtgctgggttggatcagcgcaacattcttttagagaccattggagataagtttgagcaatggaacctcaaggtattatcctctttggacctttgttctcgctagcagagtgctcattgatacttattatcagtgacagataaaatcaattatcattattaatcttcacctatgcagattcgcaaagaaaaagctatctatcacaccttgaacatgcttagtcttgatgtgactaagaaatgccttgtgggtgaaggctggagtcctgtctttgcagcaacagaagtgagttactttagttccatatagttaaaatgtttgcatatttattagtgccatagtgagtttaaagttttgcatctgcagattcaagatgcattgcattgtgctgcggttgactccaattctcaagttggatcaattttccaagtcctgaggaccaaagagatgcctccgacttttttccgcacaaacaaatttactactgctttccaggaaattgttgatgcatacgggtaagcatcttttctggagcttcatctgctgtttaggaaagaggaaattggaattaggattggtaataagtaacatttttataggattagcggatacttgataatatatctttgcctcttatacactcaataagatataaatttatgttttgatttcacctgtttctaactttgtattagcttccgttttcttaatatggaataccactgaatattttcaaataagctttttcgatgatcaattcagatgatagaaacaacctttcttgcttactttattttttcttctgcaatatccatttgtgttagtgttcgtctcttgaatttcatggatcttctttgatcactacattgcagtgtggccaaatatcaggaggccaatcctagtgtattcacaattgttaccttccccttcctgtttgctgttatgtttggtgactggggtcatggaatctgcctgctgcttgcaactatgtatttaatattgagagaaaagaaactttccagccag

SEQ ID NO: 140799 - DNA, 1977 bp, Arabidopsis thaliana landsberg
gatttttaaaattaggttatacagaaattcgaaagaagaaggatggttctccatgcttttgggaaaaggtaagagtttatgagagattgagattattacaaaaaatctaaactttttttttgtccattttttctcggaaaagttactcttcttcatcgattttccggtggtttggattgtcaacttcatcttcttcttctctttctcctttcattttttttcttgtgtttcttcttttacgtgggtccttcaatctccatgaaggacccgaccattgcttaatcctaaacaaaactccaaaaatctaattcttttcgatctgttttatcttctaataataatactctttgattgctaaaaccgattttgatcatcatcatgcactgtttcccgtgtttctcttcgccaaagaacaagaaatcttcaactacgaatgagaccaacgacaacaacgaacccaaaccaaatggtatttatctcctatcgatgtaccatttcttagttttccttgttcatacgatcagtaaaatgaaagaaaacaaaaaatgatcattttttgtttgtttttaaagataggagacgtgcagaagaaacagaggaaatagagcaatcggaaggaacatcgttgaagatattcactttccgggaattagctacagccacaaagaatttccggcaagagtgtttgctaggagaaggtggatttggtagggtttacaaaggaaccctcaaatctactggccaggttcttccttaaatctctagaatttggaatttaggatacattcatgagaccatcaccaaagttaggtatttttcaatgagccatcatcagaatcagaagaatttgtcttgtaggtggtggctgtaaagcaactagacaagcatggattacatggaaacaaagagtttcaagctgaggttttgtctttaggccaacttgatcatccgaatcttgttaagcttattgcgttactgcgcggatggagatcaaaggcttttggtctatgattatatctctggaggttcacttcaagaccatcttcatggtactaaattgagagattctcattcaacacattttttttactttgaaagaaatgacaatttgaattttgcagaaccaaaagcagacagtgatccgatggattggacaactaggatgcagatagcgtatgctgcagcgcaagggcttgattacttgcacgataaagcgaatccacccgtgatatacagagatttgaaagcttcaaacattttgttagatgatgacttttctcctaagctttctggttttggtctacataagctaggacccgggacaggtgataagatgatggctttatcttcacgagtaatgggaacttatggttactctgcacctgagtatacacgaggcggaaatctcactttgaaatcagatgtctatagctttggtgttgtgttgcttgagcttatcacgggtcgaagagctcttgatactactaggcctaatgatgaacagaacttagtttcttgggtaataaataacaaaccctaatattattgcactttttcaaccaagttaaaacaagaagtttttatcttgctgaacaattcatgttatcgcaggcacaaccgatatttagagatccgaagaggtatcccgatatggcagatccagttttggagaataaattctcagagagaggattaaaccaagcagtggcaatagcttcaatgtgtgtgcaagaggaagcatcagctcgtcctcttataagcgatgtaatggttgcgcttagcttcctttcgatgcctacagaagatggtattcccacaacagttcctatcttatccttcaaagacaagagcatgtctatagccttaagccgacatgattcaaatcttgtatctcctcctcctgagctagctacggaagatgacaaatctagtacctcatcaggcgaagaatcatctttggagagcgaaaaggagagt

SEQ ID NO: 140800 - DNA, 3473 bp, Arabidopsis thaliana landsberg
ttcgagctcattggaagctggggaggctggtagtattacagcgtctatgaaattggccgctggtaacacaagtatgggatactgtaaagatgaaagagagcagaattacgacaaatgcatagatataactcgaatcccgcaccttaaagagatcagagaaaaccagaatggggttgagataggatcagtggtaacaatctctaaagttattgctgctctgaaggagattagggtctcaccgggagtggagaagatgtttggaaaacttgctactcatatggaaatgatagcggcgagatttatcaggaactttggtagcattggtggaaaccttgtgatggctcagaggaaacagtttccttctgatatggctacaatacttcttgcagctggtgcatttgttaacataatgagctcatcaagaggactcgaaaagctaacacttgaagagttccttgaacgttctcctcttgaggctcatgatctggttctgagtattgaaattcctttttggcattctgaaacaaactctgaattgttctttgaaacctatagagctgcacctcgtccacatggaagcgctctggcttacctgaatgctgctttcttggctgaagtgaaggatacaatggtagttaactgtagattggctttcggggcttacgggaccaaacacgccattaggtgtaaggaaatcgaagagttcctgtctggtaaagtaatcactgacaaagttctgtatgaggctattaccttacttggcaatgttgtggtgcctgaagacggtacaagcaatcctgcttacaggtcaagcttggcgcctggcttccttttcaagttccttcacaccttaatgacccatcctactacagataaaccttcaaatggttaccacttggatccaccaaaaccgttgccaatgttgtcttcttcacaaaatgttcctataaacaatgaatataatccagttggtcagcctgttactaaagttggagcttcccttcaggcttctggtgaggctgtttatgtggacgatattccatctcccacaaactgtctctatggagcatttatctatagcaaaaagccattcgctaggataaaaggtattcacttcaaggacgatttggtacctactggagttgttgcagtcatttctcgcaaggatgttcctaaaggcggaaagaatattggtatgaagattggattaggctccgaccaattgttcgcagaggatttcaccactagtgtaggcgaatgcatcgccttcgtggtaagttcaatcatatttgtccatgagaatcagttccatcagcagcatttttagcaacactttgtttttgcaggttgctgatacgcagagacatgcggatgctgcagtaaaccttgcagttgttgaatacgagacagaggatttggaaccaccaatcttatctgtagaagacgcggtcaagaaatctagtctgtttgacattatccctttcctttatccacaacaagttggtgatacatcaaaaggaatggctgaagctgatcaccaaattctcagctcggaagtatgtaatatagtccttttttactgtaaaaattagatatatatgttcaaccgttgtaacttttgatgtgaaacagataagactcggatcgcaatacgtcttctacatggagacacaaacagctcttgcagtgccagatgaagacaactgcattgtagtctatagttcaacacagacccctcagtacgtacagtcatcggtcgctgcttgcctaggcatccctgaaaataacatccgtgtcataaccagacgtgttggtggaggttttggagggaaatctgtcaagtcaatgccagtaagttttcaaaaattgtcctctttttcccctcactttctgcaagaaatggaccgaaacctgaaagctttctactgtctcaggttgcaacagcgtgcgctcttgctgctaataaactgcagcgtcctgtgagaacttatgtcaaccgcaagaccgatatgataatgactggtgggaggcatccgatgaagataacgtatagtgtggggttcaaatctacagggaagatcacagctttggagctagaaatactaattgatgctggggcaagttatggttttagtatgtttattccatcaaatctcatagggtcgctaaagaagtacaattggggcgccttatcttttgatatcaaactttgtaaaacaaatcttctaagcagagcaatcatgagatccccgggggacgtgcagggtacgtatattgctgaagccatcatcgaaaatatagcctctagcctctctttggaggttgatacaataagaaagattaatctccatacacatgagagcttagccctgttctacaaggatggtgctggtgaaccacatgagtatactttatcttcgatgtgggataaggttggcgtatcttccaagtttgaggagagggtttctgttgtcagagagttcaacgagtctaacatgtggagaaaacgagggatatctcgagtacctattatctatgaggttttattgtttgctactccagggagagtaagtgttttgagcgatgggacgattgttgttgagattggtggaatcgagctaggacaagggttatggacaaaggtgaagcagatgactagttatgctcttggtatgctacaatgcgatggaacggaagaactcttggagaagataagagttatacaatcagattcattgagcatggtccaaggaaatttcacaggaggtagcacaacatccgagggaagctgcgcagctgttcgtctctgctgcgaaaccttagtcgaaagattgaaacctttaatggaaagatcagatggtccaatcacctggaatgagttgatttctcaggtattcttccttgatttgctgcttattgttggtgtcaacgaattaaagattgagcttcttcattctgattcaagattttaatgtccaaactcaggcttatgcacaatccgtgaacttatcagctagtgacttgtatactccaaaagacactcccatgcagtacctgaactatggtactgcggtcagcgaggcaagctcttttttcctttctcaaaaatctgaaattggagtggagaaatgaagtaactttggtgttttcatggtgttaataggttgaagtagaccttgtgacgggacaaaccacagttctacagacagatatcttatatgactgtggaaaaagtctcaatcccgctgtcgatttaggacaggtaatatatatgaagagagacctcagaaagcaaatgaatcatttttgtaatgtgttttgtgtgtttctgcttcagattgaaggatcttttgttcaaggacttgggtttttcacgcttgaagagtacatagaagatccagaagaactccttctgacggatagcacatggacatacaagattccaacagttggcaccattccttacagttcaa

SEQ ID NO: 140801 - DNA, 385 bp, Arabidopsis thaliana landsberg
agctacaagactctgtaagagtgaaacgaagcccaatcccattatctgttatgaaaagttcataaaagcccaattaatatacaaattcactacacgaggagaaacgacgtcgttagtggagtggtaagtgttgacaaagtgacgagtgacgacgaccttttgaattaacaatcgaagcagtgactgagtttgatatcaatggaggctacggcggcgccattctcttcaattgtctcttccagacaaaacttctcttcatcttcttcgattcgcgcttcttctccggcttctttattcctctcccagaagagtattggcaatgttaatcgcaaattcaaatctcccagaagcctctccgtccgcgcatcttctacctcagattctg

SEQ ID NO: 140802 - DNA, 2311 bp, Arabidopsis thaliana landsberg
aaaacagaaagaaacatactcaaaactttttaagcagcgacgatcatagatcaaatatgaggatgaacaaaattttacttgtttttgtgtttctaagcattgccactgtaatcaatagtggaacaacaagcaactttgtccgcacagctcaaccatcaactgagatgtctctcgaaacttttccatctccggctggtcataatgctccggaacaggttttgatttcttagttctactttttgattttctggttcttagatcataaatttgtgtttggtaatttagggtttaagtttctgaatttaaaagtatcaatatcagtaaggtctgcacatgggaataattagtaacgattaattatgttttacgtacagaggccacacgttgttttttctattattatttttgtcttttttgttgaagtccctgattgtatattttgtatcttaacaaaacaattaatccatcttgatttcttgtatctttggctaggttcatatcgtccaaggagattacaatggacgtggtataatcatatcgtgggtgacccccttaaacctagctggttcaaacgtggttacttattggaaggcagttgatggtgatgtgaaaccgaaaaagaagagaggtcatgcctctacctcgtcttaccgattttatgactatacttctggttttcttcatcacgccacaattaaaggactcgaggtttgtaatttgtataatttaacttgttatataagtaacaacatcactttcttgtttcaaaagttttataaaagtttctttcttatatcttttcggcagtatgataccaaatacatctatgaggttggaactgatggatccgttagacaattttccttcactagtcctccaaaggttggacctgacgttccatacactttcggcattattggtaattaaattttcttttacctatcttttgaaactagatataactaatacttccaactcgatctaataattacattgtgttttgtaggtgatcttggacaaactttagcttctaacgagacattatatcattacatgtcaaaccctaaaggccaagctgttctcttccctggagacttatcttacgcagatgaccatccaaaccatgatcagagaaagtgggattcgtggggaagattcctggagccttgtgctgcttaccaaaccttcatctatgctgccgggaatcacgaaattgattttgtcccaaacattgtaagttcacattataattctctcaatttatagcttttttctgatcagtagtttcaactttaataaccatatgaatcttaattagggggagcctcatgccttcaagccctacattcaccgttatcataacgcctacaaggcctcgaagagcatatctcctctttggtactctattagacgtgcatctgctcacatcatcgtcctctcctcttattctgcctacggtaattagtaaacacatgaaaaatcaaatatatttgaatgccattgagttttcttatataacaagttatctcatttcaggaaaatacacacctcaatacatttggctcgagcaagagctaaagaatgtgaacagagaagagactccatggttgattgtcattgttcactctccgtggtacaacagtaataactaccattacatggaaggtgagagcatgagagttatgtttgagtcgtggctcgttaacagcaaggttgatttggttttgtctggtcatgtccatgcctatgagagatctgaacgtatctccaatattaagtacaacatcaccaatggcttgagctctcctgtgaaagatcctaatgctcctatttacatcactatcggagatggaggaaacattgaaggaattgcaaacaggtaaagagagtaaacaattttttcaataatattttgttgttttggtgatgtgaaactaacatttgtatgtcttggttgatgtagtttcgtggatccacaaccgagttactcagcatatagagaggcgagttttggccatgcggttttagagattatgaataggactcacgcgcagtacacatggcataggaaccaagacaacgagcctgtcgccgctgactctattatgttgcataacagacacttctttccggtggaggaaatagtttccagcaacattagggcctaagtttcttcttagttgtcgaggatttgtatctttctttagacgatttattatgttagcaattatttggttttctgtttggatatttggtatttttttagcttatgttgttggatttcaataaagtttgtttggattttcataaa

SEQ ID NO: 140803 - DNA, 4763 bp, Arabidopsis thaliana landsberg
tgattgtttctcataaattaggttcttatggacttcccacaattgacaatgacgttgcctgatggccgtgaggaatctgtcatgaaacgtaccacacttgttgctaacacctctaacatgcctgtggctgctcgcgaagcctcaatttacacaggtaatgttcaggcacacagatttaatagttattgatgaatcccattgcctatgctcatttttttttttttttttaatgtgaattccaggaatcacaatcgctgaatattttagagatatgggctacaatgttagtatgatggcagactcaacttcccgttgggcagaagcattaagagaaatttcaggacggctggtaatcttatgcgtttcacttttgctatatggatgttcgtgttgtcctcatctcacttctctttttctcagtttattgacacctattttgctttgttttataggctgaaatgcctgctgacagtggatatccagcctatctagcagcacgtttagcatctttctatgaacgtgctggtaaagtaaaatgtcttggtggaccagaacgtaacggaagtgttacaattgttggtgcagtttcgcctcctggaggagacttttcagatcctgtgacttcagcaacccttagtattgtgcaggtgattatttggttcatgtctgcttccctatcttccattgtagattacatagtcgtatatgttggttgagatgaaccagatggtgtttagttttagatctgccgcagactcgtatatttaagcattttttttctccactttgaaatgcttactcttccattctggttgtttctcttttcttctgcaggtcttctggggtttggacaaaaagcttgcccagagaaaacattttccctctgttaattggttgatttcttactcaaagtattcaacggtatgcttaaatattctcggttcaaacttgtcttggtttactatctagaaatcttgtatataaaacgctgctttttgttttaggcactggaatctttctatgagaagttcgatccagatttcatcaacatcaggacaaaggccagagaggtgttgcagagggaagacgatcttaatgaaattgtccaggtatgtatcacttatccttgtataagtatctattgtggtgaccaatgaactcttgtctcagcaaccctaatacattttgaaggggttgaacgataatcttggcatgtaaacttgacttgagttatagaaggaaaacagtgctagcacgttattcttttcgaaaggaacttatttgacccacacattgctttttgtgtgcagcttgtaggaaaagatgcgctagcagaaggggacaaaatcacattggaaacagctaagctattgagggaagattaccttgctcaaaacgcgtttacaccgtaagatttgttggctcccttcgttttggtttagtactctctctttctctctcaacgggttattcactcttgaaccttttggatgaattttttgacagatatgacaaattctgtcctttctacaagtccgtgtggatgatgcgtaacattatccatttctacaacctagccaaccaggtaaataagatgagatttatacatactatgctaagtggggattaaggtcaattggtttgtctaggtaaaaacccattaattgttttggatacacaggcggttgagagagcagctggaatggacggtcaaaagattacctacactcttatcaagcatcgcttaggagatcttttctaccgtttagtgtaagcaaacgacttgcttctcctcgatttctctatgactctgttacatagcgctctaataaaatggtctgaaacggaattatgggaactacaggtctcagaagttcgaagacccagcagaaggggaggatacactggtggaaaaattcaagaaattgtacgacgatctcaatgctggattccgtgctttggaagatgaaactcggtaagctgtcgagtctccaccgcaagtaaaaaaaatccacagaattgggttgtttttggagaaagagggtttcattcatggtctctttcttgtgtttttgaaccaacaactatcatagtggtcggtattttatttatcggtttggtcgatcgattgagttttagctctgtgagcgtcatgattctccggctgtgctgtgctgtgtaatatgtttgattcgttgttttcatgtttttatttcggtggtaataaggtacagccaatgtgagtcatatatttgatttgatgtaccctctcaattcaataagttaattttatgtccaaaaacatattggggataccgttatttttctcataataaataccatcattttgtaatttttttttcattttatggtttggtggtgtaaacataataaatcggtaattgaagaggaaaatttaaaatcacaaaataatttagttgtactaatttcatgagcaagtctgtgatatgacccatgaatttatttagcacgaccgagttggatcgacgagtcaattagtaagaattgaaagcccaacaggcccaaattggctttccccgtcgcgttctttctctcttcgtcttcctcggccgtagcgcgcgaagaagaaccgccggcattcagcattctgaccctagacacagagtcctccggtcttctgataaacccccatgtggaaggccaagacatgcttccgtcagatttacttgaccgtactaatacggcggtactcgagagtcgctccgccgccgtcttcggtgatccgcgtgacaaacaacgtagcacacctgggaccaccgaagcaaggaccactgccacgtcagctgatatccctgccgccatttcccggtcatccattacctggcaaaaacgccggagctgacggcgacgatggacatagcggcggccacgtcacagctataagctgggtcaagtactattttgaagaaatctatgataaggctattcaaactcatttcacaaagggccttgtgagtgtctctggtataacaatttcattacttctgatcaaatatttgattgagctttgttagactattcttttggatcatcacattgtctaatgaaattcagatacactccgtgaatatatgttaacattttatttttgtatgagagaataaattgtattatctttgtggcaggttcagatggagtttcgaggtcgtagggatgcttcaagagagaaagaagatggagctattcctatgagaaaggtacaattgatcttttgttgttgttgttgttgttggtgtgatcatttcttaggattaggttttccaatggaggtagcattgtacacttttatccgcagattaagcataacgaggtgatgcaaataggagacaaaatctggttgccggtttcaatcgctgagatgaggatttctaagagatatgacaccataccaagtggaaccttgtatccaaacgcagacgaaatcgcatatcttcaaaggcttgtcaggttcaaggtaactcttaattcttctggatttgcggatgtttttacacttgagttcaaacggtgattggtctcttttggttgatcttatagactagtttttaaccttattttctctctctactgcaggactctgctattatagttcttaataagccacctaagcttccagtcaaggtaatagagttttgctgcagaatgactttgtggaagtaagctgttacattttcttgttgattaagcagcacctgaatactcagttatcattctttgtttcagggaaatgtgcctatacataatagcatggatgcacttgcagctgcagctttgtcttttggtaacgatgaaggtcctagattggtaaaactcacttttttgggggtgttgtaatttatcttgataaattgatttggtttctgaattatttgagtttcaatggtcaggtacatcgtcttgatagggaaactagtggcctcttagtaatgggtcgaaccaaagaaagtatagattatcttcactcagtgttcagtgactacaaggggagaaactcaagctgtaaggtaaggagaacttatctgaaattttgaaccaaacatactacggtctagtaaggaacggttgaacataaaattgttaagtgactcgtaaatattgcacaatcttaggcttggaacaaagcgtgtgaggcgatgtatcagcaatattgggcattggtgattggttctccaaaggaaaaagaaggactaatttcagctcctctttcaaaggtagttatctcatttataacctttgcttgctcacacactgcttgtatctgaaaatgattcaaaaacctgtgttcaggtgcttttggacgatggtaaaacagacagggtggttttggctcaaggttcgggctttgaagcttcgcaagaagcaataacagagtataaagtgttaggacctaagatcaacgggtgttcgtgggtagaacttcgtcctattactagcagaaaacatcaggtacttgttaaactttgctatcctctttaccaattttgcgaaagattttgttcttgttttgtctcttgatgaagccaccttctaaaaaacagctacgtgtacactgcgctgaagcacttggtactccaatagtaggggattacaagtacggttggtttgttcacaagagatggaaacagatgcctcaggttgatatcgaaccaactactgggaaaccatataaactgcgcagaccagaaggtcttgatgtccaaaagggaagcgttttgtcaaaa

SEQ ID NO: 140804 - DNA, 743 bp, Arabidopsis thaliana landsberg
cggggaagcgattgagatggcgaggagactagctttagagcaaggattgctggtatatatgataaacctctacttatgttcttgcgtctttcttatacatgacattgggtttaaaacttttgcgaaatctatacaccttaggttgggatttcatctggagctgctgcagtagcagcagtcagcttggctaaaagagcagagaatgccggtaaactaatcacggtgagtaaaaacagattgacatatgtagtaatcacagttggtggtttttagctctaataatttcgtaaaacaggttctgtttccaagccatggcgagcggtatatcacaacggctctgtttagttccatcaacagagaagtccaagagatgagatattagtagcagccattagaaaagcccccaaagtttggtccttttggagagtgtaaacaacaaatctctttgcaatacagaaaagagaggtataaatggtgtttcttttttcttttcttcttgctcaaaagttcaacttcctgttgaggtaatcttacaagccaacacctgtacaggtttcagaagactgtgaggttagagctcacacgagaactgagagataaacatgtctcgagcccaaccagttttattcaaagatttgtgaatgtatagaagatcatagaccttgttgcattattcttcttcttctcactcatatgtcagggaagtatgctgaacaaataaaagtttgatcatctaaaccctg

SEQ ID NO: 140805 - DNA, 543 bp, Arabidopsis thaliana landsberg
ctcacattgcgaggaaaaaagattatttgactcaaggaaacaaaagatacttcggaaatttcttttgttttcctctcaggtaaattttgttgtttgttaatttcttttccttggaaaaaaatttgttttttattttttgatcaatgattcgatttttcttgaaaagatttgattttgttgatgatttggtaatcaaatatgagtaatatggagtcttgatgcagaaagatgatttcttttttggctttttttggggtgcagtgatgaaattacaaaacccagataagaaaaccctaagagaaggctttagtcaggaatctagtgtagtggctttagattctggagttttagctatgagtggtttgaaatgcgatgggaaattcccggtcaaggatgtattaatggaagaaggtggtgataaagtgaggaagattcaagtttctgggggaaatatatcacttgttgttgattttagtggagctaggactagttctaacaaattctttgagtctaatgctagttgggtcaatgagaatctggtta

SEQ ID NO: 140806 - DNA, 308 bp, Arabidopsis thaliana landsberg
  unsure (1)..(308): unsure at all n locations
ctctctctctcttttctcaaatcttggaggagaagaagcaaagaattagactactctgcaacaatggctatttattctgtccataacggcgacaagaaacattggtggttcactcacaagaaggtaactaaaacccataaatcacttatctttcttatagttcctcgatgatctctataatgggttcagtcaaaagacattaactngttctctatatttgtcagattgttgataagtacattaaggacgcaagatctttaatggagagtgaggagcaaaacgacgttgctttagccattcatttacta

SEQ ID NO: 140807 - DNA, 608 bp, Arabidopsis thaliana landsberg
atgtatgtggtacgttatttgcagggagcttcctgcttagctcgaagcttgaaagtagttaatgaagctctgacatctgtggatctaggattcaatgaaatacgggtaaaaaaaaagccctacttcgtttatcaatactgtgtcttcttttaagacttgtaagcaggtcaatcttattattttgcctcatttgtaggatgatggagcattcgccattgctcaagcattgaaggccaatgaagatgtcacagttacatcgataaaccttgggaacaacttcatcaccaagtttggacaggtaagaaacatatggtgcaatggagataatcaaatctttcgctcgacattgctgagaaatttcccttttgtgttatccagagtgcgctcacggatgctagagatcatgttcttgagatgactgaaaaggaagtagaaattttcttctaggagagacattgaagtgaagaagactttgtcactctgtaattttgcaccattagttgttgtttcattatttatgacgttgaaatgattcaagcgagagataaaacatttgttgttccttacggtgagatttaattttaattcaaggaagttttcatgaaaaa

SEQ ID NO: 140808 - DNA, 3695 bp, Arabidopsis thaliana landsberg
gcggttgacgcgtttcgcttttcaaaaaacgacagcgtttttctttggcttcgcggaagaaaacagagtaaatttagatcgaaatgttttttttttctttggttctgtctctgtgtctttttctctgaactaactaatcaaaatccacgagaacaaacaaaaactgaaatcatcttattacttgtttctttgtcctttcctaaccaacacacatgaagtgcgactcgtttcggatggttttgtttcatgagattgttgtttgatcctttggatttaagaaaaaaaagcaagaatctttggactagtttgttgttcacttctgggttttgtaaccaaaggaagtataataataatggagtgttcggtaatccatcatgtggtgattgtgcgactgttactttgggttctatcttacgtgaatcgatcacacgcggtattatatgtcctctctctggttaatcttaacgtggtgtggtgctccgtctcgggagaaatgtatcttttagatgttagagcttcaattttcattggatttggtgaaaaatattgttgtggtgggtttcttttaggttcatgaacgctatgtgatgagattgaggaagaaattgcagtttgaagagaggaagcaagctaaccagagacgtgtaattttctactttgttgtttaagactttaagttgctttgtgtatacatttgtttaagttctagggttcttctcaatcttgtattggaagatactgactttacctttgtttgcatgaaatggtaatctttttttatttttattttttaaatacaactttgtaggttctatctgattctgaatcggtgcggtggttgaatcatgcagtggagaggatatggcctatttgtatggaacagattgcttctcagaagattcttcgtccgatcataccttggttcttggacaagtatagaccttggactgcggtaactctttcaaattttgagtctttccagtttcgttttgtgtctagttagccctttgtagtagtactagctaggccactaactgtagctcagtttacagtcgaaaaaccgacttagtattgatggaatgataatttgtgcagaaaaaagctgtgatacaacacctttatttgggaagaaaccctcctttgttgacagatattagggttctacggcaatctacgggtgatgatcacttggtatagttgcacaatttcagttctataagctctaagttctatagagaaagtataacttatattggagtgtgtacaggtactggaacttggaatgaatttcctcacagcagatgatatgagcgcaatactcgctgtgaagttaagaaaaagacttgggtttggaatgtggacaaagttgcatttgacaggaatgcatgttgaaggaaaggtagtgcattttcttttctgcagcttcacttacacgcttccttcaatgaagtatcttacttcatatcggtatctttaactattgaaggtgttgattggagtgaagttccttcgtcgatggccttttctcgggcgtttacgagtgtgttttgcagagccaccttatttccaaatgactgttaaaccaattaccactcatggacttgatgttgctgtgcttccagggattgcaggatggctagtaagtactgacgcctgatgagctttctctggattttttgagtttttcctcttctaacactccaaccaatatctttctttctcaatcaggacaaacttttgtctgttgcatttgagcagactcttgttgaggtaagattcttgttgtttgtcgcctttctcttcggatgctctggattaatcccctctgtagttaagcaaacactgcattacaattactctagctacatgaagcttgtgtctaattttgcagccaaatatgctggtagttgatatggagaaatttgttagcccagagtcaggaggtaactattgcaggagatgctcacaatccatgacttctatcttgtacttctttttattggttcctcaaacttcttaaaccttcatccaatcagtccatatgagtaccttctttgtctgtgtttgttccagataattggttctttgttgatgagaaagaaccggttgcacacgtcttagttgaagtctttgaagcatcagatcttaaaccatctgatctaaatggttagttttgatattaccacatgcattagtctttttttcctttcagtttgaaagacttggatgttctggtttcaggtttggctgatccttatgtgaaagggaaacttggtgcttaccgattcaaaaccaagatacagaagaaaacattgtccccgaaatggcacgaagagtttaagataccaatctttacatgggattctcctagtatacttaacattgaagttggagacaaagaccgatttagcgatgacagtcttggcgactgttcagtgaacattgcagagtttcgaggcggccaaagaaatgatatgtggttgcctcttcagaacattaaaatggggagattgcaccttgctataaccgtacttgaggacgaggcaaaggtagattgagtttcttctgtttagttttctttaacgtaagagtttcatgatcaactcttatgcaatatgcattcttttacagttgaacgatgatccgtttgaaggagtgacaatatgtaaggaagacatgtgggcttcttttgcttccgacgttacaaataaaggttccttctcatcagtggtatctgacaagtctccaagggttcctgataatatggaaccaataaacatcgaaggacaagaagagactgggatttgggtacatcaaccaggaactgaagtctcacagatttgggaaccaagaaaaggcaagagtcgatgccttgataacaaaatacagtgcgctggcagtgtccgttccactgcatctacgtcgcccaacaatgaaagcagcagcactgataaaaatcaggaagggaagagcgagatgaagtctgttggttgggggctgaagaaaatcggtttagtgttccataagaatggaaaaaaggaagaatgtcatcatacagggagcattgaagaggatatcaggtctcctcggattaatttgaaggcgttaaatcaaaaggatgttggagttaagttcatcgttgaagacaggctatcggggcctctcacaggaagaagtccaaaaggtgagagctttgattctgaagacagtcagcacaaggccatatgaaggatgtggcaaagagttttctgaaacaagctgagaaatctgcaaaacagataaagcatgcgttttcccgtaaaggatccatgaaaccaagagatgggcataaagaaatcgttcctgaatctgattctggaactgattctgaatcttctgatgatgatgatgcgtttacctgtgtaaagaacctggcaacagaaccaggaaaacttacacgcgatgggaatattgaaagaacaggagatgatgatcatgtagattcaacaacattagcaaccgctaaggaagattcaagtggtgatatattagaggattcgacagatgttgaagctaaagaggagaaattaaaggaagcagcagagtcagaaactagagatatggacaccgccatgaacatcaaaactgaagatgagaaaggagagacgcttaaaaatatcgaaggaggggaagaaaaggaatcatcttcaaagtaa

SEQ ID NO: 140809 - DNA, 433 bp, Arabidopsis thaliana landsberg
ccaggaactggatttcccaggaggcaaagtcggttacacatcggagatgaaattcataccggaatcatcttcaaggaggattccatgttaccgggttcttgacgaagacggacgaatcatccccgatagcgattttattccggtacagaaatttcgagaatgtatatcaaaattgatatgagtttggtttagttctaaccgataataatttatgactgggaaggtgagtgagaaactcgctgttagaatgtacgaacaaatggcgacgctacaagtaatggatcacatcttctacgaagctcaacgtcaaggaagaatctctttttatcttacttccgtcggagaagaagccattaacatcgcttctgcagctgctctcagtcctgacgacgtcgttttacctcaaggaaaccgttgcgttcacctccactaa

SEQ ID NO: 140810 - DNA, 1934 bp, Arabidopsis thaliana landsberg
aaacctccattaccttcgtctttcttcctcagacgccctacaatggctttgcctttgtctggcacgcgccacctcacgcgcgctctcctctctaatgtcactcttatggctcctcctcggattccttcctctgttcactacggtggatctcggctaggttgttcgacccggttcttctcaattcgatgtggagctaaccggtcaggttctacttactcgccgcttaactctggctctaactttagtgatcggcctccgacggagatggctcctttgtttccgggatgcgattatgagcactggcttattgttatggataaacctggcggggaaggcccgactaagcagcagatgattgattgttacattcaaaccctagcgaaagtcgttggaaggtataatcttcagattatatatgttaattgtctaggatgctgttgaaatataatgaaaaatgtatgaaaaaatctagggcagagaattctgtttactttgtgtatctgactctgtatagtgtttgttgttggttttggttagtgaggaacaggcgaagaagcgaatctacaatgtttcatgtgagaggtatttagggtttggttgtgagattgatgaagagacatccactaagcttgaaggtctttttacttagaacttgtttgttatgtttactatgtgttaactgataataaagaagagtattcttaaagtgttactttgtttacaacaggtttaccaggtgttctgtttgtgcttccagattcctatgtggatcctgaaaacaaagattatgtaggtaattgttctgccaactattcaagtttaacctatatgtttgctttatttctccaaatgaaatctttgctagtgccattgtcattgcaaattttgagtcttagtgtgtgcctctcttgaaacatgaaggaaatatttttataagtccatcttggcaaagctaatgagtcttttggctatgattagctttgaatgctaatggactgacatcgtctattttctcttaaccgatttgtgcagatagttaataatatatctaactgcagtctggtttagatgaaaacatatattgcatgcaactctagagtgcttttctcttggaacgtgaagacgtgttattgattatcagtccatcttggcgaagctaatgagtctttgggctatgattagctttgaatgctaatggactgacatcaaataatttttatcgaagccgacttttgcagatagttagtgtaatatctacctgcagaccggtttagataaaacatacattgcatctcctgagtgcttcttgtttcaattagtccattttggtgaacctagtgaatctattggctctgtgtgcgcactaaattaatgacatgaccagttgagaagataaaatatatacgcactgatagtatctgtgtgtcactctccctagccatgtaaaagatagttcaaagttcatcttggtaaagttaataattcttttttagcaatgtttagtttagaatgctaatagacttgtatcagtttcttcacttggtgtatgtgtggattttgaatagcaacatgattaatttcctggttgagaaaaagtatatatgtaaccataataacccggtatagagatgattggaggttttagtaaagaaccatggaccagaagtccttcttggcaaagctagtagctttctgccatttctagttttgaatgttaatggactcacatccagattcgctctttcttgtgctgtgctctttatattgaggaagcatggactcaattacgagagatacaccagctttacatttttcaaattagatctcaactatacagaagaacatttactgcgatcgaattctgatttattcttaatcgttgtcgatgacttgcagctgagctgtttgttaatggagagatagtccaacgatca

SEQ ID NO: 140811 - DNA, 1193 bp, Arabidopsis thaliana landsberg
ccctcgattcacgcagccgcaccattgcgtttcttcatcgaggaaaaaaaaaccaaatcaatctcactcttgtagctcgctattctccagaaatttctaagatttagctttctctaaagctcgatcgaactatctgggttttggtttaaaaggagatgatgagttcgtatcgcagcttacacggctgcgatgttttcgatttgggtttgtgatggatggtttgaagatttcttgtcctgtggatgtttcgttgccggctaagcttatgggatctgaagggtgtggtggtggagttagggtttcgtcgaataaagcagataacaactgtgacaaggctcgtgtctcgattggtgttaattcttcaattgagcgttgtagtagtgcttcaatcaacaagaaaggttagctaatttctcttcactttgacttcaaatttcatttggggattttgaaattattcttctttacactgagtacagtttatagttgtagatccaaatttgtgtttttgttcttggtaaatttgcaaactttttcaagtttggttggatgggttttgatttagtcttgttcttgatttaggagcaggaagtagcagtggagcgtctgattcatcgttatggcgcaagttaatgcattcacatgactttgtacatgataggcttactaaacttcgggttgacaattcatctgagcctcaaaatggttattcaccgattgctagtccagaaagtgcggagtctcctaggaaaagaggaaaactttctagaagtagtagtggtaatggcactccgagaaggacgaaattgatccttttagatgaaacggtgaggacacagagagataacgacaccaaggagatatgtggacaaggatctactagttgcttaggtaactctcatgtgatttctttgtctgaaattatgcattcatttagtcagtagcatatattttaaaagaatatgtaatatgttggtgaaagtttaatgtttcacactctgaaaaagtgcctgtgtatcattttgccttgtgaggttacttattaccttctgttgaatgctaaacagataaaccgtttgtggtgaagcaacggagcagttgtaacggcaagcgaggtgataagaggatttccaaagttccggtgagaactttatcaaccatcaattcagcgactggcgagaatgcatttttcg

SEQ ID NO: 140812 - DNA, 818 bp, Arabidopsis thaliana landsberg
tccatctctcagccaacaacgactcgagtcgaggagatagattctcaaagcttccattaaacgttgtgggtatttttttagctcaaatcaacagctaacatggttacaggcgataaagaatcttccttgatgaagaagaggaacaagagaagccataagagaaagcgagaggaggatttcgaacgtatagattcacttccttggagctcttctatacccattggagaagacgacgaaggcgaatccttctccactctattttcaggctcaggccagctcgacggaggtaaaagttttggttttgtttttgaattttttgaatttttgtttcctctgtgaactattattgtgggtgcctgatttttgttgaaatttatgcaattcatgttttttttttaggtaactcaaattatcatttatctcaaattagtgtctggattcaattgctttgccttgttagttcactgaaagtctgaaactttatactttgtttgggcaggttttctatcacttgaggagattgatgaagctgattaccatctaactctccctaccattgaaagtgaaataacagagagaaaacaatctccagaagatgatgatgataccaacgagacagtggatgagatgattgaaggagaagaagctgaagaagatggagaaggaagggatgacgaggatgacgaagatgacgaggagactcgtctgaaaaaagagaagacagcttcgaggaataaggagaagaaaatagagaagaagaagaagaagcataagaagattaatgaggccgcaaagaatcaggacgcttctgctggtta

SEQ ID NO: 140813 - DNA, 438 bp, Arabidopsis thaliana landsberg
gctctatctcgtttgtaggcagtgccaatttcaccacttgtgttgtgtgtcagcggatatagaatctgagaggaatatttaaagattctccctttgcttcttcttttttataccgtttctattaatgtttgggactcttgcttccggcgaaatcgaaactgccagactgaaccgtaatttggggattacgtccaatttaggggtttcctgcggtggatttgaagactttgctatgagattccaaggggaaaacatggtgccatacaaaggtgaagaggaggaggaggaagaagaccaagtggtggtgagcgaaacgacgccgtttcagtttcaacaacctttgtttctgcagcagcagcagaagctcgttgttgggtatgctctgacttctaagaagaagaagagtttcttgcagcccaagcttgaacttcttgctag

SEQ ID NO: 140814 - DNA, 1102 bp, Arabidopsis thaliana landsberg
atgaaatcggtttacgctgttttttccaatcttggtttagagaaacaagggaccgggacttcagctcattctttagacattctttcaacatcttatcctccttcttcaggatcattcaaagaagagtttattcaatatcttcaaccacttcttgattttcattctcaaatcgaatcacctttcttgataaatgcttatcccttttttgcttataaagatagtcctaaagaagttccattagagtatgttttgtttcaacctaatcaaggtatggttgatccaaacactaatcttcattatgacaacatgttgtttgctcaagttgatgcgctttactctgccattaagactttgggacataccgatatcgaggttcggatatcggaaaccggttggccttctaaaggagatgagaatgagattggagcttcgccggagaacgcggctttgtataatgggaacttgttgaagttgattcagcagaggaaaggaactccggcgaagcaatctgttcctattgatgtttatgtgtttgctctgtttaatgagaatcttaaaccgggtccggtttctgagaggaattatggacttttttacccggatggtaaaccggtttacaatgtcggtatgcaaggttatttacctgatattatctatacttcaagggcaactacaattaaggtaaattcctcttttcattttttatatttacatttttaacgttttgtttcattattgttttgagaaaatgttctaaaaacaatagaatttttactttctattgcatagtttatatattatgttatgattaaaattaaggaatatatatatatatatatatatgattatatatgataagatattgataatgtggatgttgaataattgtgcagattttgaatttgtggagagtcgtgatgggtttggctgtggcttggttcatactcgatatgggcgacaagatgaggatgagataagcttcgcttgtgtctttgtctgtccttgtaggatttttgtttgaatatgttagttgattataggtgaggtatacaattctttgtcatgtattggattcacaaaaattaaaaaaattaatttattc

SEQ ID NO: 140815 - DNA, 5993 bp, Arabidopsis thaliana landsberg
  unsure (1)..(5993): unsure at all n locations
atggaaggaaaggtggctaaacctagaggtagaccaaggaaacgccccagaccagaggatcttaatggggtatctaatcgagggaagaggccggttttcgaggtgaaagtggctgtacctagatctcttcttggtcgttatgtgttgaaagatgttgatgacagtggagtttttcttgggaagatagtttcttacaatactgngttgtacagagttgaatatgaggatggtgattttgaggatttggaaacttgttatcttcgccagttaattattggggatagttactttgatgatgaattacgtgctagaaggagtaaattagacgactttattctgaagaaggacgaaaagaagaaaacagattgcctgaagaacaaaggagttgaggtgcccacatgtaatagcccaagttctgtggcagaagttgaaagtggttattcatcttgtggtttgcctgagtgtgaagatgacatagatccagatttcgaaagtatgtctcctcttgttccaccagtggagttgccttcttcatcaggaacaattggtatccctgaggagactgtggcacatctattatctgtatatgggttcttaagatcatttagttttcagctttatatctgcccatttgaactcaatgattttgtgggagcgttgtatttctcgggaccaaattctttgttggatgctgttcatgtggccttgttgcgggcattgaagggtcatctagagagactttcctcagaagggtctcaagtggcttcaaaatgcttatggtaagcacagacaacacttgtcatccacagttttcatacagatatttctttgtttcctcttgcagatgcttctagttatctttcatatattccgagttatttctgtgaaacagtaaaattaatttgttggatatctgaatttcaaggaagcagaactgctgacattatttttcaagctagtaaaaatatacattgttatcttatgtatgcatacatgcaacaaaccttttataacagctgggagaaaaaggcctatggctgtacagggactgcaatataagcctcttattcatagtttaggtgaaacttgttttaggtctcccattatcccatattttagtggataacaattcgggggttttgttgcattgccatctgcaggtgcattgattggagcttgctcgatgcgctaacttggcctgtttatttggttcagtactttgctgccatgggacatgcaagtgggcctctctggagattttttaatgaatttgttgtggagaaagagtattgctcgtcacctgtagtaatgaagttgaagatcctgcaaattctgtgtgatgacgtctttgatgtagcagatttaagagctgaaattgataacagagaagaatctgaagttggatttgatactgatggagtaactgctgaacttcctgaaaatggacctagaagggtccaccccagatttgctaaaacctcagcttccaaggagaaagagcttagtgaatttgttgcagtgaaccatgggataagttcattgagcgactcaaaaaattggagttcaagatacactgatggtggtcctaatggagatagcccagatctggatgcaaacagtgatgaatgtaggctctgtggcatggatggaacgttgctgtgttgtgatggatgccctttagcatatcattcaagatgcattggtgtggtcaaaatgtatataccagatgggccgtggtattgtccagagtgcactattaacaaaaaggggccgaagattgctcatggaacctcacttagaggagctgtacagtttggaatggatccacatgggcgactcttcttgggtacttgcaatcacttactggtgtatgttttcgttgcctccattcatacataatttgttttgcatttgttggaattagcaacctgatctttcaatctattcccctgctacatagtttaagattcattacttcctaggcaaatagttgctaacaggttttagccagcattactctggaacatttgaatttgcttgttgtgacactgatgagcattctccttcttttctcttaaatcacaggcttaacatatctgtcaatggagatgcagttgtcaagtactacaatgttaatgacatatcaaaagttgtactagtgcttatatctgcatcaaaccatacactagaatatgtagagatttgcaaagcgatcacccaatactgggatcttcctgaaggtatctccttgagggaaggggagattggtttaactcaagcaaaggatagagaggatggcaaggtttcagagatcactaagtcagatagtgcaaatatttccaatagaagtcatacccagactgtgtttgacctccctacatctactttgggtaataccaacagtgctgttacaggaggttcatgtggaatacaggggaaaaaattggctgctcgtgttacctgcctgggtttatcatttaaacctcattcttacattaatcattacacaaatggagaattggctgcatcagctgctgctactttggctatcctaatgtcagaggaaacccatgaacctgatctacacaaatttagtaatgccaagaaagctgcatcaagtaacatcttgctacagatgaaagcattttcgatagtagcctcgagtttcttctggccaagtcctgataagaaggaaattaccagagaaaggtgtggatggtgtcattcttgcaaactcacatcagcaagtaggagaggatgcatgttaaatgcagctgtaacaggggccaccaagagtgctatgaaaatctacagtggcctttttcctctaaagaacggggagggggtactttctagtatcgcagcatatgccctatatctcgaggaaagcttacgtggtctcattgcggggccatttcttagtgagagtcttaggtaccagtggcgtaagaagttagaggaagcttcaacatgcaaagcgatgaaagccctcctgcttgaagtaagtaaaactttttcattctaaaactgttcggttcttattcacgttcttttgctattaaaaataattgtactttttcttgtcatttgcactgttcagatttgatgttgtcaactatatatagtgatatctttggtttgtcactatatgtatcgtgttttcattggcatgatatggttcattttgcttgttcacagcttgaggaaaatatttgcagtattgctctgtcaagcgactggcttaaactaatggacgattggttgatagaactttctatctttcaaagcgctccagttactgttggggccacacagaaacgtagacctggtaggaggaagcagaggaaccaggctgaaaatacggcccaaggttctgatgatgatagctttacttggtggcgaggggggaagttatcaaaaattatactcctcaaggcagtcttgtcgaagcctaagataaagaaagcagcttggcaaggtaaacctgattggttatgctttttgcgcttgtgaacaattctcacgtatgcattcttatagttttttcttttttgatacttcgaccggagatatcttatttgagttttactctggggatagtgctaatttgttttgttttttttattccattaggtggtacgaaaaagtttcctgaatttaattatggtgatggttcttacattcctaaaagaagcaggcggtctatttggaaagccgcagttgaaagtagcaaaaacatttctcagcttgctcttcaggtttgtcttctattatcaatgcttattcaaatgattctgtgtatatgattgttttttaatcccctgaaattcaactgaattggggccaggttagatacctggatatgaatataagatggagtgaacttgtacgcccagagcaaaacgtgcaagatgttaaaggtccagagacagaggccactattttcaggaacgctagtatttgtgtcaagaagattatagataacaaggttagatacggagttgtctttgggaatcaaaagcatcttccatcccgtgtcatgaagaatgtcattgaagtcgagaaatctgaagatagaaacgaaaagtattggtttcatgaagcacgcgttcccttatatttgatcaaagaatatgaagaaagtttgcatagggtggtacacataccttttatcaagaagccatcaagaaaaatatcaaagctccagaaaaggcaactaaaagcttctcgagcaaacatattttcttatctagcctctcggagggacaacacggagaagtgttcttgtgcatcatgccatctcgatgtttttttgaggtattgttttagctttcttcacctttcaagatgcttcttaaaaaatctgatgtagctcatttatttgtgttcccgtcctctacatgtctatagggattcaataacatgcagtacttgccaaggtacactacactcgcttgctgatggatttgacaacatggcaatattacgtttgcttatttgggaatttatctgaataattgtggatttactctttgcctctcaggtttctgtcacaaggaatgtactatgagttcacaacacacaactgggcagttggaaattttggtaacctgcaaacggtgctaccttgcaagagcacgttcacaaatcaatatcaatcacagacaaccaacaacacccagtgtcctgatcaacggtcaacttcaaaatgcagccacttcaaacacgaagacacagattaagcgtcttaatcaacagttaccatcttccaaaacaggcgacaatgcttcaggagttaaacaaatcactccggatttcaatttggcaccgaaaagtaaacacaagacattgtcttggggagtcatatggaggaaaaagaacttggcagacacaggtgttagtttcagacatgaaaatgttatgttggctggacgatctgatcagccgaatctgcaaccagtttgctggatctgcaaattgccgtataatcctggcctaacatatattcactgtacaagttgtgacagtaagaaaatttttactcactctaaattctatactgaattgtacatttcgtcaatgccaccattttgctcttataattctaatcctagatctctatgcagtgtggtaccacatcgaagcggtcaagctcgaggagtcaaaaattcctgaagtggttgggttcaagtgttgcagatgtcgtcgtatacgatcaccagattgcccttacatggatcccaaactcaaggaacagaagcagatgaaacaagtattcttcaggaggcagaagcatgggcaaggaaataccggaattgattcggattccgaaagaatgtctgaaccgaaagactcgttgccctccactccctcatttctctctgaagatacgtttgttccagaggatgatcctctcttggtgtcagtttcaaaagtcgaacaaattacaccaaatagtttggatgtggaatggaacgaggatggttgtgtgccaggaccacagaagctacaagtgaggagaccagtaaaacgtgaagacacggacgggaataataatctttcttataccgagtttacaatgcatcccgaatcaatgcctgttgtgaaaccagaaatggagccaacatttcctgtcatggaatgggatgcatctggcaatagcaacaacatgaatgaaggcgagcttatgtttgactacgaagacatggaattcgaacctcaaacatatttctcgctgaccgagttgctcacaacagatgatagtggccagtgcgatggatatggagatgacaaggatgcttcaggaatcacggataacccaaaccctcaggttgaggcaatggaacagtgcacgtcatttctctatgaaaatacaattccatgtcagatatgcaagcatgtggagccaggacctgacctcacatgtcagacttgtaatatgacaaaacaatctcactgttctccatgggaggaggaatctacgtgcataggag

SEQ ID NO: 140816 - DNA, 459 bp, Arabidopsis thaliana landsberg
tcagctgcttgtccttcctttagaatctactactacgacggagccgccggtgccgtcccttttgattgggaatctcatccaggcacacccaaacacccctcctctgagctacctactctgccacctctcactcctccgccgtctcatttctctttctccggcgaccaaatccgccgccgttccaaaaagtccaccaagaaaatcctcgcactaatcccgacaaggctcttctggctatcgggcgatcacaatggtaaggctaagaaactgtcggcttcatcaccaccatctctgtcggagagagtgttgatcgacgaaaatgagtacgatctgttcaagtttcaaacagaaaggaatgtcatgcgaagattttcatccttcgactcttctgctgactacccaattcagagatcacaatccacttcctgcttcggaatccgcagatgtttcctctgctaa

SEQ ID NO: 140817 - DNA, 2682 bp, Arabidopsis thaliana landsberg
tatgaattgactcttccattattaggcgaaaatatcattatggagagtacattaatgtttttgttaacgaataaactataattatacgtttataaatgggttcattgcacatttgaataattgaaaatataattttgtttcgcaaattaacgaatgagcatcacacacatccatgcatgattcgacacctacctaatcagtttactactgatcaatgaatcatttggtggaatattatcccgttcattgtgctgaaattgaagtgtgcatagacaacagaaaataacaataatgctccattgccagatgatgtgtcactatctaactggttagtgaaaccaatggaacagggtgcccctacttgtgtgatatgtggatgactggattgcttctaaagcttaacaacctccactagagactttcttgagcaaaaaagattggttataaaggaccaaccattgtcatgttattgagtgtcatttttgtgagggagagaaataagagagcaaaatgagcataaataggaatctgttgaatatcataataatcctttgtatatgtctcaatttgggttgtaacgagggagctcaagaaagagagactgattggcatactatccaagtcagctctctcctcccttcatcatcatcatcttgtgttctttctcccagaggtgatgatttcttagccaattcattttctgatatgattcattgtcttttagctttatagacaaggtagatgaatagagactctcaattaggaaacttaggttataaatcttgcttccaagtagttgatactattaccatcacagattcacaggactaagaaagcgatagtaaatatgtctttagtagtatatgttgaatgggggaaacgacaataattagtagttgtaatcaaaattttgttagctagttgagtgagttaacaaaaattgcaacaatttatactcttttgtgagttaattatataagtacaactctgtatgactccacataagttgaaaattttctttatcatttccttagatagtaatacatcaacgaccacaaaatataaggttttggtttttttttggtgataacttaaagaatctgtgggcagtgggcatattcgttttctttctaacgcgaactttttatctcattcctattcagcgtctactacaaagtcttcactgcacgtgacgcatagacacggcacgtgttcgcgtctaaacaatggcaaggccacgagtccagaccatgtcgagatcctaagactcgaccaggctcgcgtaaactcaatccactcaaaactatcgaagaaactcgcaacagatcacgtcagtgaaagcaagtcaacggatctaccggctaaagacggaagcacactcggttcaggtaactacatcgtgacggtcggcctcgggacaccaaagaacgatctatcactaatcttcgacactggaagcgatttaacgtggactcagtgtcagccatgtgttcgaacttgctatgaccagaaggaaccaatctttaacccttctaagtctacttcttactacaacgtatcctgctcatcggctgcgtgtggttctctctcttctgctacaggttcaatttcagtttttgtagttccggttattacaaccattataaccgtatccggttttgttaaccggtttttaatttttaattaggaaacgccggaagctgttcggcttcgaattgcatctacggtattcaatacggcgatcaatcgttctccgtcggatttctcgccaaggagaagtttacactaacgaactccgacgtatttgacggcgtttatttcggttgcggcgagaacaaccaaggacttttcaccggtgtcgccggacttctcggtcttggtcgtgacaagctttcgtttccgtcgcagacggcaacggcttacaataagatcttctcttactgcctcccttcctccgctagctacaccggacatctcacattcggatccgccggaatctccagatccgttaaattcacaccaatttcaaccatcactgatggaacttccttctacggccttaatatcgtcgcaatcaccgtcggcggtcagaaattgccgattccttcaactgtattctctactccgggagctttaatcgattccggcaccgttatcactcgtctcccgccgaaagcctacgcggcgttacgaagctcgttcaaggcgaagatgtcaaagtatccgaccacgtcgggcgtctcgatcttggacacgtgtttcgatctcagcgggtttaagacggtgactatcccgaaagtgggcgttctctttcagcggtggcgccgtcgtggagcttggttcgaaagggatattttacgtgtttaagatatcgcaggtttgtttggcgtttgcagggaatagcgatgacagtaacgctgccatctttggaaacgttcagcagcaaacgctagaagttgtgtatgatggtgcgggtgggcgggtcgggtttgctccaaacgggtgtagttaagttagttaatgaaaaacagatcggggaaaattttaaatttatggatttggcacaaattagctttatccttaatcaagtgtgtaatttgggtaaagatcggaattcgtgatggtctttgaagtaattgtatagtaataagtttgtgtggatgatacaacaattacaagaac

SEQ ID NO: 140818 - DNA, 2643 bp, Arabidopsis thaliana landsberg
caggttgtatcgccggaggttgtttccgtttacctctctcacacctatttctcttcttctatccgacattcgaaagctctctctctctatctctctttttaccgcgcttcctacacattgtggcagacatcaactcctacctaaatctggtagcagcccattttcggatcgaattgaccccaaggagatcacatcaggtataagaatctcaagttagctcgtatcgtcttctttagctttcactgcgtttcccgttgcttaaacatgttcaatttcgatttattcgagtgtgatctggatcggcttcgttctcaatttcgtttttttcccttctctgagtttggatccagtcaagtgattttgatgcgataaagctgggattgttgagagagaagatcaattctggttaatattgactatatttggctcttctgtgatttgcagtttttgggggttttgaggaatgaatttcttgcttcgatctgcttcttccgctactcatcggcctccggtgatcgaaccaccagctacgccgcctcaacctccccctgaaacagcgaagcccggagttactttggaagggctgattgctgaagagcatttcccacaatatccatcagtagatgaagatctcgatcgtgtgggtgatggatctggagaccttgatggtaatggagagtcaaatgctaagtctggtggctctggtatggagagattctctgatgtgtctgaggaacaaggatggatcgccattccatacagtatataacttactctctctacttaaaaagtttttaatttgaagttattcaattagagagccttttgttacttatccatgattcggtgatttttcattacagaggagatccctgataactggtctgagtcagtggatattcattctttacggtcgttggatcgttcctttgtttttcctgggatgctgtttctcatattctcatctcaccatttacttttaaagtgcccttagtgattgaacaccgcgacattttgtaccatcctataggggagcagattcaaatccttgcatgcttatctgagagtaaaggagacacagagattattaccccttttaaggttgctgaggtaatgatcagacatgaaacaatgagaggtctctgacaatcaaaatggagatatgtctgatggggcgagtacgccatcaggggatggagaaatgagtcctgatgctcaatttgctactcagaatggtgacagtccttgtaaagagagtttggattcacaaaaagacttatctgatggtgaatcaatcttgaggatggaagatcataagagacgaacagaagatttgctttccaggtttcagaagtctcatttctttgttaggattgcagagtctggtgagccactttggtcaaagaaaagttctctggtcgcagatacagagatggatgaagagaggaaaagaacaaaaagtagaccttgtgtcagtgcttttgtagatagaggagacttcgatcctaatgtttctggaggtgtagctagaagtaaggcaaaatgctgtgccttaccaaatggagatatagtggtatgtgatggtaaatttgttactttcttttttcgtaataaaactaggatagtctgtttgaattgatttatgaaccagtgaaattcctcttcttgtgtaatgcattgtctgatttatgtgaatttaccaccctactcgttcagatattctgaactttgataaccgagttgatggacctactgattcttagacaacacctttgtttggaaggatgcaggtctctttacaagtttatattgtcgactgtcccaaagaacccatcatagagatactgcagtttgagaagcatcaggaccaggaccaaaatcctgagaacgataaggatccatatgggaatcttttaaagtggttgataccgctggataacactatttctcagcaaccccgttctttaccacctccaataacccctagcccaagtatcagtagcactgcacacaagccagcgatatcttctacctcaggctctcaactcttctcatttggtcattttagaagctactcaatgtccgctctgcctccaaacactgcaccagttactggacccataaaaacacagagctctaaaccatcatttgatattgaagattgggacagttactcaggccaaacggtacgaaacggtcagaagtctgggactgaagagctcttgtcttttcggggtgtcgcattggagcgggataggttttctgttcgttgtggactcgaaggcatctacatccctggtagaaggtggaggaggaaactcgagatcattcaacctattgagataaactcttttgcagctgactgcaatacagatgatcttctctgcgttcagataaaggtttgtctctgcatctctgttaatttttggtgttattgtggtcaattttttttctgggatgcatcctaacttaccttttttactggcagaatgtggctcctacccatgctccagatattgtaatatacatagacgccataacaattgtttttgaagaagcagggaaaaatgcttccccttcttcagtaccaatagcatgcattgaagctggaaacgagcacagtttgccaaatttaactctcag

SEQ ID NO: 140819 - DNA, 1303 bp, Arabidopsis thaliana landsberg
ctgcttgcctgctacaatgggttacgcccagctagttattggtccagcaggcagtggaaaggttatgctatagtctatgttaagttaatttctgttaactagtttcatcagtgagatttgactaactgtgtttttttgtgtgttttggatctatcagtcaacttattgctcgtctttgtatgaacattgtgaaactatcggtcgaacaatgcatgttgttaaccttgatcctgctgcggagatcttcaactatcctgtggctatgggtgagtgaagaagtttcttcttgttcaattacctttggggggagttttgagtgcttctcacttttttgacatcgttgaatgcagatatcagagaacttatttctttggaagatgtgatggaggatctaaagcttggtcctaatggtgcccttatgtattgcatggagtatcctatgttttggttacattggcaacttgagaatgttactagctttgtaaaatcgggtcttccaaagttgttaactttgtgtgtaaaaatagaataagtacatgatatgttttggattagccttaacttttaatccataggtatcttgaggatagcttacatgattgggtggatgaagaattggagaactacagggatgacgattaccttatctttgattgtccaggtacatacatgatcaatgagtttatctctgatctatgtgtttgataaagtgtgtggtttctacaaagctatttagtgttggcataccaatatgaagcatcccaactatgtttaaattctgtgaattttattctgttaataggccagatagagctgtttacacatgttcctgtgctcaagaactttgtggagcatttgaagcagaagaacttcaacgtctgtgttgtttatctgcttgattcacaggtattatataagttctatctcccttccactacttactccttattgtagtgaaccattttgcctaactaaagatgaatttttgtttggatcagttcatcacagatgtaaccaagtttatcagtggttgcatgtcatctctcgctgcaatgatccagcttgaattaccacatgtcaacatcctctcaaaaatggacctcttgcaggacaaaagcaacattgatgagtatggattcctatttttccctttgtttttctccgttgcagtttcggtatttattaaattgctttgtgtttgacgtggctttagttacttgaatccggagcctcgcacattgctagcagagttaaacaaaaggatgggtcctcaatatgcaaaactaaacaaagccttgattga

SEQ ID NO: 140820 - DNA, 496 bp, Arabidopsis thaliana landsberg
gttgttcccttatataaagaaactcttcctttcataccaaaaaaaaaaaaaaatccattttcatttctcctcttaaaaaaccgccatgacctctctctccaccgccggttaccttcttctccttctccttctccctataagctacgacggtggcttcatcggagccgccgatgcagaacatgacctcagagccactgatctccataatcatcgccatcgtcgccaccgtaaccaccatcgcggagaagagtttgagtactcagccatatcatgtagagcttactcagcctcattggacgagtttggcgccgtaggagacggtgtgacttcaaatacagcggcgtttcgcgacgcggtgtcacaacttagccgtttcgcagactacggtggctcattgttatttgttcccgccggacggtggctcaccggaaactttaacctgaccagccattttacgcttttcctccaccgtgatgctgttatcctcgcctctcaa

SEQ ID NO: 140821 - DNA, 457 bp, Arabidopsis thaliana landsberg
agtgcctttccagctcgagaacgtagaaaaattgatcaacctggatttcaattggctaataccgggttagtgcacttaggctatatatatctgctttactactgaaatggacattttggatgttgatggcggttttgtatatcaggacatggaagaagagtacatttcaaagatggagacgagaaggcgaagaatctggaagcacttgttcagaagcacagagagaaacaacttgtttcctttagcaaatccgggaaagcttaagatatgtatgctgattctaaaccggttaatcaaactaaaccagaccgaatgtctctacggcctgactggtctatgtgtcagttagttcccacgcgagtgatgtatttatttctacgtaacattgtgaacctgcttaaacgcttactagattgaaacgaagaccgtgagtaataaagtctcctctttcctagtg

SEQ ID NO: 140822 - DNA, 1699 bp, Arabidopsis thaliana landsberg
  unsure (1)..(1699): unsure at all n locations
agagacggaaaaaaacggtgaccctgtggtttctgtgaggttctggaagctttgtgttgatcctcatttactacacgaagctttcttgttagaaaattttgacatatttgaatggtcaaaatctaaaccattggaagattggagcgatatgtacagagaagtaatcaggaagaatgagctctatgtgccatgcaatcaagatggtcgaagtagtaatgaggtggcttcacttgcaaaccacgcttcaaattcttcaccaaaagctgcggtaattgccaatgaaaactctgcgttccagaaccccaaagaaatccataagaggaccggggagcttatagaggtacttatttttcttacattgacgaacaagtcactgatattgttgaaactttcttatcttttgagatcgagtattctaatctttataacaggccctttgtatcaacgccattaaccatcggcaagctgcattagctagcaaccgcaaggtcagtatatcgtcgtaatttgcctttaccacttgttctatctttaatttcctgtgaaattcataagtttttgtaacttgccatatgctacgcaccaaaactttagatatgcaaagatgagtctgcatcctggaaaacatccattaaccttttatctgtatcctgcattcttgcatcagtatctcgagataaaattttcagatgatattgcatgtcccatatgaagaccaagtttatgtcaatctgttgttattttgttgttgcagtgttttattatgcttagtggtaatgtggcaggagacatagacacatccctaaatgtgcattcgtgacatgcagggtataattttctttaacctagaagatggtgattcttcccaaaatcagtcagactatatctggtcagatgctgactggccacataatggttgggctaactctgagtcaactcccgttccaacatgtgtttcactcggtgttggtcttggggataagaaaggagcacaccttgggttaggtggggccactgttggagttgtttctctttacaagcctgggaaagctgacagagttcctggctactctgggttaggagcgatagcggatccaggatcattttttacccaggtcacacatagctaaaaaaaaaaaaatttgataagccaaatatatattttctcataacattaaataaaattcacgtagatccgccggtggttaggagtctctggtctaggttgggaaactcaagaagaatttgaagagtttgttgatcctcccccaacagttgaaagtgttattacgagagcattctctaatcacccgacaatgcccctcttcttggttggctcaagcaacactcacatatacttgtgggaggtttgtgcctaaacacttgcaccatctgttttaggagttcggagtaaatgatatgacatttcttatctatccttgtggatcttataatgcaaaccttgcatgttacagtttggaaacgaaagagctactgcaacttatggtgttcttcctgctgcaaatgtttcccnnnnnnnnnnnnnnnnnnnnnnnnnnnnngtgcaattcggtccattcggacacagatttgctagcgctgcactggatggaactgtatgcacttggcaatcagaagttggaggaaggagcaatattcatcctgttgaatcatctctttgcttcaatggccatgcatc

SEQ ID NO: 140823 - DNA, 1513 bp, Arabidopsis thaliana landsberg
attgacatggacactattgaagtcagtaacctgaataggcaatttctattccgtcgttctcatgttgggcagtctaaggctaaggtaattttgcttgagctaagtccaaggaaagccagttcataagagttaatatatttttaccatatcaccaggttgccagagatgcagtcttgagatttaggcctaacattaatataagatcataccatgcaaatgtgaagaatcccgagtttgatgttgattttttcaagcaatttgatgttgttctgaatgggctggacaacttggatgcaaggcgtcatgtgaatcgcctttgtcttgcagctgatgttcctcttgtagaaagtgggacaacgggcttccttggacaggttattctgcttgccttttggtcttgcagctcttctttctcttatcattattctatgagttagatgcactacaatgttaggcttgaatggtgtactgttgtcatttctctcgtatctgactttgcaatacttgcttgtaaaaatcaggtaactgtgcatataaagggaaaaacagaatgttatgagtgccaaaccaaacctgctccaaagacttatcctgtgtgtacaataaccagcacgccaactaaggtattaacaccttcttgtttgttccaaatttttgtgaatcttggggaaattatattctatcttggcttatatagtattatcctaagcatagagcttgtttttgatgtgccgatgaattttgaattgattctgcagtttgtgcactgtattgtatgggcaaaagacctgctctttgcaaagttgtttggcgacaagaatcaagataatgatcttaatgtgcgatccaacaattctgcaagctcatccaaagaaacagaagatgtatttgaacgttcagaagatgaagatattgagctgtatggtaggaagatatatgatcatgtgtttggttctaacattgaagcggctttgtccaatgaagagacatggaaaaatcgcagacgaccaaggcctatatacagtaaggatgtcttgcctgaaagtctgactcaacaaaatggaagcactcagaattgttctgttactgatggtgattcaatggtctctgccatgccatcgcttggcctgaagaatccacaggaattgtggggtctaacgcagaattctcttgtgttcatagaagcattgaagttgttcttcgccaagagaaagaaggtctgtgtggtcctttttgtaaactctccttgtctatagataagtttcggtgcactgattaattcatggttttatcgatatgctgccacaggaaataggacaccttacttttgacaaagatgatcagttagctgtagaatttgttactgctgctgcaaatatccgtgctgagtctttcggaattcctttgcacagcctttttgaagcgaaaggtattgctagaaacattgttcatgctgttgctacgaccaacgccattattgctggtttgattgtcattctagcaatctaagtgc

SEQ ID NO: 140824 - DNA, 329 bp, Arabidopsis thaliana landsberg
gtcacctatcacactcctccacgtttccctatccatgttatcaaaagtattcgtgaagaggcatctcttatatttcaaaagcttggtttacgtgactttgctcgcattgatggatggtatttggctcccaattcaaatttatcatcacctgtaagtgaaacgcttggaggaaccaagtcaggagatattatattcacagacatcaacctggttagcctagtgcaatttcaccggccttcaaatttacccggagctactaatactttgcattgttcttagaagtaacacttgaatgcatatctcaaatgctcttacagataagtggcatg

SEQ ID NO: 140825 - DNA, 1445 bp, Arabidopsis thaliana landsberg
aagtaaccgagttatatacaacgagtcatcaagagaaagaatccccccaaaaaatggccaagtcattgaacatccttattgcagctctctcgctcattgcattttctcctttttgtttgtgttccaaagcctatggaagtggcggctatctctttcctcagttttatgaccaatcgtgtcctaaagctcaagagattgttcagtccattgtcgctaaagcattcgaacatgatcctcgcatgcctgcctccttgctcagactccatttccacgactgtttcgtcaaggtctcaagcttagcaaaatttcgtaacgtttaaaaacatacggaaattttccaatcttaatatatttttctccttgtgatatatatttgtgctgcagggatgtgatgcttccatactattggacagcagtggaaccataatcagcgagaaacgatcaaaccctaacagaaactcagcccgtggtttcgaactcatcgaggaaatcaaacatgccttagaacaagagtgtcctgaaacagtttcttgcgctgatatcttggctctagccgctagagactcaactgttattgtaagtactcatcacaattcactacacacaaaattagttgattattatcaataatttgacaaatgaaataacagacgggtggaccgagctgttaagtacctctaggaagaagagacgcgagaggagcaagcttgagtggttccaacaacgacattcctgctccaaacaacactttccaaaccatcctcactaagttcaagcgtcaaggccttgatctcgtcgatcttgtctccctctctggtatacatatctatccatctttattacacgaaacattttcaataacttattacacttttaagaagcggatacatatgatttataggaagtcacaccattggaaactcgaggtgcacaagtttccggcagaggttatacaatcaatccggcaacggaaagcctgatctgactcttagccaatactatgcaacactattgcgtcaacgatgtccgagatccggaggtgaccagaccctattcttcctcgacttcgcgacaccgttcaagtttgacaaccactacttcaagaacctgataatgtacaaaggtctattgagctctgatgagattctgttcacgaagaacaaacagtccaaggagctggtggagctatacgctgagaatcaagaggccttctttgagcagtttgctatatcgatggtgaagatgggaaatatctctccgttgacaggcgccaagggagagatcaggcgcatctgtcggagggttaaccatgcttattaatacaaatccatctttataattatgtgcaatataatgctttcgtttctcattgagttttcaatttcttttggctttgtttgcatgagtgtgtatcatatgtttattactcaaatctgattttgttt

SEQ ID NO: 140826 - DNA, 3072 bp, Arabidopsis thaliana landsberg
  unsure (1)..(3072): unsure at all n locations
aggaccccccaacggtatgaaatcactggtgatctactccataaggtatcttttgattaaccaagaaaagtatgacatttttatcggggaagatattggttctcttgattctgaaatctgcatttccaggaaatctcgatgttctttatggacattgttaatgcttctcacagctatgcaacaggaggaacatcagtcagtgagttctggtactaccattacctgactttagtctttggttcattgtaacatgactttttgttttaagttctaaccatgatttgggaatggtaatattaggcaagatcccaagagaatggcgactgcactgcaaactgaaaacgaggaatcatgtactacttataacatgctcaaggtaggattttaaacttttccccctctttctatttgctcaaggtaacatactaacatatcaacacttgtacaatttcaggtctctaggaatctgttcagatggacaaaagaggttagctatgcagactattacgagcgcgctttgaccaacagtgtgctcggaattcaaagaggaaccgatcccggactgatgatctacatgctcccattgggtaaaggtgtttctaaggctgtgacttatcacggttggggaacaccttatgattccttttggtgttgctatggcactggtaaacttttaaccacaattcatctggttttctacatttttcttgtttcaaagacagattaattttgaggtaatggtagtaattgaatctttctgtccacaggaattgaatccttctcaaaactgggagattccatatattttcaagaagatggtgcaactccagctctttatgtcacccaatatatatcaagctcacttgattggaaatctgctggtctttcaatatctcagaaagttaatcctgttgtgtcgtgggatccgtacatgcgtgtgacattcactctttcttcttccaaagtggtaaaacttttgcacaacttgatgcaacatgttacattgaagaaagagtctgatggatccaattttgttgcagggagtggcgaaggagtcgactttgaatctaagaattcctgtttggactaactctataggtgccaaagtatctttgaatgggcgaccctgaaacgtaccaacttcaggtgatttgagcattaggttctaaaaagcagaactcgcttgactgttacagtcnggagtgggtgaaatgagaatcatattgtacctgtctttttctttgcaggtaatttcctatcaatcaaacagaaatggaaatctggtgatcaagtaaccatggagctaccaatgagtatcagaaccgaagctattaaaggtataaaacacaattacgctgagtagagttggttcttgattattgtgtataaattgtatgcaactctgtagtgtcaaagcaataacaacagaactgattttacattatgtcagatgatcggccggagtacgcatctcttcaagccatactctatggcccttacttgttagccggacacacgagcatggactggagcatcacaactcaggctaaagctggaaactggataacccctatacctgaaactcttaacagtcaccttgtcacactctcacaacaatctggaaacatatcttacgtgttgtcaaacagcaaccaaaccatcataatgaaagtatcacccgagccagggacacaagacgctgtttcggcgactttcaggctcgtgactgatgattctaaacatccgatttcgagtccagagggactaattggaagccttgtcatgcttgagccgtttgatttccctggcatgatcgtaaagcaagcaactgatagctccctcacggttcaagcttcttctcctagtgacaaaggatcttctagctttcggttagtatctggacttgacgggaagccaggaagcgtgtcgttaagcctagagagcaaaaagggttgttttgtgtacagcgatcaaacattaaagcaagggacgaaactaaggcttgaatgtggttcggctgcgactgatgagaagtttaaacaggcagcaagctttagtttaaagacaggaatgaatcaatacaatccaatgagtttcgtgatgagcggaacacagaggaactttgtgctatcgccattgtttagcctaagagatgaaacatacaatgtgtacttcagtgtgcaagcttgaagaaataaacccttttaaaactcctttggaatatagacatgtgttcagatgttcagcctcttaggtggtttgtgactctgcgtttaatttgcaatatcatctaaatatgtatgttgatgttacaataaatataaacaaatgtgtttttataagttatgctaacgatgaatccatgtctttctgaaatcagaatcatagtttgtgcattcatgaaatattctcatggtgtagaaataaaatgttgaaagcaaaacaatgtttgcagacataaagtatattcggttgtgcaatgaaacaatgatgtagacaaaaaaaaacagtcctatcaagcattgattttcttaaccactaaattcaaaaaagtatgcaattttgatccacacacccttagcttaaattaaatcgtcacattttttttcaactgtcgaaactgaatcatgattctaagaacaacatcgtcattataacactctttagaatcttaatcaaaaaattaattgtgtaatatatagaatgtacatgtatccaagcaagggcaacaacattatgaggttcacttgcccgtgatgaatgggtgagctaatgcctgtgacactgtaagtctcttttgaggatcaagtgtgaaaattttgtccaaaagattcctgaaatgaaccaacaccttgggatcttcatcctcataacgtcgtctaattactgaacctaaatcttttggctttacgttgaccattattctccttattgtctttccagtaacactatcctcctctgtagcatagaagcataagtccttatcaaagtgttgatcgataaatgctcctttgcgaagcatctttttagggaagggacctttcagttccatatgcaggcgtaacatatcat

SEQ ID NO: 140827 - DNA, 1818 bp, Arabidopsis thaliana landsberg
atcttcgagtgtgagtggatccagagagagaattagatatttccgacacgaggcaaattcctagtggctcatggcgtcatcatctgatcacacggcgaagataatcgacggcaaggcgattgctcataccatcagatcagagatcgccgaggaagttcgcggtctatctgagaaacacggcaaggtaaacgcatcttatgaatcagtgtcctaatcttgacatgtctctccttataattctccgttcttttataagatgatagcactattgaaaatttactctcttttagctttatggtttaaaatgactagatttaagcagctatgatcacaaccttctattgaaaatgcttaacagggtcaaatgtaagctccattttagttagatcactgttattttgtttcgctggatttttgagctgcctgcattacttcaagtggcatactatcttatttatacagatagtgtgtgctaagcttataatgtttgatatcattgtaataaaatagaaggaacgagagtatgtgtaataaatggtttagtgcgtttgttcagttgcttcagttggacccctttatatagtttcaagaatgtacgagattcaatcgaatctgattttaccttcatgcaggtcccaggactagctgtagttattgttgggagccgaaaggattcacagacctatgtgaatacgaagaggaaagcgtgcgctgaggttgggattaagtcatttgacgtgggcctaccagaggaagtttctgaagctgatcttattagcaaagttcatgaactaaattcaaatccggatgtccatggttagttgtggcggtaaataatacttgattttgtatgtcttctcggttatcattagtctaaactattaaggatagatagaaactttaatgtctatgcaagtctttcgttttggtataaagcaaacattccttgctctcctgtgcttatataagctttggtgtttgatttgcaggcatattagttcaactcccattgccgaaacatattaatgaggagaatatattgggtgcaatcagcattgataaagatgtcgatggcttccatcctttgaatattggtaagctagccatgataggcagagaacccctcttccttccttgcaccccagaggtacttctcctttttttgcatatagacttcagtctctttcaagccagaaatctcagtgttctgtttttcttctgtatcaactatgaggtgattttctgtgtgtgcagggatgtttggaactcctagctagaagcggcgtaaagataaaggggcaacgagcagttgttgtaggtcggagtaacattgttggtttgcccgtttcacttcttttgctcaaggctgatgctactgtcacaactgtacattctcacaccaaggatcctgaggctatcatacgggaagctgacattgttattgctgcatgcggacaagcccacatggtgattttcattgtcatttagaagataatttagtctacctcttgtagatcaatgtgaatagtttacaattcaaatatactatcgttttgacatttcagattaagggcaactggataaagccaggggctgcagtaattgatgttggaactaatgcagtcagcgacccgagcaagaaatcaggataccggttggttggagatgtcgatttcgcagaagcttcaaaagttgcaggtttcataactccggtccctggtggtgtaggcccaatgacagtggcaatgcttctcaggacaccgtagacggtgcaagcgtgtctatggcgagtaaaacaatctactgtatgtaataaag

SEQ ID NO: 140828 - DNA, 549 bp, Arabidopsis thaliana landsberg
ctaagaaagcgcgcgaaaattggcaacccaagttcgccatagccacgaccacgaccttccatttctcttaaacggaggagattacgaataaagcaattatgggcaagcaaaagcagcagacgatttctcgtttcttcgctcccaaacccaaatccccgactcacgaaccgaatccggtagccgaatcatcaacaccgccaccgaagatatccgccactgtatccttctctccttccaagcgtaagcttctctccgaccacctcgccgccgcgtcacccaaaaagcctaaactttctcctcacactcaaaacccagtacccgatcccaatttacaccaaagatttctccagagatttctggaaccctcgccggaggaatatgttcccgaaacgtcatcatcgaggaaatacacaccattggaacagcacgtggtggagctaaagagcaagtacccagatgtggttttgatggtggaagttggttacaggtacagattcttctgagaagacgcggagatcgcagcacgcgtgttgggtatttacgctcata

SEQ ID NO: 140829 - DNA, 590 bp, Arabidopsis thaliana landsberg
aacagggtaactccggaactagagctaaagaaaatcttaatgatgccatatgttctgctgaggttagtctgtcattggttgatttgtattgtcaagatgccattttcttcttttgtttctcttcacagtttgtcattttaacacaggaactctctcataagatacaagagataaaatcaaaagccgaacaaaccgaagcaatggtccaagacatatgcagcgacattaaaaagttagattttgcaaagaagaacataaccacggcggtcactgctcttagtcgcctcacaatgttaggtaagttatcaataatttactctggtcaagctatcctgaaataggcaagagtattgaaatcaaaataggggttacgtaacatgatgttgctggttagcctcttagtgaattttattttattatttatgtagtaaccaaaatgtatggcatgaacttagttaaagttgaccaagtacacccttcatatgctcattaatgagactcgctgcaatgttttggcagtgtctgctgttcaacagcttcaggtgatgacgtcaaaaaggcaatacaaggaggcagctacgcagctggag

SEQ ID NO: 140830 - DNA, 8888 bp, Arabidopsis thaliana landsberg
aaacttcggaatccgatggctaacttaccgaaatcgtcggttaattacccgggaactctctctcctctagagccaaataggccatcaccacagccagatagaaccccggtccctcattctcctccagtagtagcttcacctatacctcctaggtttcctcaaccaagttttagaccagatcagatgtcttcaccgtcgatgaaatccccaagtttgttgtcacctgcgaatggtatcagaaccggaagtcccattcctcgcttgagtactccgcctggtcctcctgtctttaatactccggttaaaccagctgctgtgcctttccgtacctctccagctactcctcagcctatggcatactcttcagctaattcttctctgcccgtatctacaccttccttttactcaaacgggtcatctgttggatctcagcgtgatcttccagatgttgttagaatggaagaaccaatagctgcagactcaccttatgttttgttttcagcaaataaggtattttacttaactttcaattcacatttggtgtgcgtcagtgttagctaattgtgtaatttatttatctgcaaccatcactggccgtttcatgtaggttttaaagcagaagaagctagcaaatgttgctagcttggggtttggagcaatagtttctgctgggagggagattagtcctggtcctcagattatccaacgtgatccacatcgctgtttgaactgtggagcatattcaaatccctatagctccatattaattggctcaggccaatggcagtgtgtcatctgcgagaacatgaatggaagtaaaggtgaatatgtggcttcgagcaagaatgagttgcaaaactttccagagctttcattgcctctgtttgattatgtacagactggaaacaagagacctgggtttgttcctgcctctgattcgcggacatctgcacctgtcgtccttgttattgatgagtgtttagatgaaccacatcttcagcacttgcagagctctttgcatgcatttgtagactcgcttccacaaactaccaggcttgggattatactgtatggtcgtactgtttcaatatatgatttctctgaagattccgttgcttctgcggatgttatttctggtgcaaaatcaccatctgcagagtcgatgaaagcgctgatttatgggaccggtgtatacttgtcaccaatgcatgcatcactaaaggtagcgcatgagatattctcgtccttaagaccatacacattgaatgtacctgaagcctctagagataggtgccttggaactgccgttgaggctgctctggctataatccaaggaccatcagccgaaatgtctcggggagtggtcagaagagcaggaggtaacagtagaatcatagtttgcgctggtggtcccattacatatggtcctggatcggtacctcattcaatgagtcatccaaattatccatatatggaaaagacagccataaaatggatggaaaatttggggcgtgaagctcacaggcacaatacggtcgtcgacatattgtgcgctggaacttgccctctcagagttcctatcctgcagccacttgcaaaagcttcaggtggtgttttggttcttcacgatgattttggtgaagcctttggtgtggacttgcagagggcagccactagggcagcaggttcacatggtctgcttgaagtacgatgttcagatgatattcttataactcaggtgattggacctggcgaagaagcacattcagaaactcacgagacgtttaagagtgatgcggctctctctattcagatgctgagtgttgaagaaacacaaagcttctctctctcaatggagaataagagggacatcaaaagcgatcatgtatttttccagtttgctttccattattcggatgtttatcaagcagatgtgtctcgggtaattacgttcaaattgccaactgttgatagcatctcagcatatcttcagagtgttgaggacgaagcttctgcggtcctcatctccaagagaactcttttattagcaaaaaatcagaaggacgcagtcgatatgcgtgctacagtagacgaaagaatcaaagacattgctttgaaattcggatcacaagtgccaaaatcaaagctttatagcttccctaaggaactatcatccctcccagaactcctcttccatcttagaaggggtcctttactgggaaacatcattggtcatgaagatgaaagatcggtgctacgaaatttgtttctaaacgcatctttcgatctgtctcttcgtatggtagcaccccgttgcttgatgcaccaagaaggtggtacattcgaggaactaccagcgtatgatctctctatgcaatcagataaggctgttattcttgaccatggcacagatgtatttatttggttggtaagttactcttgtcttcattctgtgtcttaattattttcggatcacttcagtttaatcattcattttggttgatttagggagccgaactgtcagctgacgaggtgaagagtgctgcagtcttagcagcttgcagaacgttagctgaagagctaactgaattccggtttccagctccacgtattctcgcattcaaggtccttaacatttcagaaccttatacaatttttctcaaaagaatcacacactttctaacctttctttttttatggattcaatatctatctgctaatccattgaaacataattcaaaatcttgtatatattgaaacataacaggaaggaagttcccaagctagatattttgtttgccggcttataccagcacataaagaccctccttatgagcaggtaaaaacatactaaaccatgtcagaaagaaaagacaaaactatcattgcggatcttaatccatttttttttattttttttcttctgaacccaattgttttgtgcaggaagcaagatttccacagataagaacattgacgacagagcaaagaatgaaactaaagagtagttttatagagtttgatgaagccagtttctgcgaatggatgaggagtttgaaagtagtgcctcctgagcccaggtagtcatacattttattcttgcttcatcgtttttttttgccgccttttactgtcagaacattttttttgttctctgtgagtcttttgtttttaggattctctttatatgatctccagttctctcaagtgaattatatactttgtccgttacagcaaaataatgtgtagagatgttgaccgtgatttttatttttaccattttacagtcgatgtaatgccgtgtcaatttttaccatccatgcttagcacttttttggtttgaatccaagttatttgatggtacaaatcaatcggtcacctaaatttttaaaatctgcattatcataggcacatacatgccgaatatataaaataattcgtgaaataagttaaagctagaaaatatgtaagaaactcaatgacgtggcaaaaaaaagagtatccaccagaagttgagtctaggggtataaacgtaattaacatcaccttatccccaacgtctcaattctctctctcgtgctcttcactcgacgacacacgaaaaccggaaatcaaagatttcgggttttcttcagccggactgtttttcgctcccgccggaaattctcccggctctccgtcgaagatgatggtgactccactctgcgactctcagttactttaccaccgcccctcgatctcacctaccgcttctcagttcgtgatcgcggatggaatcatcctccggcaaaatcgtcttctgagctcttcgtcgttttggggcaccaaattcggaaataccgtcaagttgggagtatctggatgtagcagctgctctcggaagagaagcacgagtgtgaatgcttcactaggtggtcttctcggcgggattttcaagggttctgataacggagagtcgactaggcaacagtatgcatccatcgtcgcctccgtcaatcgcttggagactgagatttcggctctctcggattcggagttgcgagagaggactgatgcgttgaagcaacgggctcagaaaggagaatccatggattcacttttacctgtaattttctgaatccttcagtttttggttttgacaccaatgtttttgattcagttgtggaaatttcaaattgtaggaagcatttgctgttgtgagagaagcttccaagagagttcttggactcagacctttcgatgtacaattaattggtaacacaatctctgtggaatgttattcctatggtttcactgttaagaattttttatttgagtgcactctctatttggttctaattgcaggtggtatggttcttcataaaggagaaatagctgaaatgagaactggtgaagggaaaacgcttgttgctattttaccagcttatttgaatgcattaagtgggaaaggtgttcatgtggttacagtcaatgattatcttgctcgaagagattgtgaatgggttggtcaagttcctcggttccttggattgaaggttggtctaatccaacgtatgtctcttttctctgaacttctttgtcaatgtaatcagcatcttctttgctcgttgtgagttatagatgctttacgcatgtggttactttgacagagaatatgacacctgaacaaagaaaggaaaattatttatgcgatatcacatatgtcaccaacagtgagcttggatttgattatctgagagacaatctagccacggaaagtaattcttgctttattttctcctgtcattattgattgtatgagtttattttgtatgttttttctgagttagtttctgattgtacagagtgttgaggagctcgtcttgagggatttcaattattgtgtgattgatgaagttgattccatacttattgatgaagcaaggactcctctcattatctctgggcctgcagagaaacctagtgaccaatattacaaagctgcaaagattgcttcagcctttgagcgggatatacattacactgtaagaatcctcagttatttcttttgttgtgtgaaattttatagtggagttggcaatccatcttccgaattctaactggtcactaaggttttttggtgtggcaggttgatgaaaagcagaagactgttttactgacggaacagggttatgaggatgcagaagaaatcctggacgtgaaagatttgtatgatccccgtgaacagtgggcatcatatgttcttaatgccattaaggcaaaagaactttttctcagagatgtgaactatatcatccgagcaaaggaggttcttatcgtggatgagtttactggtcgtgtaatgcaggtacttgtttatattcatcttaataagaaatatcactatttatcattttagtgatctcagtggctactgctgataaatattcttaggccacaagaacaacatagattaaaaaaaaaacagtacgtaggaacccactgaataagttatttctttcagggaagacgttggagtgatggactacatcaagctgttgaagcaaaagaaggcttgcctattcagaatgaatctattactctggcgtcaattagttatcaaaacttctttctgcaggttggaaatgcatactttccactttttgattattgtttgcattgtaatgtataatatcttttatgttgtagtttccgaaactttgcgggatgacgggtacagcatcgaccgagagtgcagaatttgaaagcatatacaagcttaaagttacaattgtacccacaaataagcccatgataagaaaggtttgtctcctatcttatgctctgaacttgtacctcaaaatttagactgttggtcttcacaattgttctccatcggaagatctaaaattcgtgtatgttggccttctagtgagatctgttaaagtggaaaaatgttaaacatccatgttagttctggaaggacattgtatgctgtactagtttccgattttgattttttcttttcaaaaaaaaacgtttctctttccctgtcttatacctttttaaatcactttcaggatgagtcagatgtggttttcaaggcagtcaatggcaaatggcgggcagtagtagtggagatctctagaatgcacaagacaggtagggctgtgctagttggcacaaccagtgtcgagcagagtgatgaactatcgcaactgttgagggaagctggaataactcatgaggtaaggctttcatgtcattttgattaataaatcttggacgcgtaatctatgcaaaaatgaatccaagatacatatgctccattagtattagttcaaattttttttttttgacatctaaacaaatggtgtatgtaaagacaaaccaataaaaaaatcaaatcaattatattccttgtacaagaatactgacagatgatgttatatatatgttgcacaaaaaggtcctcaatgccaagccagaaaatgtggagagggaagctgaaattgtagcacaaagtggccgtttaggggcagtaacaattgccacaaatatggcagggcgtgggacagacataattcttggtggaaacgcagagttcatggcacgtttgaagcttcgtgagatacttatgcccaggtatcatgcatgaagcattcgaagttataaataatactttattatcgctaataaacattttgtccacataagaaagatcctttatccaccattgataaaattgctacaggttatgtactttgtgtaacaaagaaccttggagttcatgatttctttttagctgaagttttgttacgttttatgttaccacagagtggtaaagcctactgatggtgtttttgtatctgtgaagaaggcccctcccaagagaacatggaaggtttggcctttctagagtctctggttttggtaaacatgagattctaatggttacactgagctaagtagaattttttgacgattcaggtgaatgagaagttatttccatgcaaactgtcaaatgagaaagcaaagctagctgaagaagctgtacaatcagctgtagaggcttggggcccgaaatcgttaactgagcttgaagcagaggaacgtttatcctattcttgtgaaaaggtgaacaactgagaaatcctggaagtatatgttcatatgttaaattttagtttgagtcatttctttcctccttttctcagggtcctgtccaagatgaagttataggtaaactgaggactgcatttctggcgatagcgaaagaatataagggctacactgatgaagaaaggaagaaggttagttctgttacagcagagcagtatgtgaatctctgtcaagtgtctgttgttgatcgtttattctcctgaactgctgcaggtggtggaagctggtggacttcacgtggtggggacagagcggcatgaatcacgtcgaatagacaatcaggtttccttaatagatttgtttcaaggagatttatggttgattcaggttcctttctcagtgaaataaaccttcttcactatgttttgttcccctcatacagttgcgtgggcgaagtggccggcaaggggatcctggaagttcccgattcttccttagtcttgaagataacatattccgcatttttggtggagatcggattcaggtgacatttgtatctacaatttattgattcttctggaaaataatcatctaaacatagttgtcgtataactcttagggtatgatgagggcatttagggtggaagatttaccgatcgaatccaagatgcttactaaagctctagatgaagctcagagaaaagttgagaattacttctttgacatcagaaagcaattattcgaatttgacgaggttctcaatagccaaagagatcgtgtttatacagagagaaggcgtgctcttgtgtcggacagccttgagcctctgattatcgagtatgctgaattgacaatggatgacattctagaggtaagccgtttgatattgatgcccagctaaagaaggtcgttattccccctgagtctttgtataccaacagttgaaactcgttttaccattactaggcaaatattggcccagatactccaaaggaaagctgggattttgaaaagctcattgcgaaagttcagcagtaagaattatacttctttaggaaaacatttcacatacataagcactatacatttgtttaagctctcataaaaattcaacctcttaggtactgttacctgttgaacgatctcactcccgatttgctgaaaagcgaaggatcaagttatgaagggttgcaagattatctccgtgcccgtggccgcgatgcatacttacagaaaagagtaagttatagatggattcttagccttttcacattggtataagataccaggagctgtgtggttaataaagcttgtttatgattcataggaaatcgtggagaaacaatcaccagggctaatgaaagatgccgaacgattcttaatcttgagcaatattgataggttatggaaagaacaccttcaagcactcaagttcgtgcaacaagctgtggggctcagaggatatgcgcaacgcgatccactcatcgagtataagctcgaaggatacaatctatttctggaaatgatggctcaaatacgaagaaatgtgatatactccatatatcaggttcttcattaaatcaaaacctctgcttcacttcacacaataatttactcattcaagttttgattctttttttttgtggcagtttcaaccagtgcgggtaaagaaagacgaagagaagaagtctcagaacgggaaaccgagcaaacaagtagataatgctagtgagaagcctaaacaagttggtgtcacagatgagccatcctcaattgcaagcgcctaa

SEQ ID NO: 140831 - DNA, 1067 bp, Arabidopsis thaliana landsberg
atggatggtaaggttacttatttaataatgtgtagttgtttgtttcggttttcttcgctttctcatgggattttgatgtgaactctattaggtacactgcttaacagtaaaagtcagatttcggaggcaaatgcaaaagctttaaaagaagcccttctgaggggacttaaagtagtcatagctacggggaaggtgagaagacagcagttttacaatgacttcatgtttggactattctttgatctgtccaacaatatctttccttattttttaatatttgcttgtctttgaaatgttttggagataggatatgttcctaaatttatttatttatcacagtcccgcccaggtgcgatcagaatcttgaagacggctgatctaactggatccgatggcattatctcagagtcctctccaggcgttttcgttcaggtttacttgctctaacatcagggaactagtgaggtgcaccaatatcaatgtagtctcactaaatatctgtttaattacagggattacttgtctatggtagacaagggaaagaagtgtatcgaggaaacttagaccaaaatgtctgcagagaggtaagtccacttaggatttagactacaacgactcacagaattaattctcacatcctcggcttagttcacaaaccatgcattagaattctggaacccagtctctttgcatcatgtaattctctaccatgttaagcagcaaaaagctacctaagtacctatgatagtgctcaacttattatccctgtgtatcgtgattgaataactgagttctaggaatcctatcttatacttactaaaatgttgatttgttatatacagacctgtctttattctttggagcatagaattcctctcattgcattcagccaggatcgctgcttgacattgtttgaccaccctcttgtcgactctcttcacacaatctacaatgagccaaaggtaggttaatgaaactgcacgctctctccccatctaaaaatgatttttgacagcttcttgctaatctctccatgatttttaacaggccgaaattatatctcggtt

SEQ ID NO: 140832 - DNA, 1770 bp, Arabidopsis thaliana landsberg
gatttttcagtgccgttgggatgaaatcgactctaatcataatggaagttataccttttcttgttttggctgtaagtcgtgtctatttctaatattgcttgcaacttaaatatgttagctgatgttgtggcgacgttcttcatattgttcttaatttttttttacttctacttggaatatttttatcgacaggtcggtgttgataatatgtgcatcctggttcatgctgtcaagaggcaagagcaagagctgcctttggaaagaagaattagcaatgcccttatggaagttggaccatcgattactctagcaagtttagccgagattttagctttcgctgttggtgctttcattaaaatgccagctgttcgagtattctccatgtttgctggtcagtaaaactcttcagtatacagtttgaatgctttcattatctactttttaacgagtatatgcatcatgcttgcagcattggctgtccttttggactttcttctccagattaccgcgtttgtagctttgatagtttttgacttccgacggacggaggataagcgagttgattgcttcccgtgtattaagacatcaaaatcatctattagtgctgaaaaaggtaatcccttttgagggttgatgtatcatcgaatccttactcattgtagaattttgtggaatcaaattttcattggagttgtcttgtgtcacctttcaggggttggtcaaagaaaagctggccttttgactcgatatatgaaggtactttaataatcaacttatataccatctaataaaacataacaagtggtttttgttctacataattttgatttataaatgtacattttgtatgcttcattgtacactttcaggaagtccatgcacctgttcttagccattggatagtcaaaatagtggttattgccttcttctttggcttagcaatggctggaattgtgagttgatacattttctgatacataagaaaaatgttatgttatcaatttagccgtttaaatgatcatctcgtaatcatcctattcgtggaccatataggcattgtcgactcgtattgagcctggtttggagcaacagattgttcttcctcaagactcatatcttcaggtttacattgaatcttgctaatgtaaaagtatcaaatctaagatatctaacaagtgctcctcttttccattttagggttacttcaacaatatttctacatatcttcgaatcggtccacctttatactttgttctgaagaattataactacaggtattccacgttctgttagctactgatataatttgttccaactcattattaaaactcaatttgcctcatgtctcagctcagaatcaagacatacaaatcaactttgttccattaacaagtgtaatcctaactctcttttaaatgaggtatatttctcgtctgcatttattttcatttctcctcatagtataatttggttagctgtctttaatatatggtactattaactgctacagcttctttagctgttggcattaattgtgtctcagtaattgaataggcatattgttagcagagaatctgttcttattctttttgaggatctaaatttcattattttccatagattgcaagggcttctttgactccggaactaagctacatagctaagccagctgcttcgtggctcgatgactttcttgtgtggttatctcccgaggcgtttggatgttgcagaaagtttacaaatggtaccttttgcccccctgatgaccag

SEQ ID NO: 140833 - DNA, 2125 bp, Arabidopsis thaliana landsberg
ataagatacattcacaaagacaaaatcactcactcgctcaagagctcctccatggctgctgctacttccttcacttgctcacttccttttactccactatccaaatcccttaaacccattcgttccccaattctacgctcagactatggaactagcagaagctttgttataagatccatgacggttcaagaagatgacaagagaacaagcgatgaatcaatgagtattgacaatttacgaggattcgtcgatcttaatgtcggaaaatggactggctcctttcatgtatagtcacccataaaccctaaagtttgctcctttttgttagatttatgctaaagactctctctttttgattttgtttttgtttttgcagcaatttgatggtaatgggaatttgttacataagattgatacacgtctttcagctagttcttatggagaagatgagctccttagtcttaatcaatcgtatgtttctgagaatctgtgtttctgcttcaatgggaataactgtttttggaacatggattgtgtgtaatttaggattcaattatctttaggaatcagttgatagagaatttggcaataggaagtatataaagtcttgaactttatatgattattctatgaatttggagcaaatttgaagtttatcttgtttactatttggaacaaatggatattatttagcatacctgaagatttttcttgtacactatatgttgattttgtgtgaagcaatggtttttgctctgtacaactagtttactaatctgtattgtgtttgtactatagaaaagtttgtgaattttcaatgatgtgtaagaaattgtgtgtcctcacgaagtttattcatatatctattgatgctcattggtattgttgtttcctatataatgtatccagaagcaatggtttttgctctgcattaccagtctttgtgtttgtattgtttaggttatatataaagcagcctacatcagctacttcagtttccgaagaggaggaagaggaaccggaatgggtagagtacaaaattaaagaaaccaatatgttcactgtggacaagtatcagcaggtgagagtagctctgtttatctcaattagtcaagatactaagtttgagttttgtggtttgtctcttaagtatttgatgactatcttgatatccatcatcagtagtctgcagattggatttttcccaaaggagagagcgttttcgctgaggtaccaaaccgctggaatgttggatacgacgttaaggcagggcgtgctcggggaggatgacactggagaagaatcaccaaggttggtttctcatgtctattggctccttcttatgtataaacattttaatgctccatgaagcttataacaatttgttttcagaaatcttaaacttccatctcggcgtccgtctttagtatgtgagaactgtttgtattctaaggagatagatagaagggctagagcctttcacatcatggatcctaaaggtgttcttgaaatgcttattgttttcctcgaggaaagagggttagagaatctcgctcatccagtcctcgataacgctcaggtagtttgttgttattgattcatgctcataaagcattttactgccataccaatatatgttcccctttgttacagaacgatgcagaaaggataaacccatttctcggtacttggaaaggtcgttcggtaacaaaacgaagcggtgtctatggagcaacactatcagaagccgatactgttgctgttcttgaaatgaatgacaaaggtcaagtagtccaggtatataatactgttcaacaatcccacatagccttttattaacttctgtttatatgagaatgcctctgaactcgatgtgaatcaggatatttcgtcaacatcggatgagaaaaaagtaacaacaaatgtgcactgggaagggaaaatgtcgaaagacttggttacattcgcggaaggataccaaatgactctgttaccaggaggtatgtacatgggatgtccttgcgacgtatcaaagtgtgttgctgatttaaagtctttccacttagaattctgctggcttgaatcgccgagctcaagacaaagactcatccgcacatatgaccat

SEQ ID NO: 140834 - DNA, 708 bp, Arabidopsis thaliana landsberg
cttcaaccctgcgattcattcatcattcacagagtttgaagaaaacgccgaaatcggaaatggcgtctattgttcttcgatctcgcctgttgccaagattagcaaagctcagatctcgtaatctgagatgtttctctgcggaagcatcttcgacgaattctacatctaggtattcgggagtcacctctacccagtcgatgttttctgattttccaccgccaaatcagccgccacctcctcctcctcctcaagtggaagctgctgccgcggctgcgacgggaaaggagaggaaaggtcttaagtatcttggttacgcactcctctgggcactcactggtgctaccgctgctactggttacgcaagttttggtatgtacttgcattcatgaattatcttttttccctctcgtagatttctagtacaaagttgtttttgctgtgaaatgcgagtaaaaatgtgttatggtttgcttaatcgtggcattgcattacattttcacatatcagtcttttgaattcagtgttcttcacttggtagaactgtgtctttcttcgttatgttgactctttttagttctgattatacttgtttgtttcgttatgcagcttacacgatagatgaagtgaatgaaaagactaaggcgttccgagaatcagctacgaagacaccagttattaaatcttctggcattgatgtgattgatgtga

SEQ ID NO: 140835 - DNA, 1893 bp, Arabidopsis thaliana landsberg
  unsure (1)..(1893): unsure at all n locations
atgctgtatgatcaagggcaactagctaatgtgtacctcgacggttttagcattaccaaggacgttatgtattcttatgtggcaagagacatccttgattatcttagaagagacatgattgcacctgaaggtggaatattctcagctgaagatgccgatagctttgagttcgagggggcaaagagaaagaaagaaggagctttctatatatggacaagcgatgaggttcttttctctgatatatgatatattcatgagctgactctggtttccctctgcatactgacatttgttttgcgtgtgtgtttggtttcaagattgatgaagtcctcggggagaatgctgatcttttcaaggagcattattatgttaagaaatcaggtaactgcgatctttcgagcaggagtgacccgcacaatgaatttgctgggaagaacgtgctgatcgaaagaaatgagacgtctgctatggcatcaaagtttagcctctctgttgagaagtatcaggagatattaggtgaatgccgaagaaagcttttcgatgtcagattgaagcgacctaagccgcatctagatgataaggtaatactcttcttggaattctcatgttgtcttctctactgtttcttcagatgtgttaaccatttaagatttctttcatagataatcgtgtcttggaacggtcttgttatctcgtctttcgcaagagcttccaagattcttaaggctgagcctgaaagcaccaaatattatttccctgtggtgnnnnnnnnnnnnnnnnnnnnnacaccctttcctttaatttcttctttgaccgttttgtaattagaagactcatttttcagccagaggattacatagaggttgcagagaaagcagctttgtttatcagaggaaatctctatgatgagcagtctcgcagattacaacacagttacagacaggggccatccaaagctcctgccttcttagacgattatgctttcttgatctctggtttactcgatctttacgagaatggaggtgggatcgaatggcttaagtgggcgattaaacttcaagaaacacaggcaagtgagatctttactagctcgatttgttaaagttcttgattttggctaaaaaagttaaaaacattttaggatgagttatatctggaccgagaaggaggagcatacttcaatactgaaggacaagacccatcggttcttcttcgtgtaaaagaagatcatgatggtgcagaaccttcagggaactctgtttctgctatcaatcttgtgaggttagcttccatagtcgccggagaaaaagctgaatcctacctcaacacggcacatcgtctcctggtaaacaaagaaacaactaatcccatttgctattcatagaaagagattattgagtctctttgttgttgtttttgcaggcagtctttgagttgaggttaagagaactggcggtggctgtgccattaatgtgctgctccgcagatatgatctctgttccgtcgaggaaacaagttgtattggttggttctaagtcttccccagagcttaccaacatgctttctgcagcacattcagtctatgatcctaataaaacggtaagagcttaaaaaattatccaaatttctagattcaagatttgtgacttttggtggttttactgagcaggtgattcacatagatccctctagttctgatgaaatcgagttttgggaagagcataacagtaatgtagctgagatggctaagaagaacagaaactcagagaaagtggtggctcttgtttgtcaacacttcacttgcagtcctcctgtctttgactcttcttctctcactcgcttgctttccaagtgaacaaagatcattccatgtttaatagttgcttgtaacgt

SEQ ID NO: 140836 - DNA, 229 bp, Arabidopsis thaliana landsberg
atgcagtactcgctcttcggttcgattctgacaattggagcaatgatcggcgcagctatgagtggacgaatcgccgatatgataggcagacgagctgtaaaatttgttcttctttctttccatgacaagcgaatatttacatttttgcgtcaaactggtaaataaatcatttatttgtgtgtgtgtgggtgaatagactatgggcttctcggagatgttttgcattctc

SEQ ID NO: 140837 - DNA, 596 bp, Arabidopsis thaliana landsberg
atggtaagttaattcacattagtcaatttaggcatagaggagaaatagtataatcgtctttttttctaataggagtgtgatggagaaaaggtggtgaaggatatcatttatggtccaggaaagaagaaatataggttttgtaaggttatactcacttctctttctgatatagagacttcaattttgttctataccacactgtgtttggaataaatttgtgtttctggcctttctctgcacagcatatatcgaaacagcgacttcttggtttgccaagtgaactaatgagtgaagggaagcactttatattgatacgcaatcccctcaacatattggtaagcttctcaaactcacttctggtgttatgttttcgtggagattcttctgggttggttttgtcttgacgtttatgggtctgatcctttctggtttgagatgtttcctctctttgctttcgattctttgacttttcttgcagccttcttttgagaagatacacccttcatcgtttcacgaattgtgactgggagagttagtatcgatatacagtgatctctgtcagatgggaacaccaccagcaatcatcgatgcagatg

SEQ ID NO: 140838 - DNA, 3517 bp, Arabidopsis thaliana landsberg
ggaatttcggatcgtgtctctctctgtttctttgtttcaatccgatttcgaatcaagccctttacttgtgcaccttcaagatttcgtttttccaggtcagtttcttcatcaagccaacctttttttctagggtttttcttcctttgttttttttctgggagttttctccttcacagtcctaagaagctacttgttaactctgtctttttgcttttgaagttaaacctagttgactttctcaagcttaaagagttcagctttttttttttttaattggtgattttgttcttaattttgagctaccaaaatcatcgaattaaatgttaatctcttgaattctgtttcggtggtagtttcttggtttgaaatcatagctgcagcttcatgccgaattctcactggttctagatttagagtttagctttttttttttactttactcggatatgaatactgagtaaggaattgagtcaactcggatgtgaatactgaatagtttttgttctagctagagttgcaaaactaagagattcagctactgaagctactttagtgtcattcaaactgaattgaaatgatgtgtgtgagtgtgactgtacctaatttttcaaactcaggcattttcgactgtgccaacaccttaagtctcaatgattttgactttgatccgcgagctaagcttaaggtctgaatgagtttctcagactttgtagattgtgcaagctacatgtctgattgggtttgatgaattgctttaaaggttgtgtttttgatgggctatttttgtcagtctgttagctacaaacagattgttcttacatatttgactttgtgacttatggtagtcagcagaatttcccttaggacactttgaataagtaaaggactctttagcattctttagctggcttgtttaactgaaacaaactagagaacctttttcttgactttataggacataattgaaaactatgttagcaaaagagatggtatgtaatgctgtttttttttgtgctcattcagcgcagccaatgctccgggtgaccaacatttgttcctgattcatttcctattggttcgtattggtaggtgttgatctttcttttatattctatcacctaattttgttctttctgtctttttttctttttcttaatttccttccgaatcctggcagtctgtgcacacaagagaaatttcaagaagttgttactaaaagagaggccacaagtggatattgtctttgttatcaagtgttagtacagaaaagtggtgagaaagtaatatggctgataccagtccgagaactgatgtctcaacagatgacgacacagatcatcctgatcttggggttagctcataatctggctagattttatcagttatattcttcaaaatagtgtgattttttatggaccaaacaaaaattctggtgttaattttaatgcagtcggagggagcactagtgaatactgctgcttctgattcgagtcaccgatcgaagggaaagatggatcaaaaggtaacatgtccatctctgtagataagatcactgtttttattcagccaatttataatctctttttgtttccttatattttgatccatagactcttcgtaggcttgctcaaaaccgtgaggcagcaaggaaaagcagattgaggaagaaggtatattaccttccattggttttatctttttttactttttcttttctttttaaattggtgcatcgctagaagcatagctatttggtactacgttaattccttttaattgctccctccataggcttatgttcagcagctagagaacagccgcttgaaactaacccagcttgagcaggagctgcaaagagcaagacagcaggttcaaatttgtttcttatttctaattgatttttattttgttattctgtatacctaacggtaaatttcttgtttctagggcgtcttcatttcaggcacaggagaccaggcccattctactggtggaaatggttggttgcttattctccattagttttaattatgtttattttttggcttctaatttgtgtataagttaagttcatatatcaacttcctgttgacttggtatagactgatcaattagtacatcatatctcatcccattacaatacactgggttatcagagtcagtggcagactgacatggttctgatagcaaaaactgttattctaattagcactggtgtagatttagatttacaagatgacgaatctcatgggtttgttttgatcatgtataaattttttaattcaggtgctttggcgtttgatgctgaacattcacggtggttggaagaaaagaacaagcaaatgaacgagctgaggtctgctctgaatgcgcatgcaggtgattctgagcttcgaataatagtcgatggtgtgatggctcactatgaggagcttttcaggataaagagcaatgcagctaagaatgatgtctttcacttgctatctggcatgtggaaaacaccagctgagagatgtttcttgtggctcggtggatttcgttcatccgaacttctaaaggtgaggtcaaatttcactttgtcttcaccgattgcatctgtttctacatagaacataaaaagaatggtcatagggaaaaatgtgttgaaacagcttctggcgaatcagttggagccaatgacagagagacagttgatgggcataaataacctgcaacagacatcgcagcaggctgaagatgctttgtctcaagggatggagagcttacaacagtcactagctgatactttatcgagcgggactcttggttcaagttcatcagggaatgtcgcaagctacatgggtcagatggccatggcaatgggaaagttaggaacactcgaaggatttatccgccaggtacaacacttgtgatgttttgagatgatatcttagttaagagtatatatatatatcaataggttaataatcgtctcttggttggtggttgcaggctgataatttgagactacaaacattgcaacagatgataagagtattaacaacgagacagtcagcacgtgctctacttgcaatacacgattacttctcacggctacgagctctaagctccttatggcttgctcgacccagagagtgaaactgtattttggtcacatgtcagctgtacaaaatccatatggacacaaaaccaggagagactattaatcaacacttgtcagattcttcttaccaaatccatcaacaaataagcaaatttctgggaaacaaaagactctttgtatgtaggtttcttctacatggttgtggtaattcatgttgttttagttgtagtcatcagtttttaatttagcatttgaaaagttcaatgttgtttatatagcatcttcgattatcttagaaaggttattgaattttgtttttttttgttacttttgtgtgtggtaaaggtgttttaaccttgcaacttctgtactgtaatcatttaacaatattaagatgttctatttgagttttgt

SEQ ID NO: 140839 - DNA, 675 bp, Arabidopsis thaliana landsberg
acttgctttttaagctttcttaccattaggaccattaagagctttccataaaagcatcacaacggctgcaacagttaacaaatacaaggacgagtacagaaactggttcgggagtcatcatgcctcagaactgcatagcaccaaggcctgaagaagatggtggagtcatggttcaaggtttgccagatatgtcagacacgcagagcaagtctgtactagccttccctacgattacttcacaacctggtctccagatgtctatgtatcccataactctcaaggtgtgtgtgtcttgatcacttcttgttttattttctgctgagcttttgagttgtacctgcaacaaatctcatcagaagtatttctttctcttcttcaaatagcttggtagttgattacaagacatgacatcattctaacgatgttttccattcggtttctttgtggttgtacagtttgaggaggttgtgtacaaggttaagatagagcagacaagtcagtgtatgggatcatggaaaagcaaagagaagacgattttgaatgggataacgggaatggtttgtcccggagagtttctagccatgttaggtccatcaggcagtggcaaaaccactcttctatcagctctcgggggccgtctctccaaaactttctcacgtaaagtcatgtacaacg

SEQ ID NO: 140840 - DNA, 460 bp, Arabidopsis thaliana landsberg
gttggttcatgtgtggaagttctctaagaacaacagaaaatttcaaatggtttctcagataatctcgtgtttatctcaatcttcgtctcttctatgtttatccgattcaaggaggttaattcttccgaagacttgtacttgcggcggtttgagccggttttctccaggatttgctagccgccggttatttacggttaatcggaagaaatggagatcggcctgcattttcaactctggaaaggaacctggaggagagggaaaggttactggatcactgactctatctaaattagattcttgtttagtttccggtctgaatttttctgaggcagctctatgtaacttgttcaattgaatccaaattctattggaatgtgaaaaaagactagacctttgagaaattatttgaagttttgattgttatatttgttgtagttacaaggaggtagctcagagtggc

SEQ ID NO: 140841 - DNA, 1002 bp, Arabidopsis thaliana landsberg
atgcttactagtcctattaagctcatcaatggttttgtcgctgatccctctaacaacactggacagagcgagatgctacagcttgaaaacggtggttacatggatgaatctaaactcgaaaccagttctggtcattgccctgaatcagctcaccaatatgagaatggaaatggtcgatgtttctctaaggaatctgaatcttgtagcagttcacaagctagctcagaaggtggaaccttagaaatggagtcagagctcacagtttcatctcatagggaagaggaaaaagccgagatagaagtaaaagaaacatcaaagccaaatattttgcttgtggaagataataagatcaacatcatggttgcaaagtcgatgatgaagcagttaggccataccatggatattgctaataatggagttgaagccataaccgcgattaatagctctagctacgatctggtactcatggtatgtaaattttcttagctctaaggacttgtccttttcaaattcacttatatttgaaaaaggcttataattcatattgggttcacaggatgtgtgcatgccggtgctcgatggtttaaaagctacaagactgatccgttcgtatgaagaaactgggaactggaatgctgcaatagaagccggagtagatatatcgacatcggagaatgaacaagtttgtatgcgtcccacaaaccggctgcctataatcgcggtcagtacttctttttcgaatactaaacacagagatctaatgcataacttgagaaaactgatagtcagaatgcgttgtggaatgtgcagatgacggcaaatactttagcagagagttcagaagaatgttatgcaaatggtatggactcgtttatttcgaaacctgtaacgttgcaaaaactgagagagtgtttacaacagtatttgcactgagatttcagattttttgtgttttgtagattaagaaatggttgtgttgtatataaattgtgtaggaaaaaa

SEQ ID NO: 140842 - DNA, 946 bp, Arabidopsis thaliana landsberg
caatttgctgcgtctctgtagaaatccccatggaagagatcgttgatgagccaagatagcgagagaaagagaagaaagaaagagagaagagagagtaattttcacaaagggaacagatccaaattgagaaatttaaaaaggggaaaaaacgtaaaccaccagcaaagcagcaacggtcgaatccagatgctgccacgtgttgatacatctgcatcgaggtttttattttcaaataatttgtctcccgagatgatacagtcgctacaggcccagatattattaagcccacggtattccaacttcataatcactaggataatatacagtcactacaagcccagataatagcccaataagcttcaagatcgtttgacgatgagattttaattcggaactaagtaaccacgtgtcagtacctcgtcaaagtagctccatgcagaactgacacgcccgcgtgacactcttctccattgcctaacacgcctcgtcgttcgacacatgtctcgtttaagtttagcctctccttcatactagtctattttcattcttcataataatcacaaatggtaagcttattaaagctacaaaaacaacatagaacattaaatccatactctcttagaaaaagaaaaaaagaaatggcggatcatcaacaacatcagcaacaacaacaaccaataatgaggagtctccatgaatcatcaccatcgactcggcagatagtgagattcgtaacggcagctacgatcggcctatcactcctcgtgctctcaggactaacactaaccggaacggtgatcggtttgatcgtagcgacgccgttgatggttctgttcagcccggtgttggtaccggcagtgataacgatagggcttttgacgatgggattcctattctccggtggttgtggggtggcagcagctacggcgttaacgtggatttataa

SEQ ID NO: 140843 - DNA, 8850 bp, Arabidopsis thaliana landsberg
atggctgcaatcaccatttcttcctccttgcacgcctcagcctctccgcgtgttgttcgtccacatgtttctcgaaatacccctgtgatcaccctctattcacgcttcacaccatccttctccttcccatctctctccttcacactccgtgacacagctccgtctcgtcgtcgttccttctttatcgcctccgccgtcaaatctctaacggagacggagctgcttccaatcacagaggctgattcaatcccgtccgcttccggtgtatacgctgtatacgataagagcgacgagcttcagttcgtcggaatatctcggaacatcgctgcgagtgtctctgctcatctcaaatctgtgccggagctttgtggctccgttaaggtacttatccatgatttcatatagaggagtagcatgtctgttactataacgaaggattctttgttttgttgtggttgacttttgtttattactgttcatagatttgggaagtgttttggtaaatgaatactacaaaagttcaacactttagttccagagatagtatttcatatcattaggatcactattgtttgcaaaactagagctaatgaagttcttggttctgttgttggtaagagttcttttaacaacacttaccacacattatgattaggagatgcatcaatagttcattttgtatatgttacttaggagttaggacttgtttttttagcattttcttttgattagttttttagggaaattctactctatagattcaggacagtgcgcattggcgagatttgtcgaggtttgagaggtatatcggttttgtaccagtggagagaactgattctctttggcattttgattaccattctgtgtcaggttcttttaattaataacaagagcttttgtttttttcttggtgtccatgatccttaactgtatcagcttacaacagtcaaatctaaagattgctcttgagaaatttacatttttatgggttgtattattatcttaagaatttacatttttcctctttctatcatttatttgtcacttattgcttatattttgcttatgatttacttatgttatgattattttagtgtttatttgctccattgactcaatatgtgatggatattgacaagttttggtattgttgatatatcttccataactgatttcatcattgttttgctaggttggaatagtagaagaaccggataaagcagttttaacacaagcatggaaattatggatagaagaacatataaaagtaactggaaaagttccgccggggaataagtcagggaacaacacatttgtcaaacaaactccgaggaagaaatccgatatccgtctcactccaggtcgccatgttgagctcacggttcctttggaggaactgattgaccgtttagtgaaagagagcaaagtggtagctttcataaaaggatcaaggagtgctcctcaatgtggattctcacagagagttgttgggattcttgaaagccaaggagttgattatgaaactgttgatgttcttgacgatgagtataatcatgggctaagggagacgcttaagaactacagcaattggccaacgtttccacagatatttgtgaaaggagaacttgtaggaggatgtgatattttgacctcaatgtatgaaaatggtgaacttgccaatatcttgaactagtttcatccgattttcttctctatttctagttgtaactccaaacattcattatagagaaaacatgcttggattctcttccatagttacagattcgttttctgttttccgcatttataaaaggttacagattctatacaaatctattagtaggtttaaaacgcataaccatccactaaattcacctattttgtggtcatttaaccaatgatttttttttatttttttttacactaattgtccctttaaatatatatatgttgaaacaaaacatcatcggaaatggagttaagaaactattgttacgttaaatgatttaattgattaatttagtagcattcttattcttgtagcacgtttattagagaattattgttcttctttgacataatttttgggtgaactagcacaaaatattcattttaagtactaaattctcatttgtaggatgaatatctcaaaaataacacaaatattctatggtattcatttgttacaacttatatgagcaacaaacgttcatgaaaattgaaaagtatgatgatgacgatgttagtttatgggttgtattttctttttattttttttttggaaactgaaaaaaattaaatgaacaaataaaacaataagtcaacggtctcaaaaattagattacataaaaacaaaacaataaaaaaatataagtcagactgtaaaataagttgataggtgttgattctgaaaatcacacaataaatttgtttaaaggggataaacaaatttacttaactctctctcgctatttagtgagcaaaggctcaatgaaaagaagaacaaggttgcttagagacaaagttagggttttgctcaagaacaatgaagaaaactagggttttattattaagtttcggatctttagaatagaggacaaccccccccccctcctatttatacactattaagacgattaaaagatatgttaaactttcaattcttcgaggcttgaatcttctaatttcctttatcttcgaagacttgctattttcaaaggagaaaacttctttttcttcgaattaggaagtcggctaggcggtctccctacttggggctaaagtcggcaaatgacctccttattttggctcattaacagactaaaccgggataccccggtttgattgcaatctcagtctaattcgtagttcctctggtttaagccggtattgtcggaggtgctaattcatgcaccaacaatagaaataaatgtaatcgatgaaaatgaaattttatagaagttagtagattttacttttaggtacgattctcttcaatgtgttccctctcgctgtgattgattgatactctgatggtaaaaatctctctttgtttgtatccgtcttattcacagccaaagatgaagaacaatttaacatttacaccaaaaaagatgaagaacctagcgaagagtgcattcgtgtctcacaagggagagctcaagagcattttcgtggtgaagaagcttcacttgacttgggtcatgtcgccaagagttttgctcagagagaacaaccgtctttagttgggaaatcgcatgataaggaatcaatgaagagaaaaagagacgaatgtcaaaaagggcaacaagctaagaagagaaagaagatgagtggtagtactagtgccaatacaaaaaaaaaaaaaacttgatcgaatcggtttggccatcataaaccatagcataagtttgttcatcgaaatttttgaaatatctaagttttgaacttaactatgtttttgttaacaataataattacttgtatcaaccagaaacaacaaactgaaatttaggcagaagttagtggattttgttgcattaaaaataaaaatggccgatgcctaataattttttacagcccatacaagtaagcataattaaagctctaaaaggtaaaaagatatggtaaaagagactctctctcttaacacactgttcatctttgagagagagagtggtgaattccggttaaccggaatattccatctttttgttttatatagttttccgactttgtttggattctatttttcttagtcgatctttatttctgtttatctatcttaatttgtcggctaagatacgcttttttcctttttgttcttccctttttctacagcttttactcttgaatcccgtttgcttttatcagaattagtcatcgacttgatgtttctccaatgatagagtaatatcttcgccgctatatcctcaaagtgaaggattaaagacctcttcgttaggttttaggtggagcttcttcttggaggtgggattgagttcgaagtcttctaagactaattcaacagttgctatggctaaaattgtggaaagaaggtctccgaagcatgattccaagtctctatctactaatcgctggcgagaagaatcaagtcagatccaaatcttagtcggcaagaagaatcgagatgataagagaagagtgggcccacatatgtgcttaacaatacacgttatagggattcgtgtcattaatgttattgggttcatttaatctgggcttaaaaaggcttgtatcatgttgtaatattcccatatgggctttcatataatgaaatttggccgacaaaaaaacaaaaagcccttttaggtagtactaagcccaaatcgtaagagaaacaatcgggaatgacaataatgtcatcgaaaagcagcttctgagatcgaaaagcagagatcctatcctattgtttgattgttgatctgattatcctggggtatcaaatccggctagctataagaactccggtgaagccgattgttcgatgacgaagtttcgaatttccagagaagcgggtgaggtcttcaattacggcggacgaggcgaaagaggattgattactcaacatcacagaagaaaaaaggcagtcctgcatgcgaagaagaggtgtgatcgcgattttttgttttatcaaattggttacaaaggagagaagatgcgtcaacagagattcggatatcgaaaaacagagattctatcatcagattcgtcaatggagatacctgtttgtcgaggtctggaagctgattttagaggtcagaccctgatttggtttatgttttaatcttcgctaaaaaacacttttacagcaagattatacgatgtttttcagttttttctaatcgcccttttcaggaaaattgtcccaatattatttcttctacttaccaaacgattcattcatcttgtacaaaccattcattcaactccattcaactccctgttctttttcctccgccttctctcttctaactcttctaatcatgcgctcgtttatctggtttatgttacagagtccagttattttgttatttgccatgattttggtataactatcttagtgttggttgttatatgtcttaggataatatttccatcacttgatgatgttcatcgagttgatgacaacacatatgtacaagttgttgttgactccgatcacgaacatcatcaagaagggctcatacccgttccagtagagaatttcgtatttaggtatcccgaaagggattgtagtatttgtctagacacttttgaaagtaatgttccattggctaatacagtgtgcggacacgcgttccactttcactgtttaagtcaatggaacaagacttgtcctatctgtagggcaattctattctagttagtattagtatttaggaaatttttaactaggtgggtagtgttttagtttgtatttagcaaaatgggtagtttttcttatgcactatcttcaatttcaaatgtaacttatgcactcctgcccgtaccctcatgcactatctacaagtccgactattccctggcacgattgtaaaccgcttagctgcattctcccgtagcttaagtaagtttttgaaagtccatgttttagtctgacttggtttatgtcccagaatttttcgtctttgatgacattttgttttgtatctttgtttgatatcctgtgtgtagtttctcatgacattggttcttgtgatgcaggtaaggaagatggcgaatgaaacggggttggacttcactgagcagattattactttggagaacaagtatagacaggtaaagatacaagtataagttggttctcgatttaaatggttaaaggagacccaccgttcaaatttgatgttaatgtatagctacaatttgtttgggaaagacttcttattgacccccgccattctaatgtcaggcaccggaaaaaatctttacagcatctcactctgatacaacgtgtgaacattgggcgtcatcccaaccgacctactttccttgatcatatacataacatcactgacaaggtttggtctctcagtagtaaggcttttttgtcatgcattgacgataaattcttgttttttttttacattcttgggactctctgctcttgtttcagtttatggagcttcatggagaccgagcggggtatgatgaccctgcaattgtgacgggtattggaaccattgatgaacgttacatgttcataggtcaccagaaaggtagaaacaccaaagaaaatataatgcggaactttggtatgcctactcctcacgggtatgttttcatgaggagcttcctggtttgcagttaaatagaaacattcagaatcagcaactctcttatcaaatttctgtaatgtctacaacagatataggaaagcacttcggatgatgtattatgcagaccatcacggttttccaatcgtgacatttatcgacactcctggagcctatgcagatcttaaatccgaggaacttggacaggtagaagaaatgtcttttatgtttgaaatgtactactggtttatctgcatcataacattttttttcttatctgtataacagggtgaagcgattgccaacaatctgaggacgatgttcggcctgaaagtgccaattctttctattgtcattggggaaggtggttctggtggtgccctagccattggctgtgcgaataaaatgctgatgctcgaaaacgcagttttctatgttgccaggtaaactttttcccaatgtagtaggtatgatgagatgatgtttttacagattgatttatcacgtctgttgttttgcctttcacagtccagaggcatgtgcagcgatcttgtggaagacttctaaggctgctcctgaggtatgtgcactgctctaccactcgattaaaagtgatcatgtagactctaatattacacttgaatgaaactcgtgtacgcaggctgctgaaaagcttagaattacctccaaggagctggtcacgcttactgcagctgaaggaaccattcctgtaactgatcctacctctaatctatctgtttcctcttacactttttttgtcactttggatcactgagtaactctcacatgttgtacaggaaccgcttggaggggcccatgccgatccttcatggacgtcgcagcaaataaagattgctatcaatgaaaacatgaatgtaggcatagttgttcttctcaacgctggatgtggatctaaaagagttctaacttttttttgggaacttgtaggaattcggaaaaatgagtggggaggagctcctgaaacacaggatggctaagtaccgaaagattggagtgttcatagagggcgaaccaatagagccaagtaggaaaatcaacatgaagaaaagggaagccgtgttctcagatagccggaagctgcagggtgaggttgacaagctgaaggagcagattctgaaagccaaggagacgtctacggaagccgagccttcgagtgaagttcttaatgagatgattgagaaactcaaatccgagatagatgacgagtacactgaagctgcaatagcagtaggtttggaggagagactaacggcaatgcgcgaagagttctcgaaagcgagttcagaagagcaccttatgcacccggttctgatcgagaaaattgagaagctcaaggaagaattcaatacccgtttgactgacgcacctaactacgagagcctaaaatctaagcttaacatgcttagggacttttccagagccaaagcagcatcagaagctacttcattgaaaaaggagatcaataagcggttccaggaagctgtagaccgcccagaaattagagaaaaggtcgaggcaatcaaagctgaggtcgcgagctcaggagcttcttcttttgacgagttacctgatgcactgaaagaaaaagttctgaagactaaaggggaggtcgaagcagagatggcgggtgtgttaaagtcaatgggtctggagcttgacgctgttaaacagaatcagaaggatacggctgagcagatctatgccgcaaacgaaaaccttcaagaaaaacttgaaaagctgaaccaagaaatcaccagcaagattgaggaggtggtgaggacaccagagatcaagagcatggtggagttgctgaaagtggaaaccgcaaaggcgagcaaaacgcctggtgtcaccgaagcatatcagaaaatcgaggcacttgagcagcagatcaagcagaagattgcagaggctctgaacacgtccggactgcaggaaaagcaagacgagctcgagaaggagcttgcagctgcacgtgaactagctgcagaggaatcagacgggagtgtgaaggaagatgatgacgatgacgaagatagttcagaatccgggaaatcggagatggttaaccccagcttcgcctgaagcacaaaacaagacattgtttgtaagtcaaaaatcttatcaaaacaccatctttgaatcattcagagacacacaaccaaatgctaactaacacaaagactcgcaggatcttgaagctctttcgatatccccggtaaagaggctatcctccatgatctgaagcagagagataaactatagtggaggaacagcaacttaaaaaaccttgcttttgtctagttagcttctggaacatgatttctggattggaacaagcgtttgaagttgacttttgtctttggattcatttctgtattgttatgtcttattttgttagaacactagttttgtctttgacatacgtgaacatttttcgctcctcttctggtcaaaacctttggtatttataaaatttgtctaaagaatacacagtttgttgtgcatt

SEQ ID NO: 140844 - DNA, 1949 bp, Arabidopsis thaliana landsberg
gaccagcgtggctcaagcgacaccgttttggtaaggaagatatgtcactggtcgactacgacgattcttcatccgacgacgatgttttagccgccgaggagaaacctctcccacagacgcaaaagcgtctggtttctccagctcaatcttttcctccaaagaggcagtgagtgattttagggtttaccaatcttggattcgtgttctttttttctttttggggtttgcaattagagctttcaatatgaagagttgtttctggaaccaatcttaaacagctatgactaactttgattcatgtagcttagtttctcattgttcagtctttgtttgtgtgctgatgaagcagggcttttcgattcatatgtagctataaatctaggttcaggcttcaagttctgttctttacctttgtatagatgtctgtgtacagagttttgtttcttaggtagccaaagtgagttccttttgttgattccgatctcgatcagttctgatattgaatgtgtcagaggttactttttaaagcaagtgttgtgttaagtttgggtattgaatacagtttcctttgtggggtttgtaggagatttgagcaggacgagagtgttgagaagctaccagatgctctgcttcttctggagtcaccgacactcgctcaggtgactggcggagaccatgcttccgttgttgcagctgcaatggctgagagtgcattaaggaagagagacttgagtgggaatgcttcttctcttcctcgtcgtcccaagctaccaagaggaaatttgcctcattcaaagaattatcctgaaactttgggtaatgtgcttgtgcctcctcagctcaagggaaggttagtcaatgatatatcatatttgcttgtttcatctcttttttcactatatttctcaaatctagaaaactatggagaaaggctatgagtgttgttaacaatcattcaaagagttatttagggtattttgtgcttgaaatgtggtttaggaagttatcaattgttgacattatgagcatcttcatgagaactagctcctgaattaggtgcaatatcttgtttagaacaattataatcgaataacttgagattatatatgcaggagcaatgttgctacagaggatatgagcaggctttttgtgaaaaaacggcaagactccaccaaggcaaaatctccagaccaggaatagtttggtcaaatttgaatggttttatttctctgactaattacgtaacattttgtgcaacataatagtggtatcttagcagaaataacagagtatgcaactttttttgttttttcatttatttggtactatttatacaaaagaaacaaaaaaagttctgatatttccattattctaattgcttagtagtgtgagtagatgttaaaatcttggaagtgcgatttggttgatcatttagggtgacattcaggaatttattcatttaatatttaaagagttatttggcttgatcacttataatccttaattttaacttttaacatgtgtaaatttcaaacaaaaaaaaaattgcagaaaattagataacaatctttggtttatttaaaaaataaaaattctccaaaacgaaagtactgtaatattgttcttagaagtttgtcgggttaacgaaaactagagtatttgacatgtgaagccactaaaacttcgtaacttgttcacataaagtatcaaaactagagtattatgactgtggtcacttaacataaaatatatgaatttaattattaaaaatacaaaaaagacatgtgccataaatcatagtatttcatcaatactttctccacatggaagttgttactatgctcaaatattttacgggtgcaaaaaattctaatacaaattatttgcatattggaacagaacaaaaacctttatttttttatgttttgttttatagaaacgaaatttga

SEQ ID NO: 140845 - DNA, 490 bp, Arabidopsis thaliana landsberg; identical to SEQ ID NO: 64589

SEQ ID NO: 140846 - DNA, 919 bp, Arabidopsis thaliana landsberg
tgtgagggcaggcaattatagtctctacgcatgggggtctggttttattggagactataagtatgagcaaaacattaccatcacgccaggtatatatttacacttatccattataaacccattttagatcatagctagagcctagagaagcatgcttgatctcactgttcactaaatattcaattcaactctcttttggaaaacatatggatacttatatttattttggggtgtgcaggtagcgagatgaatgtagggcctatagtgtatgaaccgccgagaaacggtccaacattgtgggaaatcggtgtaccggatcgaaccgcaggtgaattctatataccggatccttaccctacactgatgaataagctttatgtcaacccactccaagacaggttggtactatatataatcttcgcatgtaaaactagttttgatatatcttcgtataagttcagaaatttaatttggttgattttttgtttaaactttttttcctttttcagtttgaccaaattcaaaactcctaattattgcagatttaggcaatatggattatgggatcgttacgcagatttataccctcaaaacgatcttgtctacacaatcggtgtaagtgattatagaagtgattggatctttgcacatgtggcgaggtaaaaacatacataactatttaatttcttatttttagatgcttctattcaaagtatatatctaactatcttaatgattcaatcctatagaaacgttggtaacgatacataccaaccaacaacatggcaaatcatattcaacctaaaaaacgtgaaccgtatcggacgctacacactccgaatagctctagcatcagcagctgattcggaactacagattcgaatcaacgaatcgaaatccgatgcgattattacaaccg

SEQ ID NO: 140847 - DNA, 2001 bp, Arabidopsis thaliana landsberg
  unsure (1)..(2001): unsure at all n locations
ctcatttcctccaaacgtcaaacatagcagcagccatggctgccaccaacacaatcctcgcattctcatctccttctcgtcttctcattcctccttcctccaatccttcaactctccgttcctctttccgcggcgtctctctcaacaacaacaatctccaccgtctccaatctgtttccttcgccgttaaagctccgtcgaaagcgttgacagttgtttccgcggcgaagaaggctgttgcagttcttaaaggtacttctgatgtcgaaggagttgttactttgacccaagatgactcaggtccgtctctctcaattgctcaaaatctctaatttctcatctgggtttctgaagattgatttgatgggcatgattaggtcactctcagtgttcaatctgcttcgtatctgactttcaatatcttcaaagtctcagactttttctgtttaatctgcttcatatctgattttcggtttcttcaaagtttcagactttttctgtttaatctgttgagttacatttgttagtgtttggttctcactgctatgaataacttaagataagctgataaagaaagggattagctttaagagtgttttgcatattcttgctgattcaatggttctgtgaaagtttacaaagtaaccctatatggtttcttgctaatttttgactatgtagattgttctaagtgaatatggttgtgtttatggcaagcaggtcctacaactgtgaatgttcgtatcactggtctcactccagggcctcatggatttcatctcgtaagcttgttcctcctcggaagaatgaatcatctgttcttcttatagctataatggtgtaattatgtcctctgtttgattttgcagcatgagtttggtgatacaactaatggatgtatctcaacaggttaatagcaaaacccctgtggcagattcttttgatactgatgtcatgatttgccaaattctaagacgatatcttgtcttatattcttgtaggaccacatttcaaccctaacaacatgacacacggagctccagaagatgagtgccgtcatgcgggtgacctgggaaacataaatgccaatgcngatggtattttacatcctccattcaagttcccatacaatttggctgtcttcgataatcaaaaacctgttgaactaagtactgtttttgtaacaacaggcgtggcagaaacaacaatagtggacaatcaggttggtgctatcgcatgtttttcctataagaagtatattgcttctcatattttctcttataagaagcttttgtttactgtgaacttgattgtgtagattcctctgactggtcctaattctgttgttggaagagcctttgtggttcacgagcttaaggatgacctcggaaagggtaaaccattatactttacttccaagtctcgatacatcaattggcacggttgcactaatgaattgttaataaaaaggatggctctttcctagcttataaatgtctcttaagccaagttatgatatgatattactctctttgatttgacaaatataggtggccatgagcttagtctgaccactggaaacgcaggcgggagattggcatgtggtatgtttaaactttctatcactatgacttaggctgcgattgtttcaaacgccaaaaattgtggtttcattcgaagaaaacacacttgattataacgtttaatcgcaaattcggaccatctgtttcggtatcctcacgagttatgttggttctttcgcaggtgtgattggcttgacgccgctctaagtcagaggctaagcaagtactcttatgtctactgtgttgatcttgtctgtttgaacagatgtaagaatcttagcaaataatgtttggcttaataaactttgatgtttatgttcattgcatcaatttttctctttttgaatttgtgacagtgatgtgtttacttttgatacaactttgtgtttgatcgtttaagtacattttggtttattta

SEQ ID NO: 140848 - DNA, 736 bp, Arabidopsis thaliana landsberg
atggagaacatgtcgaatctaactagcaaatttttattaaacccgttgaatgttcataagcattgtgcagtttcagatgaaaatggtgatagaaaatctcatgttctgaaacaggtgtgttcatgtatctgctgttgcaacagaaggaacaagactcaagctaggagccagaaagggtcctactttataaaagggaaggtccatccggtaagtagaatggagaagtgggaggagaagatcacagaagctaatagtcatggcaaaattgtaagctcttcctcctatgatttgcctttctatgttgttttgcattcttcctctgcagatagctcgacatgatctgattctttgtaacatggaacagcttgtagtgaatttcaaggcttcgtggtgtttacctagtaaaacaatattaccaatataccaggagcttgcatccacatacacctcaatgatatttgtcactatagacgtcgaagagctcgctgtaagtaaccaatcaacttctgttacttagaatgattctttgtgaagatgagagatctcgaaactgagcgatttgggtgttaaaatatgtttgatacaggagtttagtcatgaatggaacgtggatgcaactccaacagtagtgttccttaaagatgggaggcaaatggataaatttgtaggtggagatgctgcagagcttcagaagaaaactgcagcagctgcaaatctccttcttagacaatcttaa

SEQ ID NO: 140849 - DNA, 1432 bp, Arabidopsis thaliana landsberg
gaacgcgagaacaaagaagagctaaagacaaagctcaaggagttaatccgtgagaaatcagatgcgttcaactcagatactactgaagaggataaggttctttttagtgaatttacgttattgggaatatctttggttttcagttatggtcaatctttgggcctcccttcatttctgaaagtggtttccatttgcataggtgaagctagggcaacctggatggagagaacgttattatgaagagaagttctcagtagtaacccctgaagaaatggaaagagtccggaaggatgttgtaagtttgagaatgatatttaattcaatttttggtacaactcttggagggttctttctaatttgtgaaatattctttgtacaggttttgaagtacacagaaggcctttgttgggtcatgcattactacatggaaggtgtttgctcctggcagtggtgagttccttcacttaatatttcttatgtccagaacaacttcacttactgttccgtttggattattttctttagtgtggtctattattttaagtttaagcttttcatttgaagtgccatagaaaatttcttgttgagttgtcttttgttttctatctgctttccttttaaacaaaacgcaggagtaatttaagattagaatttttttgccttgatagttattttccatctaaatttttatatttattcttggtctgatagggtttgctctgttatatatatacctttgtattagacactatatttgctttttagaattcgtaggtattcattgactgtgagaggttttagctgtctctcctgatataattgtactcttatgttacaggttctatccttaccactatgcaccattcgcttctgatctgaaggatttgggtgagatggatattaagttcgaattaggaactccttttaagcctttcaatcaacttcttggggtgttcccagctgcaaggtagttacatctatgatttttcattattttctcgacatttttgtttacgctctatggtatatctctgatctttactgcatttggtcagttcgcatgcacttccagagcgctacaggaccttgatgacagatcccaactctcctatcattgatttttacccaactggtagtgtttcctttcctagtaaagattccatctttttctgagtgttattgttgtaacaaattatatctacattgctttcgattgtggtttttctagatttcgaagtcgacatgaatgggaagcgtttttcctggcaggtagcctctctgtctttcttgatcgcttccttatgtattaaaaacacaatcactatattttgaacacattttactttttacatcaaagggtattgctaagctgcctttcattgatgaaaggcgcctactagaagctgtttctgaagtggaatttacattgacg

SEQ ID NO: 140850 - DNA, 3055 bp, Arabidopsis thaliana landsberg
  unsure (1)..(3055): unsure at all n locations
atgagcagtgcagcgaacaaaactggtttagttgatctcgctggtaatgaaagtgaacttatgcaagcaaatgttgtagctgagaaggggaacaaaccaaaagacactttgagttctgaatcctcttgttatgcttctcctgtgtctgttgtatttgagggatctgatgcaagtgatcagatcaaaagttcaacagaaacatccaaagactccgccctccaaatcagcgctgaaagtaaagatgaagtttgcagagagagtaacaacggaaggcttgtggaggaaagcagtttcataaacgaaccaaataaaacggaatatcctataagccattnnnnnnnnnnnnnnnnnnnacctgacactgttaatacagctaatcagacgtcactggaaatcggaaggacagaattcaatagagttgttggtggcttgggggtaattcaagcaaatgaggtcgacggtaatgtcaaagcacacaacaattatgctgaggtcccagtgacaatagaatcaaacgatcatcgagattttgggagattgcagaatctttcagaagctcacattagatctctggtttctagtccgctagtcactagaaataatacatctaatgcttctgagtctaacttgggaccagtttcaggtacttatcctatatatcttgtatgagcgaaaaaacaaaactctcttcaagatataacactcattaaaatgaatattgtgtatctctgtaatagccaagtcgattttgatggaacaggtctaagcgctggagttaacaaacaggaagacgcatctcagaaccaagagatcaccttggagaagacaacaagctggggcacagcaaaggagcaacacgtccctctaaagaaccttctgagtgaagcaagatcaccaaggctacaacaacaagcaaaggatcacgagagtaacaacataccgagagtgagttcgatactgggacaggagacatcccctgaagatggtcactggccagagaaaagagaagtgagcgaggaatggaattcaccagcaaagtatccagtggacttaaagagagaggagaagaaagtgaaaggaagacccttttgggtgccatttgtttgctgctccaatgttaaatagaccaccactctattgtataatgtgtaggagatgatgaatggtttctgaagacttgctagtacaaagacgtgttagtagtttggttcttgtaggcgctactgttgcttaggctttgaatacttttatgcagaccacttttgaatttgacttttttcaatttctgtttgcgtttgaatgcctagtttgttgaatgagtgtaccagcttgaacttaaaccgaattgatcaaaccgaataaatgtttggtaagacttaaaccgaaatcaaactaaaccgtaccagaaccgggaaaataatccattcttctggaaaaggttcaaactttttgcagagcttcgaatgtaatggagaatctgacgacggcgcaatttctccacagagcgacgctactgaagaagccacctcctcctccatggaatttgaactcaagctttctcacatctacctcctattcgatacctagaccttcttctctccgccgctctttgcccttgtctatcaatggcgacgcgacacagcccacctctcttctccaccaccaccggtttctcagttcattgacacggcggctcagtctttccggttcgtgtcctctacggcttcttcaggaggatggagattggagcaaagaccatttctgggccgttattcgttttctccgtcagtcctcaagactccacgagattcttcctgtactttcctcctctgtatctatctctttcataaaatttcagaacatgaagatgactttttgtttcttctttcaattacaggtttttgatacgtggaagaatcttgagccttcgcgaataagtgagaacaattacgaaaggattataaggtttttatgtgaggaaaaatcgatgagtgaagcaattcgagcttttcgtagtatgattgatgatcatgagctaagtccgtctttagaaatctataattcaatcatacatagttatgctgatgatgggaagtttgaggaagctatgttctacttgaatcatatgaaggagaatggtctgttaccgataacggagacatacgatggattgattgaagcatatggtaaatggaaaatgtatgatgagattgttttgtgtcttaagagaatggaatctgatggttgtgtgcgtgatcatgttacttataatctactcatacgcgagttttcccgaggagggttgcttaagagaatggagcaaatgtatcagagtttgatgtcgaggaagatgactttggagccttctacgttgttgtctatgcttgaagcttatgcagagtttgggctaattgaaaagatggaggaaacgtgtaacaagattataaggtttgggatttctttggatgagggtttagttaggaaattagctaatgtttatattgaaaacctcatgttctcgagacttgatgatttgggtcgtggcatttctgcttctagaacccgtaggactgaacttgcttggtgtctcaggcttctgtgtcatgcccgacttgtgagtcggaaaggtttggattatgttgttaaagagatggaagaagctagagttccttggaatacaacttttgccaatatcgcacttttagcttactcaaagatgggagatttcacgagcattgagctgttactctctgagctccggataaaacatgtgaagcttgatcttgtaactgtaggaattgtctttgacttgagtgaagctaggttcgacggcactggagtttttatgacttggaaaaagattgggtttcttgataagcctgtggaaatgaagacagaccctttggttcatgctgcttttggtaaggggcagtttctcaggagctgtgaagaagtgaagaaccagtctcttggtacgagagacggagaatcgaagtcatggacttaccagtatctaattgaactagtggttaagaatcagaaaactgtaccttag

SEQ ID NO: 140851 - DNA, 1858 bp, Arabidopsis thaliana landsberg
gtgttcgtgttcgtggagcggaggacaacgtagttggtttccgcgtgctgtacgagacagataacttctacagagagaaacaaagatcgagacaaaaagaaacccttaaaggatttgaacggagaagaaaaggaaaaacaaaaacacaactctgtaagttctgacccaattttttttatgttttgtctggaaagtttcaagatttgatttttgtggttctctttacattttctgggttttgtgtaagcatttgatgtgtggagtgtctctctttttgttattcgaattcattatcaatcttttgtgtgtgtttcatgtagatttgctcaatttttaatctagatctaaccaaattaattaactaaagatttagataagaaaagccctaatttgtgatctactatatgatccagaatctggagtctttgtttctacttgatatatgtaaatcttgaaagtttccttttttttttcttctcttcttgaagtagtaaagactttatcttttctcaattgaatccaagaatgattagagggtttatttattttgggaccaataaacagactttgttcttgggggcagagactgtttctttcccttttcttttttttcacttctttagaagattcttcatttgaattctgtccttcaattttgaagttgtcttgttctcttttttactaaatgtgaatcaaaagaatgttttcttaagtttaaaaaagcctgtggtggttactgcttttggtccattgataagaagaatcttcttttcttctcttctcttctcttctcttctcttccctgtcattgctttgttattaagtatcattcagaatttgaatcaaaactctacttttgtgtcttgcagaacctttagagagagaaaaacaaatgtcgttccgtagcatagttcgtgatgtgagagatagtataggaagtctatcgaggcgtagtttcgactttaagttaagcagcttgaacaaagaaggtggtaaatcccgtggttcggttcaagattctcatgaggaacaacttgtagtaacgattcaagaaacaccgtgggcgaatctacctccagagttattacgtgatgtgatcaaaagacttgaagagagtgaaagtgtgtggcctgctcgtagacatgttgttgcttgtgcttctgtttgcaggtcatggagagatatgtgtaaagagattgttcaaagtccggagctctcaggcaaaatcacatttcctgtttcgttgaaacaggttagatttcaattctttactaatgtcatcatcacatatgttttggttagtcttatgattggttatttcaagtaatttcttcttcggtgtttatagcctggaccaagagatgcaacaatgcaatgctttatcaaaagggataaatctaacttgacttatcatttatatctttgtctcagtcctggtaaaacttcattttctctgtttttgttccaagtttttctctgttctccaaagcaaatctgaaagcatgaatatttgcagctttgttggttgagaatggaaagtttcttctttctgcaaaacgcataagaagaactacatacaccgagtacgtgatctctatgcacgccgacaccatttcgagatcaagcaatacctacattggcaaaatcaggtaataggaaagactttgcctagttataagacatttagaaagcgaatgtgctaacgtttccggcttaacgcgtgattatctcctctttggcaggtctaattttctggggacgaagtttataatatacgatacacaaccagcatacaacagcaacatcgctcgagcggtccaaccggtaggtcttagccgcagattctactcaaagagag

SEQ ID NO: 140852 - DNA, 915 bp, Arabidopsis thaliana landsberg
gttgaatcgcccgtcactaaaatcctctccgagaatcctcctccgatctgccactagctatggcggtaagcatcgccggatctccaccgtatttcaccggccaagattcgaatcctagtttacctttcttccattttcacttttacaggaatcgtctggtaccacgctaatggatctgatctcggcggatccaaccccggttcctgcacaatctacttcttcgtccgcatcctccacggcgtctcagccgacttctgcttccgcatcgtcttcttcgcatctgcaccatccaatgtcgacgaagacgactctaggagagaagaaatcgaagagagccactttgatgcagatccaaaacgacactatatctgttgctaaagctgcactgaatcctgttaaggccaatatcatgcctcaaaggcagagacagaaaaagaaggttcgatctactaattgaattttgtttggcacatttctctgtgtttgaactaaaccctggatcattggagctaagataactagattgtggttgtagatttgaattgttaataggaggtatcagtgtatatagggtctctgttgtaaatagagtcttggtgagtcaatatacctatgtcttgtttcgatgtagttaacacgactttatgttgcaaatgacttcacagccggtttcctattcgcaacttgcaaggagcattcatgaattagctgccactttggatcaggtttaagtttgtgttcttatgctctgcctttatacctctcttcttctgctgaaaatagtatctgaattttcttactgtttttctcgcgagtgagcagaaaagttctcagaaacaactagtgaatcacgtgttccctaagcttgctgtgtacaactccgttgatccttctctggccccatctcttcttatg

SEQ ID NO: 140853 - DNA, 1232 bp, Arabidopsis thaliana landsberg
gatttgttggaggtcaatggattgtgggaattattgacgagcttagaaaggcgtatgcagaagagtcttctgatagcggaccaatattgatagatacaaagactcgactccgtgatacacttccagctgagccacagagaaggaatggaaggtaagtgtttgatagagttaagaaaaacgttggtcatttttggttttggtttaatacgtgggagttttgtgttaatgtccttgaattaactatatttgacaggcttcagctaatgctttacaagcttctatgggacactattgtgaaagaagggtttccaacgggaccttttttcgactacttttctttgaatcgcaattatgtcttatcccaagatgtcagagatcacattgctaatgcaggtatcaaagctcaggtatacttatctttgactgtgtacaatatatctttcactaaaccaaagtttatgtgtttatgaagagagaattactcacttcgaaatggggttgtattgatattttcttactagttttaacttggtgcagacacttgaagagatagttaggtactatgaaaacacttttcagatgcttccgatagcaaataatcaactattactaaagtaagtagagatggcttgttcttgatgttatagaatacattaatatatctctgatcatctgattgtagttgagtggaaaattttgcctcaggtacgagtttcagaaggaccaatctataatagctgaaattagattcaaccatgatcatgaatgggtgatgagcaaatatagagaagtcattgagttctggagaaatgaacgagaagctgggtacactcctgaagaagaacgttggaaatgtcggtattgccaatttgctaagtcttgccctggaaacccgagtttcgaatctcctagcacaagctcaccaacaagagaggctcctcctttaccaagctaaaaagaagatgaaaagttgattctttcaccgaaagctgctaaatgctaacatatatgtttgtgttgtctttaatttccacatttgcttcccttaaattgcatagcagttaagtgattaaaccgtggtttgattagggttggttaggcgtaccaagattgatttgtaccgggatgccgcaatttgattattgtgtatcgtttccaacacacgctttgtatgtatcatcattgttggaatctctaaggtaatcgacaatagcatttttacgttctgtata

SEQ ID NO: 140854 - DNA, 1491 bp, Arabidopsis thaliana landsberg
atggaagcattgagagcgtcctacggcgactcttcatcggattccgataccgatgatctttctccggcgagtcccgttactgcaaattctggagagaaagattcgatttccttgcctcctccaccgcttgcgcttctcgattccattgtatccacaggtgaagatgctcatcaattgtctctgtgattgttcatcaatcaaattcttagagatttcactcatcacttattttttatttcgtctgaacttgaaggttcactggatttcttctcaacagagcctggagttcgtgtaagaaactttcctcatgtcgatggaaattacgctttgcacgtttacgtacctggtatttgttcatttcgtagcttaaaatttctgagagtttcgaggtttttgaattctgaagtggttgtttagtataagaggatacgtatgtgtttgagaatgtattgatgaagtgcaggcctgatgaagtgtatcacttgtctttctctttcactcattgtttattttgtttttgggattctagtttgtatacctccactgccaaagaaggagattgtatgttttttaaagaaggttgcatcagttgttcctcatcttcatttggtagaggctgatgtgccactcagcattctatgcaaggatgatcagaagtttgagcgtgccttggggagagagttccacataagcttaggaagaaacgttccactacgtgttcatcagattaactcggtgatttctatgcttcggcaaaagcttcagttgcagaagaggtaagatcatttcttgcctaccatactacccaaattacgatggggtttgtgaattgttttccgttctgtttttgacagatacttgatagatttcaataagtgggaagtctttgtgaatgatgaccatactcgctctttcctttctttggaaatcactacttcaggactatccgaggtatgttgtacaacaagagttaaccttgaatgttggatttttgcatactcagtaccttgtgttagatattgtactgattatcatatccttaattcagataagtaagcaaattgatgctgttaatgaagtttacaagctccacaatctgccggagttctacaaggtccacttgcttttctatatagtactttacagcttgattgtattttactgtttagccaatgaaaatcgtcatggacacttatcccatcgagtctgcttcaatttttcttttaggatccgcggccgcatatatccttggtttgggcgttgggtgatattagaacttccctaaagggagctgttgacgtggaacttaggaagcttagagcaggtggttgtgtgcagaatcgtatcttcacctctaagttttgtgggatcgagtgtaagataggaaacaaaacacacaaaatatgtaaactcccagatgaataagaaaatctcaaatttctgtgtttgcagaccaatcaggtatgcatttgtaacgacatagaaggatga

SEQ ID NO: 140855 - DNA, 1498 bp, Arabidopsis thaliana landsberg
cttattttttatcggagagtgccttatgaagaacagattaaagacctcttgaggaaaaagagatatagagaaaccatctccttggtgggagaacttgactcacagggggaaatttcgaaagacatgctttcgtttcttcatgctcaaatagggtatctactgctttttgatttgcgctttgaggaagctgtgaatcaatttttgaagtcagaaaaaatggaaccttctgaagtttttccttttatcatgcgggatcctaatcgctggtctttggtggtataattttttttcctgtcagctggtttttaattatatactctaatttgtttctaaaaattgactgattatcaaccaaagttcattattttccttactcaaggcattgcctgacttgtagcgaacccgaactttatgatgtcttaagccttgtccagctgcactctgcttaactaaaatttttgcttggtttcaggttccaagaaacagatactggggactgcatcctcccccagctcctttcgaagatgttgtagataatgggctgatggccatccagagagccaattttcttagaaaagcaggaatggacactccggttgacgaagagtttttctcagatccccctagtagagctgatttactggattcagcaattaaaaacataaccaggtgatacaattacactttttatgtatattgttttcctctacagcttttgtagatatccctgttctctgtggtctgagttggcatataatgagataacgttacatgttacgacaggtacctcgagatatcacgtgagaaggacttaactcacccagtgagggagggaatagacacgcttctaatgcttctttacagagcattaaaccgtgttgaagatatggagaatcttgcatcttccggtaataactgtgttgtggtatgtgtttttagttaatataatttacgcattcataatttcataacatcaaatcgataggtggcaccacaaactaataactgaaagatgttagaaacctgtaattcggactagtaaatctattctttgacagaactatttaagcaagatagctagagattggttaaaaaggagaagaaaacaaattttcagtctaggtgcgtttttgtatgcatgtactttgtaccaaagtaccagttttgcagttatttagctgagtctcagtgtagtaaagcactgtatttgaaagcagtatatcaatgacattcatttaggatgctgactttcccccgaacaaagtccctaaagttacatcgtagcactgttaactggaaaatattagctgtagtactttaggattcatctggatgtacgacgtggaaattacgtttttttggatccttagaaatttaatacatagaaaaacaaagagcttgttgtcagatggttgcctgagggaggactttacaacttgtgtggacgatgcaggaggagttggagactcttctaactgaatctggacacttacggaca

SEQ ID NO: 140856 - DNA, 3025 bp, Arabidopsis thaliana landsberg
ctcattttacttatctgaagttcgtctacgatggaggaagagaaggtgagggttcgtctggtgtttgaagaccgacggattctgagtaagtatcaaaagaagcaaggtttaacacggagctgggttgttctaaatcgtaaatgtcaccgaactatatcagagttttctgatcatatctttcacacatttagcctctgtgaagcgtgtcctcatggcctctctctatctgtacgttatacttctttgtgccctaatttcagagaaatcaaatttgtcaatgttgacgccattaatgcttacattatctttcgggcttttcagatggaaggtttcgttttgccacctttcgagtccagctgtgtattgaaggataaagatatcgtttggttagtttcgtcaatctcttaaagctttttcctttgagctttactaagtatcattagtgttaaattttgcgctttttgtgtagtgttaagaagaagaaagagtctttgttggagattgttggggaagacagtgatgagaatgtttacaacgctattgaggttgaggaaaggcctcagattcgtcctggtgaaatgctgcttgctaatgaggaattccagaaggaaactggaggatatgaaagtgagtctgaggaagatgagcttgaagaggcagcagaagagtctgtgccagagaagaaggcttcgaagaaacgtaaaacttcaagcaaaaaccagagcaccaagtaggatctctacgaaaacttattcttagtcacctcaatgtctatttgttgttattcaagcttgaagataatgtaggaggaagaagtgtaagttagatactactgaagaatctcccgacgagagagaacacgcaaatgttgaaaacaatgttgtgaagaagaagaagaagaagaaatcattggatgtacaaagtgctaacaatgatgaacagaataacgatagtaccaaacccatgaccaaatcaaagaggtacgtagacttttgctttgtcaaaactcgcttgtgaatctttaatcctcttgaattatctctaactagtcattttttccattttcttgcttttgtgattgcaggtcatcacaacaagaagagagcaaagagcataacgatctgtgccaactatctgctgaaactaaaaaggtttgagtttacttagttattgcaaggaattagaatgaacaatatgtgtagagtgtaaaattccttgatgtttgtagatgcagggattggcttttgtttcacttactcatttagcttcctatcagtccttcactcttccttatttttattttagacacctagcagaagtgcccgacgtaaaaaggcgaaacggcaatggctgagagagaaaacaaaactagagaaagaagaggttcttcatcaaatactttaaacttaaaatgataagatttatgtatgcatcacgtgttttagtgatgtacagcctgcacttcaacacttatatcttctttattgttacatgatttgcagcttctacagacgcagttggttgtagcacccagccaaaaaccagtcatcactatagatcaccaagcaaccaaggaaaagcactgtgaaactcttgaaaatcaacaggcagaagaagttagtgatggtttcggggatgaagttgtacctgtggaagtgaggccaggccacatacgcttcaagcctctcggtaaattattatgtaaatttctctctgtatagcttttgtgcgtttgcaaggctcctcacagtttcccttatatgcttatttttcagctggaacagatgaagcctctcttgatagtgaacctcttgtggtatgacttgaccctatgtttgtatccttaaagctttgcctaagctgaatctgtaatgattatgtctaaataatattaggaaaatgtcttgtggaatggaaacatgacgaagaagaagggacagaaatggggcacagagaagtcagggttttccaagcgatatgctcaggattttaatgaagatgctacgacacagcccgctgaagcagagacacttgctaattgtccgattgattatgaacagcttgtggcttacactggctcagtaaaggtttgtttatagtctttactacccccagcaggttgtttatagattcagcatttttaaactccttaactcctggtttgttaactttacagaaaggagatgttattgcataccgcctcattgagttaacatcatcttggacacccgaggtttcctcttttcgggtaaaatatctggctctccttttaagccaaattcgatcaatcaacgcttattctgaggaacttatccactttacaatatacttcttttgataggttgggaagataagctactatgatccagactccaagatggtgactttgatgcctgttcaagaatttccaatcgagaaaaagacagaagaggacgacgatttctgtatgcaacctgatacatctctttataaagaagatggatccctggaggtatgcttcatggtttacattatgtcatacatatcttatgaacaagaacattcttgtagttgtttgcttgctaagcatcagaattctaatataagaaagactttgcttctgcagatagaattttctgctctgctcgatgttcgcagtgtcaaaactagcagctcagattctgcagaagtcgccaagtcagcactgcccgagcctgaccagtcagctaaaaagccaaagctaagcgcaaacaaagaattgcaaacccctgcaaaaggtaaattttccatcaatcttggatcgacattgtattgaaatagatggagtcttatctactttcattggaatattgcagaaaatggagaagtgagcccttgggaagaactaagtgaagctttaagtgcaaagaaagcagcgttgtctcaggccaacaatgggtggaacaagaaagggagttcaagtggaggctcatggtcttacaaggcactgcgaggcagtgctatgggtcctgtaatgaactatctcagatctcagaaagagatttga

SEQ ID NO: 140857 - DNA, 1571 bp, Arabidopsis thaliana landsberg
ttcccttatatccttctgggtttcgcaaaactgcaagcaaaattgtttctctctacgatttgcggcggcgttagggtttcgtttagattttgtgattcgtgagtgtgttcaagctttgggaggaagcaaaaatggtgaggaaacatggttggcaacttcctgctcacaaatttcaggtcttttatttcaacctttctctgattttctccaatttctaacatttgggttttagttcatttgtttcgtttggtcatgaaacaggtggttgcgattacggtgttctgcttattgagtgtagcatactatgcgtttttcgctccttttgttggaggacgcatctgggagtatattcttctcggtgtttactctcctgtggtatgtactagaatcgctttagagaatgataaggaattgataagagctaggtaggtacatggtagttttgcatatctgatacccttttgcttcttgtgtcatgtgtttgttttgcaggcgcttattgttttcgttctttatgttcgttgtactgcaatcaatcctgctgatccaggaatcatgtcgaaattcgaaagaggtgcgagtagaggtggtgacttacctactgccaaagatatctcgagaaaatttgatgaaacgggcagccacctgcagtcttccccttcggttgcttccaggacttctactttaccaaactctagtgtgaaaggttctgttggagatgctcaaagagtggaagctgctaaaagaaaatcttgctttaatccgttggcaatatgctgtggcgtgtttgtttatgaagattgtcgtagcaaagaagagacggatgagcagcaaggggatagggaagaagctctgttttgcacgttgtgcaatgctgaggtaatgtgttaatattggtttatgcttgaagagtaagaagcaactactaaatcctttgttcaccttggttttgtgacaggtccgtaagtttagcaagcattgtcgaagttgcgacaaatgtgtagattgtttcgatcatcattgccgggtaaatttcttactgttatgataattaactgtttcttggagttgattgactagagttttatgggtgtgatcaaatgacatagctgtatttaaatgcaacagtggcttaacaattgggttggtcgcaagaattatatgacttttatatcgctgatggctgtcagtcttctctgggtacgtatattctcctgatatgccttttctcaagctcactttttgcttaccagtaatcaataaatctttctctttctcagctccttatagaagcaggagttggaattgcagttatagtgcgtgtatttgttaataagaaggacatggaaacagaaatcgtcaatagacttggaaatggattttctcgggcaccttttgccacagttgttgtaagtattcttagtgtaagggtgagcatctattgttgattttcctgaatcctgatgttttcttacaatttatgcagggtctctgtactgctgtttccatgctggcattgtttccattaggtgaacttttctttttccacatgctcctcattaaaaaggtga

SEQ ID NO: 140858 - DNA, 2020 bp, Arabidopsis thaliana landsberg
gtttcttcgaggactttggcatactgcaggtttgtcccgatctcatgctacatcattatacgaagccattacttaacccagtagattgatagctcaaattatcattgcaagaaatgaccggatttagtgatattgtacagttttctgattcggaattttaaataaaaatcggtcgtgacgatttaggtatgtgggtagtgcgtagaagccctaatttcaaggatatgtacagttccagactgttaattatttgtgtttatttggataggttgttggagctgtagtgcttaaaaaccctacctttatactgtttagagcagcagtccctccatgtcaggtcttgtggcgttatgcagagctcgagcttctgcttcgtcttctttattcaacagcgttattcgtccagcatttcgcaatttctctacaggtaggtggtattactctttattctagatgtatgcttttgacagacttttcaagttttctcactctttgctttgaaccttgaatgaatttgttgaagaggtgatatatgggttgtgaaatggtgtaggaacatggttgcactgtgagttttataataatagttaaagccattttccttaggcagagtattgttacaaacaacaaaacattgagtaacgtctattgttatgttagcctcttctatttaagtggtcaagttgattttttttcctatgttgtgggttttatcaagctacaaacctcttctagatggattaggaactggatgaacgaacttacttacttctggattagatgatgagctagtgtgaaagtgcggttgcttctttttgttagatgataaaagaatgagcttgtatcacatcggctcttcttcataaattagtcttggattaaagattgagctgaaaactatgctacttcaagttaagatactatgtaactagaataagtttataactagggcctaagctgggatctctgcaactatggtgctatttgtatctaattcttctcctaagtctcttgctagctggattatattcttttcctataattaagattgagctctgtggagtatcattgattgatgcatgtagctactttgtgggacttgagtctgtctagtctataattaagattgatctgtgtggagtatatacatctcaaaagtgacttaacctgagggatttggagatccaaagtttcaatcaagctttttattttttgtcaaaatccatatcttctgttttgtgtgcgttttattttttgatagaaagcctctatctctgttggtgttttgcaggttttgctgatacacagaacaaatcattggtagcacaaatgaaagaagagatgctccacatggacatcaactcaatgataggaagttccatgccactaggtatgatgcgtatcggaacaatcatccacaacatcgagatgaacccagggcaaggcgcaaagatggtccgagctgcaggaaccaacgccaagatcctaaaggagcctgctaaagggaaatgcttgataaagcttccgtcaggggacaccaagtggatcaatgccaaatgtcgtgctacgattggcacagtgtcgaacccgtctcatggaacgaagaagctatataaagcaggacagagtaggtggttagggataaggcccaaagttagaggagtggcgatgaatccgtgtgatcatccacacggtggaggtgaaggaaaaagcaaaagtagtggaagcagaggaaggacatcggttagtccgtggggaaaaccgtgtaaaggcggttacaaatcagctagtgtcaagaagaagaagaagcgtttggcagaagcagcagccaaaatgtgatatgggtgaacaagtttcgattttcttcaaacgtttctttcttttaaaaagcctccaatgttatttggttacgttattgaatctgttttttgagagttttttaggcttcatgaaactagaagatctttgatcagttgagaataaatatggttacgtgtttacttttattaaaaaaaaaaaa

SEQ ID NO: 140859 - DNA, 353 bp, Arabidopsis thaliana landsberg
atggtgaagcaagaatttatcaagaaatggataaatactctccacatgttagattcttctatcgaacatcctttgaacgtaacggaaaggaaaaatgcgattagactatcatcggacttagccatggcagctgctcgaaatggctctaccgtatggagccgcgctcttatttctaggagcggaaataagacagcaaacaaacccatggctcgtcgaatactaaaaaaagctcgaaatcggatgaagaaccgttgtaacattcttagacgaaatggcaatttcacggcgaaaaccagggtgagaaaacgtacggacttgcttaagagtcttgtaccgggaggtgagttaataga

SEQ ID NO: 140860 - DNA, 1741 bp, Arabidopsis thaliana landsberg
atgaaggtcgccgtaatcggcagcggaagtgggtttcctcaatttcattcttagatttctttttcgggtttcattcatgaaaataagttttcaattattcaaatcggagcagtttctggagccgtgtgtgcatcgactctggcaaggaatggcgtctccgtcactatcttcgactcgggtcgtggacctggtggacgcatgtctcaaagaaggttccttttgattaagaatgttccttttcacttataaagtgtttaactttgaatgatgatgtctcgtttaagcagagagattggagaagatgggaaggagttgatgttcgaccatggagctccatttttctgtgtgagcaactctgatgccatggctcttgttcatgagtgggaatccagaggttttgtttctgaatggaaacaagtttttgggagttttgattgtgcctccaacaagtttcttggcatccaacaggttttgaaacatcagtctttgtacttatattaaaactttagtagattatgaagtgtgatttacttgtttcaatgtatgcgcttgtaagatgcttgatactaggattgattgattccaagtaatcaatttctgattttaatgtgtgtaggaaggggatgcaaagaagtatgtgggtgttccgggcatgaactctatatctaaggccttgtgtaatgagtctggtactttttctaatctttctagtcgagagcttgaactcaaatctctgaaacatcagtctctgttatcaactccgtgatcaacattgtaggtgttaagagtatgtttggaactggtattgccaagatggaatggttggaagaagagataccatggttgttgacagattcaaaaggagaaaatttgggtcgtttcgatggagtggttgcatcagataaaaacattgtttctccaaggtttactcaagtaactggactcccaccgcctctgggtaagacttgcacaaactcagtcctcctgcagttgctgtttcagtgtttatcacatttatctctattcacttttatttgctttcctacacagacttaagtctagtcccggagttggcgactaagctgcaaaacattcctgttctaccatgcttctctcttatgctagctttcaaggagccgttgtcctcggtaagatatttgcttttccagtctgtaatcaatgttggttgatcaatccagtaatctagtgaaagccttagctgatttctgtcggtttgcatattctatgattcttgaatcagataccagtaaagggcttatctttcaagaattcagagattttgagctgggctcactgtgaaagcaccaagccgggacggtctactgataggtagatcgcttcactaaccaatatagaaatgtgaaattacagtagttgagaagttgcaaccaaatttatggggtaagattgcttcagcgttctaaattctgagtgttattatcttgatttttttagtgaaaggtggatactgcattctactccagactatgccaacagtgttattgctaagaccggcctccaaaagctatcgagtgaaacactaaacaaaatatctgaagagatgttcaaagagtttcagtgctcaggccttgttagttctctcccctttttcatgaaagcccacagatggtaagcgtcctgactcttaagccttctgttaatcgcttcgcttgtcagcttaatgatctgttgtctctaggggaagtgcgtttccagccaa

SEQ ID NO: 140861 - DNA, 399 bp, Arabidopsis thaliana landsberg
caataatcattttttttttcattgaatgaaacaaacaagacattcaaaatagaacaaaagttctacagagatagagagagaaagagagcttttcttcatgggtggttctacaagcaaggatgagagaaacagtagtaagagacgcatcaaggtgaaagcaaatgaacagagaaggagagaaacaagaagagagcttgatgagaaagagagagtgattttggcgttgaagatggcagagacagagtggaggaaagagaggaagagactgagagaggaagtgaagaggctgagacagaagatggaagagaaggaagaaggaaaggcgaaacaacacgagtgggaatgggtcgtggaacagatgtgtttagagagagcagtgagggaagaagctgtggagag

SEQ ID NO: 140862 - DNA, 3696 bp, Arabidopsis thaliana landsberg
caaggccattttctaagcaacttgtgcgactctccttcgtcctcatctgccaaaaacttcgtacgagtcgctacttctctctctatatataaactccttaccactctctttttttctgattttttgacgttaagagatagaaacagagagagatagagagatagagttatggctttggcgatgatgatccgaaacgcagcttcgaagcgaggaatgactccgatctccggtgatttcggtggtttgagatctatgtcttcatggtgaaagagcgttgagcctgctcctaaagatccgatcctcggagttaccgaagcttttctcgctgatcctagtcctgaaaaagttaatgttggtgtggtgagtctctctttctctcactctctgttttcccctgcttactacaagatcttacgaatctatgaaattacatcaaaattgaggtcttaatcctatggatgaacatggattgttgatttggtgtttgcatggtggcttttattttggttttgatgaagctaatctgtgtttactttacttatgtgttgaattggctaaatcattttaagggagcatatcgtgatgataatgggaagcctgttgtcttggaatgtgtcagagaagctgagaaaaggcttgctgggagcactttcatgtaagagtttctctttctctccccaaatgatctaactttaatgcttctctgttcattgacatgaattgattgtcaagttttgaaatcttcttgtacagttggtgaagttcttgaattgtaactgacgaaaagtatgtgtgatttgttgacataacttgttaaatattgtaggtcttattagcccttttgaatatggttgtgtttgactatgtggtgcttaatttgtatccttcatattaaaaaagatcaacatcagcaattatctcattgtcccatatttcaccagactgatctgagctgtctttattgtattaatcatctaaagggagtaccttcctatgggaggaagtgccaaaatggtggacctaacattgaagcttgcctatggagacaatagtgaatttatcaaagataaaagaattgctgcagttcagactctgtctggcactggagcctgccggctctttgcagacttccagaaacgtttttctcctggttcacagatctacattcctgttccaacctggtccaagtgagtttcctacagttgatttgatcatttctcatgttaacctcaacggtctactttgtaagtgtggccaagcttcttttgcttcccaaaaataacatggtttatgttttctcttatgaatagccaccacaacatctggaaagatgcacaagtccctcaaaagacatatcattactatcatccagaaaccaagggcttggatttctcagcattgatggatgatgtgaaggttagcaaagaacatcttcttcaactagcatcttttttacttcttcttgttaacatcctaattctgttaagcctttttccatagaatgctccggaagggtcattcttccttcttcatgcttgtgctcataatcctactggagtagaccctacagaggaacaatggagagagatatcacagctattcaaggtgataactcatcagtttcttatagttatctgtctatcattgactttatttctccttgatcagccctctgcagactaacatcgagttctcatttcaggctaaaaagcatttcgcattcttcgatatggcttaccaaggttttgctagtggagatccagcgagagatgccaagtccatcaggatctttcttgaagatggtcatcatattggaatttctcagtcctatgcaaaaaacatgggactctacggccagagggtgggatgtctcaggtattcatttttctcaacaaagaacatcgttttcttcctacacgaaggaaaatatggaaattagaaagtacagatatcagcattttaaaaatttggattgtaggcgtcaacaaattgtatgaaatagccatcatacaggttcatttagtgatgaagtaaaaactgaatatgaacatgacaactttgtcttctactgcagtgtgctttgtgaagatccgaagcaagccgtggctgtgaaaaagtcaattgcagcagctagctagaccaatgtacagcaacccacctttgcatggtgctcagctggtctcaaccattcttgaagacccagagttaaagagtctgtggctaaaagaagttaaggtaacatttatgaaaaaatgctaattctttcattcaattaccttatatcccatgttcactcttttatgtttagtaatcaactatggaattaaaatctgataagccatatgtaaaatctgtaacaggtcatggctgataggatcatcggcatgagaactactttgcgagaaagccttgagaagttaggatcgcctttgtcatgggagcacgttaccaaacaggtaactacaacaacaaaataggcttcttttgtgaaattcttgttatttctctcctttgactcacacagtcatatctttatggtgataacagattggaatgttctgctacagtgggttaacaccagaacaggttgaccgcttaacaagcgaatatcacatctatatgacccgtaacggccgtatcaggtacttcactttctcctgattagaaatctttcagctcacattcaatgcaatccatttcctaacatcaacatgcttaatttcaatgcaagccatttcctaatcattgaggctcttgatgtttggttgcagtatggctggtgttacaacaggaaacgtgggataccttgcgaatgctatacatgaagtcaccaagtcatcttaaatcatttacttacatgtttcagccaaacatacaaattttgtttgaagagtcaataagacaggaggctagatttgtacttctgcaattggttttgtgggaactgaaagtttacccataaacagtaatttattagcgcattttttcgttagctgggcaataaaagcaaagcctaaacgatggatttttggatatacaaaattcggattgttttctttcttctcaattgctctttttgtgcttgtttcctttcaacgttacaatgccaatgctggcaaaattttatcctcaagctcattgatttcaaatgtttttagtttttacttttaccgtaggcaactttagattatcatgatttcatttcatcatttcggttatttgacttgcagtttggaatcgattttgtttcatttcaaggacaaaaacatatacaaatactgatacaggagaaaagtatctctctacaagtcagtgaacaaaaagaatataataggacacaatcatcgcctcctgatttctcaaaaagctgaattggccacgtgtaaggaggagacatcatctcttctcagaagctgatacttagttaatcagagagaagtaaatctccctctccttcattccataaggcggcattttgctctggaaaagcatctcgagatcgcttttctagggtccagcttgaaatggaaagccaccattcatctgtcgcctcacatgctctggtattagcctgttgataagctccggtgaagccccagacaactgtttcaatagtcaaagagagagctaacagattgagtaactgtatgcacattcagttatgtttggttgaaggaaaagtgattttggaatggt

SEQ ID NO: 140863 - DNA, 1100 bp, Arabidopsis thaliana landsberg
atgcggaggaacttatctgagttaagattttcagatgattctaaaggaaagttgtatgaagagtatatgaagaagagggatgcaaaactaagagaagaatggagttcaaaagaaagtaagttgaagtcaatgcaagaagctcttgaccaaagtagaaccgagatgaaggctaagttttctgctgcttccatgaagaggcaggattcgatatcaagtacccgccaacgtgcagagaagttcagatcttttaactctcggacaagttcgaaaaagtatcaggtaatcaaatcatttagtgtctttgttgatgatgacaacaaaactttgtctgactgttttgcaatttgatttagtgattcttcttaatctttttacagcatcctataagctcattacagagtgaagaggaaaacgaaaaagataagctagtcagtggacaatccattggaaaaggtgcttctaagagctcccaagttagaaaggttccatccccaaacgggagctcacgagtctcaaaaccgtcaggtaaagtttcaaacacaaacactaatacttctgggagaggacgaaaaacatcagagataaaactggttacacaatcttctcttcccaaattctctgatcttaaaaaggaaaacacaaaaccatcttctttagctggtagaaatactactaccatgatgcgaacacaggcgagaaatggtaataagaagactacaaaggaagatataccgtctcctgttatgcctcgaagaccacgatcactaaggaaaagcttctctgcaaatatagaattcacagagttgacaactctatattctgatgatatgatgaacaaagagaggaatcagaagcagaacacagacattgatgatgtatcagagaatttgaaaaatgaagcctttgatgacactgaatctgaggctgaagaagaagaaaaagaagttttggagaaccctgtcaaaggagaagaagaagctagagaaatggaaactctagtagttgaggaggatattggtgatgaaacgccttcacttactgaaatagttgagaactcatcagagaatgaaaactacacttctttgagatcagtttctcat

SEQ ID NO: 140864 - DNA, 1732 bp, Arabidopsis thaliana landsberg
atgctagatgctattcatgattctgaaaagagtacggagaagaagaccgtgcgtgaaagaaaagctgctggtggtctcttcaattgggaggtagcatatttgttttactcgactgttttttgtagcttcagtaagcattctactgaaatgtgaaatagaacaaaattaatggcctaagttcatgcctagtaccttgcaaaaatcgacttgcaactcctccaaaaggatacttttattataaagtgtttttggaactcacagttaagatggtggcatcatttttttttcattggtgcaagcatattacataaataacaatttttgctatcaggctaatttagcctcttataactctgagataagttgttatatgttaagaaacctttgtgcttttgcaggaagaaatctttgttgccagagcacctggaaggttagatgtgatgggtggaattgctgactattcaggaagccttgtcttgcaggtcaaaattctctactattagttttgcgggtcacttgtgtctatttatctactgccaaaggaaataaatttgaataaattcaacttagtggcatttatctaagtccctttacataaaacattattttgtcttatgtgtaatgctataatgtagtaattgtaaaaataccgtaagttcctccttgcgtatcctctattttgattgatcacaacaatttcttatcgatattatcacaacttcagatgccaataagggaagcttgccatgtagctgttcaaagaaaccttcctggaaaacatagactgtggaaacatgcccaagcccgacagcaagctaagggacaagtaccaacaccagttctgcaaattgtaaggatgagtatttgagtgaagtcacattttgggattgtcctggcttaagattttgaagattttgctttgtagtcctgctgagatttccttgaatctttgtgtttaaggtctcatatggatcagagatcagcaatcgtgcccccacttttgacatggatttgtctgattttatggatggagatgaaccaatttcttatgaaaaagcaagaaagttctttgctcaggatccagcacaaaagtgagtttctcctcttttgttcaactgcttcttcagttctctccgttaacaaggtaataatatcttccaggtgggcagcatatgttgctgggacaatcttggtattgatgatagaacttggtgtgcgttttgaggatagcatcagcttgctggtgcgttttttttcatccttttgttaaaatttatcatttctgctgcagaatctctcctaatttatctttttttactttgccattttaaattttgcttgtactctctgttggtaaaaaatgtttatcctgttctttgttttgatgcacatactttagttttccatgttctaggagtgaagtcatcaaaacggtaaagaaacgtttagacatgcaattgtaggatatgaaattagcaagtttgccacccccttagggggccacaattgcgaggcctctcagttataattctgacaaactgtgatctttctgtcactagtcctttatgagtttcttaaaaatcttagacctctgtccgcatttagttcttggtactatgcatattagatgaatattagagctgactaattatttgctttgctaggtttcttctgctgtacctgaaggtaaaggtgtatcttcatctgctgctgtggaggtggcgagcatgtc

SEQ ID NO: 140865 - DNA, 1920 bp, Arabidopsis thaliana landsberg
  unsure (1)..(1920): unsure at all n locations
tctcttttgattccctggttcctcatttctttcgggcgacattgatttgacgcagattctctagatcagttnttggctgccgccattgatgccgctaaaanagctggacaggtctatctttcgatctccttgagttttgatcgatattttggctaatcgttatttaatctggctccttttggtttgcgttctgcagatcattcgtaaagggttttacgagactaaacatgttgaacacaaaggccaggttttgtttctttcctccgctcagataatgtttcaatcactcaataagtgggaatggctacttaagagtgtcaattttttttttgaaattatcttctatggctccttaaattgttgcttttaggtggatttggtgacagagactgataaaggatgtgaagaacttgtgtttaatcatctcaagcagctctttcccaatcacaaggtggtgattatttcttcttttgaattcccattttgttggcttcttcctcgcgttgatcattagagttttgctataatttattagttcattggagaagaaactacagctgcatttggtgtgacagaactaactgacgaaccaacttggattgttgatcctcttgatggaacaaccaatttcgttcacgggtattttcattatttttcaattcccatttgaatgacctgtgtgtttgatttgcccatttcatcaaaaacaaaaacaaatgctgttttttttttgtaggttccctttcgtgtgtgtttccattggacttacgattggaaaagtccctgttgttggagttgtttataatcctattatggaagaggtaaaagattgtgtattccattgtttcaagtttcttcgatcgttacaacttaccattatacatagtttccttgatggtgctctgtacatgcatgtttcaagatttttctcaattcttacataatatctaatgatcaaacagctattcaccggtgtccaagggaaaggagcattcttgaatggaaagcgaatcaaaggttagcacttgttctagagacctaataaaaaatttcttgatctctttttatggcatccggagtatagctatcacttgttcagagacttgagttctcttccttcttttcaactcaaacaatgttctttttgcagtgtcagctcaaagcgaacttttaaccgctttgctcgtgacagaggtaaaaatctggctcctttgtgttagactactaaaactagattgctatgaagcctcctctcatcgcttatgtgaccaattgaatataggcgggtactaaacgagataaagctacattagacgatacaaccaacagaatcaacagtttgctaaccaaggtaaaagtttatcgatagatatttggaactccaccaatttggttctagtctctgccaaaactcatgattgttgtgtccttcattcatcaggtcaggtcccttaggatgagtggttcgtgtgcactggacctctgtggcgttgcgtgtggaagggttgatatcttctacgagctcggtttcggtggtccatggtaaattgtcttcttttttttttccttgcttggatttaaaaaggggatttctttcttgtacaaacaaaattagatcctgatgatggcataataatatcaaatctttcacagggacattgcagcaggaattgtgatcgtgaaagaagctggtggactcatctttgatccgtaagagtttgagattaaaccaaacacactcactctcaaaccgtccaactgattataactaactgttttatgtcgtctttgttcatcagatccggtaaagatttggacataacatcgcagaggatcgcggcttcaaacgcttctctcaaggagttattcgctgaggcgttgcggcttacaggggcatgaagtcatctgtgattattttca

SEQ ID NO: 140866 - DNA, 1609 bp, Arabidopsis thaliana landsberg
ctttaccgaccaagtcactcttgtcacctgaaataaacaactccgtagagactacctctaactttgcatagtcacatcattgttagtattggtttctttgtccaatgttttgatctattgtagctcgtgggttgcacagggaaaggaggaagagcgagtgttaccaaagtccttggagtacatatcatgcctaattcatttggctgtttttgggatttttggggtaaaatgcttattttccattttctgtctgtctctctgttgtgctttgtttttgtttaaatcattataatcaactcgttgactccaaatatacaggccattacgagatatttgctgcaaaaattgtttgggccaactggtgctcgagtaacaagtgatgggagcatcttgtaccttgatcttccctccaacatggtgaaagtcgcaatgcactcatctcaaacttaattacaaacctatctttcttaataaaaattctccaaatgcttccttataggtaggatcattcttgatgggttggtttggcgttgtattcaaagcagatatagcaagagtttctgaatttgtggcgataggattatcgactggttatttggggagtctgacaacattcagcggttggaaccagaaaatgctggatcttagtgctgatggtcaatgggtgtatgctgtgcttggctttttattaggtaaaaacaaaaaattcccttctcaatctccaatcacctactaaattggatgaaacatacttgcttacagcataaacgactttacaggattgtttctcacgtcatactccataattctgggagtggaaacggccaaagggtttaaatggcttcttcatagaagagcttcttctgaggataaattccattgtcttaaggttaacaccttccagagccatattgtgtctctgaccctgatgcttctgttgcttgtggctttactcactgccagttccatactgcttgtgaaagagtttgacaaaggaacaagcgaggctcagctatggtttggttgcttagttgcagcccctggtgtctggctcagatggttcttagcccgactcaatggacgtgggctgggaaaggatagtcaaaatttgagatgggtcccatttggcaccctcattgcaaatgtagttgcagcttgcgttatggcagcattggctaccttgaagaaatcggtataaacttcctcacctcctctctctaccaaacagatcaaatcacaaaagataacattcattgtatatattttgggaaacaggtgaacacgagaacatgtaacacggttgcttcgagcatacagtttggtctgttgggatgtctgagcacagtttcgaccttcatggctgagttcaatgcgatgagagaaagtgattacccatggagagcctatgcgtacgcatcttttaccattgtggtttcttttgcgattggaactattatatactcagtccctgtctgggtaataggattcagttagttgtatcaaagctagataagtcttgtgcagatgatgtgataatacatagtcgtaacatttggtagagatgaataattagatcggtcacaatcaaattatattataccttgtgcag

SEQ ID NO: 140867 - DNA, 3638 bp, Arabidopsis thaliana landsberg
  unsure (1)..(3638): unsure at all n locations
cctttatatattacacacacattttatgtgtatctctgtgtttcagaatcagacctaacccattgttgaagcctttcctcatttctccatttagatcaagaaatatggcagtaagttcgaaaactcttttctatctaacaaaattgtgttatatccccctctcgtttgttatcatcttaaatcttgttatcaaaccatgttttatgacgaaaccatcagagtgttggaattttnnnnnnnnnnnnnnnnnnnnnnnnntcatttcccaatgaatgtttaaattgtttgtttgatcatattagaacagagatatgagcctttgtttcatatcagctgactttcgtatatattcttcttctgaattcaatctgttccagtatgtgttgagaagctaaagatagttctcataggtctgattagggttcatatacatatcgctttcttgcatctcaagtttgatattgaagtcattaaagctcaaatcgcttttgaccattttctcaaaaacattttttattgttgaatgattgattgcagaaccgtccacacgttccgaagtttggggactggaacaaccaagaccaaccattcacggtcgtctttgacaacgcaaggacgaacaaacgacaagacttgtatgaatctatagagaaaccagagaccaaacctcaagagctagctcctcctcctcctcagcctgctcgtagaattcaaaaaccggaagcaccaaaaccggttaagcaagacacgccgagagcacctccaccaaccgaaaaaaacagagtcaaagctccaccggcagatcaactctacggaggcgggggcagtggaggcggaggcaggagtggaagtggaagcgcaggtggtctttatggaggttatggaggcggatcagtcggaaaccaacggcagccaccagctcctcgtcctacgcagcctagacaaaatctcagaggcggcaacaacggaagggtatgaaagacacaatatataaatgaacttggatctttgtttgcgatttgcattaacatgttattatgtgattgaagagtcacattataatctaagatatatatatgatatgaatgaaaaagtttgcttatagtcattatatgatctgtagggagggacaacgataccgccattcccaggatcagttggtgcagggggggacatgagttacacacaaattttcgagaaagtcaaagaagagagaaacgaaggtgtcatcagacccaacggaggaacagccggcaacactccttcccgccccatcaacagtcaacatgatcaatctaccaaccaaacctcttccaaggtagtttatttattaatatacaaatgtttaattacaaacacaactactttgtccatcgttagaatttgtgttttgatgtgaattgggatgtgcagggctgctgcttctcatggtgccgcaggggaagtaaatattgaagacaatgtacatatttatccctatttcgatatatctttttcttttgtaacaaaaaggagtgaagtttttgctgacaacgttggagcttctacaattttttttttaaattattttaatttgtttctcaagtatggatggtgtagtttatttgtgttgtgtatttgaattttgtaatgaaaaattgtttatttctgctaccgacaaaacattttgcgtatgaaaataaatgtgttcatcttaagacaaagcccatgggccttcgtcatatttgggaggagtagtaactaaactagtttgagtcgtgtgaccttggtcaaagtaaccaacgaagaaaacaagagtcttttgacgaaacgacgactgtaccatgtggcatgtaaatgagtatggaaagtacaagtgtaatggactaatcgtgggattgatacttgatagtggactcaaccactcaaaaagtgtaacggagtcaaaaaatctctcatatccaaagtagtgtaatccattgtaaccaggtttcatcagaaagcctttggattgtaataatcctttcgagtcctttcgtttctctcactccactctgcaatctacttcatcgtcgacatcttcttgcgcatttcaaaggtacaaactttgaatctctgcccttgttggctctctatgtctggatctgtcgattaaagttctctatttttttctctcctatttgttatttctacctgggtttccacttccactgttactggtgctagatcttccacaaagaagtaaactttaccgccttactggatttttccaagtttgaattattattatttttagttccgttaggctaattttgacaaaaatcttgaatttttttgcctgagttcttgtaattcatggggatgtcttctgaaatgtgacaaaatctttgatttttttgttgagaagttaatctttgtccttctttttttccgaagatgacctaaacttgagagtactctaattcagtagtgactttgtgactgtaaggttagcttaactctgttgaaagatggcttctcgggtggtgaggactagtatgagacttcgaaggagggatggtgtgactcaaaacgaacaccagggagatcaacaagtggctgaccaagctccaacggtgcctcagattgtggctactcctcctaggatcaatgtggttgctattgaagatgatgatgatgttgttgaatcaactgcttctgcttttgctcaggtctgctctcttcttttcctttgttttccccttttttaatttaagtcatggtttttatgtacaagtttatagatctgttttcattcttattccaggctaaaaacaaatcgagaagtgcacgcagaggatcacaagtagttgatgtggagtcaggtgaattaacatcttttactgttccttttttgcatagctaccagaatctgaacgatgcacttgtggtgcaatatcatgtcttatatagttgggattatacagttacgtgtttctttgttcacttttgttactgtgatggtatgtgtacagctggtgctaatagatccacaaggcgtcgctctgatcaaactagtgttgactcagttgagcttaacaagccggtaagagatgtgggtggggttttcttttcttttcttaaagttttgctgtttggagtttggctcaccaagtttcattttcttgttcagagaaagtccaaggctgtggctcctcctgtagaggaaccaaaatttagctgtccaatctgtctgtgtccatttactcaggaggtttcaacgaaatgtggtcatattttctgcaaaaagtgcataaagaatgcgttatccctccaagctaaatgcccgacatgtaggaaaaaaatcactgttaaggaccttatccgggtcttccttccaaccaccagatgaatgatacagaaacatcactagtagccatgtaagtctagctaatgagatttgtttttttctgctgaattctaaaaattgcgccgttcagatccttttctttctcttctcttgcagggatagtggtctagcgattctacctccaacgatgaagaaatgttgttcattagttgtagtttgttatgtcaatattgttctgttttgtaagagaaatatctaggaattatggaagacctgattttctaatggatatcgttcattggtgatcttc

SEQ ID NO: 140868 - DNA, 1664 bp, Arabidopsis thaliana landsberg
atggcgtgggagaaaacaggaaacgcgactatacttgatcaaacagttgaagaattgatcttgcaggcacaagagcttgtaccgaacgctacgtgcaaagcaagaacagtgaaaggtttctcaagcagatggagagtgatcatttcaagattagagaagataccgacatgtggatcggatttgtctagccatccttgcttctctaagcacactctatgcaaagagcaacttcaagcagtcttagaaactttgaaagaaaccatcgagctcgcgaatgtttgcgtaagtgagaagcaagaggggaaattgaagatgcagagtgatctagattctctatctgcgaagattgatcttagcttgaaagattgtggattgctaatgaaaacaggtgttcttggagaagttacgaaacctttatcttcttcgactcaagacttggaaacgttcagcgttagagaattgcttgctcggcttcagataggtcacttggagtctaaacgcaaagcgcttgagcagctcgtcgaggtaatgaaagaagacgaaaaggcggttataaccgctctaggccgtaccaacgtcgcgtctttggtgcagcttttgacggctacctcgcctagcgtaagggaaaacgcggtgactgtgatctgctctctagcggaatcaggcggatgcgaaaactggcttatctctgagaacgcattggccttcattgataaggctactagaatcaggaagtattgttgctaaggagaaagcgagttatttcgttgcagagaatgtctatttcatcagagacatcgcgttcaattgttggtcacggcggggttggtccgttgatcgagatttgcaaaacaggggactctgtttctcaatccgcttctgcttgtactttgaagaacatttccgctgtgcctgaagtaagacagaatctagcggaagaaggaatcgtgaaagtgatgattaacatacttaactgcggaatcctattgggatctaaagaatacgcagcggaatgtcttcagaatctcacttcaagcaacgaaactcttcgaagatcggttatatcagagaacggaatacaaactctgctcgcttacttagacggtcctcttcctcaagaatcaggagttgcagcaattaggaatcttgttggctctgtttctgtagagacttacttcaagataatcccaagtttagtccatgttcttaaatcaggttcaatcggagctcagcaagcggctgcgtcaactatttgcaggattgctacctcaaatgagacaaagagaatgatcggtgaatcaggttgtatcccgttgttgataagaatgttggaggcgaaagcgagtggagctagagaggttgctgctcaagctatagcgagtctggttacggttccaaggaattgcagagaagtgaagagagatgagaaaagtgtgacgagtcttgtgatgttgcttgagccgagtccgggtaactcggcaaagaagtatgcggtttcgggtttggcggctttgtgttcgagcagaaagtgtaagaagctgatggtctcacatggagctgttggttatttgaagaagttgtcggagttggaggttcctggttcgaagaagcttcttgaaaggattgagaaagggaaattaaaaagtttctttagtaggaagtag

SEQ ID NO: 140869 - DNA, 1412 bp, Arabidopsis thaliana landsberg
caacagacacatagagatgagccgctgcggctctcttgggctctatgccccaaatgctttgccatctctctccttgaagccacgcagtgtcaaatctcctttctgtattacatctcacaccaaacccaacgacactcttcttcatgtaagacttctctaccttagctaagtgtacaaccaatcaacatgaatctgcagaaaactctctgcttcttcaccgtgacttattattgttcactgcagaatgttaacaagatgagagcaaaggcctgtgatatacttggagcaaagaagacaatcttggcagctcaactcggggcagttcttgccacggtaagaacatacgagacctttattcactatcgaaactatgagacaacagtggtcagtaatcgaaaatcgttagtttttcagattgaccatccagccttagcaataacaggagttaacaaccagcaggaattgagcagtgttgtgctcgatatcgggatcatatccgtttggtacttcctagtaatgccagtaagtttgaggacacatacattgtattttcaaagatttagatgattcatgattatgagtgtggagcttatatattatactatggtttgtgttagccaatcatcatgaactggctaagagtaagatggtacagaaggaagttcttcgagatgtatttacagttcatgttcgtcttcatgttcttccccgggtaagcaagatcacaccatctcatttgcatcaatgcttacttactctcttactctctagtctttatcaagattatcattttgcaggctactgttatgggcaccatttctcaacttcaggaagttcccaagagatcctaatatgaagaatccttgggacaaaccaacagacccagactctataaagaacgtttacctcaaatacccatatgcgacgccagaagattacgatctcgattaacagatagatccacaagtctgtttcatatcttgagactgtatgtatatactctgcattcacatgaacacaatgtaatggcttgtgcatacacttatgttcaagagaaatccaaatcaaacatgtaataaacagaaataactttattgtcatcagggaaaaaagaagaaatataaattatctcagaaacaaattaaacagtctaaaaaaaaccttcaacaactttgaacagactctgtgattataaaaacgaaaactctcattattctcttcccctccataacccctaagttctggtcaagatgttcaaaattttgtatcttggagagtaaaaggctttaacttttaagtaattctctacaccgatgatattaagagttacctctctatatcatcctcaggtttttgattgtttcttttctcttacttcttcaaagctgtggagataacctcagtgtatttgt

SEQ ID NO: 140870 - DNA, 2731 bp, Arabidopsis thaliana landsberg
ctacatttttgttgcctcaagatcttggttctttccaacttcctgcttcttattctgcactggtagctcctgagaataatggtgaatactgtggaatgatggaggacggaatgaaaatcggtctgcctttcgagcaagaaatgagagttacaggtgctcataatcaaaagtttactatccaggacatatcaccagactggggttacgcgaatgaaactacaaaggtctaatctcttacacttacaccatccgtaatatttcgttgagacttatgtggaagtgcataaatgttctctcatgggtatcttcttgcctggttagaacaaatgttggtgatcactgatcagttagatttttccgttttgaaatttcattttgacaatgcaggtgataatcattggatcatttctttgtgatccaacagaatctacatggtcttgcatgtttgggaatgctcaagttccttttgagatcattaaagaagggtttatacggtgtgaagcccctcaatgtggtcctggaaaagtcaatttatgcattacttctggagatggactcttgtgtagtgaaataagggaatttgagtatcgtgagaagcctgacacatgttgccctaaatgcagtgagccacagacctctgatatgtccacaagtccaaatgagcttatattacttgtaaggtttgtgcaaacacttctatcagaccgatcgtcggaaagaaaaagtaacttagagtctggcaatgataagctgttgacgaaactgaaagctgatgatgatcaatggagacatgtcataggaacgatcatagatggcagtgcatcatcaacaagtacagttgattggcttctacaggaactgcttaaagacaagctggatacatggctgtcttcaagatcatgtgatgaagattacataacgtgttctttgtcaaagcaggaacaaggtattatccatatggttgcaggccttggcttcgagtgggcattttatccaatccttgctcatggagtcaatgtagattttcgtgatattaagggatggagcgctcttcattgggctgcacaatttggaaggtgagtagccgataaagagtagactaacagtctcatttcaactttgttgattcgagtagaaaatagtgtcttgatgttttagcatcataatttcataagtaaaagaatgttatcacttggtcacctgtaaaaaggagtttaagatggaatctttcttagacaatagcttcaaatgaatcaaaataaccaatactgtgttctctgctgtggcagtgaaaaaatggtggctgcccttatagcttcaggggcatcggctggagcagtgactgatccaagtcggcaagatccaaatggcaaaactgcagcttcaatagctgcctctaatggccacaagggtcttgcaggttatctgtcagaggtggcgttaacaaaccatctctcatcgctcacacttgaagaaaccgagaattcaaaagacactgctcaagtgcaaactgagaaaactttgaattccatctcagaacaaagtccttccggtaacgaggatcaagtgtcattgaaagacacactggctgcagtacgaaatgcagctcaagcagctgcaagaatccaagcagcttttcgcgcacattcattcagaaagcgaaaacaaagagaagcagctttggttgcttgcttacaagagtatgggatgtattgtgaagatatagaagggatctcggccatgtcaaagctaacgtttggaaagggcaggaactacaattcagcagctttatctattcagaagaattttcgtggctataaagatcgtaaatgttttctagagcttcgccagaaagttgtaaagattcaggtattttaacagctttagtgagatgaacatagttgtttcccattagcctttggcttctcgtgcagctctttattctcttctaattctggcaggctcatgtgcgaggttaccaaataaggaaaaattacaaagtaatctgttgggcagtaagaattttagataaggttgtactcaggtggagaagaaaaggagttggactaagagggttcagacaagacgtagagagtacagaggacagtgaagacgaagacattctcaaggtgttccgcaaacagaaagtagatgttgcagtgaacgaggctttctctcgtgttctatcgatgtctaactctccagaggctcgccagcaataccaccgagtgctcaagagatattgtcagacaaaggttagtagtttacaagagatgaatcaaagttataaatcatcatagtggacttgctcttagtgtttcttgtcacaagttatatgataataatgaagatgcttgaatatttgcaggctgagcttggaaaaacagagacattagttggagaggacgatgatgggttgttcgacatagctgatatggaatatgacactttgttttcattgccttgagaggggaaagacaggcaagaacatctctgtgaatttagaggtttaatagtgtctgtagattttgtgaagtttcaagagtgaataactgaatagtttagattttgtgaagttgcatgcaaagaagaaaacaaggaagagctcttgttagtagtttctgtaaatggtcttttattgggactaacttgaaaagcttaaaggctttgatgtgttggacaaggaaaacaatgtacatatacaaatttgtgatatcatgttttttttttt

SEQ ID NO: 140871 - DNA, 495 bp, Arabidopsis thaliana landsberg
gttgatctagaatatttattggatcgctaccaacctgaaaaagaggttaattggggtgatgaattatctcttggagagcaacagagattgggtatggccagactattctaccacaaacccaaatttgcaattctagatgaatgcacaagtgctgtcacaactgatatggaagaacgctttgccgctaaggttcgagctatgggaacttcttgcataacaatctcccatcgtccagcgcttgttgcattccatgatgttgttctgtcattagacggtgaaggaggatggagtgttcattacaagaggttgggattgtttcttaaccatgtttgtgagaattattaaagtttatttttatttacttattaaaatgactaaaccttcagggatgactctgcccttctgacggatgctgaaattgattcagtgaaaagttcagatacagatcggcaaaatgatgcgatggttgttcaaagagcgtttgctgcagcatag

SEQ ID NO: 140872 - DNA, 2283 bp, Arabidopsis thaliana landsberg
caaaaattagggcaaaattagcgtattgatgtgtttcacttttcttcttcttcttcttcatcgtgttcgtgtttgatttgcgactttctccaaggaaaattttgggttttcgatgaaggaacctttgcagaagaagaaggtggttgttcgtcacttgccgccttctctttcacagtccgatctcttatctcaaattgatcctcgtttcgctgatcgttacaattgggtttcgtttcgtcctgggaagtccaggttagggtttcattttgtctcttttctcgttgcgtcttgaatttggaattttggtttctatgaattttagggttacgaatttttgtaatttaagaagatgatggaaattgaagaagattgtatttgattatgttggaaattgaagattattgtagagattcttgttacttagttgattgtagtgaaattatacttagtagtattggttttttttttagtgatgtgtgtgtgtttgtgtttttgtggtttcttcagctataaaaatcagaagtattcacgggcctacgtaagtttcaaggcaccagaagatgtttatgagttcgctgcatttttcaacgggcatgtgtttgttaatgaaaagggtatttgactttttaatctgtctttgtctgatggttgcatgtgtttttagtagtgtgtgtatttggggatgtgatttttgtggtttcttttggtttaggtgctcagtttaaggctatagttgaatatgcaccttctcagcgtgtgccaaaaccgtgtgataagaaagatcctcgtgaagggtctattagtaaagatcctgattatcttgagtttcttaaggtgattgctcaacctgttgagaatcttcctagtgctgaaatccagttggaaagaagagaagctgagcagtctggttcgtgtttcgtatttgcaatcattttgatgcttcttttgtctgaagaggttggttattctctagtgaattaatcgaaattactaacacaacaattatttttcttaggtgcttcaaaagcggctcccattgttacacctcttatggaattcatacgtcaaaaacgtgccactgtgatgggatcccaggtacattatgctcacagttttacggggttttcacttagtctacctagttgaatatcagaactttcctgggacggatgtctctctattttatttatttctaaatggaacttctattgttgatctctggtttctgttcaagcaacagggtttatctgatattcgaagaggaggtagaagagccagagtagtctctgcaaacaagccgagtccaaggccctcgaaacgtaactctgaaaagaaaaaggtttgtctctcactttttaggagtgaatagtcagtgtcgtctgccattatactcatctgttgccattatacttttcattctagtatgtggaaaaagaaagttcaaagaatgtgccccggaagactacagcagacgtcagcagctctaagccagattatcgtcagtcaaattcaagtggaaaggaactaccaggaaatgaaactggtaaaaaatcaacagctgttgttattcctaactagctaattacatatttttaaaaggccacgtttaactctttgtctttttgctactcaattgcagccgctatcattgatagctctccccctgggatagcattgactatggattctgggaagaaaaagattttgctcctgagatcaaaagaccgagacaatcctgatgtaagcttttttgttctttatgaaagttgtgcagactgtttgattgtaaacagaattataagccatgtaaatttcttatttgttaatggtatttttagaaccctccaccacaaccggaacagcatatagacactaatctttctagaaactccacggcttcaagacaaaaccagaagagtgatgttggtgggaggttgatcaagggaatacttctgagaaatgactctcgaccgagccagtcttccacttttgtgcagtctgagcaaagagtggaaccctcagaagcagaaaactacaaacgaccttctcgaccagccaacactcgagcaggttataaaggaatataatttaagtgaaaatgtttgcttcccaagttgggctgataattcaaaatagatggtccatgtgcagggaaagattatcatacttctggtaccatcagtgagaagcaagagaggcgtacaagaaacaaggacagacctgatcgtgttatgtgggctcctcgtcgtgatggtagtgaggatcaaccactatcttcagcag

SEQ ID NO: 140873 - DNA, 904 bp, Arabidopsis thaliana landsberg
aacccgacccagtaatcccttacccgacccggaataatctgaggtccaatcgttgcacccgagcaagaggagatagattgttcgatgcagttgcttctcatcgaacaactagggtttcgattcccacatttgaatcaaattcaatcgggtaatttattctgtcctttcgtatttgtatttgtgatagatttctcctctacgataattgtttctggagaggaatatctgttctcattttggtgtatctgaaatgcccatgaattttcactagtctgatcctcagttttagatgattattaaggcatgtcaatctttgtcgttgttgttgttgattgccacttttgtgatcttaacctttggggaaattgtgttaagttataatttagggtttatgttttcgaaagtctcaaaacacgaatttaaatctctctaatcagaaaaatctattgctaatatataacatcatgtgtgcattgcttcagtttctttcttgtttaattgtttcaggatggagaattctgatattgacatggtaatcatacctgatactccagatagatcggtacaccatagagaggttaagagaaggccacattctccagtagcaccattaagatatcaaagagaggaataccgtaatcatcatcttcacggaagagccagaccagtccctgaaattggggacaaccgggaaagttctgatacacgaactgagagtggacatcgccctcgtgcttctgtaggcaatgctttgtttaggagaactgttgttgagaaggataaagggaaatccatctccactgatccatgtgcgcctcgtgtagagaaaaatccggttttaaatctgaatcaacgtaacggacatgttcatgttggctgcttcgagataccaacccttctgaag

SEQ ID NO: 140874 - DNA, 2144 bp, Arabidopsis thaliana landsberg
aggtgaaataatttgacagctgaggatttaagcatttatgtgctgcaactctgcaagcttgtcatgtaccactgtttgtatattgtttataaataaaacagtggacttaaagttaagggaatgtcagcacctgggaagtttgattattcttctggtgggccagagaggcctttatacaggtccaacttagctgcacaaatggaaagatctagtagctttcgtgagacgatggaacatcctgtctcgtcatctcacccgagcatgttgaggagcacttcaccaatagcacaaaccgatgtaacaaacttttttcagtgtttgcgttttgatcctaaggtggttgccgcagatcataagtctattcgtcaaggtgactttaagcgtcatgtgaatatcgctcttgggattcaaggagatgaatctccaagcacaccactgaaagggaagttaattccatctcctataccagaagagatcaagaggttaaaggctggtctgcgcgaaaacaatgtgaaggccaggtagtttttgtacgataagttaagaaatcttctttggagttccgagtccagtttagctaattgaatttttgttgttgcagggagcgtttgaaaattttcaacgaagcttcttctgtatttaacaagttttttcctagtgtacctacaaagaaaaggtctcgtccagaaggattttctaatgaccgctcaggtgatcgtttggctttaaaaccaggtatgggtaaaatgggaatccaaggtcagactctgcctggttgttttgagcttgaccagcaaaagctggacgaacgacctaaaagtggtgcattgaataagcggacacgtacttccatggtaagtcctgatttttgtttgacaacacatgctttaggtcggttcatacttaaactgaacagaccttttgtgtcatgatgtagtcttctataggtgcatattttgattcagtgtttggttctgttattctagaaaaaaagttagaaatggtagtagtggagaaaattctcgtttaagataattgtgcttccaaatgtgatgcatgtgaaatattgttttcaaagcagggtaaattagttagaattactcttgttagatctacatagtttctcaattgctttttcttttctttcatgcttgtgttctgaccttaaaaattcttttgatactacagggttgttgtttttaattttgattctgaattttgaaagcatctggcagctattccattatttgctattactaatacaaatgttttaattttgctatatgtgattcagatggatgttcgaagtaatgctattgttcgacaatcagccggtgtagacagggataaagacacaatgaggctggcaaatcataatgcagttcagggtgaagatcgatcttcaattggtattgatggttgggaaaagtcgaaaatgaagaaaaaacgatctggcatcaaaacagatggtccttctagtttggcttcaaataaagctgttgatggttatagggacttgaaacagggcataccgaaattagctgttgattcccgctcgagattgaatggtgactcaaacatgttaaggtatggcctactgtattagatcataacttttttggttcaatcagttaaaagatccattgtttggagttgattaggaaaatactcccaaatagatttctttcctatttttaaatgattagattgattcttataacattggatagatgcgattttacgctctcttctgatggctattcaattggtaacagttcctggttgaattaattgtgcaggcatggggcagtgaatggcgctgttccatatgggagatctgatagcctctctcagcagacaggtttggcagcgcgttccttgctctccagggattccgatcacaatccgttgtacaatgagaagagagaacgagctactggttcagataaggaaagggtgaatctcagggctgtcaacaagtatgttaacaaacttacaatcttaaccacatctgtcaatttttctcctgatctcatttgtcaaatttttagcctctattcttcttcctgatgattcttttttattcctgttactctctgctgggttcattgcaggtcaaatattcatgaatgaatccaattctt

SEQ ID NO: 140875 - DNA, 6077 bp, Arabidopsis thaliana landsberg
  unsure (1)..(6077): unsure at all n locations
ctctggaccacaacatcttgttgctgatttggaaacttgcttcctacatctgaaacatttagctgctgctgcaaaagatgcagttgccgaaggtggttctgttcctggttgtagggctagattatggcgcagaataagggagttcaatgcttgtatcccgtatacaggtgtgcccgctaatagtgaagtccctgaggtgactttgatggcattaattacaatgctaccatcaactccaaatctccctgtagacgcccctcctttgccacctccttcacccaaagcagcagcaactgtcattggctttgttacatgtttgcgtaggttattgtcatccaggagtgcagcatcccatataatgtcattccctgctgctgttaacaggataatgggtttacttaggaacggttctgaaggtgtagctgctgaagctgcggggcttattgcgtccctcataggcggttggtcagcagatctgagcactgcaccagattccagaggagaaaaacatgcaactatcatgcataccaagtctgttttgtttgctcaacagggttatgttactattctggtcaatcgattgaaacccatgtcagtctcacctctgttttccatggcgattgttgaagtctttgaggctatggtttgtgatccacacggagagactacccaatacactgtttttgtagaattgttacgacagatagctgccctacgacgtcgtttatttgcactctttgcacatcctgcagagagtgttagggaaaccattgctgttatcatgcgtacaatagctgaagaagatgcaattgctgcagagtcaatgcgtgatgctgctttgcgcgatggtgctttgttgagacatttattgaatgcattttcccttcctgccagtgagcggcgcgaggtaagtaggcagcttgtggcactctgggcagattcttaccaaccagctttggatctactgtctcgagttctgcctcctgggcttgttgcatatttgcatacacgtcccgatgatgttgtcgatgatacagatcaagaaggttcttcaacaaataggcggcagaaaagattacttcagcagagaagaggtcgcatagctaagggaatgggtgctcaagatattcctcttccccctggtaataatgttgaggctggcgatgcagcaaaacatatgagtgcaaatgctagtgtacccgataactttcaaaggcgggcagcagattcttcctctgaagcttccaatcctcaggcttctgcttttccaggtgttgacagtactattgcaggggtttcacaaaatggctattcagcatttgcttcagtcaccacaaatgcaaatgggcatgagcaacctgagactaatgcatccgatgtggttggttctgacccaaacttgtatggcatccagaattcagtgcttacagcacctgctcaagttattgtagaaagtacagctgtaggatccggaaagctacttctaaattggcgtgagttttggcgagcctttggccttgatcataatcgtgcagatctcatctggaatgagcgtacaaggcaagaattaatagaagctttgaaggctgaagtccacaacctagatgtcgagaaagagcgcacagaagatatttcccctggtgatgtcgaggccacaactggccaggagattatcccacgtatatcttggaactattctgaattctctgtcagctatcgtagcttatcaaaagaagtttgtgtgggccagtattacctacgcttattgcttgaaagtggcaacgctggcaaggcacaagatttccctctccgtgatccagttgcttttttcagggcactctatcatcgtttccagtgtgatgctgatatggggcttactattgatggtgctgttccagatgaattgggttcatcaggcgactggtgtgatatgagtaggcttgatggttttggtggagggggaggagcttctgttagggagctttgtgcaagagcaatggcgattgtctatgagcaacactacaacacaataggtccttttgaaggcactgcacatattacagcactgattgataggacgaatgatagagctttgaggcatcgcctactacttctcctaaaggtatcatttactattcaaaatattgctttcttgttctttttattctagttattcttgttcctccacttattctcagtaaattttgatgtatgcattacgtcgtcacatacaaaatcattttggagatattcttttcatgcttggttgcttactttttcctggtacatgcaggccctagttaaggtcttgttaaacgtcgaaggttgtgttgtggttggtggttgtgtcctagctgtagatctgctgactgttgttcatgaaaactcggagaggactcctattccattacagtccaatttaattgctgctactgcatttatggaaccacctaaggaatggatgtacatagacaaaggtggtgcagaagtgggacctgtagagaaggacgtcatccgaagtttatggtccaaaaaggatattgactggacgacaaagtgtcgggctttaggaatgtcagactggaagaaattgcgtgatatccgtgaacttagatgggcagtagctgttcgagttccagtcctcacaccaactcaggttaagctttatggtttattttatgtgtgtgactggctatggaaatttcattttatcatgcttaactttccagaagacatatgcttttcatgtccattacctttttcctctgttttattcttacatttttatgcaatactcattctaattgataaaatactacgcaggtaggggatgctgcattgtccatattacatagcatggtttcggcacattcagatttggatgacgctggagagattgtaactccaacaccaagagtaaaacgtatcttgtctagtacacgttgtcttcctcacattgctcaggtaatctctttctttctctccgtaattcttcttctagctgcatccatgatgtgtttggtaagtgttattaagctgagccaaggatcctagcttccctactatttaatggcattaggcacgcctgctgtctaagtgctagctttgagtattatctgagagatgagttgtaaaataatcaaagcgctagttttgagtattatctgagagatgagttgcaaaataatcaatcagtatttgaaatcttctcatttagttttccttcatcgaaaaactgggagttgtagtcttgagctgttttttttccttgaccgaaaacagtttattataaccctatgttaatctgatgtctttctataattttgaaaaggctttgctatctggcgaaccagttattgtggaggctggtgctgctcttttgaaagacgttgttaccagaaactctaaggcaatgatccgactgtacagtacaggggccttttactttgcccttgcttaccctggatctaatctttactcaatcgcacaactcttctcggtcacccatgtccatcaagctttccatggtggggaagaagctactgtttcctcctctctgcccctggctaaacgaagcgtattgggtggtcttctcccagagtccttactatatgtattagagcgcagtggaccagctgcgtttgcagctggcatggtttctgattccgatacgccggagattatatggacacataaaatgcgagcagaaaatcttatatgtcaggtatttacatattcgctactgagggctttaggtcattttcttgaaggctatctgtaaactatcactttcaattcttcagttttaatttctcgtttttatttcctcaggttttgcagcatcttggtgattatcctcagaaattgtcacagcactgccattctctctatgattatgctcccatgccacctgttacgtatccagaacttagagatgagatgtggtgtcaccgttattatctcagaaatttatgtgatgagattcaatttcctaattggccgattgttgaacatgttgagttcttacaatcattacttgtgatgtggcgtgaagagttgactaggaaacccatggatctttctgaaggagaagcttgcaaaattctagaaatatccctgaacaatgtatcaagtgatgacctaaaccggactgcttcagttgagttgaatgaggaaatatctaatatatccaaacaaattcaaaaccttgatgaagagaaactaaagcgccagtataggaagcttgcaatgaggtaccatcctgacaagaatccagaaggaagagaaaagttcctggctgttcaaaaagcttatgaatgcctacaggtacgtctacaaagttttgatcattatctgggatttgatgtttttttcaattatatgtttaccatctttgtgtgttattgtatcggtcttttagaacattggaccattggatggtcacgtaatatgttgaaaagtgcaatattcttggataccagcacaccaggacaccagcagttatttcatgttcaagttatttgataaatgctttatgtagaaattgaattccccttcattatgttgctgtgttcttattagtagagataacattggtcaactttttcctttttccatatgtttgcttgtcaaacaagtgtttgatcatagtatgtacatgatgttatcatttagttctgctaagaacatagtcgatttgtatctaagaattttatagtatactcctatctctgaagctattccactgtagattagtgttttaggtccatatatatgattgtgtttatatatacttctgtctctagatttcatatttatcatactatacatattcgctcttctgcttataggcaacaatgcaaggattgcaaggtcctcagccgtggaggttgctgcttttactgaaagcgcagtgcatcttatatcgccgttatggacatgtgttacgaccgttcaaatatgctggctatccgatgttacttgatgcagttacagtggacaaggatgacaacaactttctatctaatgatagatcccctcttcttgttgcagcatctgagcttgtttcgttaacgtacttatttctcttgctaaaactgtacaattctagttttatttatttctagtccttcaatgttatctattttactttcctgttatcttctgtgtagctgtgctgcctcgtcattgaatggtgaagaattagtgagagatggtggtgtgcagcttctatcaactcttctttcccgctgcatgtgtgtggttcagccaacaacttcacaacacgaaccagctgcgatcattgtcacaaatgtaatgcgtacactttcggtaataagtcagtttgagagtgcgagggctggatttctagagttacccagtctgattgaagacattgtgcactgtacggaattagaacgtgtgcctgcagccgttgatgctgctctccagtccattgccaaggtttctgtcttccccgaacttcagcatggtctgctaaaggctggtgccttatggtgagctatattcttattctctttgtcgctgttaatatgtgtttgttcaattacaagacagaatcttggtggctctgttgtccatgcataaaattccatgtataatgtctatctatataannnnnnnnnnnnnnnnnnnnnnnnnnnnnnnnnnnnnnnnnnnnnnnnntggactttgtatctttgttacactcatttggacctttgcttctgacaagtatgactaatggctgtgcttctttctatttgtatgtctgtttaatcaggtatattctcccattattactacagtatgactcaactgctgaggaatctaattctgtcgagtctcatggggttggagttagcattcaaattgccaagaatgagcatgccttacaagcatcacaagccctatcaaggcttactgggctgtgtgcagatgagagtttgacaccttacaatgctactgcggctgatgttctcaaagcattactgacgccaaaacttgctagtttgttgaaagatgaagttgccaaggatttgttatccaaactgaacacaaatttggagacaccagag

SEQ ID NO: 140876 - DNA, 1289 bp, Arabidopsis thaliana landsberg
atgttgagtttggatgatgatgatgaatgtgaagaagaaataggtcagaaggaagaagaagaagacgtctggtttttttccggcgacaatgctgaaattttctgttggggtcttgagagagtggagaccacgtctttgccatgtcatgcttcgttgttgttttttaagaaaaaatgaaaaaatagattcttcgtggttgtcacaaaagaaaaaggaaataaaatcagtatctgaaatctaacggtggaaattaatcgataaaataaataaaaagatttatagtcttttttagatagaagggagaaaatgagtggataatacaaccactgaatctgttttgctttagttggaagcattaagagaacagccatggcttcttcttcaatctcattctcctgcgcaccttctttggccacctcactcttctccaccacttcttcttccccaaggctgctctcctctagatttctcggaacccgaaacttaaagcttcggatccgacctgccagactaggaccctccaatggttcaagaaccacttgctggttcaagttcggcaagaatggtgtcgatgctgaaaatgccggaatctatggcagccagtctcgagatgatttcgacagagacgacgtcgaacaggtttttcccttgactaagaatcagattgatttatgtttcgaccaagaagtcagaagacgcttaggttggattctgatgaatcaaatcgtcaagtttgctacttgaattgcaatctttagttgtagatgtgaagaagcattacatagagctacattgaatataacttttatgtatacataaatataaattttatgtgttcgtgatgttttttgcagtatttcaactacatgggtatgcttgcagtagaaggaacctattcaaagatggaagctcttcttaacctaaacattcacccagttgatatcttgttgatgttagccgctacagaaggtgacagacctaagatcgaggagcttctcaaagccggtgctgattattccgtcaaggacgctgatggaagaaccgctatcgacagagccaacagtgaagagatccgtgatttgatccttggctactcgactcaaaaggcttgactccgcttggttttaatacacaggaacaacacaagttatgttcttgagttttgaaatgtttgtgtttgctagaacaaactgtctttctgtgttccgcggatgagtagattataaaatccatcttcttcctttttgtctttctcgccagtttcttgtttcttcaatgggggttgttct

SEQ ID NO: 140877 - DNA, 1565 bp, Arabidopsis thaliana landsberg
atagtaggtcggattagtagtgatgatgattatgatgtcccgtcggaggataagtcggatgataggtctgaggaggcactgaggtaactccggtaggattatgcccgtaaccgtgtcccataaccggtgcgggagccggtacaggcgcttgttgaggcacgtggggaccatgatcagtaacatggtagtgagattgcttagccataagcttgtcttccgcatgagccgctttagccatgtgcatatccatattcgcttctgcttccttcgcctttctccgttggtgcgctatctctttctcctctttcgtcctcgccatcgcccgctccgcctgcacgtcattaatatttgaatcaatcaaacaatccataactatttagtcataacaatgatgttaaacgaaatcattagcgtaattctaaatttagaaccttctcatcagcttttgcttgacatatcaccatcttctccttggctgtactagccatatcgcttatcttctgtttcgccgattgcatattttttttctttagttttctgtttctctaaactctaactaattactcttgaatgattcttattcgatttaaataatgaaatgtatgcatggcttcgtcggtccaaatgggtcacattaattccacgtgttattaatgtcgccacgtgtcttgtttcaattcccagctttctatctagttaccacgtagagatgcttcgctggcctaatctgatatccacgcaccgcctctaccggattttggtggtttaattggccgaattttgtaaaccggaaaagtttttggtttgtatttccggtttatgatttagcagtggaatggttgattggtctcttttctcagaaacactctcttatcttcttcaacctctcgacttgtaaaagccgcgaaaatcaaaatcctccaaaactatggctctgattttgccctgtacattttgtacttcgcttcagaagaagaattttccgattaatcggagatatattacgaatttccgtcgaggagctacgactgcgacgtgtgagttccggattcctgtagaagtttccactccatcagatagaggatcgttggttgttccttcgcacaaagtcactgttcacgatcgacaacgaggagtggttcacgaattcgaggttccagaggttagattggataagttatactctagatttgcaatgtatgctctgtagtttcgagattcaaatatattttatggctttggatctaggattcgttggctatagttaattttgattctacttagtttttgtttctctcttgcttccatttcgatgttcgttgcgccttagaggaggaaattagaaggaatttgctgcttgtggctcttttggtttaagcaaatatgaattagcttgttgtagttttgtaactattcttacgtctggacattgtgtagtgtggttgatataatcgtgttgtctggcttatcactggtttccgttcgttgatatgtggaagtctatttgaaatgcaggatcagtatatattgcattcagctgaatctcagaacattagtcctttaca

SEQ ID NO: 140878 - DNA, 1615 bp, Arabidopsis thaliana landsberg
gttaacactcttttaaaagaacaaaaaaagcaaaaaaaaaaataaagatattatcaccatggctaacgcaagaagtttggtcgccaaggcaaacaatattaacgtaggttcattgattctaatggccttggtgtttggttcttgcgtggctaatggtgaatatctcggcggccgccgtggtctcgctgctaattccggtaaccccacggtctatgatattactaagtttggagccgtaggagatggttccaccaatacttttaaggtaaagtttagtttcattttcgatccataacctttttgagtattttatagtaaaatgcatgtgacattctaacgattgatccaataacattcatgcaggcgtttttgaacacatggatacaagtgtgtgacagtccagtaccagcaacgctactagttcctaagggaacattttgggctggtccagtcattttcgccggtccatgcaagagcaaagtgaccgtcaatgtagtaggcacaatcatcgctacgaccagcgggtacgcaactcccgagtggttcttgttcgagcgtgttgacaatctcgtcctcaccggaaccggcacattccacgggaaaggtgaagctgtctggaaagcagatggttgtggtaaaaaggtccaatgcaatcttcctccaacggtaagaccaaataactatatattattgcaaatcatgtatatatagatacttgcaataactaatcacacatttgtacgcatacatgcagtctctcaaattcaggaacatgaaaaatgttgaaatcaatggcataagctcggtgaacgcaaaggccttccacatgttcttagtcaaaactgagaatgttaacatcacaaaacattaggattaccgcaccagctgaaagccccaacaccgatggtatccatttgagcaatgcagacaacgttagcatcctcgacagtaccatagcgactggagacgattgtgtttcagtcggtcgtggctccaacaacgtaaccgtcgaacgtgtgatttgtggtccaggacacggtctaagtgtcggtagtcttggtaagtacaagaacgaggaagacgttagcggaatccacgttaacaactgcacgatgattgagaccgacaatggtcttaggatcaagacatggggtggttcagacccaagcaaggctgtggacattaagtttgaaaacatcatcatgcagagtgtcaagaacccaatcatcattgatcaaaactacggttcaagaggcggagtaagtatatacatcactgaaaatgtctcaaaccaactattcttttgaatatatgcgttaacaattccttttttttggcatgttttgtaggattcacaagttgctataagtgatattttgttcaagaacattagaggaacaacaattacaaaagatgttgttcagattatgtgtagcaaatcggtgccgtgccaaggagtaaacgttgttgacgtgaacttggactatgtaggcaagacaggaggagagaagaagtcgtcatcaggcggtttggtcggagctctttgcgtaacgccaatgttatcttcggtggaaaacttagtttccctatgtgtcccaaataagcttttggtata

SEQ ID NO: 140879 - DNA, 891 bp, Arabidopsis thaliana landsberg
ttattaatttttgccataagcttgagaacacttgaaaagacaagattcgcgagttcttcgttcttcgttctgcctttttttttttttttgtgtgttcgagagatgtctgcctttgaagacgattccttcgtcatactcaacgatgatgcgtctgagtctgttccagtctcaggctcttttgacgccactgattctttctcagctttcgacggctcactccaagtcgaggactccgtcgacgatgtttttgcagcgccgtcttctgactacggtgcttactccaacggtgacggcatcttcggatccaacggggatcacgacggtcctatcttgccaccaccgtcggagatggaatcagatgagggatttgctcttagagaatggagaaggttagatctactcaaagttttgatctttgttgctttttgtttacttcttcctgaagaaaatcgataaagtggataaatttagttgagaatctctttgataatctgagaatttcaattttgaattttgattcacaatttttgtgaattgaagttatctgctagttagtgtccattgttctcagaagtaatcagtttattagattggatctgttacttttgcttagagtttattggtcaaatcgtgtgttctagaataacatcttgatccgtaagcttgtaatgcttgttgagttgattaagatgtatagatctgatttcgtgctatggctttattatgtttatgtgtagacaaaatgcaattcaacttgaggagaaggagaagagagaaaaggaattgttgaagcaaattattgaggaagctgatcaatacaaagaagagtttcataagaagattgaagtaacttgtgaaaacaacaaagcagctaacagagagaaggaaaag

SEQ ID NO: 140880 - DNA, 571 bp, Arabidopsis thaliana landsberg
tacaagcaggaacttgtctcgtgtactcagttagttctaagtgaactattagatgctattgagcaagagtcttcacaggtcaaattactaccactaataagaaacattctaacttttttgtttctctaactaacccgaggttttattattgcagatttctcgggggaacatggcgcttgaagcttgcaattgcatatcatcagcactagtggtactgttttctgccaagttttgcatattttctcattcttgaaaagttttattaacttggggtggtgacatgtttgatgatgtgcagatgaatgagaaagtcaaagaactttgcttgagactgctggaaacagcaaaaggttgtttgggtgccaatgacaggtacatcgaatcgactaagaaatcactccagctaagatacaccgagtgaatgttaaattatatgatcccaaatgtggtggcaacaaagcttgtgagattgttgcatttggatccagtcaagtactcgtttgtactgtactgggtatctatttgtgtccataaggaaaatgacgatatagttttgagtatggcaacacta

SEQ ID NO: 140881 - DNA, 988 bp, Arabidopsis thaliana landsberg
cagaagagtggcctgtggctaagcagatccactctttctaccttgttaaataccgttcttacgcttaccccaaaattaaagctaagcttgatctagctgataaagagcttgaaaagttgaacaaagctcggactggagttttggacaagttgagagctaagagggtatgttttttttgctaccttcttgtgtcggatttaggagtttcgttatttcttttatagtggtgctgataatgcggttttggtaatgcctaggccgagagatcagagttatttgatctgctggacccgttgaagtcagagcgtaagggattcaacacaatgtttgatgagaaaagaaaggaaatggaaccattgcagcaagcactgggaaagttaaggagcaatgatggtgggagtgctcgtggccctgctatctgttcctccgaggaagagctgaatagtatggtaattatatgagacctttttttttgttttcgatagctttggttagccttttcggtattctcatttgcctgagtttgtggaaaatgaagatatacagctatcagtatcggattcaacatgaaagcattccgttaaccgaggagaagcagattctcaaagagatcaggctgcttgaagggacaagagataaggtcattgctaatgccgctatgagagccaaaatcaaagaatctatgggtcagaaggatgatatccaaggtcaagttaaggtaagagagttgtggccggattcttgctgttatatagtctgtagaagttggtttcatatgtgatgctttttgcagttaatgggtgctggtttggatggagtgaaaaaggagaggcaagcaatttcagcaaggattaatgagctgagtgagaagttgaaagctaccaaagatgagattacggtactggaaaatgagctcaagactgtgagcgaaaagagagacaaagcctattcaaacattcatgacctcaggaggcaacgcgatgagacg

SEQ ID NO: 140882 - DNA, 310 bp, Arabidopsis thaliana landsberg
catggccgggtgatgaaggtgaacagagatgggagcaagcttggtcagccattaaaaaggtaaaatcttgaagtaagggaaactgctgcttaacatgaagatgtcaaatctcactaaccggctatgtaaatctcaggtctgggcttcgaaatggaacgagagagcatacttcagcacgaggaaagtaaaactggatcatgactatctctgcatggctgttttggtccaagaagtcatcaatgcggattacgcattcgtcattcacacaactaatccatcttctggagattcatcagagatttatgccgag

SEQ ID NO: 140883 - DNA, 1008 bp, Arabidopsis thaliana landsberg
cacacaaaaaacacaagatctaaaaaaaaaagcttttatcatcaagaaaaatttggtttcgaatttcttggaagagagaaaatggcgtctcatcaagaacagagttacaaaactggtgaaaccagaggcaaggctcaggtactaaacgatttatatgcataactataatactttttggatagcagcattaaatgatttaattttagaaacttaaacaaaacctaaaagtaaatattgtttgtatgtgaaaaaacaaaaatgagtttgaaagttattattttcaattttgtgatgtttcgtgttatttgattttagaaaaaaaaaaaaaaaacagctgattagtattttttataatgtaaatccaatcttgaactgtaggagaaaactggggaagctatgggaacgatgggggacaaaacacaagcagctaaggacaaaactcaagagacagcccagtcagcccaacaaaaggctcatgaaacagctcagtcagctaaagacaagacgtctcaagctgcacaaacgactcaagagagagctcaagagtccaaagacaagacaggaagctacatgtcggaaactggagaagcaatcaagaacaaggcacacgatgcagctgaatataccaaagagactgcagaagcaggtaaggagaagaccagtgggatcttgggccagaccggtgagcaggtgaaacagatggctatgggagctactgatgcggtgaagcacactttagggcttcgcactgatgaaggaaacaaagaacatgtttcttcagctccaagtactactactacgaccactactcgtgagacacagaggaagtgaagaggataaatatttgtttcgtgttcgtggttttcatgtttgtttgctttgattagtgtttgttgcgttcgtgaggttatgccgatccttgttgttgtttattgggtttgaatgtacttctacgtattatcatgtaatggttttcttttataaattggacactagttatttcgggtg

SEQ ID NO: 140884 - DNA, 2085 bp, Arabidopsis thaliana landsberg
aatcatttcatcgagattctggatcttatgtctgggacttcaaagagcagcctaaacaaacatcttcttaacatgggtacaaggtaaggcttgtttgtttttccaacgttcttaatttgaattaaatatctcacacttactggatggggacatagaccattgtaaagttgatgaacgttaatttacatacataacgtttatgtatttggaagcatttgtgatcctctttctttcttggttaaagtattcatgtttcttttcctttgaagcagggatggatgcatttgtgattcaacagcagtgcaattgctttttgaagtttctcaggctctttatgatgctacagatttcgttaacataaaggatgatgacaatagacagacatcacatttaatttctcgttttgttgagatggtaccttaagttccacttacattattacgaaatcagtgagcacttgccctttttgtcaagttagttgaatttgacttcacttttgatgcttaggttgactatggggcagaaatggaacgccatttattgtttttggcggagtgtcgtgaggcctttaatgggatacatgaacttaaggtcagcaaaaagttaattattctttggtatcagttttaacttttaatactgctatacctgtggaggaccctgtatagttccagtcttgtgcattcttttacttcttaaagagagttgattatctggtaatcaagttaattatggtgcattgctatttatctagtcctttcttgcttggtcatgacggatacttagccttggatttgagggtcaagcagcaatgtatctgccatctggtgcatgatctttattatacataatagaatttgaaggttaatgtgaatttggtaaaaactctagaaattaccgcaaaatttggctacatatgatatggtacatttatgagaagggaggagtacagagactattagatattaagtatagagactagagagggaacaagagcaatacatgcttcccacatgctttttttcttgctatgggtgtgtttatttttcgtttatttgcattagagcttgacacaaacaaaaattatcaaacattttgatcatttttcctgcttatggtcactggctgcaggagacacttgttcgttcaagcaacaccttggcagtaaaagcactgaaagcaggaaagaagcatatcaactttgttaaatcttgcctagcatttagcgaagtgaccatcccatctatttcatctcccacgaaacacttaaatctttatcttgaaactgctgaggtaatatttttgtctttttcagtcctttacactcccacttcaaagcaatatacgtactaaagtttgttttataggttgcacttttaggtggtttgatttctcattcagatgaactggtcatgtcagctgttgagtatctagagaatgtagcgctgacagatggtgagtctgcaaatgtttaatttaactactggatactaaataaatatctgaaaagtaataaaactagtctgacatatcttgccaccctaagaccagttactgcaaagagaatacttggtttaaatattataatgatgattctatggtcggtggcctgcatacacttttacttgtgaagttttttcaagtatagatgattatctttttcttcgtcactctagctttgtattttttccattttcagttgttcttcagggccttttattttttctccagataaatgtatatgtcttaatgaatgaatatgcataggatatgttgatggtataatatcttgtacatttttctctatcaggtttaaaatcaattgatatagatagtatggcctcggttatatgcaaattgtgcagcctcttggtaatgatcccaggtaaatcgtggaaactgtttgatagtttttgctcaacaatatagatgtgactctgtgtcaccaaattgatttcgttctccttatttcttcggagcttcataactgagttattttcgtatattcaattggaaaggtaatcccgagaaaggcgtgatggagatccttaaaagtatcttctctgctactcgctctagttcatg

SEQ ID NO: 140885 - DNA, 2661 bp, Arabidopsis thaliana landsberg; identical to SEQ ID NO: 29163
  unsure (1)..(2661): unsure at all n locations

SEQ ID NO: 140886 - DNA, 1328 bp, Arabidopsis thaliana landsberg
acatagttatgagattctcggtgctacagaagtatgtcaacatgatctatacagaatttatcttttcactagagtcttcttctgatattgtttcaaataattatgcctgccatgaaatattctgtcggagagactgaggtagttgttacggggcattttcctgactttataggtgaactagatagtatttatcagagacatctgtaacaccactttgtccagatatggctttatattttacagatattctggcttgctagtctagcaggtctaatgtgtctgtgagcatctagagtattgatttctagtttaccaagcactctgagttaacacatgtatctatgatacttcctagtgacttgtgtttctgcctttgaagtgaggtggttcaaagcactatgaagattggggaagcaagtacccgtattaaacaactggaggagacactggaggctatacaacttggcagacagaatgctgtaagtgaggctgcattagcgaaagagaaatctgaggctctcaaaacagacgtgaagagaattgaagtaatggtaagtttgaaaattgttgctggtgctctgtaaggggtcacaaatgcacttttattttgctggcatcaattaaagcctcttaagttgatttttgattctcgagagataaaggatagcattttcaattggtgacactcaaatgctcatcattttatattcattattcttgtttattgattgtttgcttggtttctctaggttcactgtctttgcttggatatatactagctcagctctgtatttcatgttgattgttgatctatgcattcataagaagctgatagaagtaatatagttagagacgatattcataggataatatccctagtatttttggatgttcacgttgggtttgttatcaattagtacagatttaatatctctatatatgtggggaaagtctgtttgttcctaatgagtgtattcaattgttagattttggtgcaaattccttcgtatccaaacatgagtctatcacgaatttatgatgagttgatttatccataatatagtgtcctttcaggataagagataatgtgtgtagtatagaatttgttgcaaacaactttttatttaatcatgaatctatcacaattcaagggaattaagtttatagtgtctcattggaggtaactttttataattttctatcagtttgttgcactattactaacagagctttaatttgtaataaagctcactttggtcacggaggagaaagaacagttgaaagctgttgttaatgaattaaggaagtcaaacagtgaaggatctgtg

SEQ ID NO: 140887 - DNA, 1628 bp, Arabidopsis thaliana landsberg
tactccaaaatccccagtgaggcgacctctagtaattgatggtcacagacctcttgataactggccaaatgtaggatcaatcgtcttcagagacctacaggtaaataacaaagtagatgtcaatacattcagaaacaagttgtaatcaagattctcaatcctgagatgtctttgttccaggtccgttatgcagaacatttcccagctgtcttgaagaacatcacttgtgagtttccaggaggaaaaaagattggagtagtaggaagaacaggaagcggcaaatcaactttaattcaggcattgtttaggattgtagagccaagtcaaggaaccatagttattgataatgtggatataaccaagataggtctacatgacctgagatcaaggcttgggattattcctcaagatcctgcactatttgatggaacaatcagattgaatctagaccctctagctcagtacactgatcacgaaatatgggaagtaagaaacctgcaaaattttctctgtagttcttgtttgatttacttttgacaaatactctatctaatacaatgtgatacttaggccattgataaatgccaattgggagatgttattcgtgcaaaggatgagaggctggatgctacaggtgaggtttctgaaatcattatcaggaaacgtttttaagttaatgttttttggacaatgaaagctaagattcttgaatgtatgtaacagtggttgaaaatggagaaaactggagcgtagggcagagacagttagtttgtcttgggagggtgttgttgaagaaaagcaacattctggtgcttgatgaagccactgcttctgttgattctgcaactgatggtgtaatacaaaagatcatcaatcaagagtttaaagatcggacagtggtgactattgcacacagaatccacacagtgatagagagtgatcttgttctggttctgagtgatggtaagaacaatatacatgtgttttcatatacattcacacacataattatgaggtctaagtcacttttctacgagcaggacgaatcgcagagtttgattcacctgcaaaactgctacagagagaagattctttcttctccaaactcataaaagagtattcgctgagatctaatcactttgccggctcgaatgatcttctcagctaaacaccactaaaagatggatgatcttttgcagagaaaacgaaatatgaattccacagttaagcttaagttgaaagtctaactagttatttagtactacataagttgaacatagaaatggagagagcaccatggttagaagcatggcgcatcgaagaaaattcagttcaacattttaatcagtacttgtgttttaggttctatactgagttttcagtgtgttcttggagaactatccatgtaaccaatggaataaagcaggaatctattgttaatgcacgaattaaacaagtacgaaaatgggatctctagggaaggaagaagaatctttctattaatgacgagcccgcgacttaggtgaattggacggattacaaaggatgatttcttcaacaagcataaatggagtaagaacgagccgattgtagatgaaagacgagcttgaggccggaagacgatcttg

SEQ ID NO: 140888 - DNA, 6398 bp, Arabidopsis thaliana landsberg
gaacatagtggacttgaagggagcctacgaggacagacactctgtgaatctgataatggagttgtgtgaaggaggggaattgttcgataggatcatttctaaaggtctttactcagagagagctgctgcggatttgtgtaggcagatggtgatggttgtgcatagttgtcattctatgggtgtaatgcaccgagacttgaagcccgaaaactttctctttcttagtaaagatgagaactcaccattgaaagctacagactttggtctctctgtcttcttcaagccaggtttgaacagcctctatccttccctatttgatttctatagacaatttatccctctaatgaagttgatccattaatgcaggtgataagtttaaggatcttgttggaagtgcatactatgttgccccagaagttctaaaacggaactatggaccagaggctgatatctggagtgctggtgtgattctatacatccttctcagtggtgttccgcctttctggggaggtattgtcttgatcttatttgagaagagaatttggtttcactgtttaaatgttggactggaatgtatagtcacgttctttctgttgtgcagaaaatgaaacggggatctttgatgccattcttcaagggcaacttgatttttcagctgatccatggccagcactatcagatggtgccaaagatcttgtgaggaaaatgttaaaatatgaccctaaagatcggcttacagctgcggaagtgctaagtaagacccctttataacatgttttgatgaataaattgatgaaaacaccttcttttatccaattttaataacgttttgatacatacgcagatcatccgtggattagagaagatggggaggcatcagacaaaccgcttgacaatgcggtgttatccaggatgaaacaattccgggcgatgaacaaactaaaaaaaatggccctgaaggtaattaaaacactgattgaaacagtcttaccatcactattgtagtttatgtagtcttcttgttctaaagccaatctttggttttcgttttgcaatttcaggttatcgctgagaacctttctgaagaagaaatcattggtcttaaagagatgttcaaatctctagacactgataacaatggaatagtcaccttggaggaattgagaaccggtctcccaaaacttggttcaaagatctctgaagctgaaataaggcagttaatgaaagcagtaagtctatcacaatccactactttgatgtcaaagcaataatgcttatgatgctttgtttcttttaggctgatatggatggagatggatcaattgattacttggagtttatatcagccacaatgcatatgaacagaatcgaacgtgaggatcacttgtacaccgcattccagttctttgacaatgacaacagcgggtaaaacattgttctttagctctctatttctttctttaacaagctataaataaagtctcactctttgatcttgatttgtgatattagctacataacaatggaagagctagagctagccatgaagaaatacaacatgggtgatgataaatccatcaaagagatcattgctgaagtagacaccgatcgtgtaagtatacgtaaatctctggtttcgtccaattcatacatctgtaagtatacgtgtaagtttaacactctcttctcatctttgtattcgaatctttaggacggaaaaatcaactacgaagaatttgtagcgatgatgaagaagggaaatccagaattggtgccaaaccgacgcagaatgtgagagatcttttgatgttgtttgtttgtttttggttatcactttactcaaactttgtgtttctgttacaatcaattattttgtttcctgcaatctctttttatcaacacaacataaaaaatactttgagatcagaaagccatttgcaggtttggttaatgacttatgagagattcaatatataataattacaggttgattcttgcatgatttgaagctgaaattcacttaaaaaattatagaatgataatcttaacccttacaaacaaatttgagattatatatctaatcaaggcaataaaaaaataagcaaggtgcagtaggagggattagaagtttcaaatccgatttttatacatgaaaaatgacgaaatctaataatcttggtgacattttctcacagagaaatcggacaactaaaatgagtaaaaaaaattaaaagaacgaataaaaaatcaactgagatatatataaaaaaaaaactggaagaagaagaaggaccgcgagctttggatcgaatttgttaaatttttcttctctcgataataaaaacaacaaatgatcgttgatcgtttttctctagattcgattccgattccaaagaactagtctccggcgtgtaatctctgatcgttgaagatccaagctacgccgcatcttactcgccggcggcttgaatcatggtatgtcgctcccttctctcgaccgatacgtcggaaatcttaaacccctagattccttattgctactcctgcggaattacaattgttgtactgtgatgatgtgaatagaaatggtgagagaattctgaaaatgaatgatgccaatattcattgaatttagcttctgattctaaatttttcaatcaggatattcaaatccaactcaatatcactcttgaaagtaaaattactgttagcgattcgttttaatgcatctctgagcttatgttttgatttgtaagctctcgaagtttaagcttcttgtgatagcttatgagccattcattgataatctatccaaacgttaaaatgttcggcaatatctgtttatatatgtgtgtagttttgaccagcgtggtgttataagtttgttgttgtcttctcttgaatcaggctgataggagaaacaggtgtaaccagatcctccttttagcataccagagttttggcttagtgtttggagatttgagtatttctcctctctatgtgtataaatgtacattctacggaggattgagacatcaccaaacagaagatacgatatttggcgcgttttctttgatattttggaccatcactctcctttcactcatcaagtacatggtttttgtgttaagtgcagatgacaatggtgaaggtatgtgcatcggttgctaattgagtctatttgttttcttctgagacttagggttaggatgtaaatgttgaatttatgttgcaggagggatctttgctttgtatgctttgctctgcagacacgcaagattttctttgcttccaaatcagcaagctgctgatgaagaaatctctacatactatggtcctggagatgcaagtagaaatttgcctagttctgctttcaaaagccttatagaacgaaataaaagatcaaaaactgctttgcttgttttagtcttggtaggaacttccatggtaataaccatcggtgtccttacaccagcaatttcaggtgattaggcagacttcgtttcgcttctttctggttatatagtatgttaccaattttttccttttccatggtttagcatctaacgtttatcttcttgtagtctcttcgtctattgatggccttgtggccaagacaagtctgaagcacagtaagtaacgtttcctgtccatacctacatatctagtttatatattcttacgcattctgtcagtgttatttatattctttatcaatgtgttatttgcataggtactgtggtcatgatagcatgcgctttactggttggactttttgttctgcagcaccgtgggacaaataaagttgcctttctatttgcacctataatgattttgtggttgttgataattgcaactgctggtgtgtacaatattgtgacttggaaccccagtgtatacaaagccttatctccctactatatctatgtattctttagagatacgggaatagatggatggctatccctgggaggcattctattatgcatcacaggtaatatggtcatttatgctctgaaaatagactcaacaaattttaatgctatattatgtctcatctttgcaatttgtctgaattcaggaacggaggctatctttgctgaacttggccaatttacagccacatctataagggtatgtgaagcagcttttttggttcctttatgcagcagaaacttgtggagagactttttatagtagttctttaggaattgcatcgtacagttactagaagttttttttgttgctaaagaatccacaagcaattggtcatattatggattttttttattttatttttgacggaattatggatttattcttgacccaaggaagaggaaaaaatatgataaactattaaaatctggttattgttataaatatttgacagcctcttttgttggctaataaagatgaagaaacaataacattttgctatgtcatggttctctgcagttcgcgttttgttgtgttgtttacccgtgtctggtgcttcaatacatgggccaagctgcgtttttatcaaagaatttttctgctctaccttcaagcttttattcttccattccaggtaatagtttggtcaatctccttttcacgtctctttcctctacttctgacaacctgtatcaatccctccaattttatataattcctctacaagtcccaacaatactacaatttctcaaataaatgtacctgaccttcaatgttgggatgttgtagtggttgattttatccatggtacatgtctagatccaaagtttctggtttattattcttatctgcaagtaatatgtcaactcattcatgtgctcaactttgttcgtgtagttttcatgtgttttgttcttgttctacagacccatttttctggccggttctcatgatggctatgctagctgcaatggtcgctagtcaagcagtcatatttgccacgttctcgattgtcaaacaatgctatgcaatgggaatccttcccgcgtgtgaagattgttcacaaaccaagatgggtccttggccagatttacatccctgagatcaattgggttgtcatgatcctcacccttgctgtcaccatttgtttccgagacactcgacacatagcttttgcttttggtaaggacttaaccttccatcaaactcataagttccatcttttatcattaaacaaatcctttgttctccagggctcgcctgcatgactctagcctttgtgactacttggttgatgcctctcatcatcaactttgtctggaaccgtaatatcgtcttctccgtcctcttcatcctcttcttcgggaccatagaacttatcttcgttgcatcagccttagtcaaaatccctaaaggaggctggatcactctgctcctttccctcttcttcaccttcatcacatacgtatggcattacggcagcagaaagaagtacctatgcgaccagcacaacaaggtccctatgaaatcaatactaagccttggcccgagcctcgggatcatcaaagtccccgggatgggtcttatctacacagagctcgccagcggtgttcctgccacatttaagcactttctaacaaacttaccggcgttctaccaagttgtcgtctttgtctgctgcaaaactgtccctatcccgtatgtgccgcagaaagaacggtaccttatcggccggattggaccaaaaacatacaggatgtaccgatgcattatccgagctggctacaaagacgtgaacaaagacggagacgactttgaagacgagctggtgatgagcatcgccgagtttatccagctagaatccgaaggctatggtggctcaaacactgaccgttcgattgacggtcggctcgctgttgtgaaagcctcaaacaagtttgggacaaggctgtctcggtctatatccgaagccaacatcgcaggcagctcgagatcacagacaacagtaacaaacagcaagtctccggctctacttaaactgagagcagagtatgagcaagagcttccgaggctgagcatgagaaggatgtttcagttccgaccaatggacaccaagttcaggcaaccgcaggtgaaggaagagctgtttgatctggtgaatgctaaggacgctgaagtggcttacattgtcggacacggtcacgtgaaggcaaagcggaactcagtgtttgtaaaacagctggtggtaaacgtagcgtactcgttcttgaggaagaattgccggagcccaggcgtgatgttgaatattcctcacatttgtttgatcaaagtgggcatgaactattacttgtaagtgagagttttttctttttattactgatcctttgtgagagttttgtggttcgagtttcataaaattggatataatgtgtttttttgtttgtaatattttacttctttta

SEQ ID NO: 140889 - DNA, 2416 bp, Arabidopsis thaliana landsberg; identical to SEQ ID NO: 30152

SEQ ID NO: 140890 - DNA, 2871 bp, Arabidopsis thaliana landsberg
gggttttgagagagaaggaaaaaaaggagtaaagaaatcgaaagttgtttgctttttccgcgtaggcgtcagtgaggggtgaggtgaccagaaatctcctctatctcttaagaaaaacacttacgggtctttttcatcctttttttttagtgtctttcttcttcttaaaaatacaatcataattcaaaactatttgtaatctattttgtattattgagaaataatagtacatattgaactaagtgggtggtttaagaattaagatcgatttctagaagaagactagaagccattgatataatgaacatatgaatagtgaagcaacaactaaaataagaccaaaaactgaaatgtgaatagaaaaatctcgtcggtgaaaaagaatgaggtaggtgggatccatttacctagcttacgactgtccttgtgtgtgtaccttcgcagatatctatttttcatgttttcaaacccatttttatactctttttatattaatcaataaaattattttgtcgattatgaattactcattgatcttttttttttgtcctttgcttataattttgttgaatggtaacattgtcccataatcaaaatcaagcttgaaactaaaccaaattgtgtcgtttgacccaaataatatatggttttattatatattttcagtttctactttcgttaacggatgttataagtttctttaaagtattatgatgatatgtttattttggtatggtcaacaaatttctcatgtcttcaaatattagttaatatttaatttatgttttaaatggtcacatacaaagttgatatataaaatgtctacaatttgaaagctgattaataaaatcgttagaggtgataatggacgttagaggttccattaacgactgataaagacatgtctattttggcctggtcaacgaataattatgttttaaaagttagtcaacgtttagttcatgttttaaacggccgcatacgaagttgatgtataaaatggccattttttaaaagttgagggattaattgacattttttcctttatagttacaggacatacgttgagtgcagaaatcgtataactttctaacggtacagcaaatagtaaaccgtacaaaaataataaaaaagggtaagatgtagaagtataaaactaatagtacaaattaaaagattttggttccacttgtatgtataagtgattacatcaaaatggtattactaagtcatcatttagatttgatgaagtttgtattcgtgtcataaaccgggcgtaggtggagttattgtcagtttggtagcgttttacgaccacacataaaaacatgtttataaattgttaaaaaacaataagacatgtcataaatctaaatgccacaagtagaattatcgaaataaagcttttacataaatacacacacccaaactaaaaaagaaaaaataaagaaagagagagagagaagaagaatcgtggagatggcttcgaccccgaagcttaccagtacaatttcatcatcttctccatctcttcaattcctctgcaaaaaactcccaatcgcaattcatctaccatcatcttcttcctctagctttctctcgcttcctaaaaccctaacctctctctattctctccgtccccgtatcgccctactctcaaaccaccgctattaccactctcgccggttttctgtttgtgccagtaccgataatggagctgaatcagaccgccactacgattttgatctcttcactatcggtgccggaagcggcggcgtccgcgcctctcgcttcgccactagcttcggtgcatccgccgccgtttgcgagcttcctttttccactatctcttccgataccgctggaggcgttggaggaacgtaagatttcttccttcttgtggcttatatcgatagctagtgaatttgactttagtagtagctataccagaatttgaagcatttgcttgatgatttatggtttgattgtgttgtctactcatttttggttattttgcaggtgtgtattgagaggatgtgtaccaaagaagttacttgtgtatgcatccaaatacagtcatgagtttgaagacagtcatggatttggttggaagtatgagactgagccttctcatgattggactactttgattgctaacaagaatgctgagttacagcggctgactgggatttataagaatatactgcgcaaagctaatgtcaagttgattgaaggtcttggataggtatgccgaggctcggtgtttatatagttcatgagttaacctctatgtattgatttgagcttgagtatgtattttatatgtgtaggttatagacccacacactgttgatgtagatgggaaaatctatactacgaggaatattctgattgcagttggtggacgtcctttcattcctgacattccaggaaaagagtttgctattgattctgatgccgcgcttgatttgccttccaagcctaagaaaattgcaatagttggtggtggctacatagccctggagtttgcggggatcttcaatggtcttaactgtgaagttcatgtatttataaggcaaaagaaggtgctgaggggatttgatgaagatgtaagtaaaaaattgagaatgacttttgctgctttcgtttatccgtctggatattttctaattgtaattgttattcttgtttcaggtcagggatttcgttggagagcagatgtctttaagaggtattgagtttcacactgaagaatcccctgaagccatcatcaaagctggagatggctcgttctctctgaagaccagcaagggaactgctgagggattttcgcatgttatgtttgcaactggtcgcaagcccaacacaaag

SEQ ID NO: 140891 - DNA, 568 bp, Arabidopsis thaliana landsberg
  unsure (1)..(568): unsure at all n locations
tctatgactgttctggggaatgctgctaacgagaggganctattcctgactaatgaatgcatgactacacagctcaaggacattaaaggagtagccagttttgagattcgatcaaggccatgggggcatcagtataggaaaaagaacatcactgcggataagcttgactgggctagagcattagaaagaaaagtaaaagatttgccaacagagtattactgcaaaagcttgtactcacctgagagagggggattctttagtcttccactaagtgatattggtcgcagttctgggttctgcacttcatgtaagataagggaggatgaagagaagaggtctacaattaaactaaatgtttcaaagacaggctttttcatcaatgggattgagtattctgttgaggattttgtctatgtcaaccctgactctattggtgggttgaaggagggtagtaaaacttcttttaagtctgggcgaaacattgggttaagagcgtatgttgtttgccaattgctggaaattgttacaaagaaatctagaaaggctgatttgggttcctttgatgtta

SEQ ID NO: 140892 - DNA, 1575 bp, Arabidopsis thaliana landsberg
aactcatgagaaatctcgtaacaagaacgcaagacagctcacttgggttctacttctcaaagctcatcgtgccgcaggttgtctcacttctctcggttctgcattattcgctctcggcaccgccgtgcgccgccgtatcgccgccggccgtacagacattgaaatctcctcctcgggagtgggttcattacagaagcaaaaccatacgaagaaatcgaaacttttctactcttgcttaaaggtgtttctatggctttctttaatccttttgggttttgagattgctgcttatttcaaaggttggagctttggaacttctaagcttcagcttcagtttatcttcaataaagggttctttgattgggtttacacgagatgggttttgcttcgtgttgagtatcttgctcctcctcttcagtttcttgctaatggctgcattgttctgtttcttgttcagagtcttgatagactcattctttgtcttggttgtttttggatccggtttaagaagattaaaccggttcctaaaccggattctatctctgatcttgaatctggtgataatggtgctttcctccctatggttcttgttcaaatccctatgtgtaatgagaaagaggtaacaaccaaaaacccaaaagctaaaacaaattttgagttggttacaaatttttactaagttttggtttttgtacaggtttatcagcaatctattgcagctgtgtgtaacttagactggcctaaagggaagattttgattcaaattctcgatgattcggatgatccgataacgcagagtttgattaaagaagaggttcataaatggcagaagctaggtgcacgcattgtgtatcgtcaccgtgttaatagagaaggttacaaagctggtaatcttaagtctgctatgaactgtagttatgttaaagactacgaattcgttgcgattttcgacgcagattttcaacctctacctgatttcctcaagaagaccattcctcattttaaggtaataattggttaatttgatccaagaaaagattgtatactaaatcagttgtgttttcattgataggacaatgaggaaataggattggttcaagctaggtggtcttttgtgaataaggaagagaacttgttgacaagattacagaatattaacttggcttttcactttgaggttgagcaacaagtgaatagtgtcttcttgaatttcttcgggtttaacgggacagccggtgtgtggaggatcaaagctttggaagattccggtggttggctcgagagaactaccgtcgaggatatggacattgcggttcgtgctcaccttcacggatggaaattcgttttcctaaatgacgttgaggtatagtaacaataacatgttgttgttattacgaatacaaactagtttgttagattcttagctaatgtcatactatgtgttgccttttttagtgccaatgtgaattaccggaatcgtatgaagcttatagaaaacagcaacatagatggcattcaggtcctatgcaactatttcgtctttgtttgcccgcggtcattaaatcaaaggtgcgc

SEQ ID NO: 140893 - DNA, 1170 bp, Arabidopsis thaliana landsberg
aaattcttcatcgtctcttttcttatcatgtctctcttctcatacgatccacaagattcgtgatcgaagaggtgtcagaaaatccaccagaagagctactcttaccggctttgctgaggtcaacgatgtggcgctgtttttcggtggattggttagaatgttgatgctcataggatcctgcttgtgggttcgtctgctggtaaggttcttatatgtgattgaagttttgatttttttgctccttttgatgcttaattgtttatctgggtttaggttgaatttgattgcaagttaaagtctggtgcttttgatctggtaattgcttcttacaagttgatctgtaacaattgatttcgaattcagtatatggattcgtatacagattctgggctttgctttatgttcaaatttgtgtttgatcttttggtttttaagataaaaatgtgactcttttgctgcttattcacttgtatgtcatgttatggtccatgttctctaagtggttttagcttagataacttgtatgtctgttttctttactttaagttcaatatgacttgtatcacttcggctttaatgatattgttgcttattcttgtgttaacggactaaacgagtgttcagcttaatgtgttcagttttaataaaacttgtcttaatgtgatatgttgtcttaatctttagtttaagtattctatgttttcttatttgtgaatgtttagtcttcagtgttagtgtgttgtgtttcaatatgacttgtgttcgtaagaagttccatatgacttgtcttcagttttagttccaatgtgacttgtgttcagtttaagttccatatgacttgtcttcagttttagttcgaataaagcttgtgtttagtttaagtagcaaacaagcttgtgttcagtttaagttccatatggttgtcttaatgttaatgttcttgtatgtctcttcttaatgttggtttcttgttttgttacagacttaaataatgcttccaccttctctaaatcactccagtgccgacattacttgtataaaagagaccacatgttttaagtcaccacaagtttgtactttggtttgaatgcttgtacaccacaaaataatattccgaaaacactagttcttattgtgtattctatgacatcacttgtatgctaaacaata

SEQ ID NO: 140894 - DNA, 1487 bp, Arabidopsis thaliana landsberg
aggggctttagggtttataagacccaaacaaaaaacattcatcagtctcaattcaaaatcctccatcaatggagaaatacgagaagctcgaaaaggtcggtgaaggaacctatggtaaagtctacaaagcaatggagaaaaccaccggaaaactcgtcgctctgaagaaaactaggctcgaaatggacgaagaaggtataccaccaacggctctccgtgagatctctcttctccaaatgctttctcaatcaatctacatcgttcgtctcctctgcgtcgaacatgttattcaatcgaaagattcgactgtttctcactctcccaaatccaatctctatctcgtttttgagtatctcgacactgatctcaagaaatttatagattctcatagaaagggctcgaatcctagaccgcttgaggcttctcttgtgcagaggttaatgtttcagcttttttaaaggagtggctcattgtcatagccatggtgtgcttcatcgtgatcttaaaccgcagaatcttctattggataaggataaagggattcttaagattgctgatttgggtcttagtcgtgcttttactgtgcctcttaaggcttatacacatgagattgttactctttggtatagagctcctgaagttttgcttggttctactcattactctactgctgttgatatttggtctgttggatgcatctttggttagtaatcaagctaagtatatctcttttaatgtggctttgttgattgacctactatttgccgtattgatgtttcccatttttttgtagccgagatgattcgaaggcaagctcttttccctggtgattctgagtttcagcaactacttcatattttcaggtatttgcttcttgtttttgatgccaatgtgtatgtatacaggaaccagtttaggactttagcccattaggttcagtactcgtgaactcatttggattatggggactgtctagtatcaatatatctgaagtatggttttgttttgggttcatggaggttgctaggaacaccaactgagcagcaatggccgggtgtaatggcattgcgtgactggcatgtctatccaaagtgggagccgcaagacttaactcttgctgttccttctctatctcctcaaggagttgatcttctcacggtaaataactccctgatgaccatagctttgttgcaaagttgctctaatattgttacctcttgcttctgcttccctctttttttcctaagctgaattgcttggttaaatctttctgattgagcttatgtttgtacaattgcagaaaatgctcaagtacaatccagccgaaagaatttcagcaaaaacagcacttgatcacccatattttgacagccttgacaagtctcagttctgaagttcattgctgtatctgttgtcatcgtcttggtgaatttaaacatttgatctatctttgtttccgacacattagtgtcttatgtttggtttag

SEQ ID NO: 140895 - DNA, 1201 bp, Arabidopsis thaliana landsberg
acgccgtgtcgtttctcatctcgccggtcaacttttgagagagagaagaagaaaaatgcatttgagtgagaatgaaggtgtcgaaggtaacaccttcgtggtcactggaggtcttggcttcgtcggtgcagctctctgcttagagctcgttcgtcgtggtgctcgccaagttcgctcttttgacctccgtcactcttctccttggtccgatgatctcaaaaacagtggcgttcgctgcattcaaggttccaatttcatcgatccattaaaccctttttcaatttgatctgtaacttctgaatctcaagtttttagtgttagatcagttccggatttatatattgtgatgatgatgtcacaggtgatgtgactaagaaacaagatgtggataaggctttagatggagcagactgtgttttgcatcttgcttcttatggtatgtctgggaaggagatgcttcggtttggtcgttgtgatgaggttaacatcaacgggacttgtaatgtcttggaagctgcgtttaaacatgagattacaagaattgtgtatgttagcacttacaatgttgtgtttggtggtaaagagattctcaatggtaatgaaggtttgccttatttccctcttgatgatcatgttgatgcatatagtcgaactaaatcgattgcagaacagttggttctcaagagtaatggtcgaccttttaagtaagtctggttcttgattcttcaatacagcaaatgttcaggtttttatgcttatcagtggctgtgcttatgtaggaatggaggcaaactgatgtatacatgtgcgattcgtccagcggctatatatggacctggcgaagataggcatcttcctaggattgttactctaacaaagttgggtttggctctcttcaagatcggtgaaccgagtgtcaaatcagactggatttatgtcgaaaaccttgtcctagcaatcatcttggcaagtatgggactcttggatgacattcctggcagagaaggacaacctgttgctgctggtcaaccatattttgtctctgacggtaaatgcatctcttaaaccttaaaactagcttcctaaagcaagctgaagtattttgcattggcgatgttgtatgttacccagtgaatacctttgagtttctgcgtcctttactaaaaagattagactatgacctgcccaagtgtacaatctc

SEQ ID NO: 140896 - DNA, 3073 bp, Arabidopsis thaliana landsberg
taaccattctctgtctttgatgtctttgtatagtgataattcttgtgaatttggtgtaacagaggatggtgtaatatcatctgacgaggaactgagtggaggtgatcatgaggtagcagaggatgggagacaaagatgtgaagaccgggacctcaaagataggttgctacgcaaatttggaagccgtattagtactttaaagcttgagttctcaaagaagaagaagaaaggaaagttaccaagagaagcaagacaagctcttcttgattggtggaatctccattataagtggccttaccctactgtaagcaaaagcaacacttgcatgttttccgacataactaaccactacacttatatataaatgggtggtatgaatgtgtgtgtacacaggaaggagataagatagcattagctgatgcaacggggttagaccagaaacaaatcaacaattggtttataaaccaaaggaaacgtcattggaagccatcagagaatatgcctttcgctatgatggatgattctagtggatcattctttaccgaggaatgaatttatttatggtacttatttaacgttgattaaaagatggatgtatgattaaaggaaaaaaagaaagaaagagtgaagcatggacgacacatgaaatggatattacactcactcacatgtagtagaaggaacaagtcaaaatgctttgtaactattattatcggtgaataaaaataacctcttttgtcttctccggacctctcgtgatatagcttttaccctcttattggcaaaacgttgaacaaacaaaatacttagataggttagatttgtttattaactatgtgtttttcaaaaataattataaaatatcttgttatttgtgtaaatcacactaaattaaacacattcttttattgacagtttaatcatcatgtacattttgctaattgtagccaaaagtttagctatctagcaattggaaccttgtgcccataatccaaccatctctgtttaaattttggggtgggtttcaaattatccttattgggcctaaaatcggcccaatattaaactgaaaccagacttttatccaatccgagtaatcggaacaaaacaacatgatcgtgtgaaccaacggccaaaaaatggcggctctactcggtatcgtctctcctgtgactttcaccggaaagcacccggtaaattcccgatcgcgacggagaacggtagtaaaatgctcgaacgaacgccggattctcttcaaccgcattgctccagtttacgataatgtttgacatcaatctcttctctctctcttatctcctttcctctaacttgtcccgactacaaaaatcatcgtcttcttatatgcttttgtagttgaatgatctcttaagcttaggccagcatcgaatttggaaaaacatggctgtctcatggagtgggtaagagtattacatctcagtctatgttctgtgttttgattatctctattttctgattttggtttgttttgatttgacaattagagcaaaaaaaggagattacgttcttgatttatgttgtggaagtggtgatttagcgtttctcttatctgagaaagttggttcaactggcaaggtttgtgttcttagaaatgtgtagcttggcttgatcgtaaaattgttgttctgataacttggtaatattattataggtgatgggcttggatttctcatctgaacaactagctgttgcagcaactagacagagtcttaaagcaaggtcttgttacaagtgtatagagtgagctcactggtaaaatcatgcttgttgttttttttgttctaacatttcttgggaaagagttaaaactgagattttatgaatgtgttgtttaggtggattgaaggtgatgctattgatttgccatttgatgattgtgaattcgatgcggttacgatgggttatggtcttcgaaacgttgttgatagacttagagctatgaaggagatgtatcgggttttgaaaccaggtcggtgttttgttttggtatatttgagttttatccaaggcttttttctcgtgctatgcttagttatctcttgttggtttttaggttcaagagtatctatacttgatttcaataagagcaaccaatccgttactacgtttatgcaggtacttgtttttgtatgactgatcgactgtgatgtgtggtttcgtttgatttgctaattatatctcgaggaaataatttggttggtggtttggttttgttagggctggatgattgacaatgtagttgtccctgtggctactgtttatgatcttgcaaaggagtatgaatatctcaagtattcaatcaatggctatctaacaggttcgttctctgttgatgacatatatgccttttcattatatggcagagctgatatttgtgtgtttttaatccaaagcttatagctgtattaaagagcttatactaagtctctatgttttcattagctgattggaatgtcaaatgtcctttggcaggagaagagctagagactcttgctctagaagctggcttctcaagtgcctgccattatgagataagcggtggtttcatggggaatttggtcgctatgaggtaaaggaatagcgcgtttgactacacttctacaccagatatattgacacaatctttatctggatttttataagaaaagagaaacgctttgcgttaggatgatgcagataatgtagaggaattcatttttatctgtataacttacttgtttgatcaaactgtcaatgtaatctgtttctgatcccaacgatgatcatgaatctttctcctagtttaagcattttgccgctgtttatacctacctagagtaatctaccattaacttttagggatacaacaactaagcactaaatcactccagctacaacgtatcgatggctgttcaccaggctctcaatcacttccacaatccgcatatcccgtcaccggtttaggcgacctaatgctcaatgcctccatgttcgtctcggattgtggaatgtttcagtgcttggtgaagtccatcaattacttgtgtatatatag

SEQ ID NO: 140897 - DNA, 2473 bp, Arabidopsis thaliana landsberg
accgcgatcctgtttagatctatagctttcgatcggaagggaagctaaaatccatctagacgccgagatcttggttagctatcactgagattcttatagggtttatatttgagctgttatggcgactaggaatcgtacgctgttgtttaggaagtacagaaactctctcaggagcgttcgtgctccaatggggtcgtcttcgtcgtcgacattgacggagcacaattcgttgaccggagctaaatccggattaggcccggtgatcgagatggcgagcacgtctctattgaatccaaatcggtcttatgctccagtcagtaccgaggatcctgggaattcgaggtacttctcatcctctctatctctcactgccattgaaatgttagaaatttggtgattgcattagaaattaatcacttcatgtagctgctagtgtgagttggattatgaatttttgaagtaagttgttgatttagcagaaaatttggtattatcctgagcaataatgtctcttatggatttggaattggtagctagatgttcagccttgttgtttcagctactgattgagtattaagagaatagtacttgaatatatttctgtggcccaatttgttgaagttgaaagttttgcttcttgttttccaatgtcctagtagaggtacaataacagtgggacttaccaccagattgggttgatgtatctgaggagatttcagtttacattcaacgtgcaagaaccaaaatggctgaattgggaaaggctcatgcgaaagcgttgatgccttcgtttggggatggtaaagaagatcaacatcaaatcgagactttgacacaagaggttaccttcctattgaagaaatctgagaagcaacttcagaggctttctgcagctggaccttctgaagattcaaatgtcaggaaaaacgtccaggttggtgtacttgacttgatgtgtctcttaaacgcatgtcctttcatttcccatcaacatctcaactttaaaatctcatgtgttttataacagcgatctcttgctacggatctccaaaacctttctatggagttacgcaagaaacagtctacatatttgaaacgtttgagactacaaaaagaggtatgcaatgacgcactatacatttcctatgtccaagacttcactatttgtaatactgagttgctctcgagtttttggatctgttatgcagctgtactctaataaaattttggtttcatgagtttcatacattctattgttagttatttctatgattttgaggacaattacattttgtttattcccaagaagttttgacttctagctgtgatgatcatcaggatggagcggatttagagatgaatctgaacggaagcagatataaagcagaagatgatgactttgatgatatggtatgactcctttgtcccaatcttatacccatgattcatcttatgtatttctgtaataatgcaatatatgacactacaggtatttagtgagcatcaaatgagcaagataaaaaagagtgaggaaatatcaatagagagggagaaagagattcaacaggttaatgtttgcagatcttaccgctcttaattgttacctatttcatacacaatcataatcttgtcactttcttcttgttctgcttcatctgcaggttgttgaatccgtaagcgagcttgctcagatcatgaaggatctgtcagcgcttgtgatagaccaggtacaacactgtaactgttgtctagcttctgagccactgattctagaaattctataacttgaaagcaaaacttgtcgtgacagggtacaatagttgatcggattgactataatatccagaacgttgctagtacagtcgacgatggtctcaaacagctgcaaaaggtaaatttctctttacaatcagtgtgtatactctctcacaccatttcatgcctaaatttttaagcggaattgcttgtgaatctccacaggcggaacgtacacagagacaaggaggtatggtgatgtgtgcgtctgctcttgtcattctctgcttcatcatgctggtactcttaatcctcaaggagattctgttgtgacacaaggagatccctcattttttaattcttttgaaacgcgaacaccacaatttttgcgttgcggagtgttctgtccacaaaatgtcctgaagagaaaaacgaactgtgttgtctatctcgctcagtggcttttactgcagcctcttctgctttcttttttatttcttatggcgtttacataggaaaacattatcacttttgtattgagtgtttgtaagttggcttcttacgagtttataatggatttatttactgtaaagaatatattaaccatgattttaagaatctgtggagaagagatcatatagaactgtaacgtttgttccagattacaagctattaaatagcccattatccactaggccactataatactacgtactga

SEQ ID NO: 140898 - DNA, 5108 bp, Arabidopsis thaliana landsberg
gtcttacccaagacggatgcagggcagaagcatcagctgttctcttacgagtgtcaaatctgcttggccgcttgtgcaaattacatcaaacaaaagtaaaggaaaatatcatttgggctcgtcagcttggtgggaaggtgaacatcatttacttttcaccactgtagctctattgggaagttaactgattagcatgtgaatcagttcctaatttattggtattttatttggaggcagggttcaaaggctcagaagtggaaacttattatccgaaatcttcctttccaggttcttaaaactcgatttttttttttgttatctctacaatttcattaataaatgcgttgcttctcaaggatttttctgaattttgcaggctaaacctagtgatattaaagtggtcttttcagcagtagggtttgtctgggatgtttttattcctaaaaattttgaaactgggtatgttctaactcgtctgagtgatttcttgattatgaataaatcattgtatattatcctcattttggtgtaatattttggcaggctacctaagggttttgcatttgtcaaattcacgtgtaagaaagatgcagcaaatgtaagatctagtaacatgggtatcttgatttggttatcctccattcggatcacttgtcttaattaattttgcattttcaggcaattaaaaagttcaatgggcacatgtttggtaaaaggcctatagctgtagactgggcggtacctaaaaatatttacaatggtgctgctgatgccactactgcttcagcagatggtatgttaccgcattgtttttccttttatcactggagtttttaaaaacttgttaattataaacaatttttttactcaacttgtaaatgagggaaacagatacagtcagtggccgaagttttgttttatctcctcctaacagatcgtcatactttttgacgcgatccttggcaggtgacaaagaaggaagtgatggggacagtgaaaacagtagtgttgatttggaggaggttgatgaagctgtagaaagccaccctcctccaggagatgatactgatgatgatgaggacggcagtaacaaactgactgaatcagatgcactggacaaagatgttgggaccgatatgaactttgaagatgaagcagatgttgccagaaaggttcttaagaacttgcttgcttcttcaaaaggttctactgctacacctgagggagagacagaggaatcggataaaagtaaactgaaaagttcatcaactaagccagttgctgactcttctggtgtatctgaacctttgaaatccggtaaaactaaagtggtggctcctaaagaaacgcaggataatgatgattttgagagaactttatttataagaaacctcccatttgatgttactaaggaagaagtcaaacagaggtttacagtatttggggaagttgaatctttatccctggttctccacaaggtcacaaagtatgtatccttatatactttgaaattcattcaatcatcaaaaaatttccaagctcccaaagctttacattttttctccctgtgttttctttctcagacggccagaagggactgcttttgtcaagttcaaaacagcagatgcatcagttgcagccatttcagctgccgatactgcctcaggtgtcggtgtccttcttaaaggcaggcaactaaacgttatgagagctgtgggtaagaaagctgcaaaggacatagaactcaaaaagacagaggagaagaatgttgaccatcggaatctttatcttgctaaagtacacacttctccctctccctcacaaatactgggaaattgtattatctgcctgcttttcaaatacgaactaatatatcatcctgttttgacttccacaggaaggtcagatccttgatgatacacctgctgctgagggtgtgtctgcggaagatatggacaagcggcgaaggtaaacttttcttactttctcagatatgcatgttactgtctagtgctttgggatgagagaagagtgagcatgtgattgtcctcgcagattgcatgaaaacaagatgaaaatgcttcagtctcctaacttccatgtatctcggacaaggcttgtgatttataatttgcccaagtccatgaatccaaagcaactaaacaggctcttagttgatgctgttacctcacgagctacaaagcagaagccgtgtattcgacaggtcagctattcgcctttgtgctacaattcaaacatagttctattatctgaacctagtttctttgttttctacgcagatcaagttcttacaaaatgagaagaaaggtaaagttgatactaagaactactcccgtggagttgcctttgttgagttcacggagcatgaacatgctcttgtagccctgagagtacttaacaacaatcctggtaattgatcttgctgaaagctaaatttccttcgaaattcaagtacttctttccaaatgatatgctatttgatgattttatggttatctcaccaatcggatgagacatgtatcactttagcttacgatttaggatgcaatgtccaagaataataattttcatgttatggtaatcgttttggttatctctgcagagacatttggtcctcaacaccgccctgtcatagaatttgctgttgataatgtccagaagctgaagatacgagaagctaagcagcagcagtttcagcaacgcgagaaacacaatgaatctgatcagcagcaggcgaacggcgaagcacaggcacctgacaataaatacaaacgaaaaacgagggaaggggataacactggtccaaggaaagagaatgcagccaggtttaagaagggaccacgtgaagagagtaaagaagaagcaaaatccaatatagcagtaaaagataatgcagcagagaagaagagacctatacgcacacaggaaaaaccgtcttcaaacaagaaaggccaattgatgagacagaaagagacaactgagaaaccagatccgaaaatttccaaagatttgagcgaaccaaggaagaggaagttcggggaggatagaggtgaagagaatagaaatgggcagaggaagaggaagaagcaaggtcaaggtcaaggtggtgcagaagttgtggacaaacttgatctgttgattgagaaatacaggtctaagttctcgcagagctcagccaaaaccggcccacaaaaacagagttccggtcaagtcaggaggtggttcgaatcttgagacttgaatcaaacaaatgtaagttttgatatttttaagtttccttgtatctgttttttgattctgtctgaaaaatctccgaagtagtgaatgctgcgaacacaaccttgttttgtatttgtatcgtcaaaactagaccgaacttgaaccttaacaaaacagaatttattgttttgaaccgaaccggttttatcgacatagttagataaagcctataacggttatttacctaactaccgaagactccgtaggcgtgtgccaactaaacatcacaactacaggtcatacatttccacgtgtcaaattatcattggttccaaaccgtccgattttttcgatttcgtcttcgaatatttttttatttaatccctcagctctgttttcttctctccataattttttaaaaagtcatggattatcatcttagggttttgttctctgtttctcttatctttgtgttcgtctctgtttcggtttgtggagacgaagatgtgttgatcaggcaagtggttgatgaaacagagccgaaagttttgtcatcggaggatcactttactctcttcaagaagaaattcggcaaggtttacggttccattgaggagcattattacagattctctgttttcaaagcaaatctcctgcgagcgatgcgtcaccagaagatggatccttctgctcgtcacggcgtaacgcagttttcggatctgactcgttctgagtttcggagaaagcatttaggggttaaaggtgggtttaagcttcctaaagacgctaatcaagccccgattctccctactcagaatcttccggagaagtttgattggagagatcgcggcgcggttactcccgtgaaaaaccaggtaattcaatcatcaatgtgatgataatgatgtcatttggagaatatgaataataatggacttgaatgatcgctgtttattagggatcttgtggttcttgctggagttttagcactacaggtgcccttgaaggtgctcacttcctcgctactggcaaactcgttagtctcagtgaacaacagctcgtcgattgtgatcacgaggtatgaatatatatgcgtctcctcttgcttgatggaagctctgtttgattgttcatacttacttgttatccaagaaattcgtagtttctgtggttacgatttgagttatgcaacaatgtgccattatctttagaagattacaagtcataatctcagctgttacttgcagtgtgatccagaagaggaaggttcatgtgattctggttgtaacggtgggcttatgaacagtgcctttgaatacacgcttaaaaccggagggcttatgcgagagaaagattatccttacaccggtactgatggagggagctgcaagttagacaggtctaagatcgttgcctctgtctccaactttagtgttgtgtccatcaacgaagatcaaatagctgcaaaccttatcaaaaacggtcctctagctgtggcgatcaatgcagcttatatgcaaacctacattggaggagtctcgtgtccttacatatgctcgaggcggctcaaccacggtgtgttgttggtaggttatggctcggctgggttttctcaagcaaggttaaaggaaaaaccgtattggatcatcaagaactcgtggggtgagtcttggggtgagaatggtttctataagatatgtaaaggtcgtaacatttgcggtgttgacagtttggtctccaccgtcgctgctaccacttcttgagcttttcattattctgctgcaatgctatttaaagtctgtaaataaatgattaacaaaaacatatttcttggtgaattcgaaacaacaatgccataggcttacaga

SEQ ID NO: 140899 - DNA, 1508 bp, Arabidopsis thaliana landsberg
atattaatggcggccgcatcagcacgagctttcttcatgctctctcgtgtaactgacctatcaaagaagaagctaatccttcaccaaccaccaccgtcgtcatctcctcttcggttaccgtccgctccgaatcgtgcggtgtcttcctccgctgtaatcagctgtctcagcggtggtggagtttcctctgacgattcgtatgtatctactcgtcggtctaagttagatcgaggtttcgctgtgatcgcgaatttggtgaatcggatccagccgcttgatacgtctgttatctctaaaggcttatctgattcagctaaggattcgatgaaacagacgatttcttctatgcttggtcttcttccttcagatcaattttccgtttccgttactatctccgaacagcctctttatcgtctccttatttcttccatcattaccgggtaagttaaaatcatccatctcttttgttggaacactgtgaatttagggatttttgtgggatttaggtatacattgtggaatgcggagtatcgtgtatcactgaggaggaattttgatataccgattgatcctagaaaggaggaggaggatcaatcttcgaaagacaatgttagatttggttcagagaagggaatgagtgaggatttagggaattgtgttgaggaatttgagagactgagtcctcaggtgtttggagacttgtcacctgaagcgttgagttatattcagcttttgcagtctgagctatcttccatgaaagaggtaattgtcaaacactcaaattagtgcatggtttatgtctgagtttgtgatacttttaagctcctaatacttgttttgttcttaatgtgtatattgcaggagctagattcacaaaagaagaaagctttgaggatagaatgtgagaaaggaaacaggaatgatttgttggattatttgcgttctttagatcccgagatggtacttaacgttgaggtttcctttgatttttattctcagtctcaagatttttagtctgatgacaagaaatcatattggcaggtgactgagttatctcaactgtcttcaccggaagtggaagagattgtgaaccagcttgtccaaaacgtattagagaggctcttcgaagaccagactacttcaaatttcatgcaaaatcctggcataaggactacagatggtggtgatggaactggtagaaaggtggacacatccagggattaccttgcaaagctccttttctggtaagactttttaactcctcttatggcgcatatagttagaacagagcttggtaatctcatcgacggtctttttcattttaggtgcatgctattgggacatcatttaagaggtttggagaatagattacatctcagctgtgttgttgggttgctgtaatatcagagaatcagaaaaaggagacaagataaaaaagaaacacaaatgtatattcttctcccccattttgatttctttaatctaagcgttaagttattatctatcaa

SEQ ID NO: 140900 - DNA, 990 bp, Arabidopsis thaliana landsberg
agttagaattaaatagagaaggtgagattaaggtttcaggcgttgaagcgggagagattattgttgttagagctgttgaatcaggtacggtaacggaagcatcatctccgtcggaggtagtaccttcggtgaagagacggagacctagagagaggaaggttccttcaacttctatggcaagagcttatgggtatctgaatcaatcacttgttgcttagttaggtttgataggatctttagcaattttaacaagttgaaattttgtgaaatgtgaaggttttttaatttaggagctgctcttgcttggggagctgttaaagaatctacgtataggatggtaaatgggacaccaatgacaccagacaatcagcctgcgttatcgtctttgatgtctaaggaaaatgctgaaagattggctcttggattgtgtgaaatgcgtggagctgctcttaaagttggccaaatgttgagtatacaggacgagagtctcgttcctgctccggtatataccaatcttgctcaactagtgttctctgtttggttggttttgacatgaagataggttcttttgtagatcttgaatgctctggaatatgtgcgtcaaggtgctgatgtgatgccaaggagtcaacttaatccagttttggatgctgagttaggttccaattggcaatccaagttgactagttttgattatgaaccgctagcggcagcgagtattggtcaggtactaactactaagttagtattttgattgaagaatgcatgtgatatgtcgtccttttgagtgtgttgaatccttttccttaattcttcgtaatgatgctttaggtgcacagagctgttactaaagatggattagaagttgcaatgaagattcagtaccctggcgttgccaacagcattgaaagtgatattgaaaatgtcagacgcttgttaaattatacaaatctaattccaaagggactgtttctagacagagctataaag

SEQ ID NO: 140901 - DNA, 2365 bp, Arabidopsis thaliana landsberg
caaaattcgaaaaaaaagcttcccagagagaagagaaaaaacttctctgaggcggccatgacattgcagagaggtttacctcttctcttgcaacagtacacggcgttgttcaagaaaaaccttttgctttcatggcggagcaaacgagccacgtttcttcagctcttcgcttctttcttcttcatccttctcatcttctgtatccaagcagccatggagaagagtttcgcttcctccacggctctcaaaactgttacggatccgacggcgctgatatcgccgccgattccgccttgtgaagataaattcttcgtgaatcttccttgctatgactttgtttggagcggtaatcgtagctccaaggtcacgcagattgttaatgcgattatgaagaataatcctggaagaagtattcctattgagaaggtattgtcttcttttatttgatttagtcaaattgtgtaattaagcattcttcaggagaaagaactagagtagattttgattgtgatgtgatgcaattttagtgatgttatagatatagaaaaccaaattgttaggtttaggttttgagaattaaccacaaaaggttacgtgttggatactaaaagtggaagtcaaattgtatttaggtacgatcattcgtggatcctgaagcggtagatacgtggcttatggcgaatcctttgttagttccaggagctttgcactttattgaaagaaatgctacagtgataagttatggtattcaaactaactcaactccagagatgaatagaggaaggtttgaagatcctacttttaagtttcagatacctcttcaaattgcggctgagcgtgaaatcgcgaggtcgttgataggaggtatgcattttatcttgttgaatcttttgagtgtgtggtcatgagtgttgagttcttgacgttgagaagttgttgttacgtttttgcagatccgaactttaattgggttgttgggtttaaggagtttcctcacccaactattgaagctattgttgcgttggacactataggaccgacttttttccttgcggttgctatgtttggttttgtacttcagattagttctttgattactgagaaagagcttaaacttcgccaggtataacgttgtttctatataggctgctgtgaacaaagtctttatagtagattgattgtgttgtgcaacaggcaatgacgatgatgggtgtttttgacactgcttattggttgtcatggcttacttgggaaggaattcttactgccatctcggcgctcctgacggttctgtttggaatgatgttccagttcgactttttcttgaagaacagtttccctgttgtcttcctacttttcatgcttttccagtttaatttggtaaaactctcttgctaagactaatgtttacacctcttttggcacatcagttaaattattaacttcattgtttgtggtgctagattggactagcattcatgctatcagcttttatcagtaaatcaacttcagcaacaactgtcggtttctttgtgtttctggttggctttgtaacacaggtgcggtttctctcatgcaaaaaacaaatagctggaactgtttcttcgaattaacaattgtgttgctaatcatataatctaactgcagcttgcaacatcaagtgggtttccctatgccaagaagtattctcgtatgatcagggcactttggtcactgttcccacccaataccttttctcagggtttaaagttgctcgctgatgcaacttcaactcctcaagatcctggtattagttggagtaaaagagcagaatgcggtcctaacgacgacactggttgtgtgcttacaattgtaagtcaactctcaataaaatttccatctaataactctgtctaatagttctctgatcattactttttggttttggcagaatgatatctacttgtggcttcttgggactttctttttgtggtttgttttggctctttactttgacaatataactccaaatgcttctggagtaagaaaatctatcttctactttctaaaacctgggtactggaccggcaaaggtggcaaccgagtagaaggtactttctcctcagtcttgtttctgtattcattagtaattttggtgtcgtaaaagtgatcctaagtaaacgtttctattatgaacagaaggtggaatttgccgttgtattggttcagttccacctgtggatcacattaccccagatgacgaagatgtccttgaagaggaaactttagttaaacaacattcaatggagggcttagttgatcccaacgttgcagttaaatacgtggtcttgcaaagacttatgctcggacgactaagtttggatgc

SEQ ID NO: 140902 - DNA, 6382 bp, Arabidopsis thaliana landsberg
atgcgggtcagggtcgataaatcaacgccaaatgatatcaacactttcagaaaggtcagtaccataatccctctttatatacttgagttgttgcattattggttgacgatcatactttactaacttactttcctcatgtaaataactgacatttctttctgtcttttgagttccggtgtgattgggttaagtctaaaccattgtgtatgtcaaaataggtgatgagaagcataaaggacaacatcacagaggaagtgctactgcaggagataagggagatcatccgtttgcctatgtatgcggatcgtattcaaatggatagcaaagctgcgcgccgcagatgaaacgtctgtttgtttctctcaatatacccaagaagctgagtcaagaaaaagacatgtctgggttggcagtaatgcttttgcttctcttctttgcaaatcccggggtgcttctatactaacattgtacgtaagaaggaaaaaaaaagaacgctgcatttctcgaatgtgtaagaatcccggtttcaaggaggttttagggtgggtttattatgaatcaaaattccgtttgggggtatgtgatgatggttttagcttgataagatgtgtttactcttctaagtgattcatatgtttagatgaaggtgtttgtaatattactagcaatagtacttaggaatgttgtaatcttttagtattagtatcatattattattgttggttccattatacttcagaagcaaaagaatgttagacacttttatcattgagaaagtatcaccactccgattctcatatcatatgtcaatcattttgatttgaaatcttttcatcgcattttacatagaaaaatcaagaacggaaaaggttaaaaatcttccttcgatcattcgaagtgatagggaataattgacgtttctcatatttgtaactaaacagcgagctgtgtcgtgcgttttacttagatcaaaacggcaagcagtttactcttcacagcgtcattcgatttcgccggctgcgatctcccacacacacagagtctcagcttcgtctcattctccttctcgatctctcctttttactcaccattccaaattccctaaaccccgattttggggaggttttacaaaatctatcgacgtagttggatacagttcttcgattctgattcgattttaattttatgtcaagggaatttgtctagtattcgcagagtgtgatcatatgaaatctcgagcgaggcagtgtctgctggtttgtttgctctgtctttccttaacgaatctctcctatggagaaaataagttcagagagcgtaaagccaccgatgacgagctgggctaccccgatatgtaagttttcgatctgtattgagatgcaacgcctcaatttgatcgaatttttgtttcataactcataccattgattgctggagatatgtttctttcctcgtaaggctttctgtttggtttctccgatttaagtttctttctgggttgtttcgtttgtgcagtgatgaagatgctttattgaatactcagtgcccgaaaaaattggagctgcgatggcaaactgaagtcacttctagcgtttatgctacacccttgattgctgatattaacaggtttggtttattatctttcccaccaatgtttttatgttgattctgtgttaaaatcttttactcacaatcagatgttttctctctcgaatttgggttaaggcatcatgattaatgagtgctggttccatactttgtgcttaaagccggattttgtttttgttacagtgatggaaagcttgacattgttgttccatcttttgttcattacctcgaagttcttgaaggagctgatggagacaagatgccaggtacaagatatcttatcttctttacctttagctttctgaaattttattttgtgctttgttcatttgatgctgtagaatattaaggattttgaaaaggttactgatgctctcataaatttctaggttggcctgcttttcaccagtcaaatgtgcactcgagtcctcttctatttgatatcgacaaagatggtgttagagaaattgttctggctacctacaatgccgaagtgctctttttcaggtaattctttctctcagatgatggatattcttttgtctgttatcatcgatccttagagttttgtgggttttgcatatgatactttcttgtttccagggtatcaggctttttgatgtcagataagctagaagtgccacgtaaaaaagtgcacaagaactggcatgtgggacttaatcctgatcctgttgaccgttcgcatcttgatgttcatcatcatgtgcttgagaaggtagatatggcaatcaagtcatagaccactcgtaaccttctttttcatattggattttctacgtcagtttattctttgcttcttaagtcattcccatctcccatggtttcttggtaatttgcgttcttcctagttctagaggacactgaacaggtaggtaattgaaagtataaagataagtttatgcttcgagtagctgcctcagcttatctgaagaatgtttttgtattttgtgtcttgcttttttcttatggattttacgtctgatgggaagctccagtatttagagggtagaaaaagtacatgaattagcagagtcaatttagttcgtgatgaaagtttactttgtgactctcacttctccactctgtagaaacgaatgcaactaccacaacaccaaatgttacagtctcgatgaccaaagaagttcatggcgctaattcatatgtgtcaactcaagaggatcaaaagagaccagagaataatcaaacagaagctattgtaaagcctactccagagctacataattcctccatggatgctggagcaaataatttggcagcaaatgctactacagctggctcaagagaaaacctcaatagaaatgtaaccaccaatgaggtggatcaaagcaaaattagtggagataagaatgaaactgttattaaattaaatactagtacgggtaattcctcagaaactctggggacatctggaaacagtagtacggcagagacagtaaccaaaagtgggaggcgacttctggaagaggatggttcgaaagaatctgtggacagccattcggacagtaaagccaacagtgagggtgtccgcatggcgacagtagaaaatgatggaggcttagaagctgacgcagattcatcgtttgagttgttgcgtgagaatgatgagttagctgatgaatacagttatgattatgacgattatgttgatgagaaaatgtggggtgatgaggaatgggttgaggggcagcacgagaactcagaagattatgtgaatattgacgcccatatactatgcactcctgtgagtttcatctatgtcaaaaaccttgtttaggattattccggattacttacttccatgggagatcttactgtatctctttttatcaggtaattgctgacatagacaaagatggagtacaggagatgattgttgctgtttcctatttcttcgaccccgagtaagtttagctttcatgctgtaaatgttctctgaatctgttaatgcaaaagcatcattagtatgtattgcatgcatgaggtcttgaatattatcattggcgttttcaatgtatttgcattgcataatatagggcagctaacacaatacgcaattttcaggtactatgataatccagaacatctgaaagagcttggtggtatcgacattaaaaattatattgctagttcaattgtggttttcaatcttgatactaaacaagtcaagtggatcaaagagctagatttgagtacggataaagcaaacttccgtgcttatatttattcttcaccaacggttgttgatttggatggcgatggttatttggatatccttgtcggaacttcctttggcttattctacgccatggatcatcgtggtaagtcttcttgttacttcctgctgtttattttcttgcattgatgacaattctgcatttcctgttactgtttttaccaagcaatgcttctagcaggagctgtttcttttggatcggttttatgtgattatgcaactatagctttcatagtcaaggtcacacacttcaaaaaaaaatctatgttaagtttgaatattccgtttccctgcaagaccaaaatttcactcttattttattcttgttcatggacaatacatacacaagttttactacacatttttgcctgcaaatctcgatgttggtttggattctaagattgttgtctttttgcaggaaacatcagagaaaaattcccactggaaatggctgaaattcaaggagcagtggttgcggccgacataaatgatgatggaaagattgaacttgtaactactgattcacacggaaatatagcagcatggaccacccaaggagtggaaatttgggaagcacatcttaagagccttgttccccaggtcaacaattacctctgtttattcttatcagaaatagaaaactcttatgaatgaaccagttgtacgagcatcatcagaattctatcaaataattgtagtgtatacaagctttcatgagatcttaagtccctgcgtaagaccaaaattatttaccatgtaacattgtaacctgtctctgaattgatcacttcacgattattgattgctgccaatcttctcttacagggtccttctataggcgatgttgatggtgacggacacacggaggttgtggttcctacatcatcaggaaacatatacgttcttagtggcaaggatggttctattgtccgtccttacccatacaggactcatggaagagtgatgaaccaacttcttcttgttgatctgaacaagcgaggtgagaaaaagaagggtctcaccatcgttactacatcctttgacggttacctgtatctcatagatggacccacctcgtgcactgacgttgttgacattggcgaaacttcgtaagtcacttttgcttcctctcggcacgtaatatctttagtattttgaccaccaatgtctttcgagttacagatacagcatggtcttggctgataatgttgacggtggagatgatctcgatcttattgtctcaactatgaatggaaacgtcttttgcttctcaacgccttctcctcaccatccccttaaggcaagatcaaccccgaactctatttgcgagcgggttctgctcaacatctctttgattgttttttaaaatgggggaaattactgatttcacacttggttcccgaattcatcaggcttggagatctagtgatcaaggcaggaacaataaggccaatcgttatgatcgtgaaggcgtttttgtcacgcattcgaccagaggtttccgtgatgaggaaggcaaaaacttctgggctgagatcgagatcgttgataaatatagatatccatctggttcacaagcaccctacaacgttactgtaagttcctgaaacctcaatagatgagcaatggcttcttgctgaactaaaccagctgttttcaaatacagacgacgctgttggttccaggcaattaccagggagagaggaggataacgcagagccagatctatgaccgccctggaaaataccggataaaactaccaactgtgggagtgagaacaacaggaactgtaatggtggagatggcagataagaatggactccatttctcagacgaattctcactaactttccatatgtattactacaagcttctgaaatggcttcttgttctcccgatgctcgggatgttcggtctgctcgtgatactacggcctcaagaagccgtgcctctcccgtctttttcccgcaacacagatttatgatactaggtaccatctgtaaacaggaggtacacatcctcatagagctcatcaaaaggatccagggacaatttcgtgctagagttttcgatttctgtacctttttaaaatgtaattcgactttagtattagatcaactcttttctgagtttataaagtttttgcacaacttaatttcttgagaatttatgttttgttcatacgaaatttgaatttgaagaaatgatcattcgcaaacaacgattccatgaagtaattacaaactggagtctaaaatccaatcgcagaacgcaataagaagaatcaagaacaattctatagagatatctgctgctgcttcaagagagctgcaacaatggcctcttaccaagtctcttcatctctctctccatgcttcctgtgagcatcagactaaacatcttgagatcgcagagaaacgaccaaagcggatgcccaaagctcgccggaacattcccttccacgaagaagtggctataccacgcgaatccgtaccctag

SEQ ID NO: 140903 - DNA, 997 bp, Arabidopsis thaliana landsberg
ttttccgacacaaacagagcaatgacgtccgttaacgttaagctcctttaccgttacgtcttaaccaactttttcaacctctgtttgttcccgttaacggcgttcctcgccggaaaagcctctcggcttaccataaacgatctccacaacttcctttcctatctccaacacaaccttataacagtaactttactctttgctttcactgttttcggttgggttctctacatcgtaacccgacccaatccggtttatctcgttgactactcgtgttaccttccaccaccgcatctcaaagttagtgtctctaaagtcatggatattttctaccaaataagaaaagctgatacttcttcacggaacgtggcatgtgatgatccgtcctcgctcgatttcctgaggaagattcaagagcgttcaggtctaggtgatgagacgtacagtcctgagggactcattcacgtaccaccgcggaagacttttgcagcgtcacgtgaagagacagagaaggttatcatcggtgcgctcgaaaatctattcgagaacaccaaagttaaccctagagagattggtatacttgtggtgaactcaagcatgtttaatccaactccttcgctatccgctatggtcgttaatactttcaagctccgaagcaacatcaaaagctttaatctaggaggaatgggttgtagtgctggtgttattgccattgatttggctaaagacttgttgcatgttcataaaaacacttatgctcttgtggtgagcactgagaacatcacacaaggcatttatgctggagaaaatagatcaatgatggttagcaattgcttgtttcgtgttggtggggccgcgattttgctctctaacaagtcgggagaccggagacggtccaagtacaagctagttcacacggtccgaacgcatactggagctgatgacaagtcttttcgatgtgtgcaacaagaagacgatgagagcggcaaaatcggagttt

SEQ ID NO: 140904 - DNA, 512 bp, Arabidopsis thaliana landsberg
caaagtttgagagaaagaaagagagagaatggtgggttcttgaagcttctcacattattttcttcatcgttcaagaaatcaatatttggtgatgtttccttttatagaaatatatgtctttttctcaaagtcttgttttgttctttgccatattattacaggaagtggaagaagaggtctcaagatgggaaggctacgccgattggagaaacagagcagccgtgaaaggccgtcacggtggcatgctcgccgcctctttcgtcttaggtcagtttcaaaattccaaatttacccctcgattctcttaatgcatctttttctttatcatccacacatttatattaagaacgattctctaatggatcattgtgattgattcatatatatttgtctcttatgaagtggtggagatattagagaatctagcgtatttggcgaatgcgagtaataatgtgctatacctaagagaatacatgcacatgtctccatcaaaatcggcaaatgacgtcacc

SEQ ID NO: 140905 - DNA, 501 bp, Arabidopsis thaliana landsberg
caacccgtcttgttcgccaagtcgctttgatctaaaaagctcttaaactattcttccagcgaccggaagaaacgaataatcggaatcgaaaaattcgaaaaaggaactgagaagaaacagatctgaagatggagtgtgtatttggtctagttgggaatggattcgctatcgtggcggcggatacatcagcagttcacagtattcttcttcacaagaacaaagaggacaagatcatgactcttgactctcacaagctcgtcgccgctagtggtgagcctggtgaccggtaaaaaaacttctccgtctctctctctgtctgtgattcagtagtagtagtacatgaatttgatttctgtttttttttggatttactttagggttcagtttacggagtatgttcagaagaatgtgtcactgtatcagtttcgtaatgggattcctttgagtactgctgctgctgctaacttcactcgtggagaacttgccactgctttgagaaag

SEQ ID NO: 140906 - DNA, 448 bp, Arabidopsis thaliana landsberg
caagactagttcttgttttctccatattcctcaacaacatcaaaatgttgactcccaccatttctaaatccatctctttagtaaccattctattagttctacaagctttctctaacacaacaaaggctcaaaattgcggttgttcgtcagagctatgttgtagtcagtttggcttttgcggtaacacttcagactattgtggtgtaggttgccaacaaggaccttgttttgctcctccccctgcaaatggtgtctctgtggctgagattgtaacgcaagaattcttcaatggaatcatcagtcaagccgcgtctagttgcgccggcaatagattttacagtcggggagcttttcttgaggccttagactcatattctcgtttcggtagagttggatcgaccgacgactctaggcgtgagattgcagcgttctttgctcatgtcacaca

SEQ ID NO: 140907 - DNA, 1398 bp, Arabidopsis thaliana landsberg
atggctctgaatggtaagtaaaaccgcacttaaaaccgcaccgcaacagtactgtaacagtattaaaatttctacatattcatatgtatctatatattttcgttactatttgaaccgcaccgcacttctcccgcaccgcaaaacgcaatcaccattcggagcctatatcttggagatatagctgggcaaacatatgatatcgatatccagaccctaaagaattttaaaatatcaaaaaattatttgtaccctcaaacaaatttaaattgaattttattgacactttaacacgtgtaacagttaaattggacgactctttctaaaacgaaataaaaaagagtttaacaagagattcgtttcagtttaagaagaaaaaaaacacgagattagtcttccaacatggacaaggacatgacaatttgcacgtaatcatatagttacgttaatcaatacaattacgtaaattaatttattatggcacgtcacagcatcatcgtagatcaagggtaaaacagtcattctccatcatccaggcatattccggtcggtgaattgaggaggttgagcgataaattttccaattcgattctatattattggaaactactttcgggtcggcaaaacaattctccttcgattttccgattctcacaaactcaatctcgatccagattccgagcttatccttctctggcgaatttcgattttctgtgtttccgacctgattacagagaaccacatcgaagcttcgagaaaaaaaaacacgatgtttaacgggttaatggatcctgagatgattcggctcgctcaagatcagatgagtcgtatgactcctgctgatttcgctaggatccaacaacaggtttcgttatttttcctgattcgaattattcgatcgattctgaggagaatttgtttgatttgatttgattatggctttgtatgatgaatttataccattgtttattatacagatgatgtcaaatccagatttgatgaatatggcaacagagagtatgaagaacatgaggcctgaagatttgaaacaagctgcggaacagcttaagcatactcggcctgaagatatggctgagattagcgagaagatggctaaagcttcccctgaagatattgcagctatgcgtgctcatgctgatgctcaatttacttatcagatcaatgcagctcagatgcttaaaaaacaggtaacaattgacttcctgagagaagttttctattgaattttgctttcctgattataaagtaaggaacaagaatggcttcagcaagtggacctttgtgtaatttgatgttaatctcattttctactacgtttggcagggaaacgagcttcatagccgaggaaatttcagcgatgccgcagagaaatacttgcgt

SEQ ID NO: 140908 - DNA, 868 bp, Arabidopsis thaliana landsberg
gttaatggctgcttatcgtactatgataaagttcctgatgggttttatatgatgaatggtctggatccctatatttggaccttatgcatcgacctgcatgaaagtggtcgcatcccttcaattgaatcattaagagctgttgattctggtgttgattcttcgcttgaagcgatcatagttgataggcgtagtgatccagccttcaaggaacttcacaatagagtccacgacatatcttgtagctgcattaccacaaaagaggttgttgatcagctggcaaagcttatctgcaatcgtatggggttagtactcatacaatccttacgatccctttgaacttatatttttatatcttcctgtgatttctcacatttcttggtactcgttaattctcacttcttcaggggtccagttatcatgggggaagatgagttggttcccatgtggaaggagtgcattgatggtctaaaagaaatctttaaagtggtggttcccataggtagcctttctgttggactctgcagacatcgagctttactcttcaaagtgagatcccaactttgatggtattccgatgacatttaagacatcttgtgaaatgatcatataaattattgtgcatcatccatttgtttttattggaatacatatgaagaacgttgaatgagaaaagtggtgttattgattagaaaaaaataggttactgatagttgaatgttccaaagaaaaaaagtattttatatcttctatttggtgcatgcaggtactggctgacataattgatttaccctgtcgaattgccaaaggatgtaaatattgtaatagagacgatgccgcttcgtgccttgtcaggtttgggcttgatagg

SEQ ID NO: 140909 - DNA, 3002 bp, Arabidopsis thaliana landsberg
tgttactttgcttcgtacggatttgaaggctttacctcaccggagcttccaagtagaagacgacactgagtcactgacacagggatacaaattatggcgccttttggcgggaaatctttagcggacgttgtttctggcatcggagggaatggtgttggcggggctctggctgcggtggccgccgctctgttggtccgcctcttcgctggacctggcatcgctctcttacctgaagacgaagctgaagatgattacgctgagacggaagacggtggtggtgattcaattcgtccggtgacaatccgttggaggaacatcacctgctcgctctccgataagtcctccaaatcggtgagcacatttcttctccttttgcatgtttcgattgcgcgtatattagtctttccaatttcacgttaatagccgaatcagaattggttgattatgtgattctcaggtgaggtttttgttgaaaaatgtatccggagaagcaaaacctgggaggttgctagcgattatgggtccttctggttctgggaaaacaacattgctcaatgttttagcaggacagcttagtttatctccacgtttgcatttgtcaggtctcttggaggttaatggcaaaccgagctctagcaaagcttataagtatgtcctatgagttatacaaagtctatatttgtgtgaaaatctgatcattgtttgagagagtttcttgcaatggcaggcttgcgtttgtgagacaggaggatctcttcttttcgcagttaactgtcagggaaacactttcttttgcagccgagcttcagcttccggagatctcttctgctgaggagagggatgagtatgtcaacaacctcttgctcaaacttggtctggtgaggtttcattgatctctgcattttggatgatattgtggtagattgaaatcctggaattatgtttcttgatcgtcttttgtggctctccaaaaggtcagctgtgcagattcatgtgttggcgatgctaaagttcgtgggatcagcggtggagagaagaagcggctgtcacttgcgtgtgaattgatcgctagtccctctgtcatatttgctgatgaacctaccactggtaaatgcctagtctgtctgattctgaacattgatggattgttttaaaaaagaattagaggatgataaaatattcttgtggtcttcagggcttgatgccttccaggctgagaaagtgatggagacattgcaaaagcttgcacaggatggacatactgtgatctgctccatacaccagcctagaggttcggtgtacgctaaatttgacgacattgtgttacttacagaaggaactctagtctatgccggccctgcaggaaaagaacctctgacatatttcgggaacttcgggttgggtttatgaacatttccccttatatgtcacatgtctccattaagcaagtgctttaggattatccactgacaactgttcttctgatcgttgagcaggttcctttgccctgagcatgtgaaccctgctgagtttcttgctgatcttatatctgttgactatagctcttcggaaacggtctactcttcgcagaagagagtacatgctcttgttgatgcattctcccagcgttcatcatcggttctttatgccactcccctcagcatgaaagaagaaacaaagaacggcatgagacctcgcagaaaagccattgttgagagaacagatggttggtggaggcagtttttcttgctgcttaaacgtgcatggatgcaggtattctcctatgcatgatgtgaagaattctttctataacatgttgggcttgaacaccttttctgacgtcctggaatatctgataatggttttaaatagttgcatgatttttactaatgattgcttaagaaagatatgaaaatctttgaattgtctctttctgtcatgtgacaattttttagcattttgtgtttctaaatgtttcacccgactccgtaggcatcatagaagggtccttgaattgtacacacgatcttattcaaggttaacttgaacagtttttctgattgatttcttcacttgacttcataggcttctcgggatgggccaacaaacaaagtccgtgcaagaatgtctgttgcatctgctgtgatatttgggtctgttttctggagaatggggaagtctcagacgtcaattcaggacagaatgggtttgcttcaggtcttacacattttgcttttgctatatacatctctctttttctgtcttgttgaatatcttttatatatatactaatcaatgatacctgtatacttcaggttgctgcaataaacacggcaatggcagctcttacaaagacagttggtgtctttcctaaagagcgtgccatagtggatagagaacgatccaaagggtcttattctttaggcccttacctgctctccaaaacaatagctgaaattcctattggagctgcatttcctttgatgtttggtgctgtactataccccatggctcgccttaatcccactttgtcaaggtaattcgtaagctttctatcattttgttattcctgtggccatgaggtaaatgtcaatggtactgataagccattcttgagcattcttcgtatatttgaccaacccattaaccccagtgagaaatgcacatgtcaactatgtccttaacaaagaaattgttttgccagatttggaaaattttgtgggatagtgactgtggagtcatttgctgcgtctgcaatgggtctaactgttggagctatggtcccaagcacagaagctgcaatggccgtgggaccatctctcatgacagttttcatcgtgtttggaggttactatgtcaatgcagacaacaccccaatcatcttccgttggattcctcgtgcttcattgatcagatggtgaaccaccttatcccaaattactatacagcgatgatgaccttatttatatatgaactcacttaagtcttagcatccactcgtc

SEQ ID NO: 140910 - DNA, 589 bp, Arabidopsis thaliana landsberg
gatctcgatctcatttgcagaggccatcaggtaaatagacttccatagtgatcaaaactagaaccaaatggtccaactctgtagaaatgtttgacatttgttgtatcttgtgaatatgggcataaaggaaaagacttttatgagaaccttccaagatattgacttgtgagggacgtgtttgcaggtagtggaagatgggtatgagtttttcgcaaaacggaggttagtcacaatattctcagctccaaactatggaggagagtttgacaatgccggtgcattattgagcgtggatcaatctctcgtttgctcctttgagattctgaaaccggctccagcttctagcactaatcctctcaagaaggtttgtttccaccaagaactttcaaaagaccaagtagtccttcttttgataataatattggttagctcggatataccaaaatctgaatccaacaagaccaagccttttggacttgatgagtcatgacaagttttgttcttttggaaacttcacgtcataatgtaacacatgtttctctctatattttctctttttgatcaggtaccgaaaatggggaagtcttga

SEQ ID NO: 140911 - DNA, 545 bp, Arabidopsis thaliana landsberg
agagaatctctccggcgagatcaccggcgttattccgataatttcgcctgagagttgtcgcatgttataaatgggtcttcctttattgtcttgtagttccacaagagtcactctctcttcttcttcttcttcatcttggtgtagtagcggaagcggtggatttaggagtagttctaagcttttcgattctccggcgtgttcgagatcggatttgaagaaacgtagcgggaagagaaattcacggttaaacggactttcgttagagaaattaaggtcgattaaagcatcgtcgtcttccgctggacagagcagtagcgaagtgatcgacgacggagatgcggcggcgcgtggtttagctgttacttcaggagatgtaacgtcggttggaagtttcagtagcggcgaatttgttggtgctggtagtggcggtttagctggaccttcaggtgaggttacttccgtcggcgagtttgtcggcggaagcggcggggattttaaggattgggataagatcggtgctattgttaggttgagttatggaatcg

SEQ ID NO: 140912 - DNA, 617 bp, Arabidopsis thaliana landsberg
gctgcctctgaaggattttatgtcttggcgatccaattggtagaagcaagtgctaatgttcttgcaaaagacaggtaacttcttttttaaccaaataaagagcggtttgttttcgcggttgctaacagttttttttgtaattagatggggaaacacacctcttgatgaagctttgggttgtgggaacaagatgttgataaagttactcgaagacgctaagaattctcaaatctcttcgtttccgagtggctccaaagagcctaaaggtagttttatcggcatataagtcaaagtaccgatgtttttttagatagaaactttaacaagcggtttgtttattcgaataatctgcagataaagtctataagaagaaatgtacagtgtatttttcacatcctggtgattcgaaagagaaaagaaggcgcgggattgtactgtgggtacctcgaagcatcgaggagcttataagaacagcaaaggagcagctgaatgttccggaggcttcttgtgtattatctgaagatgaagccaaaattattgatgtagatttgataagtgatggacaaaaactgtatttggctgttgaaacataatgattcgagcaaatttcaaaaaat

SEQ ID NO: 140913 - DNA, 238 bp, Arabidopsis thaliana landsberg
atagggacatggatgaccgggagtgcacacataataacggccgtgatagggtcgggagtgttgtctttggcgtgggcaatcgcacaacttggatgggtggcaggacccgccgtactaatggctttttctttcataacatattttacatcaaccatgcttgccgattgttaccgttcccctgaccctgttaccggcaaacgcaactacacctacatggaagttgtccgatcctatctag

SEQ ID NO: 140914 - DNA, 1986 bp, Arabidopsis thaliana landsberg
atggaaagtggcttttattcagattggaaagatacttcttcttcttcgttctttggatcagagaatatggaggaagagttggaagatggagttcttagagctgaagagcttttctcatcgattcctcaacctcagacacctaaagagccaatggagtttctgtctagatcctggagtctctctacttctgaaatctccaaagcacttgctctcaaacatagacaacaacaagatcagttttgtgttggccagaacagtcctcctgttttgttccctgatgctgctgcagatccactcgtggtacgatccttttatcccttttccaaattccaatgaaaccctttttccaactatttcttagaattatgatgagccttaaaagtcagagacttttcaattgtatatgattgccattgcaccagttcctaacatagttcttgggaattggaatggataataatagtggactcttttcatattttacaactttgggattttgattctaggctgggaagatcatgaactctgttggcacacgtagagcagggacattgtctaaatggtttcaccacaacaaggaacacagcaccagcagtactactaccaatctcaagaagaaagataaagtgcgtgtggagaacgcccacgtgcattctgccgtctctatagcggctctggctgcaggtttagcctctgtgacatctgctagcaattgcaaagggtcaggctccaagatggcactggctttagcctcagccactgaactgttggcctcacactgtgttgagatggctgagcgagccggtgctgaccatgcacgtgttacttccacggttagatcttctgtggatatccacagccccggtgatctcatgactctaacagccgctgctgcaactggtaaggctttgttgcagcttcacaaggctttttcagtttcgttgatatgcatttgatctgactttgtttaaactgacactagctttgagaggagaagcggctctgaaggcgaggcagccaaaggaagcaaggaaaaatgcagctattaccccttttgagagaagtttctctgattctcattggcatgcaaattttcagtatagattggaagaaccaaatcttccatttgaaggcgaactgatgcaatgtgcacgaaatggtaattgtcttctgtcaccgagtctgatcactttaagagttcactggatctgagataagacagagagcttaactcttcttccttgtgctttaacttgcaggagtgcagcgaactaagcgtgtctgtgtctatatcaacaagaagtctcaggtatagcagatttgattagtatctatatataacacataacacaactcagttcacttttgattcaatgcttattatgctacttatgattttgcaggtaatgatcaaactcaaaagcaaacatgttggaggggcattctctaagaaaatcaaatgtaagcatttactaatctttcagtttggataaattacctgaaagacgacactctgaacttgttcttcctttctgaaggcgttgtctatggagtctgcgatgagaaatcagcttggccttacaggaaagagagggaaaattcagaagaagtctacttcggtctgaaaaccggacaaggtcttttggagttcaagtgcaagagcaagattcacaagcagagatgggttgatggggttcagtctcttctccgccaagtaaattgctttgaggctgccaaatgctcgctgggatctctgagtctcactggtcacacgtgatgcaggatcctgtatatatttgattatattcatatatataatatccaaatttttgctgttgtgaggtatttgcaaaacctggcaatgtaacctcagaagacttttggataaaacaaagcaggttgttcaaatgatcacaacaagtgttaggaacattgctatgtacagaaagacatcagaagaatgatgaatctcaattgaacttttta

SEQ ID NO: 140915 - DNA, 421 bp, Arabidopsis thaliana landsberg
aggtggaggtgctggtgggggcggtggtcttggaggaggacatggtggcggttttgggggtggtgccggtggtggattaggtggcggtgctggcggtgctggcggaggtaccggaggaggatttggtgggggtgctggcggtggtgctggtgggggtgccgggggaggattcggcggtggtgctggtggaggtgccgggggaggattcggcggtggtgcaggaggaggtgctggtggaggagctggcggaggatttggtggtggtgcaggcggaggtcacggtggaggtgttggtggtggatttggtggaggttctggaggaggatttggtggaggtgctggtggaggagccggcggaggtgctggtggaggatttggtggtggtggtggtgcaggtggtggatttggcggtggattttaa

SEQ ID NO: 140916 - DNA, 760 bp, Arabidopsis thaliana landsberg
gtggctctggtttctccatccaaacaaaaacaacacccaaaccttgtccacaccaaaatgttaaactcaaaatccaaccacacacacacaatttctcttcctctctaccattaacatcgatcagaaagaccgagagagagagggagaagctgattgattatggctgctgcttcgatttctgcaataggatgtaatcaaactttgataggaacttccttctatggaggatggggaagttccatctccggagaagattaccaaaccatgctctccaagacagttgcgccaccgcaacaagccagagtctcaaggaaagcaatcagagcagttccaatgatgaagaatgtcaatgaaggcaaaggcttatttgcacctctagttgttgtcacacgcaacctagtaggcaagaagaggtttaatcagctcagaggaaaagccattgccttacactctcaggtttgcttgtcttataatcattctcttaagaactagtcaaagaagcaaagttttgtggaactgggttcttttgttctttcaggtgatcactgagttttgcaaatcgattggagcagatgcaaaacagagacaagggcttatcaggcttgctaagaagaatggagagaggcttggtttccttgcttaggtcttaaaaagaacaaatctttctctctgcttgtgtctgatatatacactcacaactcctcttgttgttcttgtctagatgtattttgtccaaacctataatcttgatttttgttac

SEQ ID NO: 140917 - DNA, 1397 bp, Arabidopsis thaliana landsberg
tcctccatggaagcagaagaaggtcatcagcgtgaccgcctctgcgactattgcgactcctccgtggctcttgtctactgcaaagctgactccgccaagctctgcctcgcctgcgacaagcaagtccacgtcgccaaccaactcttcgccaaacacttcaggtcacttctctgcgactcctgcaacgaatctccctcttcccttttctgcgagactgaaaggtctgttctttgccagaactgcgactggcaacaccacaccgcctcttcctcccttcatagccgcagaccctttgaaggatttaccggctgtccctccgtgcctgagttgctggccatcgttggcctcgatgacctcactctcgattccggattgctttgggagtcacctgagatcgttagcctcaacgaccttattgtttcgggcgggtccggtactcataacttccgggccacggatgttcctcctctgcctaaggtataacttgctctgtttttttctagccaattgctctgttttattttctttctctgaaatgttttgaaatgctccagaatcgtcacgccacctgcgggaaatacaaagatgagatgatccgacagctccgtggactatccagatctgagcctggttgtctgaaatttgaaaccccagatgctgagatcgatgccgggttccaattcctagcgccggatttgttttctacatgcgagctggtaatagagactgctattggttgtgttttcttgtgcttgtcaaatgattttccagcttataaatctctcttgtcaatatgaaggagagtggactgaaatggttcgatcagcaagatcatgaggactttccatattgctctctgctaaagaacttgtcggagtcagatgagaaacctgagaatgtagaccgagagtcatcggtgatggttcccgtttccggctgcttaaaccgatgtgaggaagagactgtgatggttccggttatcactagtacaaggtcgatgacacatgagatcaacagtcttgagaggaactctgctctctctcgctacaaagaaaagaagaagtctcgaaggtaaacaagctaattttaaaagtgagacaccaccaataggattgggatttgaatcatgtgttgatgaaacaggtacgagaaacacatcaggtatgaatcacgcaaggttcgtgcagaaagcaggacaagaatcaggggacgtttcgccaaggcagcagatccatgaatgatgatgaggttactttgataatcaaaaatcttttgtattaatcgaatcatatagtgtgtatgatcagataagtttttgtattctaagcttaggagttatcactgtatatcgaccacactctcaaaattgtcacttaagaatagttttttttttgttt

SEQ ID NO: 140918 - DNA, 713 bp, Arabidopsis thaliana landsberg
atgcatcgggtgagagaatatctctgatctgttattcagttctgttcctcctatcagaatcgtgcctgtttcttaattgattgatgtggaatgtttgttcccccactggttgcaggtaatatattctgatggagattccgaagagcttaatctcactgaagagcgctgggagttactcgaggatgacacttcggccgatgaggtacaagtttcttctatttgttttggaataaagtgtaatcgccgtgcttaatgattttcccacaatcgatcagcaggataaggagattgatctgccagagtccattcctttatctgacatgtgagtaaatcggttcattactgtgatctgtgtaaagttgcaatcttgatcttctatggtattaaaggtaatagtctattccggttcttatgatgttgcagaatgcagaggcagaaagttaagaaaagcaaaaacgtggcagtgtctgtggaaccgactagttcctcaggtgtaaggtgtgtgagaatttactaaaattcaagttattgtttatatgaaattttgatgatgacttgttctgacaggattggcgtgtatattgatggtgatagatcctcaagtagaacacttatgaagaaggattgtggcaaaaggttgaataaacaagttgaaaaaacaagagaaggaaagaatctaagatcgttaaaagagttgaatgctgaaagtgaca

SEQ ID NO: 140919 - DNA, 1729 bp, Arabidopsis thaliana landsberg
atgaatggaaagctaagctctggaacaacaccccacgaggccgatcctcctcaggcatcaaacttggcattgtctccagaggctgctcctccagacactgctatggacgatgcctctggtataaattttggacctctcccaccatttgtccccgagttcccggtatgtactcttaactgttttagatatgtgaggaacattttttgttgtaattgctcattggttcattatctttctgataataataggtttatatattttacttgggggaaaggaaacacgatgatcctaatttggtgactcaatcacatcttgaaatcctgaaatcggttcttggaaggtaaaagagtagttgcattgaatatttttggttgtataacttgcttctaaggtggttactgcattaattttctggtttgaatcttgtgttacagcgaagaagcagccaataagtcaatggtctacagttatcaccatgggttttctggctttgcagctaagctcaaaccggccgaggcagagaaattgaagagtaatgttctttatctcatatttctcgcttgctcatgagttcttaaagttccaaaacttagaatgtatttttactaagctattttctatatttctgtctactagagcatcctgaagttattattcttctggaaaaccgaaaacttgggttgcaaacgacacggacatgggattacttaggccaattttcaactccaacttcttctaaaagtcttctacatgagaccaacatgggcagtggtgctattattggtgttattgactctggtattatatcaatatctctattaggttgttttgttctcaacttttcttagcagaacgttaacaaatccgacattatatgagcaggtatatggtcagaatcaggctcctttgacgatgatggatatggaccaataccaaaacattggaaaggacaatgtgtatctgcagaccagttcagtcctgcagattgcaacaaaaagcttattggagctaaatactacattgatggtcttaatgcagatctggaaacaagtattaacagtactacagaatatctatctcctagagatcataatggccacgggactcaagtatcatccacggcagctggttccttcgtttctaacatgactttgcctggtctctcctctgggtcaatcatgagaggtggcgctccaaaggcgcacatagctatgtataaagcatgttgggatgtggaaggagggatgtgttcagttgctgatgtctggaaatcttttgatgaagccattcacgacggtgttgatgttttgtcggtttccgtcggcggctcggccctgaaaacacttgatgttgaaatcgacatcgcaattgcagcattacacgcagtgaataaaggtattcctgttgtttctccagctggtaacgaaggatcccgctcttcatcggttattaacgtttctccatggatattaaccgtggctgcgactacccttgaccggtctttctccacattgatcacactcgaaaacaataaaacatatctggtatatacaagatataatacattttaacttttaaatctcgaatgatccaaagcttgtgattcatggtaaagttgccttttcatgacctgtttttcagggtcagagtctgtacacaggaccagaaattagcttcacagatgtgatttgtactggtgatcatagtaatgttgatcaaattacaaagg

SEQ ID NO: 140920 - DNA, 803 bp, Arabidopsis thaliana landsberg
agtcacattctataaatatacgacaagagacgacctttgagactcgagaagctctctccaaaaacaaacgaaaagaagcgacttttgcctgttttggtctctccccttctccggagagatctgctctctctatctatctctcaatctgtaagaagaagattcccacttcagtaaaagccctaactttacttgggaaagttcttcatctatcatccttcaatcgtcatcatccatggctgatcaacaaaccctagattcctctactcctcctcctactcaatccgatgatctatctcactcccactctacttcctctactacttcagcttcttcttcctcagatccatcactcttgaggtctctctccttaagtcgactcaacgccggagctcctgagttcgttcctggtcgaactactcctccgctgcctcaacctccgaggatgattatcccgcctcctccgccgcacggtatgcttcatatgtatcaccaccagcctcctttcaatactccagttcttggtcctgttccaatccagccacacttggttcctgttcaaaatcaccaccctcatcatcgctttcatcagcatcatcatcacaatcgtcatcagaatcagcaatatgtcccggtgaggaatcacggagagtatcagcagcgtggtggtgtcggtggtgagcaggaaccggatttggtttcaaagaagaatgatcggagagatcatagtaagagagaatctaagaacgatcaagtgactgaaactggagcttctgtttctattgattcaaaaactggttggctga

SEQ ID NO: 140921 - DNA, 3833 bp, Arabidopsis thaliana landsberg
acgccgcagttgcttgcagaagtcaggggcaaaacaagccagaggaatttccacaaacaccatatagagtgagtgataaagtagcagaaggtgtaatctcttgtctcgaagaacttctaaaaaaatgtcacattggatccatagatcaggtgagctggttttgaactctcacaatcgtttttatgattgttttctacctttactcgatttgggtaacatattctcagcttagttatggaaactgtgttgaattttttccccgtacagatggttgtaattatgaagaagttaactagtggtgctgttttatcaccatctgaggcttctgaagagtttcgtgaagggatagtcaaatgtttccgagcaatgatctctggtctgcttccatgctctgatgattcttgctcttgtaagcgcactgttggctggcctcagctgtcagatagaagagattatcaaactcaagtttcagagtcttataagtatgattttgaaactcgtgaatgcttgcttgcatttcttcagtctcagtctgctttggctgctgtcggtcattggctttccattcttctcaaagtaaccctcttttctcctatgctttcttttttctttcatctggagtcatgtagttttatacattctaaggtatttcaattctgatcactccacaaggtcgctgatgctgaggcttctcgaggacatcgaggaagtgcaaatcttcgagttgaagcctttatggctttacggatacttgtggctaaggtaacttttaaattatgcatatatggtttggaccatttctggcacccatgggtcctaatgagaacatgtttcttgttgcagattggtactgctgatgtgttggcgttttttctacctggtgttgttagccaagtttccaaagtgttgcatgtttcgagagcaatgataagcggagctgcaggaagtgttgatgcattggaccaagcaattagagggttagctgagtttcttatgatcgtccttgaggatgaggctaattcatcggctctcgagatttctaatggtgatactaagtcgcagaaacatgaatctgcacactcaattttagacgaacttcgttctctgacaacaaaatctcaaggacagagtgacgagctgacagaaattacaaaccaagagattgttaacatcaatgtacctgaaaaatccaatctgaatctgagtcgtgactcctttcttgttgaacgcacgaagaaatggttagatagcactacatctcacgtaaataagctgctgtgtgagacatttcctcatgtaagctatttattctcgtgctacgttcaacacatttgtcccaaatccctttggatttgttttttctaaatggtaattcttaattggtttcagattcttattcacccagccggcaaaattcgatggggatttctagcagcaatacgtgggctgctctctaagagctcttgctcgttgaagggtgctagattagtgatgttggtaggttcataactaacaacaactcatgatattgggtatatccattccaaggattgccaccagataaattccttataatgatgcaggaatgcgtatgtactctggctgttgatgactctgatgaagtttctgtagcagctcaggaatttctcgatcatttattctcagaaagtacaaaaaaccatgtagagagtgatataaaaaagatctttagcaggtatttgttgtatattgtttttttcctttgaagctaagtatgcagatgtctaaacagagatgtgtttttttattcttcttccgtggcttgttgacaacagactacttgagaggcttccaaaagtggttctggggaatgaggaattgcctgcactttcggtggtgaagcagttacttgtcatcacctattattccggtcctcagtttttggcggatcatcttcagtctcccgtatgtattctttcttgacacgctcataggtttggtgctacttctttcttgattagcaaatctagttcgaaaaaccaaacatgttctaataatgacttgcgatatatgattagttcttcatggcattctgttatgtagataacagctagcagattcctggatatattttctctctgtctaagccataattcagcattcaccggttctcttgagaaactcatcgcagaaaggccttcatcatcgacaggttacctcccttctatcacagaactaaaagtggggttccgggagaccagatacaaccgtgctgttccaaatatcacagaaacagatcaagtaaaattggagatatcgtcccccagtagccatatgttacctcgcatgcctccctggttttcttatgttggtagccagaagctctacgagatgctcgctggaatccttagacttgtaggcttatccttaatggcaggtcatttcatattccttcggaaccatttttctgaaaattactctgcagttaacttataaatgagttagttactgatagtaaatcatctccgttgtgtttgtgtttgataggatttaaaaacgaagggcatttagcagtcatcctggatattcctctggggtttgtccgtaaattggtttcagaagttcgtgtaaaggagtataatggagaagactggcagtcgtggtgtaatcgaactggttcaggacagttagttcgccaggcggcaactgctgcttgtatcttgaatgagatgatctttggtctatctgatcaagcaacggatgctctctcaagactgcttcagaagtcaaggaagggaagagacaaactttcctgggaaatctcttggaacaaacgtgcaaaaacaaatctgattgagtgcgttggtaaaatcctgcatgaataccaagcttctgaagtttgggatctccccgtggaccaaaaggcaattctgggccaaactgataacgatgggcaacatattagtctgcatttcttaagagacagtgcaatgctacaccaagttataatagaaggagtaggtgtgttttccttgtgtctagggaaagactttgcttcaagtggatttcttcactcttcgctttaccttctgcttgagagtcttacctgctcgagtttccaagttagaaatgcttcagacactgtcctacgtcttcttgctgccacctcaggccatcccacagtgagaatgaagaataatgtagtcgaaaatattcaatcacatcatagaatcgtttttaaaatcaacatcttgttgtcttttgtttgtttgtttggcaggttgggcatctggttgttgcaaatgcggattatgttattgactctatttgtcgccagctgcgccacctggatcttaatcctcatgtcccaaatgttctagctgctatgctttcttatatcggggttgcccatgatatattacctttgttggaggaaccggtaaggccatttgtagtgaacctttttctttttcatggaaaattgcctctgttggatcttcatcacactccgattcatcatattcagtgtgttaagaactttctttttccattttgggggatctacagatgcgattggtttcccaggaacttgaaatagttggtagacaacagcatccaaatctaactatacccttcttgaaggtaattcaatctttcatttttttctattgaagtcttttaaaatcattggctttcttttgtctaacaaacatcataacctttgttggtgcttctgctaggctgttggtgagattgtaaatgcatcaaagaacgaggcttgcttattaccataccgagccaagtcatataatgaccatgttaagacccaagcatctgatgcgattcccttatga

SEQ ID NO: 140922 - DNA, 2150 bp, Arabidopsis thaliana landsberg
  unsure (1)..(2150): unsure at all n locations
aaacagaagaacgtaaaccagtcaagtctgtaaatggcgaaaaaagaaggttcaaagatgaacatcgccattatacatccagatcttggaataggtacgatcttcattaattgttcgattttgatttccccctgattagccttcttcctctcgtataattggtctttcttctgcgatctatcttggttccgaggagttattaccaacttcaaagagtaaacgcaattgagagatcaataactagtttaacagactttgatttgatacacggatgaataagnnnnnnnnnnnnnnnnnnnnnnnnnnnaatttacactagtgcgttgtttctggtatatgcaggcggagcagagagattgattgttgatgcggccgttgagcttgcctcgcgcggtcataaagttcatatcttcacctctcaccacgacaaatccagatgcttcgaggaaactctttccggtgagtgacgattttacttgatttcagaaagatgtttgctttgaaagagctatctactgagagttcagattcttgacactcaatttatcatttggttttagaatattcttcaaatttgtaagctttataagatcacggtttgtgatttatgattcatgtcttaacaactatccaggtatctttcaagttacggtgtatggatctttcctgccacggcatattttctaccgactacacgcagtgtgtgcatatttgcggtgcttgtttgttgctctctgtgttcttttgggttggtcttcattcgatgttgtactagcagaccaagtttcagtcgtagtcccattgctgaaactcaaaaggtcatctaaggtattcaaattttgctgttagtcatcatatcttctgctcactatatacaacaacttaattttgaccatatgtggatataggttgttttctactgccatttcccggatctcttgctagctaagcatacaacaacacttagacggatgtatcggaaacccattgatttcattgaagaacaaacaacaggtttggttttcattcatttcctcttacttacatccatctgacatcaaattattcttatttatcacttgtgggattgtagggatggctgatatgatccttgttaacagtaacttcacggcatcaacatttgccaatacatttaaaaggctaaatgcacaagggagtcgcccagctgtactttaccccgcagtcaatattgatcagttcattgaaccccacacttataagtattgtatatccctgaactccaaatttccaggatagaaaagcaagcttccatattgcaaattacttctctgtcggtttctataagttcttctcttcttctttgtctcaagcaggttgaatttcctctccataaaccgctttgagaggaaaaagaacatcgatctagctgtttcagcttttgctatcctatgcaaacataagcaaaatctgagtgatgttacccttaccgttgcaggcaagtgtattattattcatatttcttcaataatcattactagatgaagattttactgtttgtgtgtatcctaacaaaactctgttattcaggtggatatgacgagcgattgaaggagaatgttgagtacttggaggagctcagaagtttagccgagaaagaaggagtttctgatcgagttaactttatcacatcttgttcaaccgctgaaagaaatgaacttctctcaagctgcttgtgcgttctctacacccccacggtaaaagtcaccatccttttttttttttgtctttctccaagttttcaatctcatctcatttcattgtccatatcaattgctaggatgaacattttggtattgttccattagaagcaatggctgcatacaaacccgtgatagcctgcaacagtggtggccccgtggagacggtaaagaatggagtaacaggctatctttgtgaaccaactccagaagatttcagctcggcgagggctagattcatcgagaatcctgagttggcgaattgtatgggagctgaagccaggaaccatgtcgctgaatcattctctgtgaagacgtttggacagaagttgaatcagtatctcgttgatgtcgtatcaagtcctaaagaagattgagattcctctgtttagtaatcatagatcgttcgtg

SEQ ID NO: 140923 - DNA, 1237 bp, Arabidopsis thaliana landsberg
gagatttctagatgctcgtaattgggatgtggaaaaagccaagaaaatgatccaagagactcttaaatggagatcaacttataaacctcaagagatccgttgggtaaatatttgactttattatatacttcattttaatcttcttgttactttgtatttttttcttactttttttttaatcatcttcttctgattctcttcagaatcaagtagcgcatgaaggtgagactggaaaagcttcaagagctagttttcatgatcgacaaggtagagtagtgcttataatgagaccagccatgcaggtaactaagcccattgtcacctttatgaatatttttcttgagttttttttaaaaatgatatctcacttaataaaaatgaaacagaactcaacatcacaagaaggtaatatcaggcatttggtgtatcttcttgaaaatgcaatcataaatcttcccacgggacaaaaacaaatgtcttggctcattgatttcactggttggtctatggctgttaatcctcctatgaaaacaacacgcgaaatcattcacattctacagaactattaccctgagagactcggtatcgcctttctctacaatccaccaagactcttccaagcagtctacagggtacacaaaaaaaacattggtcattattacaaaaccatcaaaattgtctctcttctctttttctttaaaaaggtttactatatacctactatattctttcatgtaggctgctaagtacttcttggacccacgtacagctgaaaaggtgaaatttgtgtacccaaaagacaaagcaagtgatgaactgatgacgacacattttgacgttgagaatctccccaaggaattcggaggtgaagcaacactagagtatgatcatgaagatttctcacgacaaatgtatgaagacgatctcaaaaccgcaaaatactggggactagaggggaagcactatccgaaaacaaacggtttctctccatccgatgttgttcctgagccggcgatagaaatcgcatcagcagctagctgagagttgaacgatatatacacacaagagcaagaagagaagaagaataaaagggttattctcattcatagaagaaaagccaatagaatgtgctggttaacttgatgatcaataaagtttcaaatagtctttgcctctttttcttattagtgagccaaacactttgtaacgttttaaattagcagagactatcctgtat

SEQ ID NO: 140924 - DNA, 704 bp, Arabidopsis thaliana landsberg
aaaaaaaaaaaaacttttgtctttcccttaatttctctaattttccctcgatttctctggcatcaacagtctcattctcattgatctttcttttttgtagcgagaaagatccatttttttcggttcgttctcttctgggttacgaatcaaagagctacacagacacagacacacactgtttcctgtttctccccggattgcaaacagaactagggtttgttttcacaaattttggatcttttttttgaagaaaagaacaaaatttggatgaaaggaaaccagaaagactcgtcggaaaaaccgatatgggatcggagctcatcaagtacatctatacccggaatgtggtctttaacccgacccggtccaaaacttatggtttggcttatctgtttcattgtcttcacttacattatctacatgcttaagcttgtctctacctcacgctcctgtgacgattccacttctttcaccaccgtctctgctctctccacaaacgtctcttcaaatgtctcgtctttatccacctccttagcttcacggcggcgtaattgggaggaggaagaagaagacacggtggtggataagctgacggatcttaaccacgtggtgtttgggatcgctgcgtcgtctaagctatggaaacagaggaaagagtatatcaagatctggtataaaccaaaacgcatgcgttgcgacgtttg

SEQ ID NO: 140925 - DNA, 529 bp, Arabidopsis thaliana landsberg
ccactttctcatccgatctcttcaccttgtataaccatatactcatcagcctctctcgccaaaccccaaaaagcaaaccaaacatgattcaagacaagtctaaaggtgcaaagcaaacgcttctagagcggccatggttcctcgctgtggctctagctggtcttataggtggcgcaatgctcatcacaagcttcatccgagctacggacaacaccttgtcactctgctccacggctaagaacacagctgcgtccatagccgaatacacagccaccccaatccaactccaatccatcgtccactacgccacttcacacaccgtccctcaacaatctttcgaggagatctcgatctctttaaacgtcctcaaggagcgtctcccttgtaactttctagtctttggcctcggccgcgactccctcatgtgggcctccctcaatccaggtggcacaactgtgttcttggaagaggatcctgagtggatagaggccgtcctcaaggacgccccatccctcagggcccaccatgt

SEQ ID NO: 140926 - DNA, 606 bp, Arabidopsis thaliana landsberg
tctctgcttcgaagagttttgtctcaaagaaatggactttatttctctgtatcggttgcttctgcgcaggaattctcttctccgacaggtaacaaaacaatgctctctaatgaactcacttattcttttcttatttcttcagttatacgattttcccgggaatttttttatctcttttaggactgtcggtgggtaaaattatctcattttcgaaacacccagatttgtaaatctaacgacttttcgtgaaaattcatgctgtgaaagttttgggtccaattttttccgggaaagtgtgattaaatttttcttgtttcgcaaattttttaatttcattcactattggaaaggttgtaattcttcacaaaggtaacgaaaagtacatcctgagatttatttatagacaaaagtatattctttatggacaaagtagttcatggaagaaccaaaatcaatcgcaagctgttgatcgtctaatagtagactaatcagactgtgtttgttaatagaatgtggccagagcctgaatccaatgttgtatcaagggacacagtagcatcagatgaacggctgcggttagagtctgaggactgtgattcatcaaaa

SEQ ID NO: 140927 - DNA, 3364 bp, Arabidopsis thaliana landsberg
gtgtgcatacgagcaatccatattctgtgaagtgttccatgccaaggaatctggttggagagagtgtaattcatgtgacaaggtgacgaaaatccatggcttactacacatgtttttgcactcaacgtatttcaattgttttccttaatacgtatttacgtttttttcagcgtcttcactgtggatgcattgcttctagatttatgatggagcttctagagaatggtggtgttacctgtataagttgcgccaagaaatccggactaatttctgtaagacaatttcctctccataagttaacttcttgcaagggatgcttccttggtcttggtttctctgtcactatactcatgtaatctctcttacagatgaatgtgagccatgaatctaacggtaaggacttcccctcatttgcttcagcagagcatgtaggcagtgttcttgagaggacaaatctcaagcacttgcttcactttcaaagaatcgaccccactcattcttctcttcaaatgaaacaagaagaatcgctgcttccttccagcctagatgctcttagacacaaaactgaaaggaaagaattgtctgcacagccaaacttgagcatttcacttggacctacgcttatgacaagcccatttcatgatgctgctgttgatgacagaagtaagactaattcgattttccaactggcccctcggtccaggcagctgcttccaaaacctgcaaattcagctcccattgctgctggcatggagcctagtgggagcctggtgtcacagattcatgtcgctcggcctcctccagaaggtcgcgggaagacccaattgcttccccgttactggcctaggattactgaccaagagctgctgcaattatctggacagtatcctcatctgtatgttataatatcgtgtttctgcttttattctaccattatgcactatttttctgtgctaaggagtccttgactgtttattttcctagctcaaattccaaaattataccactctttgaaaaagttctgagtgcgagcgatgcgggtcgtattggtcgactggttcttccgaaagcatgtgcagaggtaacttgtttctctgtacgcttatttgatattcccaaactattgctatctaaatgccaggtatcagctataaccgtctatgcttctatgtaggcatatttcccccctatatctctacccgagggtctcccgttaaagatacaagacataaaagggaaagaatgggtgttccagttcaggttttggcctaataataacagcaggatgtacgttttggagggtgtgactccttgcatacagtccatgcagttgcaagctggtgacactggtacttttcaaatccttttgtttcgttaactacattcataacatattgataaacccaccctggtatggataaatgaaacattggcactaaagcgttccaatcatgaggacagtgaaatacattccacgaagagatgaccgtacttttctattaggtctgatgtcttggattttccatgttctctgcagtaacattcagccgtacagaacctgaaggaaaactcgtaatgggataccgtaaagcgacgaactctacagcgacacaggtaaatgcgtaataagctgagagttgcccccttaggcataagtaactgccactgtgaagtgtattgaattaaagaatcctttctggtgctctcgtactgattctttcagtgaaatatttttccgtgtttcttcagatgttcaagggaagcagtgaacccaatctgaacatgttttccaacagcttgaatccgggatgtggtgacatcaattggtctaaactagagaagtctgaggacatggcaaaggataacttatttcttcagtcgtccttaacttcagctaggaaacgggttcggaacattgggactaagaccaagcgtctgctcattgatagcgtagatgttctggaactgaaaataacttgggaggaggcacaggagctgttgcggcctccccaatccaccaaacccagcatctttacgctggaaaatcaagattttgaagaatatgacgtgagttactgtttactgtttagttatcaaaaacagctgggaacttttcactgtattttctgaaatcatgtatttgctgctacccaggaaccaccagttttcgggaagaggaccctttttgtctcacgtcaaacagggtgaggcctcatgtactatgtaatgataggatcagaagaattaagcacccttggaatgatcgaaagatttgaagtaatgaacatctgattatttggttctgatatgtgatccatgaattctcagggaacaagagcaatgggtgcagtgtgatgcttgtgggaaatggcgacagctgccggtggatattcttcttccaccaaagtggtcgtgctctgataatctcttggatcctggcaggtaaacgaggttgcatgttcatgtgtttaacctaggctagttaccacagaacattgcgcatttttttccgaaataacttagactacacatatgggataattttagatttttgactcactgagactggccatctgaataatttgagttgctgtttatatcgtcaggtcttcatgttccgcacctgatgaactctctccaagagaacaggatacacttgtccggcagagcaaaggtaaaatccgcagctattattggtctgtataattagaaacttccttctttacataacgaaactttcgtctcaacagagttcaaaaggaggagactggcatcatcaaacgaaaagctaaaccagtcgcaggatgcatctgctctgaatagtttaggaaatgcaggcatcaccacaaccggtgaacagggggaaatcacggttgcagccacgaccaagcatccaagacaccgggcagggtgttcgtgcatcgtctgcagccaaccaccgagcggaaaaggcaaacacaagccgtcatgcacttgcactgtgtgcgaggcagtgaagagacgattcaggacgctcatgctgcggaagcggaacagaggagaggcaggacaggcaagccagcaggcgcagtcacagtcagagtgcagggacgagacagaagtggagagcattccagcggttgaactagccgcaggggaaaacatcgacttgaactcagacccgggggcttcccgagtaagcatgatgaggcttctccaagctgcagcgtttcctctggaagcatatctgaaacaaaaggctatttccaatacagcaggagaacagcaaagcagtgatatggtcagcacagaacacggttcgtcctcagccgcacaagaaactgagaaagacacaacaaatggagctcatgatcctgtgaactaa

SEQ ID NO: 140928 - DNA, 1746 bp, Arabidopsis thaliana landsberg
tatttttctcgctcgcgaattcctctttctcaccttttctcgctcctgggaatctgaagcagttcttctccgacgcctggatcggtaagttgatttccagtttcttcttaacgaatcataagatctcatctctaaaccttcattttccgattcacattccctttaatccaacttcgaaccggtgaatctgaacccatttctcgcttcttctgttttattcatacccgattcgtttcaaaatctgcagtatagtcttaatctgtttgtgcaagtagagaaaaatcaataaagccgaagataacactcgagtggctataattgttttttcccaggatctgtaaatgatttctcgtatttattactaaatattttattcgagatccgaaaatatctattgtttcgtctcttatagcaatgagctcataggaattatttttggtgttgcagtgatttgattcgaactttcacataagatggctatggtagatgaaccgttgtatcccattgctgtgcttatagatgagcttaagaatgatgatattcagcttcgtttgaactcgatccgtcgcttatctactatagctcgtgctcttggagaggagcgtacaaggaaggagttaatcccttttttgagtgagaatagtgacgatgacgatgaggtgcttcttgcaatggctgaggagttaggagtttttattccgtttgttggaggaattgagtttgcgcatgttcttcttcctcctttggaatctctatgtactgttgaagagacttgtgtgagagaaaaagctgtggaatcgctttgtaagattggatctcagatgaaagagaatgatcttgttgaatcttttgttcctcttgtgaaggttagtttaggagatttatgtagcactagattacgccgttttgttagttggttcaatcaaagcttttttttttgttttgttgtttgtcttgtagaggttagcgggtggtgaatggtttgcagcaagagtttctgcatgtggtatatttcatgttgcataccaaggttgcactgatgtgttgaagactgagttacgggctacttatagccagttgtgcaaagatgatatgccaatggtgcgaagagctgctgcatctaacctggggaaatttgctacaactgtcgagtctacctttttgattgctgagatcatgactatgttcgatgatcttactaaagatggtacttaatgtttgaatatatcgtactttatatgtgctcatcacttagaaatagtttgcatagacccaagagtatggtaaagagatcacatttgaattaataaatgctgtttgatgaaatatattggatacttacctcttcagaaatgtttgttttatctgtgcttatattggttaaactttaaccttcatttcagaccaagattctgtgagactattggctgttgaagggtgtgcagctcttggaaagttgttggaacctcaggattgtgttgcacgcattttacctgttattgttaatttctctcaggtgaattgagctttgtttttttcattcatggatttttcagttaattgtctgctgttccatgtttaattttcatcggtaaaagcttgctgttctgatgtttttctatggtgtttgtattgatttctgagagcaggataaatcttggagggtgcgctacatggttgctaatcagctatatgaactttgtgaggcagtgggtcctgattgcacgaggtatgtgttttgtgaca

SEQ ID NO: 140929 - DNA, 844 bp, Arabidopsis thaliana landsberg
gtccttggttgctattggaactcatgaccttgatacattgcagggtcctttcacatacgaggtgattgtctgttattatctttcctcttcttttttcgtgtctacagtcttcctctacctctcgaagaagtagaatactgatccaactttcatacaatctgtttcctttgatttatgttgacacttttgtttagttgagcttttttcgtgtctcattaactctatgtatattatttttcaggctttgccgccaacggatataaattttgtacctttgaagcaagtaagtcaatgtcattatgggttcatcaactagtatctctgttcaaaatagttacatgtgcctgtgtttctttgtttaaattctgaatcattctttctcctcggttatatagataaatgatttttaatgtaatggttatttggttatagcatgttctttttttttaacttctggtacaatttctcacttcttcgtagtgacaatctagtttgtttcatgtttgtacctaataccaatttcttggtcgcagacaaagagcttcagggctgacgaacttattgaattctacaaggtaaacagttaatctgttactttctcgtattgtgttatgacatttgttactcttgtgaaatcgtaacttctttggagcaaataatcaacgaaagatatccccgaacttatggatatgtatagaatgagatgaaataattgtttactcgctgaataactacttaggctttccgaaggcttgtccttgatgtgtgaaagattacttttgtttgcagtctgatatgaagctgaaaaagtttctacacataatcgagaattcacccgtcttcc

SEQ ID NO: 140930 - DNA, 1106 bp, Arabidopsis thaliana landsberg
ctagccgatctcgagaaagacggagacagtaacagagaccactctagaaaacctgtcaacaagatggtccttttcgggtcaaagctcagagtccagatcccatcatcagctgattttggaactaaaaccggcatcagatatcctccttgtcaacttagtccttgtgtccaaacgaaggtcttagccgtgagcgagattgaccagacggaggactacacgcgcgtcatctctcacggtcctaacccaaccatcactcatatcttcgacaactctgttttcgtggaggctactccttgctctgttcctttacgccaaccagccatggagaccaagagcaccgagagttttctaagccgttgcttcacctgcaagaagaatcttgaccagaaacaggacatctacatatacaggttcgtacctccacaatctttaatctatgtatttgacttaaatcagatcatagagtagttccaaaactaaacttaatcacaatggttgtggtgcaggggagagaaaggtttttgcagcagcgagtgcaggtaccaggagatgcttcttgatcaaatggagacctagctagcactccttctccatctcttttcatttttattgattttgtcacagcatcatctacttttgtattattcttttagttctctgatgcttcttctctttctttctttttttgggtgggggtatttgtatttctagtcataacctttctcgcctgcagatatgtgaaagatagagagagagttgataacttttttctttgtgtcatgagagtgagtgactcggagggctcaattatatcataaacttgcagaatactgccatctgaatcagaaaatatcaaaagcatcagtcttttccataacctaacattcgtcgtggctctatgcggtcttgtagaggcaaaaggccatttgctttttgatttaattttgttaactttgacagcgccaagtgaaaacaatatatcaagttttgttaccgtttacctcagattctgaactcagactcatttttcactcgagaaaggtttctgggaagccattgaactcgtgtttttatcctgtgatatgagtctgatttggtgtttacaa

SEQ ID NO: 140931 - DNA, 670 bp, Arabidopsis thaliana landsberg
ttatgtttttctctctattcctttaacgaaccgtgatcgtgcggctcggatcgttggagattctatggacggccgatgcttatatcctgtaagtggaatatgtaatttcccgaagtgccctccagatgttcacaataatacgccatcgtactcgaattaacttcaactctctcttctctctctctttcttttcactcttgtttttgtttctgagagtgctgtgtgtgttctcggtttgtaatatctaagtcgcacaaagatcagacaaagtctgtttgcgtttgatagcattagagtctcgatcgaatttggaagacctgtgagattagggtttctttttgtttgtttttttttattccgaaggagagctgcggagcaattggaattgcctcggttaaagcaatcacgtagctttggatcgtttagggttttctcattgggtttgggggatttgtattcgagcttcctcaaactcaatctgatggtgatgtgagacaaggcttaatcctgttaattggcgattctagggtttttcaatggcgagcacaggcgagcctgaccgtaaaaggcgtcactttagctccatatcaccttctgaagctgcagccgccgtaaagaaacagcctttcttttggccctcctccgaggacaaggtttctttcttcttcat

SEQ ID NO: 140932 - DNA, 3784 bp, Arabidopsis thaliana landsberg
gcgctctccgggtgcaagttgtcagaaaggcaatcgagaatctatctggctgtaagtttgcagctgtattgtttccttctctttgcccttctccagattcatatcttatgtctcttgaccactggctcatgcagacaagactccaaaacatgttaacgttggccaatatgtcgcttcaaatgtaccaagtcttgcggaattctgtgagcaatctgggaaatcccaaaattcagcatcaactttaagggctctttcatctgtgatgttggctatacaaaggtatttaagaagctcacacttcttgaaattttcactgcatcaatacttttttctctctctcgttccttttaaacgggtgcaataaaagattgttgttattccctctttgctggaggttactattttcttcttaagttgtattatatgcaaatatcgaagaagaaaggattttctttttaccaggcatgagttcaaaacaaatcatgaagaatggtggcaaacatgcaaatcgtttctagggccaagattttccaatgatgttgttacagctctgaagagcaaaaacgagagcattaaatccctctacagagtgaaaaatgagatgcgggccaccattcaaagccttttaaaggtaaactcgatttttggaaatttaaaattttcacagccattagtgtcttgaggacattttgccaccaaaacactgaagtctgaagagattgaattattaactttcatttttgcggcttctttttagttctatggtattatgattaaccatagatcggtatcttattactaggaagatggaattctggtaatccccacagttgctgatccccctccaaggcttaacacaaagagaaataaatctttgaatgagtttcttgatcgtacttatgcactctcctgcattgcaagcatgtctggatgttgtcaggtatatttccatctcctctttctcattcaatggttggggaacattcttgttgccttttccttactcttcagtctttagtcatgacacaaatatatacatattcttcaggttacaattcctttaggggaacatggtgatcgtccaatatccgtgtcgcttcttacttactatggaggtgataagttccttctcgatacaactctcgatgtatatgcatcccttcaagaccaagccaaacttgcatccaacttagctccagtgtctgacaccaatggtaacatggaggcttctgaagttatgaaagaaaaggtaaaactatctctttgagtttgacaaatagtatatttggttctgatccatgatatgctactggagttggaatgttctgaaagttaacagtggataaaatgtaattccagggcaatgctgcatacaaggggaaacaatggaataaggcggtaaacttttatacagaagctataaaattgaatggagcaaatgctacttattattgcaatagagctgcagctttcttggaactttgctggtaattgttctcttcatatctttcattctgatctgaatataatttattatgattttctgatctgagagtttgtttatagcttccaacaagccgaacaagattgtaccaaggccatgttgatcgataagaaggtgaaaacttgattagctgccttatttctccatccctcgtagtttgttttgttacattgtgtttttaacatggttttgtgtttaagtacacttgagctggaacaaaactattcactttttatttatttgatttgcggcgtaatacctttgtactatgactatctagtttcattatcactcagatcactcactatagacacaatgacgcattatttggaagctttgattcttataatagttatttgtttctacagaatgtgaaggcatatttgagacgagggactgctagagaatcacttgtacggtacaaggaagctgctgcaggtatgatgattaaactactctgagattgtaattttatcacattggagaaacttgttaaaagataaaattcatctagctatccagatgagttactctctctagtagggtattggagcgtaacattatggttgatcatctctgcagatttcaggcacgcattggtccttgaaccacagaacaagacggcaaaggttgctgagaagagactccgaaaacacatatgagttaaaaaggattattactcgatttctcttgttcaccaatctatcttttcacttatctaaaaccctaaaaaggaaaggttttgctccggtttcaacagactaataatttagtggttttgtgacatgtgtacagattgggatgaaaacttctacctctaattacttgatctgaaaagttttatggggtccttttagcttctttgttttcttaacggtcttttacgtaaattacaatttcccccaagtccaatactgtaattccttaaattacacggagggacccataaatgacacgtttacaatcaatttctcgacaaataactgaattcgttgtttgtttttttcctcttcgtcatcgtcacgcctccgtatcttctcctctgtttcatttttgaattattcgaatcaaaaatgtttgatcatatgaaactgctgcgatgcttcagcttcacggcgtcgcgagattggttattccggcaatcattcgcaaacgccggtctacgttccgtaacgacagatctctcccacggcaattcaatcgcatcaacagctatgcattgttggattcctaaatccccgaatcgatctaaacctaatctcctcctcctccacggattcggcgccaacgcaatgtggcaatacggagaacatctccgagctttcaccggccgattcaacgtctacgttcccgatctcctcttcttcgggttatcatccacatcggaaccaaaccgaaccgaatctttccaggctcggtgtctgatgaggttaatggaagcgcactggagtccagaggatgaacatcgtcgggattagttacggtggattcgttgggtatagtttagcggcgcagtttccggagaacgttgagaagcttgtgctgtgctgcgcaggggtttgtttggaggagaaagatatggaggacggattgtttaaggtgccgaatctagaagaagctaccggaattttgattcctcagacgccggaaaagcttaaggaactcataagattctctttcgttaaaccaatcaaaggtgttccttcgttttttctctgggattttatcgatgtaagttttttcctttataataatgtctttgtttgtttgtttgttgataaatgttggagttttgagaaatgttgttcaaaatgttgaaaaggtaatgtgtaggagtttgtagaggagaagagagatttgatcaaatcaatactcaaagataggagactttctgatcttcctaggatcaaacaggtacaaacctttattcggattttaatttgcttatgtaaatttcgcagttcctataacattgtgtgtatgtgtgtgtttattggttgaattagaaatcgttgatcatatggggagaagaagatcaaatatttccactggaactaggttacagattaaaaaggtaaacaacaacatgtatattaactatagagattaccctctgtatttttttatgtgtttataataattgtatggtgaaacagacatataggagagagtgcagagatagtggtgatcaagaaagcaggacatgctgtgaatttggagaagtccaaggaatttgtcaagcatttgaaatcttttctcattgactctttgtgaattact

SEQ ID NO: 140933 - DNA, 2125 bp, Arabidopsis thaliana landsberg
aagtccaagtcagtaaatagctttgactttcttgaccagctccgagtcatgtccgaataaatgagtgttccaaaaaaaaaaaaaaaacatggccatgaggaaatttcagaacaggcagacgaaagttcgacgaagctcacttagtgcgagacgacgcgtcaaagcatcgtcttcctcttgacccatataaaggtaaataacaataagttaaaagcacccattaccagtgagaggacttcttgttatatatcatatcttcttcgttctcgatttacgagatccttgattctctctttctctaatcttatctcatctgaagtatagttacgaattcactcgttgttcgagagtagtaagctgaagaaatggagagctacttgaacgaaaacttcggcgatgtgaagccgaagaactcgtccgatgaggcgttgcagcgttggaggaagctctgctggatcgtcaagaatcctaaaaggagatttagattcactgctaatctgtctaagcgttccgaggccgaggcgattcggcgttccaatcaggtgcttctttcttctcactttgattactgaaacatttctttctatttctgcttgtatactgttggagatctaataagtgatctttctgcattccgagttttttgtttggttgactcactgtacttactggatgggatctaagtgagctcgtttttagtatttttctagttacctatcctcaggttagggattgttatcactagacatgattacattaggttctgtttctaatttaagatgtagatttttaggttcttcgtggtgtttgctagtaagaatgttcaagcaaatatgactcattagtagcaaacaacccatttcaagccttgtgtttcttgtagtttgtattgaaggaggcgttaattagagcgatcaaagcgttctgttcatttttcctttgagaataaattcttactgctattggtgctttgttctaataccattttcctttgtcaaccttatgaatgcaggaaaaatttcgagtggcggtcttagtttcacaagctgcacttcagttcattaatagtgagaatagactactcccttgtgttattcaatatgtatttgatttccttaacgagaaggtattgcgtgcttacaggtttaaagttgtccagtgagtatacactacctgaagaagtaagaaaagcagggtttgagatttgtcctgatgagttgggatcaattgtagaaggtcatgatttgaaaaagttgaaaattcatggtggaactgagggcctcactgaaaaactttcctcgtctattgatagtggaattagtacgtctgaaaacctgctgagtgtaagcaaaagatatttatggattcaaccaattcgcagaaagccccacccgtggcttttggttatttgtttggtaagcccttcaggatacaacacttatgattctagctgcatgtgcgtttgtttcacttatagttggaatactgatggaagggtggcctattggtgcccatgacggacttggtatagtggcgagtattctgcttgttgtgtttgtcactgccactagtgattataggcaatccctgcaattcaaggacctggatgcagagaagaaaaagattgtggttcaggttacgagagacaaactgaggcaaaaaatctcaatatatgatctactccctggagatgttgttcatcttggcattggagaccagattccagcagatgggctttttatctcagggttttctgttctgataaatgaaatcgagcttgactggagaaagtgaaccggttagtgtcagtgtggaacacccgtttcttctctctggtaccaaggttcaggatggatcttgcaaaatgttggtgactacagttggaatgaggactcaatggggtaaactgatggctacactaagtgaaggcggtgatgatgagacaccgttgcaagtaaaacttaatggtgtggcaaccatcattggtaaaataggtctattttttgctgtcattacgtttgctgttttggttcaaggattggctaatcagaagcgcctagataattctcactggatctggactgctgatgaatagatggcgatgctagaatatttggctgtgctg

SEQ ID NO: 140934 - DNA, 2755 bp, Arabidopsis thaliana landsberg
catgtttccaggttacagcaatggataaaaaggaaaaatcttgatgctcctactgaagcagatgcggggcccacaaatgctattacgtgcaatcatggtgagctgatgccagagcaagcaccaggggccaaaagagttgtagttccagagaatttctggtcattcctttttgaagatgctctaaaagtgatgtcagaagatactttggattgtacttgttttcctgtggactccagccaatgttgtcattgcacagaggtactttctgaggttgcatgcttcgaggattcactaaggttagccatgattagttattttttttgttggtcgttatactcttaaagattttcttaccttctattttatgcaacagaacattgaaggtcaagcagcgccaaaatcacgagaagttagccacgggaaagggtataccattaacgccacaaagccgatatttcttgttgccttctccgtggctagtgcaatggagaatctatattaacatgactggaaaaaatagttcttcagcaccagagcctgaacgtcttgatggagtcattaatactctcaaatgcaaaaaggtaagatctgttgctcggcggtgagtcggtttccaatttactggcagttagatattgtgggggtaaagctctatgtggacagaagtgattaattctaaatcagtgtccctgaccactttctctatttcctctcatagaaatatttcaatatatgttagtaaacgcgggtggtatgacctgtcttatttcagcaggcctcatttcatccccccactatgagcataaaactaatggtttgttcctatggttgtttgtttcagcatacacgactccttgaaaggctccctgaacttgtctgcagacgtggctcgtattttcagaaaaatccatctgtaagtgcatcatatataccgtgagatgattcctaatctatttttaaactgtttgatacagtaaagccaatatctgaatggaaaattgataagtgttcattcacaacatagagaggcttcaacaaatatttttcatatgaacataaataacttatttctgtagaagtaaggatattataaataagagattaatcaagtgtggggaggtgtctgtgtgttttgagactggttttagagcttggaagtaaggtgtctgatagtatggttccgtggttctgtggtgtgattttctttcagtgagaaataaagggaatcatgttctgaatttaacaaattggtatcgtgattgtcggattcagtttacatcctctctcgtgttggctgtttatagcgtcaaacgcagacttggggaattctgattttgatctaatctctagtactcttgcacctttttctagacagacaagctaacaatcatccctgagcttgattggaaatatttctgtgacgagtggggagggctcatggagaatggaatatctgctcttattgaggttggcaatacagaccaaagttcatccccagacgtcattgaccttgagaaggattcttctccggatgataatatggacgttgatgctcaacagcttattctcagggcatccccagaggtatttgcattattatcttgagcctttttttttggtcaacattttgagagtgtgatgtaatattgaatggcaatgttggcttagtatttcacattggtccatatatgaagttcagatgcgttacggtatactgtttttctttttcttaaaagcaagtgtgatcatttgcattcacatttattattgtatgacttcatgactagagttgcatttaacaggatcttttattttcgctagatttgcgaggaatgcataggagagagagaaagctgtgagttgatgcagaaacttagttactctgagggagatgtatttgtctgttttgtgcgtggaaaggaagctccaaaagcaatgttagaggcatctgactctagctttgaggtggatcggcgtacttcaaagcgatctcggagaacaaattatggaaacctgacaagcctgaaagtgtctgcgacaacgactgtataccaattaaagatgatgatatgggaattacttggggtaagattcttttagacatagtgtttttttcgtttctgtagataacttgaagaaacacaacaaaacggggtttcaataaaatatgcaggtgatgaaggaaaaccaggaactccacaaaggctcaaaagtgattgatcaggaatctgcaacccttgcagacatgaacatattccccggcgacaggctttgggtgagagatacagagatgcatgaacaccgcgatattgctggtaaccaaatttaccattattctgctgtctggttagcgagatgtccatgtaaaactattcatcttatgtcttaacagatgagttatgtgaaaagaaaacgggggctcaagatatcgaagaagggtttcgagggacgctattgactgggaatatctcttctgaagcctgctagaaattgtaactttgtgatcaaagtgtaaaaacagaatgcgtgagaactgagaaagagtcattggaccatctagaggaggtaaaatatcttataagagctactttctcgaaactaaaatctcttcttatctgcggtggtcttatgattttgtctttctcagtagttgtgcaggagacggccgacacattttttggcgtaaagtttttttgtaaagacaggcaaggctttgcagccttattttgtgtaagaaaccaacgcaaagattgga

SEQ ID NO: 140935 - DNA, 1201 bp, Arabidopsis thaliana landsberg
ccttcacccataattcccccatatcgatcctgtggcgctgaagttactcaagcgtttgatcgcttttgacccaaaggaccgtccctctgcagaagaggtaactaagaggaaaaaagagacactgaaatcttggtttgtccagtgttccttgcattcattttaatgatgctttcttctttctgcaggcattggctgatccgtattttcaaggattggcaaatgtggactatgaaccatcgaggcaacctatctcgaaacttgagtttgagtttgagaggaggaaattgactcgcgatgacgtgagggaactcatgtacagagaggtaaataaagacatcatgttcttatgagacagaaaagtatggtttgagttttaggaatctcttaaaacttttttttttgttctctttctggatatgaaacagattttggagtatcatccacagatgttgcaagagtatctacaaggagaagagaacataaactctcattttctatacccaaggtttgactcatttttccaataaacttggttctttataaagagaaagtgtgtcttactttggtgaatcaatcttgatatccagcggagttgatcagttcaaacaagagtttgcccgactcgaagaacacaacgacgatgaagaggaacacaactccccaccacatcagagaaagtacacttcactccctaggtgagttactacttcttgaaactgaaccatcatgagttttaagcgaatcaggctataagtacatgtttgggtttggttgcagagaacgggtgtgctcatcagaagacgaaggttctgattcagttcatgctcaatcgtcttcagcttcagtggtgtttacacctccacagactccaaacacagcaactggcttatcatcacagaaggcgtcacaagtagacaaagcatcaactccggttaaacggtctgcatgtctaatgaggagtgatagtatctgtgcttcaagatgtgttggtgtctcctctgcagtgtcatagtcagaaaaaaattgatttctcaagttgtttagcagcaaaccattgattgttgtgttctgcctattgtatcatgatgtctctcctgagtgttttcattgtggtaactctcttcttcttcttcttactctctgctcatattggaatctcgtgtgtaatggtttctcttggaacttgaaattcatatatata

SEQ ID NO: 140936 - DNA, 4935 bp, Arabidopsis thaliana landsberg
tccagatttggtgacagagaatttcttcaaagttttcgaaacaaagacaaaagacaagcaggctcgcttaaaagagagtggtaaaaatggtttccccaaatttgatatgttcttataggaaattgatgttttgtttctgagatttgtatatctcttgattgttttataggccgcgagcttgctgtttcatgggccctatgtgctgtatgcttggttggccatttaactcactttctaggggttaatgctccctggattcatgcgatccattcaacggggtttcatgtgtctttatgtttgattacgttgcttggtcctggacgcaagctagtacttgatggtatcaagagtcttttaaaaggttccccaaacatgaacacgctagttggtcttggtgctttgtcatcattttctgttagctcactggcagccatgattccaaaattggtgagttaactactctttccctcacactctctactttccagttgaaagaagttttgttgtatggttccaagtgcttgaaaaagattatttggagttgaatgaatggtatgtagtagctgcgtctccttttcagtacaggctcgaatcattcaacagaacagtttggctgcattaacatattttaaaatcaaaggcataagtaataatgcttgtttttgttttctttctggatttttccttgtaagctgggagtatttaaacccttgacctccatatctatattggttcttgcgattgatggctgatattccaacctgtaaaactgttttgacatccagggctggaagacattttttgaggaaccagttatgttaatagcttttgtattgctgggaaggaatcttgaacagagagctaaaataaaagccaccagtgatatgactggccttctgagtgttttgccttcaaaagctcgccttctgcttgatggtgatctgcagaattcaactgttgaggttccttgtaatagtctctctgttggtgatctagtcgtcatactaccaggagtaagaagagagaactttcattctcatgcatagtatgttgttgtttcccatttagtgatattttactgcaagggatattctcattcatttttttgcaaacaacagcctattcaaatgtttttcttcgtgtatcctttttgttgacgcttgggttatgttttccttatttaccaggatcgagttccagcagatggtgtggtcaagtcaggtagaagcaccattgatgagtcaagtttcacaggtgaaccattgccagtgacaaaagagtcaggggtaactttctactccacccctatctatatctagtgtagcctgagatagatgagaatgttatcacgactgtttgggttgtctctttgcacatattatactcacgttttttttgttaaaaaatattttgggctagagtcaagtcgcagcaggatctataaacctgaacggaactcttactgtcgaagtgcatagatcagggggtgaaactgcagttggggacattattcgtctggttgaagaggctcagagtagagaagcaccagtacagcagttggttgacaaggtctctccttctttcctagtgcatttgaatatcagtttggactgaccttgatttcccatggaataaaaacctgtcaacaaaatttaaatatataaccaggactacaatttttttgcaactacaggtcgcagggcgcttcacgtatggagtgatggcactctctgcagctacatttacattctggaatctatttggtgcacatgttcttccttctgccttgcataatgggagcccaatgtctttggcccttcaactatcttgcagcgttctggtatacttctaagttctaatatatatacatattgattttaatgtttaatattttatgagatcaagaatatgcaaacaaagtttttgaaagcctattatacaatccctcaactgcagcctatgatatcaattgtaatatttagagagaatacggaggaaatttgtgtttcacttctgattctattaccttagtaattaaaattgatcaaagcaaggatggcttaaaaatagtttctccctcttttatttggatacaggttgtggcttgtccttgcgcccttgggttggctactccaacggcaatgctggtaatatttttactgcataaacagtttttctgctatgaatcagacagaataagacgttgaatatcttgatatattccttaggttggtacatcattaggagcaagaagaggattacttctttcgtggtggtgatattcttgaaaagttttccttggttgatactgttgtcttcgacaaaactgggacactgacgaagggacaccctgttgtgactgaagttattattcctgaaaatccaaggttaggcttctgggcacagcacttctatacttttaaatcatatttttgctgaagtcttgtactgtttcagattaattttttttctttcttgaaattttctacatacttctgtgttctgtgaaaacatctgactcttcatgttcttacgcagacacaatttgaatgatacttggtcagaagtagaggttttgatgttagcagctgctgttgagtcaaacactactcaccctgttgggaaagcgattgtaaaagcagcccgggctcgtaattgtcaaacaatgaaggtaggactgtaaatgataattatccccctatttatgataattatttccctagttttgatgaagttaatgaagtccaccactgcaggcagaggatggaacatttactgaagaaccagggtctggtgctgttgctattgtcaacaacaaaagggttacagttgggactctagaatgggtcaagaggtataatatgttcatcctttattcgtggtttgttaactagtttaggagtgatttggcacctgataagtagccattgtagtctcatatatctttcatgtttagtataatttatatctgtattgctgtttatacattttccgttgatgatgttgtccttgctgtcacaatttgatctacttttgctgcctggccattaatcaagattatacacatcttcttttttttttttctccaaagaattgtacatagagtacttaaggaacttatgaagctgaataatgaataaataatacatgataaaaaatatttttgacaagcataaggatgtggcaggattttaaactagaagaagatttatttttaatttgctcttccgctatgcagacatggagccaccgggaactcattgcttgcattagaagagcatgaaattaacaaccagtctgttgtgtatattggggtggataatacacttgctgcagtcatccgttttgaagataaagtcagggaggatgctgctcaagttgttgagaatttgactcgccagggaattgatgtgtacatgctgtctggtgacaagaggaatgctgccaattatgtagcttctgtcgtaggaattaatcatgaacgggtatgttcttcttctttaaatggattgattcaacttcttcagaagttttggcatgcattgtttgctaaaaggtggtacttggtgagaattaccaaacatctaaagtcatggcattgaatcagtgattgggctgtaggcataaacctcgttttgaacaaattaaaatatatctatattgactttcattagccagatttagttcctgcatcttaatccttaaaaaatgcctgatcgaatttgatatacaggttatagcaggagttaaaccagctgagaaaaagaattttatcaatgaacttcaaaaaaataagaagattgttgcaatggtgggggatggaataaacgatgctgctgctctggcatcatctaatgttggagtggccatgggtggtggtgcaggagcggccagtgaggtgtctcctgttgtcttgatgggcaatcggttaacacaggtttcgcatattatccccacaacacttgtacctttttcattttattgtgctataaaatgcgagatctgattgattactacatcaaatcatatagccactgctttattgatgaaacttagaacatgtttaagatttttggatttgtcgttatgcatcttcatctagttgtataaatttttgattgatgcgtaaaatcgctggtcataggaaactgcattttcttactaaatcaatgataatagatgtttccctttggctttcatgaatttggacacatgaacttagtagttacatgatttccatgcagttgcttgatgcgatggagctaagtcggcaaaccatgaagaccgtgaagcaaaacctttggtgggcgttcggatacaacattgtaagttgttctgcattttcatgtcttaatttcttgctttgagtttcagtgtgaatatataattagttaataatgtattttgtttaaaatacctatgtaggtaggaatcccaattgcggctggagtgttgctaccattgactggaaccatgttgactccatcaatggcgggggctctcatgggtgtaagctctctcggtgtcatgactaattccttacttctaaggtacagattcttctcgaaccgaaacgacaaaaatgtcaaaccggaaccaaaagagggaacaaaacagccacatgagaacacaagatggaagcaaagctcttagacggggaatttccacttcactgaggcactatatcatgatttttgcagagataaatctctttttagttttttacttttcattcttaacgataatttcggctcttggtcttgagagggtttgttaggacttagggtattgataatttggagaatcatctcaacgtgatttttcaaacaattgctttgagcttgtaacacagccacagtaacacatgtccaaactctgcattggctttggcatttgatactctgaaatttgattttgtgtataattatagtgaat

SEQ ID NO: 140937 - DNA, 1580 bp, Arabidopsis thaliana landsberg
tttcatgggttgcaagaaaaggaaaacaaacccaacgatgataattttctgcatgagagcccaaacatgactgcttccagtttttgtgcacctgataccttggatttcctgcaaggtattagcctttaattctaacttgtttaataccaagatgtcagcatctagcagtaagaagattttaatctttatggctgtatcttttcatagattccgttttgtccaattcttgcagataacaccgcaagttctgctccaaaaataaatgatgatacaagttgcatgaaaaaggaagaattgacacatgctaacatggtagttggtgaagggattttagctgaaccaaatgcagaggatttagctgactctactttgaatctgacttctaaaaaaagtgattctgatttagttgatcaggaaactgccaaaacaatgatgtcattactacttcctcaagcaattccactgctcaagaagacctcaagcaagaagcccccaagaaatgatatgtcagacaactgcaaaacgagccaacttaatgatgcgtcaggaactggtatagttaacctctaggaaagatctgaatatagtctgttttagatttgagattgcagtattttatcttgaagtattcccttattccataatttctcttctaaatttgcagctgtgtcactggcgataagagaatctagtggagatgatgagaatatgcaagttgttgctccagattccgatcaggattttgcaagtaatgtatccattgctcctgacagttttgatgagtctcacttggttggtcctgggagtggacatatcatctcttcttcccaggaagtctatccagcagtccttcctaaaatgcccatagacgaggaccatgttccaatagtaaatgatctatcggtttctgctttggaagagaataatcaagaagaatatgtgaagaggttcatgtcaataccacactgtaccagctcagttaacatgattttatcccaagaatctaaggaacgctgtgcagcagaaggaaacttgttgcaaaaagaacaccacttcgaaaacaaggaaccaaagagcacattttgttctactgaaggtaatacgctaaatctataaatatcaccatttgcctccaccctcagaagctttgcatgactatttgtctgctgtgtatgtaagcatgagtctaattgcctgcaggtaatggttttccggtcgacacaacccctactgaagcttgttcagttaaaaaggaaaatcataaggtgtatatcagaaaaagagtctcgaccaatcaacatcgaataaacagaaatttatcctctgaaagtaaaaacagttgcagaaatactggagaagatgattccataaggaatatgtctccgattaattcctcacgtatcttggagcttcagccgaccttgtctaccaactcagtatcagatagaacgaatcctctgggtaatgaaagcggtcatgtaacagaacaataccagggtcctgagttagtgaaggtgaataacaacacattcaccaatgtaaaaagcaatgaggcgtgtgtggataccacaagatacaag

SEQ ID NO: 140938 - DNA, 1654 bp, Arabidopsis thaliana landsberg
atgccatgtccaggcaaaacagattgcacggcctcctcaccggaatccgccatcgccgtcatggataaaaccaccggaagacgacgtgtcccaatgcccatgaaactaacacggcctttaccgtattttcctacaggctgattcgttctagaagcaaatgcgatacgcgggcgatgaagaaacacactggacgacgccattaacctgtgatcaaatcgtttaaattcaatagaatcctcttaaagagtttaaagctcatctccgtcaatcaaaacgtgaaattcgtaggtttcgaaacgtacccattcgtagccataaaggaatttactctccaggatacggaagttttgttctttgttacgacggagtcaaaagtttaaatctttcacttttgtctgaaaatttccggccggtgagagtgattggggatgtagggtttagcttatcccttttcatcaaaccggaaatctctaaccaaactaatagattcaatgaaaccgtaattttaatgaaaataataaaccggaagccttgaaccgatttgataagctaatggacctcacagtctcactcttaacctgaagaacgaagaaccgtctctaaaactccgacgaacgaaaaatgaagtcattagcttcgccgccgtgtctccgcctgataccgacggcacaccgtcagctcaattcgcgtcaatcttcctccgcctgttatatacacggtggctcttctgtgaacaaatccaataatctctcattctcctcatccacatccggtaagcttgctttctctcacttctcttataataactcaaatcgttttttcgcaatttcgtgattgagatgttaacatttggtgttaggatttgcgtcaccactagctgtagagaagaaattacgctcttcattcgtacagacggctgctgttcgccatgttacggggtctcttatcagaggcgaaggtcttagattcgccatcgtgagttctcagaatcgctttcttactttgtgcgctgcttagatttagtgacttggttctgatttacagtgaaatttgaaaactttgagctcaattgcagtgttgacttggttctgattcatttttctttctcaaggtggtagctcgtttcaatgaggttgtgactaagttgcttttggaaggagcgattgagactttcaagaagtattcagtcagagaagaagacattgaagtaaaagtcttttgcttgtagaacagaataaaaagttatgagctttcacaaagctaatgacactgtttttattcaggttatttgggttcctggcagctttgaaattggtgttgttgcacaaaatcttgggaaatcgggaaaatttcatgctgttttatgtatcggcgctgtggtatgattcttgttttgaaagaatctcaggctattccatttgtttttctcctcatatggcttcagaaagtagttgctttatgttgataacatatacttaaagagttggattttgatattactgttgtccttgttgtggtttagataagaggagataccacacattatgatgctgttgccaactctgctgcgtctggagtactttctgctagcataaattcaggtttacctcgatacttatttgctggatatacatctttagacatttttatttga

SEQ ID NO: 140939 - DNA, 2557 bp, Arabidopsis thaliana landsberg; identical to SEQ ID NO: 35029

SEQ ID NO: 140940 - DNA, 8530 bp, Arabidopsis thaliana landsberg
agtcttggtgaggctgttgctgcagctgctaaagcttctcaagctagcagtgttgcagttgttctcgcctcctctgagagtttttctgatgaatctaagctcagttctgcttcagatatagcttcaggttgtgatttcttttagtaaaccttgagaagtgcttgtttcattaccatttttgaactgatccttttgtggaatcgttttttacttttgacaggcacagtgcttggtttgtttgaagacagtcggtataagtctgagtcaaagaaaccatctctcaaatctgtagtattcattggctttggcactggacctgaactagagaacaagcttaagtatgctgaacatgtttcttatggcgtaattttcacgaaagaacttgttaattcaccagccaatgttctctcccctggtatggattataatcatactcttagacttctcatgttttttataatgtgagcatcatgtctattgaagtttatttcaaacatttgactctaatctgctttgtatcttacagccgtactagctgaggaagcctcgaatctggcttccatgtacagtaatgtcatgactgcaaacatcttgaaagaggagcaatgcaaagaattgaagatgggttcatatcttgctgtagctgctgcttcagctaatccacctcatttcatccaccttatctacaaaccttctagtggccctgttaaaaccaaacttgctcttgttggaaaaggattgacatttgacaggtactcgcaagagctgttgtcttctgtttgccgcatcaatctctttcttttatacttattggttattgaccatctggtttttgttcacagcggtggctacaacattaaaattgggcctgaattaataattgagctcatgaaaatcgatgtgggaggttcagctgctgttcttggcgctgcaaaagccattggtgaaattaagcctcccggtgttgaggtaagtttatcacacggagcttgagtttctgagttaagtgaatgtacctaaacaaatgcttcgttgcacaatcaggtgcactttattgtcgcagcttgtgagaatatgataagtggtaccggaatgagacctggagatgtcctcacagcctcaaacggaaagacgattgaggtatcataacaccgtttccatatgaattcagcttcaaaaggttcgagctttccattgttagttttacgccaaactaattgtgggtggtattgcaggtcaacaacaccgattctgaaggtcggctaacacttgcagatgctctagtttatgcttgcaaccagggtgtcgataaggtattgtttcaaagattcttccccttatcaataacattctttctgctgggttttctctcaacttgtgaatcatatatatttgcagattgttgacattgcaacattgaccggggagattattgttgctcttggaccatcaatggcaggtacatagtcttgtgtataaaatagacagaatgacattctttcgtgatgattgaatattggtttcgatttttgatttctgcaggcatgtacacagctagtgatgagcttgccaaggaggtaattgctgcatcacagaggagtggagagaagttatggagaatgcctatggaagagagttattgggagatgatgaagtcaggtgttgcagatatggttaactttggaggccgtgcaggtggatccatcaccgcagctctctttttgaaacgggtgaggataccataagagtggaaacaaaaaaacacacttcaatactgattctattgttctctaacgaagaaccggatttggttaatggttgcagtttgttagcgagaatgttgagtggttgcacatagatatggctggacgggtgtggaacgagaagaagaaagctgcgactgggtttggagttgcgacacttgttgagtgggtacagaacaattcttcttaagatgtaggcaggtgatctttgtgctcccagttcttatttaacattctcagagaggtaaaagggtttttatttgcttgtgtgaactgtgaagtgtgacgcttgaatatgacgagttacccatttgaaagtatttgactatttgtagatattcttgtgttccgtaacatcacttacctaataacacaaactattaggagcacaagatgaaggatacaagtcgtcaatcttatgtttcagtggtcatcaataataacacaaactattaggagcaaacaaaacaatttatttaaatctcttttgaatatgttttagctcaaatcaataaataaaggcgccgagaaaaaaacagagctcatttgcacaacaatcagtatagtccaaagcttaagcaagtgaggacatgtgttctagctttcctcttgagcaggagcagaaacaggaggagtaggttcaagcattcttacagaacgaggaagcataaactcagcaaacacagggtagtgagatgaaggatacaagtcgtcaatcttatcatttacgatctcgcacattacaggaactatagatctacctctgtaaagtatccaatccgtgtgtagatcttgcgtctgtcggtcccagcagaggcataacgctctgaatatcagcttcaggaactcgaccgttccctgcttgtcacctgaacaaaggcccaacatgttatgatctagaagctttggagataaatgatttttatagctcatgagagggtggaatgtttcacacctttgaaatcatggtatgttcttatgagagcgacgttttttcttactcgggcacttggccatgcgtctctcatatctcctaccacaccatgctctctgcaagttgaatgatgcccaaaagccattcatcagcagtcaaataagtaaatatgctttgatttgaaactagttgatcagtgtgtgaagaatggtttagccattcttgcattaactaggagccctgaaagaaaactctaggagattggtaaaaagcacaaaacttgtgaatgtgatattaaggtacctagatctgcccaacagaaaccgccctgttgttgattccttctgtgtgttgaatcctccacagtacacaaccggcaaagtgggaggtaatgatgctatgtgttgccatgtgagtaaagcacttcgcctacgggcacgagggctgatttcatccaagtttgtgttgactatctgaaacgaaaaaccaggcggctccgctcctttaagttggaatgtgtaggcagcttgtcaaagaaaaccaaaatactgatatataggacaaaaacaccaaaatcataaactaatctaattatagtttaactaaaatgaacccaactagtaaaaaggatatagcccatgtcgctatacaaggaactgcggaaccccatgccgtgcttccagggaccgagggagactctgacaaccaaaaagttccaccctctagcagctctaccttcaattagtataaagtatagtatcaagcagcgtattaattatttagagcgtagttatgtattgtcttatcaaccgaattaatactttttccttgttgaagaagatggtgcagtgttcatcattagcatccccaggtcctgttcttgatatgccaaattgatcataggctgcaagcaaagagtactaccatctatttaagttcaaagaaacaatgcaaactgaagtattattaaggcatgtgaaactagaagctaagctccatggttcacagtaacaaaaaccagataaacaataccaccatcatttcaaagaaagcacctgtaaatgtgagaatatcatgcattccattgccataaaacagatgcattaagtgcactagactccggcttttgtagcctaaaaacactaacttgaacttgatgcaaaaaaggatacggattgacaaattggctatcagatttaagcaataccaacatatactaaaaatagaattaaatctagtagatcacaaatagatttacatagtagattgagaacaagagtgagtggtctacgattgataacaagattcacactagtctgtgaacttaagaagaagcagactgctgtatacaaacagggttcaattagacctaactcacaccatttaagtagagattagacttccataaatcaaagagaattcaattatacctggcaacccctgctgaagataatccaactgcgacttcacacctaaccaatgtaaacatgataacaaaagatcaaaacgaaaatcctatctctgttcaatatttcagaaggcaagaaaaagcacaagaatcaatctccagcattcaggaaaaagaagccttcttggagaaccaatataaagaaggaagcaagatctaacaagcattgaatcaccaatacgaagaaggaatcaaagatctaacaagcattgatccattgtggctaaagattattaccttgttgggtacagagaacaatgggggagtaactagtgatgacagtgagacacaaatctttccttttgagccatgaattagggctttcttcaggtagatcatcgtgaagattgaatgacatcacactcaaagacacactcattgttttgtctcctttcttcttcttcttcttcctctagttttctctcttctttctttatggtttggtaagacgaataaaaacaaaggtctctctcacatcagcagcagctcatcgtcgtcgtgacctacatgattttcaataataagtcaaaagcttatcaatttttatgtgaaaaaacagctcaggattcgaagaaagaaaatcaatcaacataatttattatattatattattgaggaatccaatacgaaccttgttgtttcagactcttatcaacaacaacagtggagaaaatgagtcttggacatttgacgacttttgctggaaaatctgtgaaagtcatgccctttgatcaccaaaagtctcttaaagccatttcctgatacatgtataaatcagcaacttcagaaacaaatcaaatcggaaacgggggaagaagaagaagaagagtaactaatcggaggagggaccggtgaagtcacggtggagggaccggtggagtcacggtggactaatcgtcggctttttggtctctctctagatttttttaaggtttaaaattaatttcagacaagcttcgaacccgagacatggaacccctacagacacgtgagtttttaataaccgttcagaccaaacaggagtaacaacaactgtttgagatagttttgttgaataaccgaattaaaccaaagtgaatacaaaaccgaaccgagatttatatttgtaaagatacgacgacgcctttgacgaaaaaggagacgaagaagatccaaacacggcgctaagctaagctccgttctcctcctcaaaactatccgacaaaagacagaagcagaaacctaaccctaatttccttttctcaaaatccccgaaaggtccgtctctctctctatctatctctctaacttagctctcctccaaattcggatgattacccattacgaatttgcagagaagaacaaatcctctctttcttcttcctccgtctctctacccctttcatgtcttctcaagtctacgactctcatccagggttgttggtgcatcaaaccctagtttttgatttcgcttttgagatttctcatgcttctttcgtttcggatctctctctgaatcagattacgtcttttgggctcttgttgttgttgtgctgctcttcaatctcttctccgttgcgttctatgtgccaaatatgagtgaaaagaaggtaatttcctactacttgttgtttgcctcttgagtttcttcacttattttgtttcccttaaggtttagttctcatggtctagagaacgatgcagaggtgcatttggagctcacctaattgcaatagagactagttttaggtggtttagtttcatggagatagtatctttttatagcttcgttttgatcattttgtagtttttctctgaggtcaatgtatatccgagagacttaactttcattatcatttggtttcttaattgttctgtaaatgattctcctttgaaacttacatttgctattctacttttattcatggcaggtatttgtgtttggatcctttacagaacatgaaactaggtcattttttgagcagaaacccactaaggatcctcagaattctaaagacaagtgtgtgggaagtattcaatttggctccttgaatcttgctgcggaaaattcttcagtaaatactaatggcgagttgaagaaaggtgaggctgatgggacagttaaatctgctgggtctcaagagagacttgatgcttctagacctgccagctcggataagaacaatgatagtgatgcaaaactcccaagaaagaactctttgagagttccagagcatgtggtacaaaatggaatcataaaagagatctctgaaagcaacaaatctctcaacaatggtgtggcggtgaaaacagatcctattggtttggataacttgtctatgtctgatggtgaaagtgatcctgtgtataaagcttcgagctctaaatttcaagcgctggacaatgaagatttctcaagtgactcttcgtctggaagcattcaaagaaagaaaaacctgaaggttcctactgaatctgttccacctgttaaagactttacaccaagaggattaataaacgctggaaacttgtgcttcctgaatgcaacactacaagcgttgctttcatgttctccttttgtgcagctcctccagaaaattcaactccaagatattctaaaggtttttaacgtacattgttccttttgtgattttggttctatttcctataatatttgttttcttatcgatattcttccattttcttttttatcaggctgactctccaaccttagctgcattttccgagttcatctccgaattggatgtgccaagcagttccagcatcagaaataacgttactgttgttgaggctggtagaccttttagacctgccatgttcgaaggagtccttagaaattttaccccagatgtactcaacaacatgtctggtaggccaaggttagtgactcccttacacagtctaaattttgatggttcctctgttttaaatagttcatatgtatgtccctattctaactttgtgtgcatgtactggcaggcaggaagatgctcaagagtttttgagttttataatggaccaaatgcatgatgagttgttgaaactcaaggaacagtcccccaaagtcaccgcttctaagtcatcggttatttcttctgccaacgatgatggtgatgaatgggaaacagttggacccaaaaacaaatcagctgtgacaagaacacaaagttttgttccgtctgagcttagtgagatatttggcgggcagcttaaaagcgtagtgaaggcaaaaggtatttgtattttttgtaatcattctaaatttctttcatgatagaattttctcatatgtcatttatggtacaggaactaaagcttcggctactgtacagccgtatctcttgctacaccttgatattcatccggacggtgtgcaaggaatagaagacgcgttgcatttgttttctgcccaagaagatcttgaaggatatagagcctcggttactgggaaggtaaactatttctctttttactatattgaagctgtgggattttaggacccaaaatatttcttatggatttcaaataataatttgcctcgttacttgtttggattctctcatttcagactggtgtagtgagtgctagtaagtcgataaagatacagaaactctcaaagataatgatactgcacctaatgcgttttagctacggaagccaagggagtactaagctgcgtaaaggcgttaaatttccccttgaactcaacttaaaccgcagccatcttgtttctctatccaatgaggtataaagccgaagcagaactgtctatgtttcacatttctcttactctctatgtgatatccctctgttgtgaactagtcaaatttcttcttgtagagtttgagatatgaacttgtggcaacaattacccaccacggatgggatccctcaaaaggacactacaccacagatgctcgacgaaagaatggtcaatggctaaggtttgatgatgcctctgtgacccccatagggacaaaactggtgttgcacgatcaagcctatgtcctcttctacaagcaagtgtaagagattcaaaggcagcagatttccatggtcggagaaagaagagtaaactctttatcggcttgtgtccggtcttctgagtttaagtcacgatgctataatctggttctcatcttatataactttgaaggagggggtctcagtaggtaaatagttttagagtacctggtttacactggaagttttgttatgattccttgagatgggtgttttaatctgattttactacttcatagacttattattcgaaaattcatgtcttatgctacatgtcttcttatcattggcctaatcttccttttcatggttcaatcaatcaagttgaaggcgatgaaatga

SEQ ID NO: 140941 - DNA, 1874 bp, Arabidopsis thaliana landsberg
tccgcaaaatcttccctcaaactcagatccgattcttctaattctttgcccccctagagattcttcttctttctccaagtaaaagaaaacaactttctttctcttttcttgcgaaagtcctcaactttcaccactaaatcagcttccttcaatcactgtgtttgctttggacccagtttctgatttagcgactagggttttgattggaaccgtattaagtatatgagaatcgggttttactggtgaatcggattatcatcggaattcggaaaaagatggatcggaatcaaaagatggatcacgttatcggcgggaagtttaagttgggtaggaagcttggaagtggatcattcggtgaactttatttaggtatcaaatcaatctattcacatcttgagagtgtttactagttcttgcattgggtttgtttagttgttgttgaagtgtaatctatgtgtgtatgatttagggatcaatattcaaactggagaagaagtcgcagttaagctggtaatactacgaatttgtttaagttatttcattcaaattttatagattttgtgctgaggaaggtttcaattttggataatgaatcaatgttatttgcagcttgttttaagtgagactagttttgattgggaatagaagtgtaatttgcagcttgttctcttcttattcctgatggttgctgctctgttatggaaagaaatggtgttaattatgcaagctccatttctgtctttgtggtctaataatggttctttttttgacactaggaacctgtgaagacgaggcatcctcaactgcagtatgaatcgaaaatatatatgtttcttcaaggaggaagtgagtttggtttgtctttctctgctagtttatatgaagttttagttccaagcctctgataccttgatatattttctttctgttaaatagcgggtgttccccatctgaaatggtttggagttgagggtgaatacagttgcatggttatcgatcttcttgggccaagcttggaggacttattcaattactgcaagcgaatattttcattaaaatctgttttaatgcttgcagatcaattggtaagtactgagtaatgagtatgccctttctttaagatgttaggttggtcgttgagagtatgttgtatcaatgcagatatgtagagttgagtatatgcattcgcggggttttcttcaccgcgatattaaaccagacaactttttgatgggtcttgggcgcagagcaaaccaggtaatctaccgattcagcatgagttggtgtatgttttgaagatgtctttagaataaatctgtgtgtgattcttagcataggagtagtactgaagccttctggtttactgaattaatttctaacctcaggtgtatatcattgattatggccttgctaaaaaatacaaggatcttcagacacaaaagcatataccatacaggtgagatatgcaaactcttacctacattttcagtcatccatgttttaggaacctgttgtagatatatgtttagttgatcttccgtgcctatcttattcatgaaacttgaattttatgctgcaccagtgttttcttatagatcgtgttcaatactttcctttgtgcactcttcttccagcttgctttattagtattccttgcaattttgcagggaaaacaagaatcttacaggaactgctcggtatgcaagtgtgaacacacaccttgggattggtaagagctgctttcatctcatacatccgtggatttcttgtcagaagcatttgatgaaaactcttatcttcaaatgctgatcattttttttatgcatacttacagagcaaagtagaagagatgatcggagtactgataggtgttg

SEQ ID NO: 140942 - DNA, 4155 bp, Arabidopsis thaliana landsberg
atggatcaagatttcgttctcgtatctggaccaccagtagatatgccatcatcttcatcaagttcttcgaagccttataattttccattcaagtctcagtctcctcctgtagagttattcaacagaagcataagttcaacggctcccatgccaataattggtgctactagcaacagcattggtcagtttgggagccttgacagtcagtattctgccccgagcacttctcatgggtctctggatcttggtgatgcttttgaacagccatcaactcacagcctgacaagaatcaggtctctgagaaaatatgcagcaacaattgcagaactagtttatgaaagggtaacgaaacttttcactgtttgtagatagtcacatattatcatcgtgacatcactggccatcatgagtttctgagtagattattttcatgattctttgtatagattgaatctgacaaacatctagaagctttctcgatccaattggcgattctggcaatttggaaacaggcactgcacatatgtcatactcaggcaatttcaggtttggaaggaagcccaagccaagacattaacaaactaagaagtagcagcctgaaacacgatactcacagttctaataaagtcactgatctcagccatgatggatcggaggagatatcctctcagattcagaggcaatttatacaggagattgagcttgctgaagaacttgccaagagtattgaacctggtatgtttttttttctcttgggaaaaaataaacatttgtttttgaggtattaaagatcttaaaaggttttcatctacatgtttgtaggaaatacaaaaatgccagatgcaatggagacgatatttgaagcagcacttgatcttggaaaacttggaggagtaagtttcctttgtcttttcccaaagaatattgatgaacaatccaaaaacaatgaaaacaaaacaatcaacttgtctatactcattctcatatatggtgcctgtggctttttctgcaggttaaggaggttatgggagatacagagaacgccggaaaccaatattcgaaagcagtgcgtttgctggtattccttttagtagaagcaccaatgctgattctgaatccgccactgtctctcacaaactcagtcaggtatcgtctcaggacatatattgatttcctcagcagaagattaaaacatctgcagtcacatagaagaagttcagctggtcagatgcaaggatcatcgttagctatgatgaacagacaatcatagatccattcgcttgggttgggttctcctgtttctggtgttctcttatggaaagaaaaaacaaataatgatctaaaagagaaaaatgtatatgtttttgtacagcaacatcatatattcttattcttttggggttaatctggagggacgttggggaaatgatctgtgtgatggatgttgtaacttgtaacattttcctgttctattttgatcttaatcctatgttttttacttgattttatacaaaaatatatgttatgatgattcttggatacattatttatgtataaataaatctatgactatgtttttaaactaattgtagagtatttatgatgcatattttaaaatcttaaaatctccttaaatctttctaataaatgatattcttaattttggttcgtcaagaataatatttatctcttacttaagtctttgacttatttatgtattgtactttattcgtatctcaaaattatgcaataaggacagaaccttaagggtttcagtttcccacacgtatgcagatgttaccacacgtgcaagagactgaaaagaaatatatacagtgaagccgaagaaaaataagcgccagtggccctaatcactcttgcagtcaccactgtcgccgtccgtctctccttctccttcttagggaccattcctcctctttcagaccagattctaggttagggtttcatcatcatcggctaaagtttcaatctttgaaatttccgttatctgttgatctcattattctctgattttgtgtagtttccacaagtttattccttttgatacattcttggggttttgttgtatttgcaaaagctttttttggaagaagcttcttatagcttgctggatttgatttgatatttgtcgaaattgccctgtttacagaagaggaaaaatggcaggatgtgcaatgaatcttcagttctcaagtgttgtgaaagtgagaaacgagatctcttcttttgggatttgtaatcgagactttgtatttagagatttagccaaggcaatgaaagtgcctgttttgcggattagaggtggttcaggtaggcaaaggtcgaggcttttcgtggttaatatgtctcaatctcccattgagccacaatctggtggttttgcggctactgaacaaattaaaggagaaggtgataatagtatcttagggaaagacaatgttagaaacttaggaactgatcagcttgagaatttggatattgatggtaatgttggagatggttttaatggtagtgatggtaatgggggtggtggaggaggtggaaatggaggagaaggtgatggtgaaggtgaagactacgaagaaaaagagtttggaccgatattgaaatttgaagaggtcatgaaggagactgaagctagaggagctactcttccatctgatatgttggaagctgctaagaactatgggatccgcaaagtgcttctccttaggtacttggatttgcaggtacatgtttcattgcttttgtctattattcttctggaaataatagtgttagagaagagttttgattttcggtttcttcggatttagagctcagcagggcttcttgggtttgctataagatcatgggctatgcttcgtaacagaatgttggctgatccatctttcctcttcaaaataggggctgaggtaaggcactccctccatagttttcatttagaaaacagtttcttcttgcattgaagaaatagtgagcatttgatatgtcaatttcagatagtcattgattcttgctgtgccactgttgctgaagttcaaaagagagggaaagatttctgggcggagtttgagttgtatgttgctgatcttttagttggaactgtggttaacattgctctggtcggtatgttggcgccttatgttcgttttggacaaccttccgcatcacctggcttcttaggacgcatagtttttgcatataatgcgcttcctagcaggtaaatttcctcaagaagattactcaattctcatatagtacttaccatctctcattttgtgtaacttggttaataaactttgagatgttgatcttatacagtgtttttgaagctgaaaggccaggatgtagattttccgctcaacagagacttgctacatacttctacaaggtaattgaatttcacagtctctgtgtctcaatttctctataacttttgctgttgctgaacaatctttgttacatcttttcagggtataatgtatggtgcagttggatttggatgtggcattgtaggtcaaggcattgcaaatcttatcatgactgccaaacggtaacacacatctctttctggtagctaaaatcgaaagggtcatgtagttcttggatttgacttactgttttcttttgtcactctcttctctcagaaacataaataaatcagaagagaacatcccggtaccaccgctaatcaagagtgcagctctctggggtacatacatacttatactagctagtttctctaccttatttactttcactgtactaaatcttaatctccataacaatggttgattaattgcaggtgtattcttgagtgtttcttcgaatactcgttatcaaatcatcaatggtctagaaagagtggtcgaagcatcaccttttgccaagaaattgcctccggcggctatggccttcacagttggtgtacggttggccaataacatctacggcggaatgcagtttgtggattgggcaagattgagcggttgtcagtgaaaacaaccaaaaactcttttttgtgtgtcttatttgatgaaaccatatgttgttgtagcctactcatttctatctgttttactacatttccgttgttatatctaacaataagaattttcagctcgaatgttg

SEQ ID NO: 140943 - DNA, 1014 bp, Arabidopsis thaliana landsberg
ctctctcttatttgatcataaagatattattgcttcttttagtaaacataaaaatgggaagctttctctacctcatcgtagtcatcttcctcttctcttcatccgctaacgctcgtgatcgatgtcttcaccgagctaaagcagctcatttctcctctgcctctgctctctcttgtaaacatcctaactacttcttttttaactatctgtgaggttcttttctcatgccctgtttatgtgtcatttgcagctggcgcttgtgcatatggctctatggctaccggtttcttcgccggacacattgctgcggctctgccctccatctacaaagacggctccggctgcggagttgcttccaggtcagatgcaagaacccgacgctttgcagcagcaaaggaaccaccgtgattgtcacagacttgaacaagaccaaccaaaccgatcttgtccttagcagcagagcctttagggccatggctaagcctgttgttggcgccgacagagatcttctcaaacaaggcattgtcgatattgaatacaggaggttcgattcccgaaccatctatgttatgctagcttttctcattttccttcaagtagctagtagtaataagaactattgaatattgaaacagagttccttgcgattacggtaacaagaagatgaacgtgagagttgaagaatcaagcaaaaatccaaactacttggcgataaagctcttgtaccaaggaggccaaactgaagtggtagccatttacattgctcaggttggttcgtcacattggagttacatgaccagaagccacggagccgtgtgggttactgacaaagtacccaacggagctctgcagttcaggttcgtggtgaccgcaggctacgacggcaaaatggtctggtcgcagagggtccttccagctaactgggaagctggaaagtcctatgacgccggcgttcagatcacagacattgctcaggaaggttgtgatccatgcgacgatcacatctggaactga

SEQ ID NO: 140944 - DNA, 203 bp, Arabidopsis thaliana landsberg
gtatgttgagccaacgatcttgttggaccctcctcttgattctgagatcatgaatgaagagatctttggtccaattctcccgattatcacggtaagcatatttaaagcatacagtatatacattaatcaactaatcgttgttgattttgtctatttcctcctatgtgatgaaggtacgtgacatccaagaaagcagagggatc

SEQ ID NO: 140945 - DNA, 1812 bp, Arabidopsis thaliana landsberg
gttcagacctatggaaaggtctgcagcgttcatcaacgctatcgaagtcgtgtcagctccagacgaactgatctctgattctggcactgcccttttccctgtcattgggttctcgggtctgtctgactacgcttaccagtctgtttatagagtcaatgtcggcggtcccttgatcatgcctcagaatgatacattaggaagaacctggatacccgataaggaattcttgaaagatgagaacttggcaaaggacgttaaaacaaccccttcggcaatcaagtacccaccggaagttacacctttgattgctccacagacggtttatgcaacagctgtagaaatggctaattctctcaccatagaccctaattttaacgtctcctggaatttcccctccaacccatcgtttaactaccttatccggcttcatttctgtgatatcgttagcaagtctctcaatgacctgtactttaatgtgtacattaacgggaaaactgccatttctggactggatttgtccactgtcgctgggaatctagctgctccttactacaaagacatcgttgtgaacgcaacacttatgggccctgagctccaagtccagattggtcccatgggagaagatacagggaccaaaaacgcgatcttgaacggtgttgaggttctgaagatgagcaattccgtgaacagccttgatggagagtttggagtggatggtagaaccactggcatggggaagcatggtatggtagcaaccgcggggtttgtgatgatgtttggagctttcattggtctgggagccatggtttacaagtggaagaagaggccacaagattggcagaagagaaatagtttctcctcttggttgctaccaatacatgctggtgatagcactttcatgacaagcaaaggtggttctcagaaatccaacttctacaactcaacacttggtctcggccgctatttctccctttcagagcttcaagaagccacaaagaactttgaagcatcccagattatcggtgttggaggattcggtaacgtctacattggaaccctcgacgatggaaccaaagtcgctgtcaaaagaggtaatccacagtctgaacaaggaatcactgagtttcagacagagatccagatgctttctaagctcagacacagacacttggtctccttgattggttactgtgacgagaactctgagatgatcttagtctatgagttcatgtccaatggtccattcagggaccacttgtatggaaagaaccttgctcctctaacctggaaacaaagactcgagatatgtatcggatctgcacgtgggcttcactacttacacacaggaacagctcaggggattatccaccgtgatgtcaaatccaccaacattcttctcgatgaagctttagttgcaaaagtcgctgactttggtctttctaaagatgtagcttttggacaaaaccatgtcagcacggccgtgaaaggaagtttcgggtacttagacccggagtactttagaagacaacaacttaccgacaaatccgatgtttattcctttggtgtcgatcttctaaaagctctgtgcgcaagaccagccatcaatcctcagctaccaagagagcaggttaacttagctgaatgggcgatgcaatggaaacgaaaaggacttcttgaaaagatcattgatcctcatttggctggaacgattaatcctgaatcgatgaagaagatagctgaagctgcagagaagtgtttagaagactacggtgtcgataggccaacaatgggagatgtactgtggaacttgga

SEQ ID NO: 140946 - DNA, 1396 bp, Arabidopsis thaliana landsberg
gaaatacctgaagaagtgtgggactgtggatctggagtcagagtacttgacattagtgaaaacttcattaaagaagtacctgccaaaatcagctcctttggttctatgcaggtgagaactgctaagtttcatgtatattttaaatctttctgtttagtgtagaattaaggattatgatatgactataatatgagcatttgtagaaattgttccttcaaggaaatggtctgtccgatgaatccattcaatgggaagggatagcatctctgaagcgcctgatgcttctgtccattagccataacaagtgagtttttcgctttcactcttggaactgtctttcttagtatatatcagacatgccttcaatgtttttcgacaagctaaaccaaaggaaaaattgatttgaagctgaagttacacgtaaatcgtaatcacttggactctagaacacaacatttatacttgtgaacgccgaatgatttttgacggggaaattgtttggttgggcttttgtttgtgttgcagtctaactgttctgccatcagcaatgggttcactgacgtctcttagacagcttgatgtcaccaacaacaagttgacaagtctaccgaatgagttaggacttctgacgcagcttgagattttgaaagccaacaacaacaggcaaataagctttactcatatcttttaattgatcgaaaacacaaaagtttcagtcgtagcattgtgattcattgattacattgctcatggtctctccatcgttttgtattctgcagaataactagtcttcctgagagtatcggaaactgttcattcctcatggaggttgatctttcagctaatattatatcagaacttcccgagacattcaccaaactgcgtaatctaaaggtaaaaaacaatcttttgactactctttgttccatggccatgggtttacaaatactgacttagtgtttcggtattcagacgctggagctgaataacacgggattgaagacgctgccatcggctttatttaagatgtgtttgcagctctcaactttaggactccacaacacagagataaccgttgaatttctccgccaggtttgtttgttcagagtttcatgttttgagtctatagttctttcttcgttatctgaactgaaacaaggatatttgtattatgacagttcgagggatatgatgattttgatgaaagaagacgtaccaagcatcaaaagcagcttgattttcgtgttgtgggatctggccaattcgacgaaggcgctgataaatcttggtgatcaagccaagtcgagtctcgaatcgtcagtactcttaatatatttgtggcactttcagtgaaaaaatctttctccttcatgcctatatattgtttgcttactcc

SEQ ID NO: 140947 - DNA, 3394 bp, Arabidopsis thaliana landsberg
  unsure (1)..(3394): unsure at all n locations
gtcatttagtggagcgagccaacactcactcctcatttcgagacaaaaacgcggaaggcgacgacacgccgttgaggaggatccgactactcggaagtttcctgctcatctggaaattggggatcgttgctgagagagtttaattgagtgatcaagttccgnnnnnnnnnnnnnnnnnnnnnnnnnnnnnnnnnnnctgaaaggtttcggcaaaaggaaattcaatgcttaagaaaaaactatccctagaagatgaagatgacgatagatcgtataacttaaggtcatcgcgttctaatgccaagtcgaaacccaggtcctctgctggtaccgcaacgaatcctagagcgtcaaagagagctcgcctttcgggtgctagtgcgactcaagaagactcgagtcttgtagataaggtctgcatttgtttctacattttttgtttgcctagtgtctgtcatatgtttatgttttggcttgtcaccttgatgaaggtctcgagtttcgctttttatatgtctcgcagattagattgtctttcgaagatttcgatgaagctttaagcggcttcaaggtatcttctggtacgcgccaactttgcctggatcctactccacaattttcacacttttattgatgttccgctatgatgcttcctcttacggtttttggagcttataatgtctgtcatttcattgctctgtggtctcttgtttaggttatgaaaggagcaagaataccgatttgtgggttgacaaatacaggcctcgcaccttggaagagcttgctgttcacaagaagaaggttgctttgttctttcttttccttttagctctgctttctccttggttcaccaactcatctcctttcttgtttttgttatctttaggttgacgaagtcaaattgtggtttcaggaaagtttggatttcttaaaggtaatgtttcgtttatctttgaaattgatttatgatttcagagctcgtgatgcttaatggcagtattcacttttttgcctttctgtttcagcagaatggtttaaggaataacgttctactagtcacaggacaagctggagtcggaaaatctgctaccatccatttgattacgtctatccttggagtcacagtgcatgagtggaacgctcctattcctaccatctggcaagaacatgtgcacaacactagttcaggtacttgaaggaattatagttgttagttactcagttttggcactgctattacagaccagaggatggttgttgtactaatccggttataatctactggattttcattaattcttctaggactgaagtacacgtcgaagctggatgagtttgaaaactttgttgagagtactaggaaatacggagtaatggcttcatcaagtactgacggaataaaggcgcccgttgttcttttgattgatgaccttcctctagccaatgggaggcatgcttttgaaaggctgcaaaattgcctactactattggtgaaatcaacgcagattccaacagtgatattaatcactgaccacaataacgcggactcttctgaccagactgcacgacgcatggaggacacacagtcatctcttgagcgagcaggggctttaaaggttgctttatcaaactatttacagtctaaatcttattagaaatatcattttttcaactctagttgattgtccaggtatgtattctcaggttgctttcaatcccatcacgaagaactcaattaaaaaggtacttcagaaaatatgtagggaagagcattgtaaggtaacaactatggagattgatcagatggcaactgcaagtggaggcgacatcagacatgctattacatctttgcagctcttctccgttaagccagagctaaatcatactaagataaaatcaccaaggcctggcatggaagacaattatcatggaaacgagcagacaatgtacagtggtttggatagtggaatatcttcctgttttggtagagatgagaccctttcgttgtttcacgctctgggcaagtttctccacaacaaaagagagacggataatgtcattatatcaggtaattcgttattaagaaatttaaagaatgcaatttagagctcaggatcactatcttctaagctaaagtttgtgtagagtgcagcagctctcttgttcatgacgagtttgcaaggttgccactgaaaatggatgcgccggagaaggttctcagccaagctcatggacaggcggggcgggttgtggattttctacatgaaaatggtatcaactactacctcgtcttgactatccagtattgagttagcatatgcactatttcctccttgatagagtgacacatgagagcatacctaaacttacatttgtttgtgcttttcgtactgaaagattttctaaaatggactctttatgttaatgaagtgttagattttgtgagtgacggagccatagaagatgcctggtgtgtttcttcgtatttggcggatgctgatctccttctcgctgatataagaggaaagatgagtgggcataacaacacagaggatgttccacagtcagccggtgcctcggttgctgttcgtggtgtgttgtatggaaacaagcagccatgttcatccaggtttcttttacatacggataccagctgactgtattatagtttatttgtttgaaaataatattatcgattgatctgtattgtgattatgcagatggcacgtgattcggaagccaaaactctggcaagtggagcaatcctcaatacaaacaaaggtcagggtctttccctttttttttcaggaatagaaactaattatacatgtccaatacatatcaaacctgtatatgcttacaaatttgatgtgtgaatgcagaagaatctgagagagcagaggaacataagctatgaggggtcaagagtggcagatatatcagtgatggccccagagtatagccccgtgctgaaatggcttagctacagggcatctccagatgcgtttccgggaatgggcgaagagacagatgaggaggacagtgatatttctgaagatgatgaaatacaagactggtgacattcaccatcttaagtgtcttatatgttaggtcagatagaactggtatgatagttaacaacttaacatcaagggaaggaacactaattgttctgcttacttataaatagaaaatggagagtcacttctctatctaacaatgagcaacagcaaatttatccttggtttgatcaagatcaagcgaattttaaaccctttcttcagtttttttttggagcattttcaagttaacaaaacgatggggtcaggttcttcttttgccaaagagttggctcgagtcaaaacaagattgagaaacagaagcagcgaagaag

SEQ ID NO: 140948 - DNA, 692 bp, Arabidopsis thaliana landsberg
gttcgagatatctctggaacattccgctgggcaccgttcctggctctgcagaaagagaactcctttttgaccatgctgttacttctttctaaatacaaaatgaagagcatcccggtggttgatttaggtgtagcaaaaatcgagaacattatcacacaatcaggagttatacatatgctggcagaatgcgcggggcttctctggtttgaggattggggaatcaaaactctctctgaagtcggtcttcccattatgtcaaaggaccatatcataaaggtcagtttgtaatctaactcattgctccattgagagttttttttttccttttttaacagatcattatttctctttcagatctatgaggatgaaccagttcttcaggcattcaagctgatgaggagaaagagaatcggaggcatacctgtcattgaaaggaatagcgagaagccagtaggcaacataagccttagagatgttcaatttctcctcactgcacctgagatctaccataactacaggttaatacttcacaaatccttgtgatgatgatacaccgagttttgcagcattgtcaaatcttcaatcctttctctctctttattttaggtcaatcacaacgaagaacttcttagtatctgttagagagcatcttgagaagtgcggggatacatcagctcctatcatgagtggtg

SEQ ID NO: 140949 - DNA, 8672 bp, Arabidopsis thaliana landsberg
atttttaaaaaacaaattctgaaaattaacaattagagaaaaagaaaagaaaaggaaaaaaaaaaagatttctagtagaaagagagaagggcgtgaattcctgagcgagagattcttcgccggagtaatctctttgcgtgatcttaccggctgcttaattcgtcttcgcctgattcgttggtttcaaaattcgtctctctctttcaatcggaggttaattgtttttctgtttgggggtcaaagcgaagatggtgaacgctatggtggagagagcgacgagcgagatgctgatcgggcctgattgggctatgaacctcgagatctgtgatatgctcaatagcgatccagcgtatgtttccctctgctccctccgattttgtttttgttgttatctctctctctctctctctctctctctaccttttgttttctatacttctcgattagtctcctgtaaactattgtaactctctatacggatttggatttttggttcagtgagagagagagagagagttaacagtaagatggaaatcaaatttcgtttctttaccagagttagatatttccatgttttctaggaccaattggaatacttgtggcctactgttttgctcaatttagtcatctttcatagggctttaattgtagaagctctcaagttattttctttatatgctttgtgattggaagaaggagatttcagtgtgtgtactaactgcaccaatactatgtgatgtctgaaactggttcctgttttgtaggcaagcaaaagatgttgtgaaaggcattaaaaaacggattggtagcaggaatccaaaagctcagcttcttgccttaactgtgagctcctagataactgtctctcctttttattttccttgatggctacttcattgaaatagccactgttgtttctgaaacggtgcatttggatagcgtgtttgtttcacaaacctcttttattagtggaagttgacatgatcagagattacttgttcatgatactaatgtacatgatgaggattttaatgacttacaagttttctaacaagaatgataagctgatacattattttcacgttttttcatctttcttgtttgttttgcaatgatagttattcactcatcgtcatgctttttgttatgttctagctgcttgagacaatagtgaagaactgtggtgacatggttcatatgcatgtggctgagaaaggtgttattcatgagatggtccggatagttaagaagaaggtaatggttcttccaaattggtctctctttctctctcccttgctctgcctctctaatcctaattggtctgatgcatatagccggacttccatgtcaaagagaagattctggtccttatcgatacatggcaagaggcctttggtggccctagggcaagatatccacaatactatgcaggataccaggaattgttggtatgtctacataatttagttgtttgatatacttattttgggtttcatttttttttccttcagtagagtagtgtttctgattctgggtgtccagatgtctcatactgaaattttattacatctcataatgaattcttcttagatccttttgtgagttctgttagaaaatcttctactactcttgcctaaccaccagtgactcatgtccctttcagcgtgctggtgctgttttccctcagagatcagagagatcagctcctgtgttcacacctcctcaaacacagcctttgacatcttaccctccaaatcttcgtaacgctggacctggtaatgatgtgcctgaaccttcagcagagccagaatttccgactctaaggtagatatcttctgttgcaactccgcagttttaagttcataaatttttaacaaaagcatacaatattttgttgggaaaatttcaacgtccttgctatatctaacaaattgtcgtaatatatgtttagctactttttgttcaacgtccttccctagttggaagcctatatataggatgaatcgaagtaaagaggaatcaagaaaataatcacacttaagcaaaagccttctagcttttgaaaaatgcacgcatttgcagtaacggagtttcaattttttcttgtaagactcaataggcatgttcactagggtctgctagttttaactttgtgtctgtttgcttgctttatttaggacgtatatgtatgcctttgttgctcagtatttattgcttctcaaaattttattctgctgtatgtcaaattctttttcagtttgtcggagattcaaaatgcaaaaggtatcatggatgtgcttgcggagatgctgagtgcattagagcccggaaacaaggaggtaacacgatttagttgcagagtgtttgagctacctgtttacaagtgtaggctatagcccaaaatatactaaataatgatcattcttctcgtttttggatttattcaggatctcaaacaagaggttatggtcgatctggtggagcagtgtcgtacatacaaacaaagagtggtgcacctcgtcaactcgacttcgtaagagctctttattttcctcttcggttccatttgattatctctttcatgtctcatataagttatatttcttggggtacgagacgatttttttttttattctcatcttctaatatgcatacatagtaccactagattcagcaggaaatgattcgtgttttgtgtgggttttggtttattatggacgagggtggggagaggacttcattaagaattatctgaaatccgtacttgtctgagttaatgctgctacttacttcacgtttcagatagtatcgtgtggaataatacagttagaattgctattatgcttcagaccttatgtttctttgtactcttctttacctcgcaactttgtttttcagggacgagtctttgttatgtcaaggtctggctttgaatgatgacttgcagcgtgtcttaaccaattatgaagcaattgcttctggattacctggaacttcttctcagatcgagaagcccaagtccgagacaggaaaatcccttgttgatgttgatggtccacttattgatacaggggacagcagtaatcaggcgaacgggtacgttctaccaaacttgactgttatgcacccaagaatgttggataaaatcacctatttttggatatgggttaccgatcctagctgcaatcttgagctcgatatatggcttgcacgtccaaactattacaatctaggatgtgaaaacgaaaagttacttatgaatctgggagtaactttataatcattttaatataaacggtgttaatttgtctcttaaccaagtaagaactggggtttcaggccaagtgaccttgtaaaagttttttttttgtcttataacatagctattgatttatactgtccaacgttttcacagagctacatcgagctctggtaacggggttctaaatcagttggccctccctgcaccacctgtaactaatggttcagccaattccaaaatagacctcctcagtggcgatgatcttgcccttgttcctgttggacctcctcagccagcaagtccggttgcatcagatcaaaatgcactcgcccttatcgacatgttctcagataatactaataatccaagtcctgcaactgcaccaagtggcaatccagctcagaatattcctttgaatcctcaagggcaccaacaaccaaatagtcaagctggagaagctggattacaacaatccaatggatttgcgcctcaagtgggttattcgcagtttgagcagccatcatacgggcaaggagtctcttctccctggagcagtcagcctgcacagcaaccagtccagccatcttatggtaatatatataaacagtttttgtttttcacacatctggagattagattgcagtatgccaatgtttctctggttatggcaacaaggagaaagaatttccttcttttggattcagaagaatcagcttcaattgtgtctcatgtctaatcattaattgttctgtttttatggtaatcttgtaatataaaaagaaggtgcccaagacagtacggcatttccacctcccccatgggaaactcagctccaagactatagtccctctgcggagtcaggaagtccgttttctcctggaatgcatccaactcagaccgccttcacacatgctcaaccagttaacaacaacaatccatatcctcaaattccccaaaccgggccaccagtcaacaataacagtccatatgctcaaatgccccaaacaggtcaagcagttgccaacatcagtccatatcctcaaattccacaaaacggcgtgtacatgccaaaccaaccaaatcaggctcttgggtcaggctatcaaccacagcaacaacagcagcagcagatgatgatggctcagtactatgcccaacagcaacagctacagcaacaacaacagcaacaggcgtatggaaaccagatgggaggatacggatatggctataatcaacagcaacaaggaagcagcccatatctggaccagcaaatgtacggtttatccatgagagaccagacatcgcatcaggtagcatcatcatcatctaccacatcttatctgcctccaatgaaacctaagaataaaccagaggacaagctatttggggatcttgtggacatctccaaattcaagcctacaaaaccgacttccggaagagctggtaccatgtgaaaattcctccatccattcatcatttaccagtattcatctcctctatcctcctcagctaactctctttcttctctttgttaagcttttttcatcattgattttattaccctcttgggagatacatagatatacatatgtgttatgttcttccttataatttaccgttggttatgggtttgtatatttcttgtagagaaaagaaaactggaaaatcttttgttgagaactcagcgatttggggtttgtctcgagattctattttaggacattttaatctctcatttgtattttcagaccttttatttgttatatccattggcaataaagtttgatatcaattggatgagagttatggttcttaaatttgccaaaaggacagtttatgttctttgtatatgattgcaaccctaattccatagtcaatggagacatcaaaatgtcaaactatgcttgcattatataatctctttcgactcaatgatgtcaattaccgaaaaagtagaaaggaaggatttgttttgtttgcgactgttgttagttcttatgttgctcgtcgtaaacaagaaaaacctgccattcgtttgggtttttgaaatctagtctaacagaaagaaacaagagacaaatgaagaagagtaaatctagtccattcatcatcatcagtcttttggatcgtgcatatattaatttctataagagtctgtctaacaaaattgtcaatatgtccgagtggttaagggagattgactcgaaatcaattgggcttttgccgggcaagttcgaatcctgctgttgacgcattctattttgttttcttttcagctctcttcagaatttttgtaaatattttaaaagggaaaaaaatctcaaaatacgatttcaattaaaattgtagagattctcctcacgtctgtttgtgaaatgttgtctctaataaatttccgtaaattactgaaaacaagacacgagaaattgttaatttaacaaaataaaaatacgttacgtttggggtttgccacgtaactacttaccgccacacgttctcgtccttttcttcttcctctctgcattcttcacagagtttgtcaccaccaacaccaaacacacaatttcacattcttttgcatatttcttcttcttcttccattatggagatacggagcttgattgtttctatgaaccctaatttatcttcctttgagctctctcgccctgtatctcctctcactcgctcactagttccgttccgatcgactaaactagttccccgctccatttctagggtttcggcgtcgatctccaccccgaatagtgaaactgacaagatctccgttaaacctgtttacgtcccgacgtctcccaatcgcgaactccggactcctcacagtgggtaaattgatccattccattccatttctcttctcttgtttgttttattaagctccaatttcagtttcgtcttttaatttatatgttcttcttacgatcagtgggacttaaaaaattgctcctttaaatgcttcagtatgttttgagtattacaaagttgtaagattttatttttattcatttggtggctcaccattcgacgactacttttgaatttgagtttttgaaaaatgcaatttaacatcagagagttttttttttatggttgataacttattgtttaacttttgaaaaatgcagataccatttcgatggaacacctcggaagttcttcgagggatggtatttcagggtttccatcccagagaagagggagagtttttgttttatgtattctgtggagaatcctgcatttcggcagagtttgtcaccattggaagtggctctatatggacctagattcactggtgttggagctcagattcttggcgctaatgataaatatttatgccaatacgaacaagactctcacaatttctggggaggtaactccttgacccttaaaatgctgtgtcatgacaataagaaatcatatctgagtcttttctctacttctagtactaatgttcgttattgttgttaaagatctaagtcttatctgaattttgttacattttggttctggtgctttctcaacatgaatttgtatatatgactttaaagattgcttacctaaagtttttactcatgcatagatcgacatgagctagttttggggaatacttttagtgctgtgccaggcgcaaaggctccaaacaaggaggttccaccagaggttctcactcctcccttgttggttactttgttatctgttaaatagttttccaattgtatccggatagtgttctacttctccttgtagaaaatctcaagtttttgttactcttgctattctcttggatgttgatttgtaaagcatgtcgttttattgtaggaatttaacagaagagtgtccgaagggttccaagctactccattttggcatcaaggtcacatttgcgatgatggccggtaattatatgattctatgcacaacaagaattcactatattataaatattggatattgagtatttttgttgaaaatttctgtgtttaaatctgacttgacttgttttgtcagtactgactatgcggaaactgtgaaatctgctcgttgggagtatagtactcgtcccgtttacggttggggtgatgttggggccaaacagaagtcaactgcaggctggcctgcagcttttcctgtatttgagcctcattggcagatatgcatggcaggaggcctttccacaggtgtgagctttgcttgattgacttaaagttaataaatagacggttaagtttacttgcctagtactaacagaaaattaagaaagaaaccaccctctttctatcagcagaaactgctattgtagttcttattttttctcttgtatttgcagggtggatagaatggggcggtgaaaggtttgagtttcgggatgcaccttcttattcagagaagaattggggtggaggcttcccaagaaaatggttttgggtaaaacatttcatccttttgctacatttcttgttgcagactttagttagctagtggacctgtgtatacacccacatgtagtatacttgtttgatagctttatttgtcaatgtctctttacaggtccagtgtaatgtctttaaggggcaagtggagaagttgctttaaccgcaggtggcgggttgaggcaattgcctggattgactgagacctatgaaaatgctgcactggtatgcacttataagatcttcttaagcaatgacagtgagtattagaaggcagatagtttacaaaagctctgggcccttgtaaatctgcaggtttgtgtacactatgatggaaaaatgtacgagtttgttccttggaatggtgttgttagatgggaaatgtctccctggggttattggtatataactgcagagaacgaaaaccatgtggtaaatttgttttactagtttcattcagttttacttttgacatcatatcattcccttatggctagattccaacacccgatgaatgtcttgtgacaggtggaactagaggcaagaacaaatgaagcgggtacacctctgcgtgctcctaccacagaagttgggctagctacggcttgcagagatagttgttacggtgaattgaagttgcagatatgggaacggctatatgatggaagtaaaggcaaggtatgtatgctaatgtgatccaatccctgtagttaaaagtcttaacaaatcctaaggcagtgaaagaagattatgaacgtttgttatggttaacaatgatgcaggtgatattagagacaaagagctcaatggcagcagtggagataggaggaggaccgtggtttgggacatggaaaggagatacgagcaacacgcccgagctactaaaacaggctcttcaggtcccattggatcttgaaagcgccttaggtttggtccctttcttcaagccaccgggtctgtaa

SEQ ID NO: 140950 - DNA, 1237 bp, Arabidopsis thaliana landsberg
aaaatgtggaaaaagaagaagaagaagaaatgagatttggtgtttggtttgtgctagagcttttcactcttcagtgagtgattcacctaacccaaagcagccaccgttggagtttccgccttcgtgtgggacctacgagaatatcatatatctttaactgggctgtaataagcccaatttatatgttgggctttttaatagtaatcaattcaaacgacgacgttattctttatttccttaaacagccggagccgccgtgagagagagagagtcgggggagaagaaatgagcggcggaggaaacaacgtcgtgaacaaagtgttctacgcgacgtcgtatcatccgattcaagccggaagtatcgacggaactgatgttgctccacatgataacggcgtccgtcgagctcttctctgttataacgctggcttatgtatgtatactctctcgttctctctgctcctcttttcacttttatcgtttggtttctgaattcaaatacattgatttgggttgttttgaaagatgatccttctggtgattcgaaggctgttggagatccttactgtactctcttcgtgggtcgtctctctcatcacactacggaggatacacttcgagaggttaatgattgaaatttcacttagtttttgattttcgtgtagactatgttttgaatatgattataaaagtttcttcttcgtaggtgatgagtaagtatggcaggattaagaacttgcgcttggtaagacacattggtaagattttgcaattgctctacttatgacatcaacactttgctttatctttaggaaatttatcatctttctatttctgatggtttgttactttctaccaagatatttgtctaagcagaactgtgattacatatttcctctaagttccacattgtgtagtattgagtctcctcttcttgttacctttttttagtgacgggagcttcacgaggatatggttttgtggagtatgagactgaaaaggagatgcttcgtgcttatgaggtgctgtgatactaaattgcattttctttttacctcttgtttttgttgttgaaagctgtctgaaccacttactaaggcaccgcaatgtgattgtttcattaacatctccgtgtaattactggaaactagtggagtttgtttatcagagtgagaatttttttggtgtttctttagcagaatgctcatcattcactaatagatgggcgagagattat

SEQ ID NO: 140951 - DNA, 578 bp, Arabidopsis thaliana landsberg
atgaaagttagcggggataggttacgatcaccacactgcaaaaagtacgcgtacgatcatttctggtccattcacgtggccgtgtctagtctgtattgtacgttgcatttaaactctagttacgcctatacaaaatttaagcaacgtatttggttaataacttaatactccttcattcttctaagtaagtaattttatagctttagaatgttaattattctcttagttttcctttaattatacaacttcaactttgaatggcaaaatataacaacaataaagacatactagacattttgtaactatgtgtaagatgttaaccatcaatattttagtaatcaatatgtgttttatcatttttttttatatgaagtcgtgtactcgtgtgcttttgtgttctttaaacatattttgtgccagaaagattcgaatttgccaaaggaataattaaatcggatggtcaaacaaaacatgatatttatcactcgtgctctaatcttgatttgctgaaatagtaaaatagtaaaacatgtcatgagatccgtatctctcaacttaacactttaggtctaggttct

SEQ ID NO: 140952 - DNA, 1332 bp, Arabidopsis thaliana landsberg
ggtgatgggagagcagatgcgaccaagtcctttttgacagcttggtcattagcctgcggctcacgggctcgagccatggtctacgttccccgtggaacatatttggtcaaaaacctagtcttttggggtccttgcaagaacattataactttcaaaaacgatggaacactcgtggctccagcgaactactgggatataggtaattccggttattggattcttttcgctaaagtaaaccggatctcggtttacggtggcaccattgatgctagaggagctggttattggtcttgtagaaagaaaggtagtcattgtcctcaaggtgcaagggtatgtttacatcaaaactagcggatttgatttgttcatttattagctagttatattaatttgatttaattataattggacatggcttcttttgcagtctatatcgttcagctggtgcaataacgttctactaagtggtctatcgtcgtttaatagccagaatatgcacgtcacggttcatcattcttctaatgttcggattgaaaacgtaagaattagggctccaagtggaagccctaacaccgatggtatccacgtacagtcttcttctggagtcaccattagtggcggaaccattgcgaccggtgatgactgcattgcacttagtcaaggatctaggaacatttggatcgaacgtgtcaattgtggaccgggacatggaatcaggtaactaggaattcaacaataatcaacttaaatgcgatggttgagtgccaattaaagcaattttgcttgtaaatgtgatgcagcattgggagtcttggggattacgctaatgaggaaggtgtgcaaaatgtaaccgttacgagctctgttttcaccaagacgcagaacggagtaagaataaagacatgggctaggcctagcagagggtttgtgaataatgtggtatttcgaaatttgataatgaataatgttgaaaatccggtgataatcgatcaaaactattgtcctaatggaaaaggttgtcctcgccaggtatataatctagtcaatttagcttaactcaaatcctaaatctagtctttatttaatggaatcttattatgattgatcaaacagagctctggagtgaagataagtggagtgacttttgcaaacataaaggggacatcaacaacaccaatagcaatgaagttggattgtagtggaagcaatcattgcacagggcttaggttacaagacattaagcttacttacatgagaagatcatcagcttcttattgtaggaacgcccatggacgagcctctggagttatggttccaaggaattgtatgtga

SEQ ID NO: 140953 - DNA, 430 bp, Arabidopsis thaliana landsberg
cacaaatctgcaaatcttcttcttcttctgtcttcatgaatttcaagtctaacaattcctagccgttaacaatttgacggcacaattcttcattccttgtcgtgcccggaagtaaaaagatgatctttttggtttctgatgagataaaacagagatcttgttaacacttataagcagacccaactcgggaagctatggccgctattcgttttgcggcggcgattctgatttgctgtttattaccggcggcggttttgtcttacggtttcccggcggcgttgaaacttgaaagagttattccagcgaatcacgaaatggaacttagtcagctcaaggctcgtgatgaagctagacacggcagattgttacagtctttaggtggagtcatagattttcccgtggacggaacttttgatcctttcgttgttgg

SEQ ID NO: 140954 - DNA, 1872 bp, Arabidopsis thaliana landsberg
atcacgtttctctcactctctctccttcgcttgtgtgtttaagctaagccgttagtcgttaaacatctcatatcctaaaacgccgtcgttttagctatggcgttgagctcagctacgcttagacttacctctctgtcgttctcggcgaagaagacgaatcgaaaccctagaaatccagctctctccttcaccatcactagctcatcgtcctttgacgaatcacccaaaccttcttctctcgccacttcctcttctacgtcacctattcgcgtctcctctagttctacccccaaagctcgattcatcgctcgtcagaaacaatccgtctccgttcgtcagctacagcgacctctaagtaacttcagcgcgattctctctgatctaaatttctgtttcctgtggatgattaaatctggatcggattgtttgattttgaatttgctttttgtttatggtttgcagttgagtatatgagcttacctgcgagtcagtactcggtgcttgatgcggagaggattgagagagttgatgataacacgtttagatgttatgtttatacgtttaaattcttcaactttgaagtctgccctgttttgcttgtcagggttgaagagcagcctaatggctgctgcatcaagctcttgtcctgcaaggtaattcttcttttgttcttttggaaatgattgaatttgcaaacaaagagaggaacttgtggcgtttagacatatgtcaaatcaaatccagttatgatttgttaagactgtgatgatttttgtattttcttgtgccatatagcttgagggatctcctgttgtggttgctcaaaatgacaaatttgatggtaagcatatccctgtatacgcttcactttgttaacccgttttgaaagtactgccatgttgtcaagttttgtgtactgaaattatttaaatttagtgatggttgtgtgggcttaacatttattattttctagtcatgcagcttctatggtgaaccgggtatcatgtgatagcactcaggagggctcatcagagcaacaaattacttcagatgcagtcattgaggtagctaagttcttcattttttttccttttgcttagttaatcagtgcattgctgtggtatctctgacttacttggcgattgtaggtcaatatcgagattccttttgcatttagagtcttcccagtgggagcaatagaggcgactgggacacaagttcttgatcaaattcttaaactcatgctacctcgatttttgtcacaggtatgcaggaaaacagatttgtattattacgttttaattgcttattctgcatcaacgaggtccgttaagcgatcatgtatttctctatggcactatggttttttagatagcaagatcgtcctgcttgagaggattaggctgacatctgaggtttcctgttgatatttgagaagatcttttatatttgagctgtttgatgaggcaatataacatgttttgggcgttatttatgttggtaaagcacatgttgaaccaggactcaggtttcagattagcctaggcttctatggtttcctctgtaaaactggcttgttgattctttatatttatgtgctcctccttctgcatatatgaacataaatacattccattgcctgcaaaatcatcccaacattaatcttatcatgctcttttattcattttgcagctctcgaaagactatcatgcatgggctttgggagacacttcaaggcaacctcttgggaccggtgagatctgatagtaaagcaaaagctaccgtacgtacctggttcaacgatcctgtgccttctcgagttcaaataggggatgatagcaaaatttcgatctttttaatgtggtattcggg

SEQ ID NO: 140955 - DNA, 622 bp, Arabidopsis thaliana landsberg
tgcgcacctctctctcttaatcctttatcctgcgcaccaccaccaccatcttcttctccggcgaaaacaaacccaccgccatggggaaaggtcgtgcactttccgacggagtgatcaaaaagatcatcctttcatacacctatgtcgcaatctggatcttcctcagcttcacagtcatcgtctacaacaaatacatcctcgacaagaagatgtataattggccattcccaataactctcaccatgatccacatgggtttttgctcttccttagctgtgattctcatcaaagtcttcaaagtcgtcgagcctgtttcaatgtcacgcgagacttatctcagatccgtcgtaccaatcggcgcgttgtactcactttctctctggttatcaaactctgcttacatctacctctctgtttccttcattcaaatgctcaaagccctaatgcctgtagcagtttactcaatcggggttttgttgaagaaagagactttcaaatctcagactatgactaacatgctttcgatctcgtttggtgttgctattgctgcttatggtgaagctaagtttgatggttggggtgtttttcttcagctaggtgctgttgcttttgaagccactag

SEQ ID NO: 140956 - DNA, 1144 bp, Arabidopsis thaliana landsberg
tttcgatttaaattcgcacaatttcggttcattagttgcttacatgcaaaaatactctctttttaaattgaaatcagatcttgagaaaccataaaaattcaaactttgtttgttcttttcaagctattgtggttagaaagataaaagcttgaaacttgcggaccaatctttataggttaccagacactaatgctgcattgtcatgtgtgtttgcagattgtccattagatttcagtggatcaaatttcactctagtagctactgtgtgctccaacataaccaacagaggcaaatgttgccgctacatgaacgcttttgttgcggtgtccgtggctcgttacgcgaacttgtcaactaatcttggagtcacatcagatttatctgaaacctgcattgcttccatctctagagccatggagggctacggagtctcgagaaacgccactagtttctgcggtttgggaaccaagatccttgttaagtatgactgtgacggtcgaaccactgttacacaaatgcatcagtctccgggatttggacatgtttcaagaaactgcagactcccattttcgccgggacaccaatgcagaaagtgtttgaactctggcatcacttaccttcgtaatctcataggtgcagagactaataacattactctgagtacttgtcgtgatgcgacttatgctacattagcaagccgaatagacgatacatcagctcttgaactccttagttgtttctttcaagtgacagagcttaacattccttcaggttagactcatgactgcaattttcttagtatctcatcagtttctttagtaactcattgtgtatcgacagagtcattttcaccagtggcaagtccagaaccttctccaagcacggttggtggtattagcccaagcaacagtgattctcaaatgactacaagtagaagcaccaatccatatcacttaacaatggttccaaccattgggattgttgttacagctgttgctcttacgatgcttgtagtcttggtaattcttatccgtagaaagaaccgggaactggatgaatctgagagcttggatagaaagtcaacaaaatcagttccttcttcccttcctgtattcaagattcatgaaggtgtgaaaatagagag

SEQ ID NO: 140957 - DNA, 1270 bp, Arabidopsis thaliana landsberg
attttccgctcaattcgatcttacatgttaacaatggttggtctaactccagctgaggatcgttcagagattgcctttttcgacgtcgagacgacaattccgttccgagttggtcaggggtacgcgattctggagtttggatcgattctggtttgccccaagaagcttgtggagctgaaaaactactctgttctggttcgtcctgctaatctcaacctcatcacgcctcggtccgtgaagtgcaacggcatcaaacgcgaagacgtcgaatcagctcttacctttgcagatatcgccgacaccgtctacgatattctccatggtaagatacagaagaaactctcttcttttcaagaattttgggacacaattcgagctcaaagttgttaactttggagcctgttttgttcaagtgtgttgatgttgtggtttaatggttattgtaggaaggatatgggcaggtcataacatattgaagttcgattgtccaaggataagagaagcatttgctgagattggacgagatccaccagagccaaagggcaccattgactccttggctttgcttactcaaaggtttgggagaagagctggtgatatgaaggtaacaattttgctctctggtcctgacttgtttattgttttgagatggtttcttctcgtatactcaaagagtcatgattgatattcatctgtgtattttgaatttgcttgatggaattcgaatttggcggttttgatggttccttattctgttttcctgtggcctttgtttgaacagatggcgactttggctacatactttggacttggaaaccagacgcataggtaatttatatatgtgagtttttttgcattacggtgttttaataggccggttgagttctaatgctttgtacactatgtttatttctatctcttaaggagtctggacgatgtaaggatgaacttcgaggttctcaagtattgtgccactgttttgttcttggtatgctctctttacttcttcgagatggattatcgtgtgttgtgtgtacctgtcgctctgtagaatagattttagtgatgtaactatgaggagctaattcagaaacatgccatttttcaacaggagtcaagtcttccagatgaacttatagagaactcggttactactactactcctgaaactagttcaagaaggcgtaggactataaaaaaatctcctctgcaatctcccactgatcagcagacaggagagaacatgacaactatacctattttatcattt

SEQ ID NO: 140958 - DNA, 115 bp, Arabidopsis thaliana landsberg
aggcggatgaagaagaacaagaggtgttgcggttaaaaatagaaacaggaataggagcttataatgaaactcaaagccctactttgagcatcgactctctttactaataatactt

SEQ ID NO: 140959 - DNA, 2458 bp, Arabidopsis thaliana landsberg
atgtgtgagaatgatcatcattttgtcgagtggaaggagcattttgtctcacaagagcgagggaaccgtgttgttcattacttcctcaaggattctgccggtgaatctatcctagctgtcattggtactgagagaagtgttaggcacatgttctatgttgtctctgaggagtttgtgcgcattcatggtcctgagaattcaattcattctggcttcaaatggaggtcgagaagggaagttgtggattggctcacttcaatgctgtctaagcagagtacacaaggaaactggtcgagtacgcatttatctttatcttttaccatatgtgacaaattgtctgttgagtggagaaggaatgaattcttcctttatgttggtctcttctaactttataactgattattctaaagcacttgttatattgtcatttacagagtcaccaaaatgtgagtcaggggaatctaatggatctcccgaatttccaagcaatggatttactgctcagcgagctcaagcaagtgaagaggtgatgtttagctgcttgttgctctcatataattgtcactgcattttactttcctgttatactgatgggaaaatctctcttacaggtccgtcttcccataaacttgattattcacagttgggagattatgtggtcaggagctccttggatgtgtggtaaacagctcaaacattacccatcattttgcagaaatgggacaacaataggggtaagttgaagacttggcatcagtgcatgcatagttcgatatatgttgactgttcttgtgatttgtatctgtaaagatcttggatgagactactcacttggaggcgtaattcttcttttggattttcaggttcaatcttttgtctttgtcttgagcaaaggggaggatcggtacgttgcatatctggaagatatgtatgaggataagcgtggcctaaaaaaggtcaaagtgaggtggtttcactacacaaaagaagtgaagggtgcagttgctctcaagaacccaaacccaaaagaggtttttatcacccctcattcacaggtcatcagtgcagaatgtgttgatggtcctgccactgtcttgacccgtgagcattatgaggagtgtgtggcttcctttccgaattctttattggcaagggtacacatgtgctatcggcaactcaggaacagcaaagttaaaccttttgatttgagtaaattgcgtggatatttggaccaaccgattatgtcttgcttaagttctatggaggctggtcctgtagactgtgcgatgaatatagaggaagatgaagaatggagtgagggtgagaatgtaatggttggtgctgagagaagcatgaaaaaacgagcaagaattatgtctgatcatctgttaacaacttacgaatcttcatgtaagagactaaaacttaatgcctcgggcaaaagatttccttcaccaaccaatgttcagaaacatccttgttacaacggagtggttaagactgatgcaaaaatagagtttctgtgtcaagatagcggtattagaagctgttggtttagatgcactgtcctggacgtatcaaggaaacaggtaaaactccagtatgatgatatagaggacgaagatggatatggaaaccttgaggtatatatttgcttccacagccattggctgtttaattttagtttctggaaatggaagctattttaatcctatgtttgggcacctaattgtgttttttttcctcaatgttttgtgtaagaattgggtgcgggcttttaattctgctatgcctggccaggcttggtataaggttgtccaacccgccaaccaatcgaccttgctcctcgagatgttaaaacagcatactttgatcttacaattggtgaagctgttgatgcatggtggaatgatggttggtgggaaggtgttgtaattgccactggcaaaccggatactgaggacttgaaaatatatatccctggtatgatttagtgtgttcctatattcatcttttactctctagttgcctccactttctccatctctgccttacgactaacatgtgttttgttttcacggtgttaggggagaacttatgcttaacagtgctcagaaaggatattcggatttccagagactgggtgggagatagctgggttgatatcgatcctaaacccgaaatactcgctattgtatcttctgatagtagctcggaatccaagctttccatgttgtccactctttcaaaagacacaaaggcaaaacccagtgctatgccaaatattgttgaggaggcagaacctgaaggtgagaaagcgtacaattcccttttaggagaacagaacaaagagcataaagatgtggtagttaaggaagatgacgaaaacaaactttcaaaagaagaggataaagaggttggaagtaacgaaactaaaacctatgtcaaccaagaaaat

SEQ ID NO: 140960 - DNA, 3885 bp, Arabidopsis thaliana landsberg
aacagttaatgaggaaaatatgtggcgattcagaagacggtgcgattcttgtttttctacctggatgggatgatataaataaaacaagacagagattacttgagaaccctttctttgcagatagtgctaaattcgacattatatgtcttcactcaatggttccagcaggggaacagaagaaagtttttaatcgcccccctccaggttgtcgcaaaattgtgcttgcgacaaatattgctgaatcagcagttaccattgatgatgtggtttatgtgatagatagtggccggatgaaggaaaagagctatgatccttataataatgtttcaactctccaatcttcttgggtatcaaaagcaaatgcaaaacagcgtcagggtcgagcaggccgctgccaacctggcatttgttatcatctctattctagacttcgggcagcctctatgccagattttaaagttcctgaaatcaagaggatgccggtagaagaactctgcttacaagtactgctcctcatttaatttctagttaatagcaattggttctatgctgtgagccgttcgtgcgtatgcaatctcttactgatcattgccctttgattacattctcaggttaagatacttgatccaaattgtaaaacaaatgatttccttcagaaactgttggacccgcctgttgatcaaagtattgcaaacgccttaagcatactacaggatattggtgccctgacacctcaggaagagctgacagaacttggagagaaatttggtcatctcccagttcatcctctgattagcaaaatgctattcttcgctgtgttagtaaactgtctggatccagcacttactctggcatgtgcagcagactacaaggaaccatttacgatgcccatgtcgcctgttgaaagacagaaagctgctgctgcaaaacttgaacttgcatcactttgtggaggtgacagtgatcaccttgcagttgttgctgcctttgagtgctggaaaaacgcaaaaggaagaggtctttcagcagagttttgctctcagtactttgtctctccaagtgctatgaagatgttggatcaaatgcgtagccaacttgagtcggaacttaaaagacatgggattattcctaacgacatttcaagttgtagccaaaattcgcgtgatcccggtatactccgtgctgtgctagcagtaggattgtatcctatggtgggaagattgtgcccagcttttggtaataatcgaagaactatagtagagactgctagtggtgctaaagttcgtgtccattcgctgtcaaacaacttcaacttgtcgtctaaaaagtatgatgaatctttactcgttttcgatgagatcactcgtggagatggaggcatgcacataagaaactgtactgttgctcgtgatcttcctttgttacttatctcaacagagatagctgtggcccctacagggagcagtgattctgatgatagtaatgaagaagaagaagatgatgaagaagtagcagctaatactaatgaagaagtagcagctaatactaatgaagaaggaatggacatacataaagaagagagtaggcgtggagcgaaaatgatgtcttcacctgaaaattcagtcaagttagtagttgatcgctggctgcctttcagaaccacagcccttgaagttgctcaaatgtacattttgcgggaacgactaatggcttctattttattcaaggtgagtttagaatccattatgcttaaaactactccatacttttaagggttcttttatttgatttgatttccaactgtttattggcaatttgtaggtaacacatccacgggaacatttgccacctcatctcggagcttctatgcatgcaatagctggtattctctcatatgatggtcatgcaggactttcatgtccaccggagtctatggtaccaaaacattcaaggactgagatgtatgataccggtggatgggaagagaaaccaaactctttccttaactcactcttttggtctctgagtttgaaagagaacaagcatcctagtcacacgaataggaatcagcagcataactacaacatggctccaacagaagctgcatcaatacctaggcagcaaaactataagcaaagaaatcccaaagcaaccaacaataccgattcgggtaagaagaaagagaagatgtttgttaatcccaccaataggattaaccagcctgaagctgcttctacgggtaagccatcaaagcacaaatcagccaacagttcgggttcgagtaacaagaaagagaacatgccttctgatcaggcctatgggaataagcaacataacacagttccaagagaagctgccgcaccaatggcgaagaatcaaagcagtaagaaaaccaagaccaggtcaggcaacaactcggattcgggtaagaagaaagaacagtatattccaaagaggcaacgcgaagacaaagcagaacagaagtgagatgcatgaaaagagattgtttttggttttgggttttggtttgggtttgggtttgggtcccatgaaagcagaggaattgatgatgtataaacaattcatgtttggatccatgtctcttcggtggttcttggctcaaagtgtttctatttatctaatcatgaaacggagtttttaacggtttcatgttgctctaatatgttccagagtattgtaactattgttgttgttactcataaagcctcttctagcagtttcatactttcattttacttccagtgagatcaaacacgtcgaaattcattcagaccagtaggctcacagccacgtggcaagatggagcacttatacaaccttatcccgacatccaaacagaagattagatgcccaaaaatccaaaaattagccaataaacaactcttttcttaaactccatatttacaaacagtttcatcactttggtcttcaggttgcaacaagaaagagaaaaaaagagaatggcgtacagcccgagcttcttacaccagagtgcacttgcctcctctgccggacgatcatcatcttcatcttcatcgtcgtttcgtcatgtgtccctctcgagacccgtccatttagtatgtagagctcaacagtctcaggaaaacaataactctgctgttttccgccgtcttgcccttaccttactcgttggtgctgcagccatcggatccaaagtctctcctgcgccgcctatggtgaagccggtatgatcccactttctctatatacattttgagcatatatcaatgagaatcatgaagcaaatcttgattgttgttttgcagctaatgtgtttggtaagccaaagaagaacacagatttcctgccatacacaggagaaggattcaaaatccagatcccatcaaagtggaacccaagtaaagaaattgagtatccaggacaagtactaagattcgaggacaactttgacgccaccagcaatgtctctgtcatgatcactcctacagacaagaaatccatcactgattacggttctcctgaacagttcctctctcaggtttcactctgtttttaaagcaaaaacggttcaatcagacgataatcaccacaacacagctgatgataggtttctggtttctgcaggtgaattatctcctcgggaagcaagcttacgtcggcgaaacagcctctgaggtaatttccttttctagttggtgaaggagtttttgggttcaaacaagaaccaataccttaaagagtgtgactgatcatttttgcagggagggtttgatgcaaatgcagtagcaactgcaaacattttggaaacatctacacaagaaatcggagggaaagaatactattacttgtcggttctgacaagaacagctgatggagatgaag

SEQ ID NO: 140961 - DNA, 2421 bp, Arabidopsis thaliana landsberg
atggcggctttgtcttcctccgtcaccacccgatcatatcattccggttatttggcttctttctcaccggttaacggtgaccgacatcgatcactctcgttcctgtctgcttctcctcaaggattgaatcctcttgacctctgtgttagattccagaggaagtctggtcgtgcttctgtctttatgcaagatggttagtttcattctatctttgttttccggattagaattgaccaaatctaaaaccaagcttatttattaactgcacttgaatctctgaatacaatttcattaggcaattaggtgtatatgtgaattaaatgtgatattgatatcagtagaagaggggttgttctgacatttggattgggtgttaggtgcaatagtcactaattcaaattcatcagagagtaaaacttctcttaagggattgaaagatgaggtgctatcagctttatctcaagaagcagccaaggttggagtagaatctgatggtcaaagccagtcaacagttagtattacggtggttggagcctctggtgatcttgctaagaagaagattttcccggctcttttcgccctttactatgaaggttgtctccctgaggtattgccaagaagatggttttcttctctatgatttgctattttgatcgcctgtgtgtgtgttttgcacattaaagtctagtgattgacaatttgattttgttgtgtggcagcattttacaatatttggatattctaggagtaagatgacagatgttgaacttagaaacatggtcagcaaaaccctcacttgcagaattgataagaggttagcaattgtagctactgaaaagtttccggtttttgtttgtcaagacaagtctttatgcttcaattcagttggatatgggtttttgaagataattaactctgagtattatgtcattgttccatttggatttcagggcaaactgtggtgaaaagatggaagaatttctcaagagatgtttttaccattctggtcagtatgattctcaggaacattttactgaattggataagaagctcaaggaacatgaggtattgaacatttgttctcttcaaatcagtaaactagaaaattggagtctacttcttttacatagtggttcttatcctttgtatttctgtaggctggaagaatctcaaaccgcctcttttatttgtctatccctccaaatatatttgtagatgctgtgaaatgtgcaagcacttctgcttcatctgtcaatggatggactagggttatcgtcgagaaaccttttggtcgagattctgaaacctcggctgctttaacgaaatccctcaagcagtatttggaggaagatcaaatttttaggtgaaagataaatgcacttatagctttgttttgttgcaatgataatactattggatgcttggctgatatgatattttgttgcaatgatgatactattggttgcttggctgatatgataatgaaaatgtgttcttacaggatagaccattacctaggaaaggagctagtcgagaacttatctgttcttcgattctcaaaccttatatttgagccgctatggtcaaggcagtacataaggaacgtgcaatttatattttctgaggatttcggcactgaaggacgtggagggtaaagtgcctgtttaccattatctagctattcatgtctcttctgtattgaaagcttatgtttccttcctgttctcttttgcttaattcaggtactttgacaattacggaataataagagatataatgcagaatcatctgcttcaaatcttagccctctttgccatggaaacgcctgttagtttggatgcagaggatatcagaaatgaaaaggtatgataatttctttcactttgcaatttgggtttgattcaagaaaacatataatgaaagtctcatgcacaattcaggttaaggtgttacgttcaatgaggccaattcgagttgaagatgtggtaataggacaatacaagagccacacaaagggaggagtcacatatcctgcctacaccgatgataaaactgtaccaaaaggtagtctgactccaacatttgcagctgctgctcttttcatcgacaatgcaagatgggacggtgtgccctttttaatgaaagcgggcaaagcactacacaccaggaggtaggtacctagaacttcgcacttgtggaattttgtatattgactcttactgataagtaaaattacagtgcagagataagggtgcagttcaggcatgttccggggaatttgtataaccggaatactggttctgatcttgatcaagctacaaatgagcttgtgatccgtgtccaaccagatgaagcaatctatttgaaaatcaacaacaaggtccctggtttaggaatgagattagatcgcagtaacttgaa

SEQ ID NO: 140962 - DNA, 1127 bp, Arabidopsis thaliana landsberg
actcgacattcaacaatataatgagaatgatgaccggaaaacgatactacggtgaagaaacaaccgatgaggaagaagcaaagcgtgtccgtaagttggtagcagatgttggggctaacacgagttcaggcaacgccgttgactacgtccccatcctcagactgttttcaagttatgaaaatagggttaaaaagttaggagaggagacagataagtttttacaaggtctcattgacgataaacgtgggcaacaagaaaccggtactacaatgatcgatcatttgcttgtcctccaaaaatctgatattgagtattacactgatcaaatcatcaaaggcatcatactggtttatttcttcttcctttattttttctattaattattagatcttttgttaactttgattataagtaagataaattgtctgatgttattatgttaatgcagataatggtaatagcagggactaacacatcagcagtcactctagaatgggcactttccaatttgcttaaccatcctgacgtaatatctaaagcgagagacgaaatcgataaccgggttggtttagaccggcttatcgaagaagcagatcttagcgagctaccatatctaaagaacattgtccttgagacccttaggctacacccagctacaccattgctagtcccacacatggcatcagaagattgcaagataggatcctacgatatgccacgtggtacaacgttgttggtgaatgcatgggccatacatagggatccaaacacgtgggatgatccggatagctttaaaccagagcggtttgagaaagaagaggaagcacaaaagcttctggcgtttggattaggtagaagagcgtgtcctggatcgggtctggcccaacgaatcgtgggactagctctcgggtcattgatacaatgctttgaatgggagagagttgggaatgtggaagtggatatgaaggaaggagttgggaatactgtacccaaagcgattcctttgaaagctatttgcaaagctcgtccatttctacataagattatttcctaaaattgttgaaactacgaataaaagatgtgtgacatgttaatgcaaatcaatgattctctctacatgtaaaatc

SEQ ID NO: 140963 - DNA, 961 bp, Arabidopsis thaliana landsberg
tgcagtagtggaaaatttttcttgcccattttgcttgattccatgtggaggtcacgaggtaggcactaattaattagaatcaagctttctaataatatctttcatttttaacaacgtgtattcagaagtttcatgctcatttagtctatctttgctaaaatacaatgtcttatgtttgtgcacagggcttgcaacttcatttgaagtcatcacatgacgcctttaaatttgagttttatgtaagtaaaaatttttagtgatctaattttgtttatgtttttgcatgaaattgtatgtaacaagagtactctttatctattttagcgggcagagaaagatcacggaccggaagttgatgtctccgtgaaaagtgatacaataaaatttggggttagtagtaaacttgatacataaatgcaaaattttatgtggatcagattttattcatgttagtcataatgttgaactcaccatgatgttatttttcaggttctaaaggatgatgtaggaaatccccaattgagccctttgacgttttggtaaaatttcgaatgtctttctctagtggttagcatatgtttcagcatcatcctctaaaagccaaaccataatctatgcagctcgaaaaatcgtaaccaaagaagacaaagagatgatagcaataacgttaagaaacttaatgtactccttatggagttggatttagatgacttacctcgtggcacagaaaatgattctactcatgtgaatgatgataatgtctcatcgccaccaagagctcactcttccgagaagattagcgacattttaaccacgactcaactagcaatagctgaatcctctgaacctaaggtgcctcatgtgaatgatggtaatgtctcatcgccaccaagagctcactcttcggccgagaagaatgaatctactcatgtgaatgatgatgatgatgtctcatcaccac

SEQ ID NO: 140964 - DNA, 1040 bp, Arabidopsis thaliana landsberg
cattcattggtggatttgccgcagccatgaactcatatcccctttgggtcttgaacgttttacctgctacaatgaacgataccttatccggaatttaccagaggggcttaaccggtgcttatcatgattggtaagcgaatacgatctctttctcaaattttcatcctttctcacttaagcttagcaccgatagtaaaacttgttcctcataggtgtgagccattctcaacatatccccgtacttacgatctgctacacgcggaccatctcttcactcactataaaatctacggtgaaggttgtttactagaggacatcatgcttgagatggaccgcattatacgccctcaggtattttacaaagcattaaccttatcggtctcactaccatttagtcataacccatctcatcttgttatgtctgtgactggaaataatggttaatgcggattttggggtttttgcagggatttatcattatcagagacgaggaatcaatcgtctcaagcgtccgagacttggctcctaagttcctttgggaagttgaagcacatgagcttcaagacaaatacaagaagacagaaactgttctattttgcagaaagaaattttgggcaatcctttgaaaaagtccacgtgtagaaattcttttttacttgtcttggttattactaagaaaaagaaattacagattacttttgtaatgtttgttcattgattaactgtaatagatgtctccttgtacatgttttgtttcgccacacactctcataaccaaaactagaattagccgatgggcctttttttaaacttgtaaacatttttgtcccacatcgaacactctgcttaagcccaaagtgagtccatttgttctcttcttcgtcttcgtcattcttagtgccttgttcaatgtcgaatttagtctacaacggaaaaacccatcgattattccccggaaaaagcatctaatccttgcattcggctctgatttcttcacgagttcgcaagatcaagttgttagtctacagatttttgttcag

SEQ ID NO: 140965 - DNA, 790 bp, Arabidopsis thaliana landsberg
cagagagccaaacaaaaaagccattgaagctggaagacaaaaaaaacagaggagattgaagaagaagagggagtaagaagatggagagttacctaaacgagaatttcgatgtgaaagcgaagcattcttcagaggaagtgcttgagaaatggcgtaatctctgtggcgttgttaagaaccctaaacgtcggtttcgtttcaccgctaatctctctaaacgctatgaagccgccgcgatgcgtcgcaccaaccaggttttgtctcttttctttttcttctatgtcatcgttgttaatgattttgttgaaatcttcgaacttttagatggattttgtgtatagcgatgaaggatcttaaaaactttctatatacaggagaaattaaggatcgctgttcttgtttctaaagctgctttccaatttatctctggtgagtttatatgtgatcaaagttgctaatttgtgtcaaagtttcaatttttgtttgtttgtttgtttatgtgagtttttgttgtaggtgtttctccaagtgactacactgtccctgaagatgtcaaagctgctggctttgagatttgtgctgacgaattaggatcaatcgttgaaagtcatgatgttaagaagctcaagttccatggtggagttgatgggcttgcaggtaagctcaaggcatctcccacagatggcctttctactgaggctgctcagttatcccaaaggcaagagcttttcggaatcaacaagtttgcagagagcgaaatgaggggtttctgggtgtttgtatgggaagc

SEQ ID NO: 140966 - DNA, 3248 bp, Arabidopsis thaliana landsberg
atgaagcgtagcttgggttcaaattcttcaaacaatagtggcagtggaagtaacaagaagtctaagaagaataataatccgagcaatcagaaaaccctaggcgcggcatggggcgctgcttcttctcgttcttctttccggtcttctcctttctccgatttcggaaggtctttctatcattctctgccattttagtgttgggtagtggttagattttgaaattcccatgtaaaagttgaaactttccctctgaaaagtgatgttctgagaaagattgaattttggaaattttatgaagttagaatgaagtaagatgcgttaagcattgttatactatcgtggttgttgattatttttttatgtttttgatgttagttacatggaagtgaaaaataggaaacttcagaaccaatttgagactgaggcttctgctgcttctcgtggtgtttcgggttctgagaaacttattttccaaggggtttcaatctttgtggatgggttcactattccttctcatcaggtttaagctctattgctttggtttctacccattttcaattttgttggtttctagttctttcctgatttggaatggcttaactcttatatcgtacaaactgttgcaggtgaataaaccttagaatttgttgtagtgcagttttgctggtgggttatatgtgatttaacagtgtctagatctgtgtaggagttgaaaggatacatgatgaagtatggtggaagatttgagaactacttttctaggcgttctgttacacatatcatttgcagcaaccttccagatagtaaagtcaagaatcttaggttagttgtttctttaaaattcttcgctaatttcttgcaagttcgtgtcttataatggattgttgtttccaatcaggacattcagcagaggattacctgttgtgaaacctacatggatagtggactctatctctgccaacagacttctgggctgtaagtctatacaagatgatttagtttcagttaaatcatgtatacataagtataaatgtttggatttgatcattcgtctactgtcaacttcgtatgcattcatttatcttgcacacaatctatttaatcatctgattcaatgccatcgcatcacaggggttccttaccagctagatcaactaaatgatacccagccaaagttgtctgccttttttgcacccagaagccatttgacccctcagatggcttcgccggttacatcttttcagcctgatactggatacagtgaagctgaagaaggaagttcaattagagcagatgattcaaaggaagcaagggaccacatcgatgatgaaattgatggcgtttatatcgagaacactactccagaactgacagaacaaacaggaactggtgatctgaaatcttctgaaatgaatgcataaggacttggtaattatgacatagaagaaaaagaagttagtagtgaacttcaatccactactaatcttcattccacttcagacaacaagtccgttcatgcaaatgggaagaatggtggcaaatcaattgcaactgctgctggatcttctacaaggcgtcattcaactctcgaggaccctaattttgtagaaaactactttaaggtacaacttacaatagattcattatctgctggtttcttctgaaaaataaacaatgatctctgcctgagatagtacgcctgtattaaaagtcctttcagctgaaagtaagagtctcattgccagtttatataactacaaataattggatggatagtattgttccaatgaagattctgaagatgctttctctatatgtattttttttgttctgcagaattcaaggctgcattttattggaacatggaggaacaggtaccgtaaaagatttcatggctcttccaatggacttaaatgggcagattcaggccagaatacagctgaaatggccaagaagtcaaccattatccacattgatttggtaatttcctcaatctaggctattttatttatcttctgctttctaaaagtaaaggaaataaaagaaagctgtggtcatattcttcgattctgcatttttccgcagcacaatagctatcttagcatgaaattggccataaaagacagtgaaataaatgcttgaagtttgcgattctaggattgcattttttttgttctgactttcatttgttgcattctagttatttgaatctgtgaaatatttccaggattgcttctttgtgtcagtggtaatcaagaaccgtcttgaattacacgacaagccggtagctgtatgtcactcagataacccaaaaggaacggctgaaatttcatctgcaaactatccagcgcgggcttatggtctgtcttatacgaaagtaatctctcttaagtttggttgcgctcggggtcctgacctttctgtttttatactaatttgatgtcattttctttatctaggagtgaaggcaggtatgtttgtaagacatgcaaaagacctttgccctcagcttgttattgttccttacaactttgaagcctacgaagaggtacttgttagaattgagtgcctattgtatattgtcacatccgtccagcttgtttgacattgtaaatcaattgcaggtagctgatcagttttatgacatcttgcataggcattgcagaaaagtccaggtcagccttcaaaaagatattttttcagttgctggtgtttatttattgttaacatttatgtttattttttggaatttaggcgctaagctgcgatgaagcgtttttagatgtctcagatttgagtgatgtagaaaccgaagttttagcctcgacaataaggaatgagatccttgagactactggatgcagtgcaagtgctggaataggcggtactatgctaatggctcatcttgctaccagagttgctaaaccagccggtcaactttatatttctgctgagaaggtgcttactgctttctataaacagctttctatcttttggtatatgtgtttgtttctgactcgtaatcagtggaaagaggtatatgagcagtggttactggttagtttcttgattgcagaatccattttgtataaatttcggttagctgatagtgtctgccatttttgcaggtagaggagttcttggatcagcttccagtcgggacactacctggtgtaggttctgtgttgaaggagaagctggtgaagcaaaatattcaaacctgtgggcagttacgtttgatttccaag

SEQ ID NO: 140967 - DNA, 1326 bp, Arabidopsis thaliana landsberg
aagaatggtgagttttgcaacacatgcaaaggatctcgaggaaaaccaaaaccaaaaccaaaacgatgaggaagaaaaggattctgtcacggagaaagcacaatcttcagctgaaaagcctgatactcttggagatgtgtccgacatatctgattctgtggatggttcggctgacattcttcagcctgatttagaagatagggatagtagttctgttctttgggatactgatgccttggaaattcatcctccatcatcagaagggagcagtagaggaagaggcatttcgatatctacacccaatggaattacagaaggaaagagtcattccactatggatgatagttcttcaacttgttctaatgattctatccgatcgggggtaaccaatgggtcctaccaagggaattccttgaatttccgaaaccagaagtcgccgaacaagtaagtttgtttcggctgtcctttgtttcttgtcagtcctgaatccttagtgatacgctttgtgacttgcagaggaaagaaccaacaagtgaaagcaatgactgatgcccacagtttagcgagtgaaacagatgatcaaccctcaacacttggaacagaccccaagggtcagaattattcttccgaggcaagcaacgttggtgaatctgattgggttgttgtctcccacatccaggagccagagggttctcgaaatcgtattcctgttgggagggttcgtcattcatgcttttaatgttttgaaattagaagatcgctgattgaattattggtttcgtgcaaaaaggtccagaatttcacaatttagttgtccctttttcaaattcattttgcaggaacgcaaaacggttcaatccattgtgaactcggtcgacatggatcgacctaaagagaaaagcactgctgtactttcttctcccagaaatgttgccaagaatccttcaccattaactcagacaaaaccggagaaaaagagcatttcaaccgcagacggtattccaaacaggaaagtactggcaactggaccaccttcatcaagccaagtagtgcttccttcagatattcagtcgcaaactgttggtctcagagctgatatgcaaaaactctctgctccaaaacaaccaccagcaacaactatatcaaggccttccagtgctccaataatccctgcgatgcgaccctccccaatcaccgtctcttcctcagttcaaacaacaacatcccttcctcgttcggttagctcagctggtcgtctaggtccagatccatccctacacaaccaacaaacatacactcctcaatcctataaaaacgctatagtcg

SEQ ID NO: 140968 - DNA, 834 bp, Arabidopsis thaliana landsberg
gagagaaaaaccaatggcttgtattcacatcgaatcatcacatccacctgcatggaagacacactctgtccaagagaacaaaccaacaaatgctgatgatatatcgaacacaaccttaccagaacaccacgacggtggcgacgggggaatccaagaaacgtgggccgcgattggagattctggcggcagaggaggaggctatttcgccggagagagtaggaagaagctggagaagaagaagagccaagtgttgcttgagggatacgcgttggatgatcaagatgatttgacgagagccaagagtttgacggatgatgatcttgaggagcttaaaggttgtttagatctagggtttggttttagttacgatgagatccctgagctttgcaacactttgcctgcgttagagctttgttactccatgagccagaagttcttagatgataagcaacaaaaccaccacaagtcccaggaggaagatgattcgtcgccaccaccgaccacgaccgctccaattgcaaattggaagatctctagccctggtaaatctctaaatctgagatagatttgagtcttgtgattatgaagaacattttcttgacttgaatgtttgattgttgcaatttttgattcaggtgatgatccagatgatgtaaaagctagactcaaatattgggcacaaactgttgcttgcaccgtacggttgtgcagctgaactagaattgattttcatctttgaaccacagaaagcccgtctttgcaagaatgaagtctatgccatagttcgctgagaatagacctgcaaatgtgtctgtggataaagtggtttggctt

SEQ ID NO: 140969 - DNA, 1697 bp, Arabidopsis thaliana landsberg
gtctaccccggacagcgtgctggtggagttgaggctgacatgatggcagcaaacgagcttaatgcacactcttttctccaggttggataaatagccatgcaaaaatgctaaatagattcttagcaattacatctccttggtggctaatagtgaaatcaacttgttattctgcttgtctatacagagcaaaagcctgcctgctaatctgcttctacttgttggtggctttgagacacaacttggggaacaggtcaggcttacaatatgtggcactgtagtttgttgaatctaagctgcactagtttgtggatattttggcataccttatggaacataggctgagtcaattcattcttacagtggctggcttttcgtgatggtgggaaagatagtgcagctgactacgcgcaaactgcgagtgaaaaaacaaccagagctcgctcccaaggagtatggaatccttatgaaaaagagcagatgataaaacgaaggagaaactttgttattaagatccttcagggtgcaatgaagggtctagcctttatgcatgataatgacaggttacatcaaagcctcgggccatcctcaattgttctcaagtatgttcccccatgagcacgtgaaagtgatagcatacacacctcactcttaatataaatgcctcatgactctactaattcagtcgatttttctctctggtgaaattatccttagtacaccagcggaacgagaagccatctatttaataccgaggctgcgagatctagccttttctgttgacataaggttcccttactcttctcatctcttcctgattgattattttatcctcagctatagtagtttttttttttattgccttttggtcttgctgtttaaactggaactagcattgtgaagataatgttggtgctttttatcaactctctgttaatagactgagcataccttacaggccttcatgcttggaagaaggagccacttctggttcactgtcagagcaactttggcgaagggcaaatgctgctggtgcttacacagtttttgagaaaagagcttttgggattgcagatgacatgtagtgctttttccttcttagtctttcatcttttaagttgcaaatgttctttgataaaggtttaacacattcttgcggtttacagatatgaagccggtcttctttttgcatacttagcatttgttccattctgtgaagcaggcgtaacggattctctttctcttcaggcaagaaagaacacaagatctccttttaatccaacaaatgtagcagctctgttctttaaacagttttttgttaccgcaatttaatctgtactgcaaggctactggaaaacactttccggctggatatcgaggctgtaagagagtaagcctcttgctacctccagattaactaacattctctattgtcataactttcttgtgttaaaacttaaaacgcatataaattgcatttcattttagcagcacaaaaagaaccgttgtattcaattaaccgattaatactccaagttactgtgtgtttgaaagacctcactaattttttatacaggtactgtttagctgatgaacgcctcgaagaagcggtaaagtttctggatcttggtgatagagctggttgggaattgctccaggtatctagtcattccaattttctctgcatcgtggttcacagt

SEQ ID NO: 140970 - DNA, 1028 bp, Arabidopsis thaliana landsberg
attatttcttgtatattttaggttgttaatgacatcagtattctgtcatccaccggaaaggtagcatcttgcgacggaactatacatgtgtggaatagccaaaccgggaaactaatatctttgttctccgagtcaccttcggatcaagatcaagcttcatcagatccgtcctcaaagaataattccaatccgtgtaatagacatgcgtcacatggattatcaagtgggatattcgatgagaacttgtatacatgtatgcattatttagaatacatagatcagctcattgttggaaccggatttggtgccctcaggtaaaatagtatccactacactaaaaaatcaaactaattgagcattagagataatatgcaacaatttttgctcaattccactgcacaattcaggtttatcgatctagcacgaggccagaagcttgaactttggggaggagaagctattgaatctggattcacttctctcgtatctgctctttgttcaggagggtctcaaacaaaacatggagacggagcttcagtatcaccttcttggattgcagctggttttagttctggccagtgtaggctatttgacttgagggaaaatggttttatttcctcctggagagctcacgacggatacgtgacaaaggtgaattaagcttttttgtcctcccaaaaccaatatggcctttcttcttatcttcaaattttgattttcttgcagttagtggcacctgagagtcatttacttgtttccagctctcttgacaaaactttacggatctgggacttaaggaagtgagcaaaaacaatcattacggtttttccttttcttgtaagtttttgttcttgttccctacatgtggtttattatctttctggtaaaacaggagctggacaccacagccttttgttgtcaaaggacacaatgacggtgtttccggtttctccatctggggcaaggaagttatatccatctcaagaaacaacatcgggattttctcactggcaaagtctcaagatgag

SEQ ID NO: 140971 - DNA, 479 bp, Arabidopsis thaliana landsberg
acaactcgttcttgactgttttcaagaacaaaggaccggaacctggtaaacccaaaaagaaaagtttaaattttggatcctagctaaaatgttcatttttcttttatgatccttatatatatatatatcttttgtgaatccctcaggtgtttcgaggtttgggaacccgttaaaaccgtgttgtgtcggggtcaacagcagttacgactgctcaaatgtggatgagaagggtgagaagaagtacataatttgtgaagatccaaaggctgccttcttttgggacatctttcatccgagtgaagaaggatggagatctgtttactcagttctacacaaacatctcaaagctatttggatttaagagtaagactaattatatgctcttcttttttggttgttatatcattactcagccgtctcggcttgtcttgtagtaaagcgagtttcacaagtcaagctcactggttcgaatgtcaaca

SEQ ID NO: 140972 - DNA, 1619 bp, Arabidopsis thaliana landsberg; identical to SEQ ID NO: 10864

SEQ ID NO: 140973 - DNA, 873 bp, Arabidopsis thaliana landsberg
ccatgaacaagagaaatgtggtcaaggaaagagtcaatgtgagtttgatgaggaaagtgatcattgtgttagctatgatgagattctagtgaattctgatgaagttattgagcttgatgaagaagaaggcggtggtgaccacgggagggttgctgatcttgttgagtgtgagaatcttggacctcctgagatgccacaagagattgtgattcaagattctgctttagttgaagaggcgggatcgaaactcgatgaacatgcttcaaaaaaggtgagagtataccttgttggcttttgcattgtgacaaattcaaaaatctaaacttaaatgtgtttcttggtctattcatagccatctaattctatggaaacaccctcctcctctgtaaacgtgaaacctattattcctaatgatgtgcgtgtgactaaagcttctacaaagggacatgatgtaacgccaaaagctgcttcaaggaggacaaagggttcttctttaagttctaattctaaaaccaatgtagatgccaagaggtattttactgttctttctatagagaattgttgcaactctgtttcatctttctctttgcttaagagttaagacctattggttttgtgaattgtgatagccaaaaggaactaagaccgaagaaaaccattgagtctcaacctaaatcatcgaacaaaaccgagactcgacctcctattgctacgaacaggttcgatactaagactactctagttttttttagataatcgacttcaacaatcaaatggtttcaccatgcaggtgcaagactagtaccacttcttctaagctggagatgagtacaggttctactagtttccgtttcaaatgtagcaaacgagctg

SEQ ID NO: 140974 - DNA, 711 bp, Arabidopsis thaliana landsberg
gaaaattcttggcatttggacttggtagaacctgaaaagattgttgttttgatgggttttaaggaaggtgaaaccataagaatcaacgtgaagccgaaaccaacaacaaatggcactgggatgctctcagctgctctttcaggaacggggaagccaaaacctctagcacttgccccaccccccaaagctgccggagtaaccaggtctcctttacctcctcctccaaacgatcccgtcgcttcaaggattgcatctgatggctgcaaggaatcacgcaggaacgagcctctatctgatctatctcagctcaaggtaaataaaccttgtcttcttaattacatttattcttattctctaaggttactctaaattatccttgatttggtaatactcggcagaaaaatcttccttcaacggcgggatcaggatcgagcaagtcaacaggagctgcatcaggttgggcagctttctgatgaatggagtgtaaaatttaagttattggacaagtccggcttcatcttcttgtgacttgagagcacgagacaatagacaacaatggtggtcagccaacagtctttttgatgtatgttaatggtaagttgatgtgtgtttctttgtaatcctcccacactccctgttttaattatttttcttccttataatcatcgttgttacattatcgattatcatttgtatcactgagatattaat

SEQ ID NO: 140975 - DNA, 3902 bp, Arabidopsis thaliana landsberg
ccgctgggagatgcttatgggctactgatgcatagaaatggtcagtgggagtggactctggctccaggtgtagctccttctccaagatatcaacatgcagcggtaaaccaaatcttgctctaatttcaaaacatatggaaaaatagcttctgaagcgttgacttatactagtattccagaggactgcacattgtagctttagaaactgagttgactaatgtttttcttctatatgatttgattgatgaggcatttgatttcatttactataccatgctctaatttcagccattgcgataagttccttgattgtttttcttatcaggtttttgtaggtgcaagattacatgtcagtggtggtgtgctgagaggaggccgtgtaatagacgctgaagcatctgttgcaggtaatggtgatggtgagctaattctcgcaggttttgctcctcttgatttttgatctttctaattgttgtggaatctttttttctcgcagtgcttgatactgctgccggtgtatggttggatagaaatgggcaagttacttctgcacgtggaagtaagggacaaatcgatcaagatccgtcttttgaacttatgcgacgctgtcgccatggcgcggcatcagttggtatccggatctatgtgcatggtggtctaagaggaggtaggcctgataatattccttttgtacaacaagatgccttagtttattgcagtacatatactttagttctgtagtttcacgtttcataatttaggtcaagttgaatcttaggaagtttttgtggtacacttacatctcttatagtttgaattaatgtctcaagttcatctatccttattctcagagtatgactattaccgtaatttatttccgcacagatgtgttacttgacgattttctagttgctgaaaattcaacattccagtcagacatcagttctcctttgctagcatcagatagaacccaacaaagttctactcccaggttttcttatgccgcacgacctccttcaggctctgaaccaagcttctccatgtctgagggactgaggtctatcccatttcctaccctcttttggtttgtgcttaactgtgtctagttgtttgagcatgacttatcttacttttctcctcaacaatatcagcttggatgaaaattcgttggagaaattgacggaggcttctgcagctgaagcagaggtagctagttctgtttggcgagctgcacaactaggagctggtactctggatgaagaaccctctacctctgatgccagctcgccaattgtagaatctactactgatggtaccgcaaatgaaggagatgtcaggcttcatccgagagctgtatgttaatacctaagaatattatacatttatctctttgtctcatgcgatggacatattggctgcttagtttgaaatacttcccaacatagtgtatgcttgaataactgttgtacctattcttttgcgtatttgattaccgaagtatctcatttgataggttgtggtagcaaaagagacggttggtagtctgggcggcatggtaagacagctaagcttggatcagtttcagaatgagagccgacggatggttcccatgaacaatagcgatgtgccacaacctaccaagaagttcacaagacagaagtctccgcaaggcctgcataaaaaggtatcattcttctgcaatcttctcatcctcctggacactgtccctgttaatatctctactaatgtgttgttgcttgcaggtcattgctgctttgttaagacctcgaaactggaaacctcctggcaataggaaatttttcttggattcttacgaagttggggaactctgttatactgccgaacaaatatttatgcatgaacaaacggttcttcagctaaaggctcctatcaaagtatttggcgatctccatgggcaatttggcgatttaatgcgtttatttgatgaatatggatttccctcaacagctggagacatcacgtaagtttaagaaatcgattgaactttgtggagttttgctaaaaaaatatagtcactgaacgattaaacgtgtttgcctcaggtatattgactatttattcttgggagattacgttgaccggggacaacacagcctggagactataacgttgctgcttgcattgaaggcaagacggtgcctaatttcacatcaccaatattagtagtgtcattcaaaatgtgctttttggttttatggttctgagatattcctttgcagattgaatatccggagaatgttcacttgattcgtggaaaccacgaggctgctgacattaatgcactatttggtttccgtcttgaatgcatagaaagaatggtaaatccctctctgcagaaatattcatcgtgtttgtcgctagcttttctgcgtagactaagcctgctctgtacttttaccagggagagaatgatggcatctgggcgtggacaagatttaatcaactttttaattatcttcctcttgctgcactaatcgagaacaaaattatatgtatgcatggtggaattgggaggtcaatcagtacagtggaacagattgagaagatcgaaagacccataacaatggatgctggatcccttgttctaatggatttattatggtaatccatcctttgctgtcttgctttcatatcaatcactatttctaatatccccgagttaatgacattttttaaagtacaggtctgatcctacagagaacgatagtatcgagggtttaagaccaaacgccagaggacctggccttgtcacgtttggggtaaatcacccctaattcgctcttattgtcgttttttattaatattgtttttaggggccaatcactgagggcgtagtcttgatactgcagcctgatagagtcacagaattctgtaagaggaataaactacagctaattatcagggcccatgaatgtgtgatggatggattcgaaagatttgcacagggacagttgattacgcttttctccgccacaaattactgcggtgaggcgaaacaaaacccgtcaaaacctcatcttgtatctatgattgtattcttggataggaaaaaacatcaagaaataaaacattgtgatacttttcttaaacaggaactgcgaacaatgcaggagctatattggtggttggcagaggattggtgattgttcccaagttaattcatcctcttccacctcccatcttatctccagagaactctccagaacattctggagacgacgcttggatgcaggtaacaacaactttgctacttctgttccaaattaattcaaatccatacatcaactctgttactacatcataagaacacattttttaaaacaaaagcttgaaacttgtttcagccacaaaccgggtaacctgaccttagtgtaagagtctgtctttgtctttttcctagaaatatttggcctaaaccggaaacacataatagtttgggaacaataaaagacattttcctagcatataccagtgaagcacataatgtctttgtttcagccacaaactgagcaacttgatcttagttggtagttatgcgatatggatagtcctaggagagtttatgtagctatatcttattttggctacgaaccagacactgacagtacacaatttatcttttgcaggagctgaatatccagagaccgccgactccaacacgaggcaggccacaaccagattttgacagaagctcacttgcatatatctgaacctgattgcatttctggtttctgcttccaattcctgatgttataacaaacattggattttggtgcaactctatacaagtatagtacgattaatttatggttcaaaatttgcagtggtcatatactctgccgcacatgtgtaatataatt

SEQ ID NO: 140976 - DNA, 1766 bp, Arabidopsis thaliana landsberg
gctggaatgggcggtggaactggcactggtgcagcccctgtaattgcaggaattgccaaggcgatgggtatattgacagttggtattgccacaacgcctttctcgtttgagggtcgaagaagaactgttcaggctcaagaagggcttgcatctctcagagacaatgttgacactctcatcgtcattccaaatgacaagttgcttacagctgtctctcagtctactccggtaacagaagcatttaatctagctgatgatatactccgtcagggggttcgtgggatatctgatatcattacggtatagcttttcttatgggcatcctgtgatcatttttttgtgtatggcaaatgatttaccagctacgtttgtccttgatttgtagattcctggtttggtgaatgtggattttgctgatgtgagagctataatggcaaatgcggggtcttcattgatgggaataggaactgcgacaggtaagtttggaatgatggataagctcatttagctgcatagtttcataagcagaaccattagtcactagatatgtgtcgaaatagtctaattgaactaatgagctagtagattggtgtggcaaagaaaccagtctagtgactgggatactgaaaatgaccatattatattcactgttactcaactattgtgcatctatgtcatgatgtaataatcaaagtcatgaaccttgaacttcttttgcgcaaggttttgttttgtttgcaacgtgctgattctttcatgctacttgtaatcattcaggaaagagtcgggcaagagatgctgcgctaaatgcaatccaatcccctttgttagatattgggattgagagagccactggaattgtttggaacattactggcggaagtgacttgacattgtttgaggtttttgtctctctctctcatctttgtttcttatctctatgtcgatagatccataaacaataactggatcttgagagacgcattgacagggtgttaaaatcatttattttcttccttccatagacatcttagagcaaagcctgattttgcttcatacccctaagatgctctatagtttttcatacactttggtcttgtgtaggtaaatgctgctgcggaagtaatatatgatcttgtcgatccaactgccaatcttatattcggtgctgttgtagatccagccctcagcggtcaagtatgtcctttataatgtttcttctactaaacataggtaagacctctagagatgatagaattgatgttttttttggtaaaaggtaagcataaccctgatagctacgggtttcaaacgacaagaagagggagaaggacgaacagttcagatggtacaagcagatgctgcgtcagttggagctacaagaagaccctcttcttcctttagagaaagcggttcagtggagatcccagagttcttgaagaagaaaggcagctctcgttatccccgagtctaaagcccaatctaatcactaccctgcacactgcagcaataacaaacgtgtgtgtactggtagtctggtactgccttctgggatacagcaagatgtgttgatgtatgatcaagaatctgcgggggtgtgtatatgttctgtcactgcctctggtcgtgttcttgaataggttgttttagaaatcggagtttctctctatgtcacttccaaaacaaaaaaggagaagaagaatcacacttctcgaaccataaacatacttataagattatgagagttttagcagaaattattgtca

SEQ ID NO: 140977 - DNA, 330 bp, Arabidopsis thaliana landsberg
aatttcacatgaccgaggctgctaaaaaaggaggtttggccatgcaaagttgtgtatgtagaaaggaagctaccagctgcgaaaggattaaagccagcttcggtgagactgttggaatattaatgggcttgcatctacaactgcacttgtatcttttttcggatggaatgataagctcgagttttatagagatggttcatagttgcgggactcgttatctatcttatctatctctatctctatctcttgaataatggatggatttgttggaacagagattaagctgtgtttgtattattgatccatcagtttagttaagctttcaccgtc

SEQ ID NO: 140978 - DNA, 930 bp, Arabidopsis thaliana landsberg
tgggttttgtacgacgcctaatcgacgttagtcttatatctgtagccaaacaagccaccaaagtggtatttatcttcttccttccttaccttgcagggcgtctgagctcgagttataaaaaagccgactttgatttctttgccagtatttcatccttaatccattcttgtggtcactttttcgtccctaacccatctaggtaagtcgatttcattgtttgttatttgagtcagtaatttttgaaaatctttgcttttttttcttttcttttgaatatcaaaagaagaaaagatttgggggataactagatcatctctttagttaaattgactctttgaggtgtgtcaattgtcactgatagtctgattaatcttttattggcatcttagaaacagattttgattctaaagtcttgtgaatcggcagcggaagaagagtgaattgttcatccttatcttgccatggtaaacattctacttcttttgttcactttgatgggtttgattgttcttagtatattcaatcctttgcttatttgacgggaagtagagatgtttttggaatgagaacatcttttcccttcttaattccagcttcctgatcacatttattactgttcttcttggagtaataaaagttgagatacttttgtcttgcaataattttgctttaatcaatcgaacaagttagattttggccatattggttgtagtattgattagtcttgtgtaatattgtttgcaggctatgtatattcgtgtgaagcgcatgaaaactacttactttatccaatgtgatccaacagagactgttttggatgttaagcaaaaactgtttgctctcattgagcaaccagttaacaatcagcgtctggtcttaatgtctaccgaagaagtattagaggattcgaaatccttagcagatcagaag

SEQ ID NO: 140979 - DNA, 1557 bp, Arabidopsis thaliana landsberg
tagaaggtcggctgatccatcaccacaacgccggacgacaatggtacttctctcctcctctgtcgtgtcaatcttcatttctctctgtctttcttctacaagtattttctgttgttagtttgatatcaaaggttcagaaatcttgttgttaagagattgtgggtgtttcctgtcattttaaatgttgtatagtgtattaggtttgtttttctgtcatttgagtctcgggttagagtgtgaacgatctatctctcttagtttttttgagattggatcttgctttcatgcttgtttgtgagattgattggttgtgttattgcagggtattgatctgatcgccggaggtaagagtaagaagaccaaaaggacagctccaaagtctgatgatgtctacctcaagcttactgtcaaggtcagaattttaaacatcaatctttgtcctttgccttatattatccaattgaagaggttttttaattttattttagtgaattgttctgaattttgattgcgaaattttgtagctttaccggtttttggtgaggagatctaacagcaacttcaatgctgtgattctgaagaggcttttcatgagcaaagtcaacaaagctcctctttcactctctaggcttgtagagttcatgactggcaaggttcgatctttttgagacccatctctctttatatacatcttgagtctgtccttggtcttaatttagaaccccatttattttattttcattctgtgaagttatgagttttgacgttgtcctgttatgttagtatttgagaacaaatgtacaaacttgattttgtatcttactattcagtgatggttagagtactcaaatgttgtggtttgtctatttattaggatgacaagattgctgtgttggttggaactatcactgatgatttgagagttcatgagattcctgccatgaaggttactgccttgaggtttactgagagggctagggctagaattgagaaagctggtggagagtgcttaacctttgaccagcttgctctcagagctccattgggacagaacacagtaagtaaaattttacactatctgaatgtttaggataattcaagtttatatatgaaactgagctgtgtttgatatgttgtgacaggttcttcttagaggaccaaagaactcgcgtgaagcagtgaagcatttcggacctgctcctggtgtgccacacagtaacactaagccatatgttaggcataagggaaggaagtttgagaaagctagaggaaagcgaaagagtcgtggattcaaggtctaagaagatgttgtctggtttcgttttgcttggtttaagtatcgaagttttggtagggaacgctggttcctctttaccctgttccagactttgttttaagttctgtttttctattctcaagacaattggatattttgctttgtcttttaatcttactactattagctgcaatgagattttatctagaatttggatttgatcagtatttggaggtcatagtatcattatgggctatttcgtttgatttctcttcctggaa

SEQ ID NO: 140980 - DNA, 1704 bp, Arabidopsis thaliana landsberg
  unsure (1)..(1704): unsure at all n locations
aaatcattgggctgggcctaaagaagtgcactacgaggagtccggttcaaaagacacgacttgacccgaccgatccgacccgggtaagaggttagcccaccacgcaacgtccgtcggggaagataccacgcgacggaaacgacgaacacgaacagcggaaatcgtcaattcaatctctcagatcagttttggaatcacatataacaatgtcggcggttctcacagccggcggaggcttaactgccggggatcgctgcattattacggcgattaacaccggcgcttcgagtctctcattcgtcggctcagccttcatcgttctctgctactgcctcttcaaagaacttcgaaaattctctttcaagctcgtcttctaccttgctctctctgtaagtttcccgttgttgcctttcgctgattgtgctagatctaggattatgtactgttttgcttccttcttcttcgattattctcactgtgaattgttacatcgctaagacgttaagttccattgcgttctgagatgagtagtgagggttcgagctctattgctgactaatggccatgtttttaattgttgcaggatatgctttgcagtttcttcctaatcgttgggtatgtttatctactactattggttctggtgaatcttgttgagattattttgataagatgattgttacatcttgatcactgtagggatccttcaaaggggttcatttgttacgcacaaggctacactactcatttcttctgcgttgcttcgttcttgtggacaactacaattgctttcactcttcatcgtactgttgtcaagcataaaactgatgtggaggatttggaagcaatgtttcatttgtatgtatggggtatgtaaaatgatactcgtgggtttcggttctcaattgttactatatccacctagggttaaggattagaatgtgttagtatcttctttggtgatttagtaagactctgattttagttacatttctcagggacttccttggttgtgactgtcatacgttcttttggtaacgaccactcacatttggggccatggtgctggacgcaaactggtcttaagggaaaggcaagtgagaatgcttagnnnnnnnnnnnnnnnnnnnnnnnnnnnnnnnngcatttgaacttttttgttgcaacgctgggccagatgaatgtagactagtattttattcttcgttactggaactcatatcacctcttgaattttgcaggctgttcattttttaactttctacgctcctctttggggagccattctttacaatgggtttacttacttccaagtgatacggatgctaagaaatgctagacgtgtatgtaactctctaatctctaataacattgtcttctgaaagtagttcacaaacgttactgatacacttggctgtgtgctgaaatggcaatgttaatttcagatggcagttggaatgtcagaccgagtcgatcaatttgataatagagcagagttaaaggtctgtctttattgccaatactagttctgtatcatgtggctggatttcatcattaaaacctcactgcttgtttcctgaaaccacaggtgttgaacagatggggatactatccactcattctaataggatcatgggcattcggcactattaaccgtatccatgatttcatcgagccagggcataacgatcttctggctctcag

SEQ ID NO: 140981 - DNA, 1283 bp, Arabidopsis thaliana landsberg
aagtatggcgttgaaggtgtggaaaccggcgggagtatcgttcatttcgtagatgaaaatgaagtttatcaggttcctcctctttaaatcgcgtttatattctattaatcttcatagtttaattgagttcgtttctcgctttatttatagtcgttgtttgttcttagaactgaaattttattcagtgatatagttaagctgaagaatagtggtctccttaatttgtacaagattgattactttctgattagtcgactctgtttacctgcaaaatgtgatatgatgattggattcttaaggatgtgcaactgttactatgatttgtcttcattaaattgtatttgccgaaactaaagccttatgagaaaaaaaactaagtctctatatatgcttaagttagagtgcttagaggtgttgacttggctagtgaaaaagcaataacaaatgccttttcttcagtctgtcagctaaatggaacctaacttatgatattggactgtcttctaagcttggtcagattttggcccttgatgataatattatccccaaattggttatcttgcaacttgcaagacttgatatcatgttttgttgtttctctgttgaatgtgtatttctggactatgatttcattgcttaactttctgactatttcttatattgtttaaggtctcgatttttcttcttcgaagttatgagcctccagtactagtgtgtgctatgaatgaactgctggacctaattacaaggggatcgtcaactctacccacaatcatagctcctttctttgtggaggcatctaagctcaagttcaataacagatccctggaagcaaataacagaaaagctagtcttcattacgttcaagttgctacagaaacagagaccagtaggttatttgcttctcgcatcgagaaaccaccactatcgatgcagatccattatgaacctttgtcatgcttgcttcatctagctcgtgttaaacgcctgcctaccgctattctcataggccaaagaagcaatagcctaactcataaagctctagacgaagagcttcaggtaattttacttagtaattttgtctcagtttatgcttgtttttcgctggttgatttcagctgaataacgagtttgtgttgttgttgtcatcacaggtgatccatgaaacaggggagctcgtggctagttggacaggactgtctttctcaagagacagaatcaagtggagcgcatcaaagacatcaaaagaagaagaaagtccgtggcgtgctctttatggctaa

SEQ ID NO: 140982 - DNA, 5933 bp, Arabidopsis thaliana landsberg
gcccttcttcgagaagctttttgtggatagaatctgcagtgagagggacgtggtgtttaaattgaagcgaaaaaccctagcgtttacgcaaaccttaatttccaggtaaatctcttgcttgaactgtgtattgatttctggatttgtatatctgtttatagatctatgctttcggattaggttttgggtcactagtactgcagggtttttaactttagttttttactcgctcgctgtgattctgccacttatttgtctcttccttcttagaaattgaactcgtgttcttcacgactaggagaaaaagctttttccgaatttcatagaaaacgctgggtcatctttggttcggatttcatattgggtttgttttcaatgttttttgttgtcaattacaccaagcagagattctcatataattttctcggagtatggatatatttgctcataatgttcaaatgctcttgtttgtaccatctgattgaacttgttgaccgtttgtatagtattattgccttttatacttgtaccattactttgttcagtagctttccctttttttttagaattgtgctgattttgttctattaacccctctttttttttgctgattatggtgaatgtccttgttgcgcagagaccagaatggcgatggagatcacacagtttctgttggctgcccagtcagccgatgcaagagtccggactgaagcagagggtaatctcaggcaattccaagaacagaacttgccgctgttcttagtatccttgtcttttgagcttgccaacaatgataaacctgctgaatcccgtcgactagccggtattctgctaaagaattctctggacgccaaagattctgccacaaaagatcatctggtgaaacaatggtttgcaattgatgttgctcttaaatttcagatcaaggatcgcttactaagaactcttggttcatctgccctagaggcaaggcatacttcagctcaggttattgctaaggtagcctccattgaaattcctcagaagcagtggcctgaacttgttggatcgctgcttaacaatatgactcagcaaggcagtcccgcacacttgaagcaatcaaccttggaaactctaggctatgtctgtgaagagatatcacaccatgatcttgtgcaagatgaagtgaattctgtcctcacagcagttgtgcagggcatgaaccagtctgaaaatactgctgaagttcgtctcgcagcaacaaaggcactgttgaatgccttggatttctctcagacaaattttgagaatgaaatggagaggaattacatcatgaagatggtatgcgagacagcatgttccaaggaggcagagatcaggcaagctgctttcgagtgccttgtgtccattgcatccacatactatgaggtgctggagcactacatacaaacactctttgagctcacatcgaatgctgtaaagggagatgaagagagcgttgccctccaagcaattgagttctggagttccatctgtgatgaagagatcgaccgtcaagagtatgacagtcctgatagtggtgactcatcccctccccactcctgtttcatagagaaggctcttccccatttagttcaaatgttgctagaaactctgctgaagcaggaagaggatcaggaccatgacgacgatgtctggaacatatctatggctggcgggacatgccttggcctggttgctagaacggttggagatggtgtagtccctcttgtgatgccttttgttgaaaaaaacataagttcgccagattggcgaagccgggaggcagccacttatgcttttggatcaattttggagggcccaacaattgataagcttgccccgatggttgctgctggcttggaatttctccttaatgcaaccaaggatcagaataaccatgtcagggatacaactgcttggactctgagccgtatctttgaatttttgcactccccagacagtggcttctctgttatatcacccgaaaacctccctagaattgtgagtgtattactggaatcaattaaagatgtgccaaatgttgcagagaaggtctgtggagcaatatacaatcttgcacagggatatgaagactctggagcaagttcatctcttctctctccttatcttacagagatcatcacacatctgcttgcagctgctgagcgtacagatggggcagagtctaagctaagaggtgctgcgtatgaaaccttgaacgaggttgtccggtgttcaaacctttcagaggcctcaagcatcatagcgcatctcctccctgccatcatgaaaaaattagctgagacaatggacctccctataatatcaactgatgaccgtgagaagcaagcggaagtccaggcttctctgtgtggtgttctccaagttataatccagaagctgagcggcagggaggatacgaaacccatcataatgcagagcgcagatgacattatgaggctgttcctaagagtgtttggatgccatagttcaagtgtccacgaagaagccatgcttgcaatcggtgctcttgcatatgctactggagctgagtttgtgaaatacatgcccgagcttttcaaatatctccagatggggctgcagaatttcgaagaataccaagtctgctcaatcacagtaggagtgcttggtgacatttgccgtgccctggatgaaaaaatcctacctttttgcgatcagataatgggtctccttatccaaaaccttcaaagtggggcactccacagatcagtgaagcctccaatattctcatgctttggagacattgctctggcaattggtgctcattttgaaaggtatgtagcaccagccgttcagatcatgcaaggggctgctcaggtgtgtgctcagatggatacccttgacgaggagcttatggattatgcaaaccaactgcggagaagcatctttgaggcatactccgggatactacaagggttcaaggacacaaaagccgagctcatgatgccctacgctcaacatctcctgcagtttgttgaactagtatccaaagatcccctgaggtccgtaccatgtggtttgaaaatataatcaatttgttccttctggtttcgttgcacatattaaacttgtaactggtgttttgttatgagagcagggatgagagcgtgacaaaagccgcggttgcagcgatgggtgatcttgcggatgttgtaggagagaacacaaagcagttgttccaaaacttcaccttcttcggtgagttccttaatgagtgtctcgaatcagaggatgaagatctcaaggtcactgcacgctggactcaaggaatgattgcaaggctcatgcacccatcataaatttaaccctctattttttttgcatgtcgtctttccgcttctctctatcgtatcatgtgaatagtggttagtttttttttgggtaaaagtagtttaattcccctcaggccatatctgtttgaggttgggtcttattttgttctcttggggtagttaatgcaaaactcttttattgttctttggttactccattatcaatcaaagtatcgttggtcgctcttgagtcaactgggtcttcatgaaaagagttggaactaagtgatagtcatgttaaaactgggggtggaaagcataaatatctaaaacaattgattgaaaccggcttaatgggctttaaatatctaaaactaatgagcttgtcgacccaaacgggctttaaactgaacggcaaggtgtttgtataaagggcgttcgcaaaccttgccgttttaatataaactgtgtcgtttcactagaaggttttataaagtgtaaaacctctttgcacctctcagattaaaaacctcagctcgcaggaaagaaatcagcgaatttgtgaacttcagagaaaaattggtcgtcaatggcgtctgctctatgtagaactgcaagccgtcttcgttccgttcaactttttcgtcggattcgcgtctccagcgatctactatcggcatcgtctccttctccggcgtgcatctccgacgcgcttcgtcatggagatttctctcttcctcgatcggttcgtcatttcttctcctcatctgaattcattttctaattctctttgttttgagctctctaattgctatcttccttttgcagtttttttcacttaactgtggaatcgaaatgctgaaaatggatcagagatgtttgctgagtacttctgcttctgatactacctcgaaacatgactcaggtaaaccggaaacaaaatcttcggagaaaaatgagaaatctggaggatcggagagttctgatggtggttcagatcataaaaacgagcgtgcttctggaaaagacgttcgtggaggggtaactgtttccatgaacaaagtctctctgattgaattgcagaattaaatggttgttttggtctaatatttgattggagagtttttggtttgattgcagccggtttcatggatgagctttttcttgctgtttgctactggagctggattggtctactattatgacacacaaaagaaacgtcatatcgaaggtactcatctatggtgagtttcattttttgaacatatctacaaagtaacacaaacttgatcatgtagagtatagactactattacatgatttggctacatagctcccattttctagtttggattgtgtaataacagtaaaactgaggtgctaggatttcgaccgagctcttaatatcttgcatcatgtcggacattttgctaatggagttctgaaatgtctaattgaatacattgtttgtagcttaatgatcacaggccttagaccttagcaaacgatatctgatttggctagtgataaccttggcaagataaatgaacttatcacttctatcactgagggaatgcttagggatttcacattgatttctgctgaatccctcttcgagcttatctcgattcttctttgtatatagacttgggttcttattgatttagatataaataagaactctatagccggcaaggaggggccatctggtgtaaaagcagccattggaggaccattcagccttataagagacgatgggaaacgtgtgacggagaaaaacttgatgggaaaatggaccattttatactttggtttcactcattgtcccgatatctgtcctgacgaacttattaagttagctgctgccattgacaaaataagtgagataccaacattttttcatttgtgtgattctacatttggagatttttcctctaaggttatatcacatttacacagaggaaaattcgggggtagacgtggtgccagtgtttatctctgtggaccctgaaagagacacagttcagcaagtacatgagtatgtcaaaggtagatatttttcatttcgaaagattcatttggttttgaaatgaaaattcatagtctgatacttcttgtagaatttcacccgaaattgatcgggttaactgggagccctgaagaaatcaaatcggtggcccgatcttaccgggtttactacatgaagaccgaagaggaagattcagactatctcgttgatcactctatagtcatgtacgtgtacttattatccctttaacatattttgttaggaagattatagttatcggcacaaaacccgacatgcagacttagaattgttcatgttcatattctcaaatttcagaatttacatagttacattttacatagttacagtgtaatgattcatcttgtatgtgttcagtagtgtttgatctcttttttggtggttggagttttgatatgtaaacatgttgtgggtgaaggtacttgatgagtccggagatgaattttgtgaaattctacgggaagaatcacgatgttgactcgttgacagacggcgttgtaaaagagatccgtcagtaccggaagtaaaga

SEQ ID NO: 140983 - DNA, 2269 bp, Arabidopsis thaliana landsberg
tgtctgtgttacagaaaaagtagttatcatggcggcattggaggagctaaagaagaagctgtctccattgtttgatgctgagaagggtttttcttcatcttcatctttggatccaaacgattcatatttagtaagattcctgtgattttcgttgttaagaagttttgttatgtttctggtttgtttacttttatcttctttttgtttgtttgtgaagttatctgatggtgggactgtgaatttacttagtagatcatatggagtttataattttaacgagctcgggttacaaaaatgtacatcttctcatgtggatgagtctgaaagttccgagacgacgtatcaatgtgcttctcacgaaatgcgggtttttggagctataggaagcggagctagcagcgttgttcaacgagctattcatatccctaatcatagaattttagcgttgaagaagattaatatctttgaaagggtaatgttaatctcttttgctagtttaaagagaaaaatgtgactccatttagtatgtgtttttgaatatgtactgattttggtgagcaggagaaaaggcagcaattgcttacagagatacggacattgtgtgaagctccttgtcatgaaggacttgtggattttcacggagcgttttatagtccagactcgggacaaatcagcatagctcttgaatatatgaatggaggatctcttgctgatattttaaaagtaacaaagaagatacctgagccggttctttcatcattgttccacgaacttttgcaagtaaagatacttaactctctctataatgtgcaacatatatatgcgttatgttttaagtgtatataaattcattcttagtgatgtgatttcattttaagggattgagctacttgcatggagtgagacatcttgttcatagagacattaaacctgctaatttgcttataaatctcaaaggggaaccgaagataaccgattttggcataagtgctggccttgagaattcaatggctatggttagtgattgtatctcagtctttcactccttattaatccagtaatccttttttgatgagtttttaacttgtattatctgaaaatgatggttgcaaagtgtgctacttttgttggaactgtcacctacatgtcaccagagaggataaggaatgacagttattcttatccagctgatatatggagccttggtctcgctctttttgaatgcggcactggagagtttccgtatatagctaatgaagggcctgttaatcttatgttgcaggttaatcaacttgtccccaaatcctttcttccgatatattatttatatttacactaattactgttatgtgaatgaagatattggatgatccttcaccaacaccaccaaaacaagaattctcaccagagttctgttccttcattgatgcttgcctccagaaggatccagatgctcgaccaacagctgaccaggttggtaaaactgaaatgtcatacatttaccagtctagtactttactgaaataagtcatttttagagcaaattgtggttaaaagtttggtgcttctcttagtattcgtctgtttgttagaagttcgatgcatttctttgtatttatttgttttaatacaagtctggttaagaattggattctttctgttgaatttattagataattcctataaagctttgctttgattcaagtctgatggtgtttcctctgctacttgaacagctcatgtcacacccttttattacaaaacacgagaaggaaagagtagatttggcgacttttgttcaaagcatctttgatccaactcagagattgaaagatttagctgatgtaagtatatgatgatcttatcagacttttcttagttcgaaaataccaaattaaagttaacattaatgatcttattggatttttgttcagatgctcaccagtacattattactccctctttgatggatttgatgatctttggcaccacgcaaaatcgctctacactgaaacttcagttttcagtttctctgggaaacataacacaggatcaactgaaatcttctcagcattatcagacattcgtaacacattaacaggagatttaccgagtgagaaacttgttcatgtcgttgagaagcttcattgcaaaccttgcggcagtggtggagtcataattcgtgctgttggatcgtttattgttggaaatcagtttctgataagtggtgatggactccaagcagaagggcttccgagtttcaaagatg

SEQ ID NO: 140984 - DNA, 3811 bp, Arabidopsis thaliana landsberg
  unsure (1)..(3811): unsure at all n locations
cttacagacccaattcttgttttctgttttgctataacaaaccagggtcagggttttatcttccatattcttttcccactgattcttacaatcgatctaagggaatctacgaactgtttggtaatttctggtagggaaaagtcttgatcttgctgtttggcttggagaaatgacgagtgcttgatattgttgacggctcaccggtgatggactcttcgagcagtccatgtttatgtctggatgctcacacgacgggtaccatcaggaggaagaagatccttggcaaagcaagaaatctggaattaggaagctctttcactggctcacgcattgtttttaggctttctccgaagcgtgtatcgagaattgcgaatcgaaagagcaaaaagctcttgattgtgaatgaggatgttgctggtaattacgacgatnnnnnnnnnnnnnnnnnnnnnnnnngagaacttttgcatgaacccttgttttcatagacaaagatttgacctttggcaataaccttattatggatggctggctttcgattttgtagcaaattgttaattattttacatacaaagctgtgaggacggttcttcatcagctgtacgaaatgaatcctcctcaatacacttggttctataagtaagtttcttatgctttatcatttgattaaagttctgtataggattagatttaacaaaaacactttactccgatcatttttgccttgtggtcttaattatgtttctcctttgttgtaaaacagtcatatcataacaaacagaccgacggatggcaaacgtttcctccgtgccctcggcaaggtaaacaagtttagtttatatctcacatgaacaagcatcatctgtaagatgcattaggtctagttgaacaagttcagctggtatactataactagccgaggactgaatgtagcagattgtagctgtggtgagttggttaatgagcagttagtgagggctgaagtttataagacttgtctctgatttggtgtattgcaacagagatagcagttccatagatttgttcttattacaatcacactgtgttgtgataaattatgtttgattcaaccttgtttagagcttggtatttaaacacagacaattgagtttgattttttttgtcttaactacttgtaggagagtcaggagcttgcagaaagagtgatgatcacgcgtcttcacttgtatggcaaatggatcaaggtaaaatcgcttgctatatctcgctccagttttggtttatgtgtttttcccttcctgccatgggaaccagaaaagactcaaaagttaatattgtatagtttgttgtgtagaaatgcgaccatgggaagatataccaggaaatatcggttgaaaacttggcgttgatgcgtgaacgcctgatggagaccgtgatatggccttccgatgacacaaactcaaggtaataggctgaagaagacagcgcacaccacagcacaacatttgctttgtcaatttgcttctcagtttttaggacttcgagttttttagtttgattacatattactatagtgaaagagcagtgtgtatatgatgtctattcttggcatgtactatatgatattaggggcaaaaaacaacacccttcttgtgctcctaaacttactttctcagtcatctcttacgctcacaccactcacattaacattggtaggctcaaaatgataatcacaatgccaatcttctcattttgcaaataaagaaaagaaaataataaaaattgattactagttttgagtattgacaaccttaataagcaagcaacaacaggcttgaatgcaatgacgtggtcatgattaaggaaaacagcggttggtccaaatcggaacacttgtcctcgtaacaacttcaaaacctggtttgacttatattacagtcctcactcatcacggaaccacgccgaaaattcatggcgaagactagcatttttgcagctctaccctttaccaacttcgaattcccgtcgctgttccgtgtcaagaactcttcgattatcagtttcagcgaaacccattttctccgacaatcaatttcgaccgcaatcgtaagatctccgactaagaggggaattgtgtccgtctcatgttcttccgtcacggacgaagcttcttctgaagagctacaagttcgaaccttgtaatatcaccttcctgtttcttctgcaatctatgtatataaacttatagctaacgattggactggtctttcttggtttctgattaaaatccgtggattgacgaaatgtgggtatttgcaggacatggaagtggaaaggttattcgataagatatcaatgtgctggaaccagtggccctgctttggtcttggttcatggtttcggtgctaacaggtctaaatcattgcccctttagctgatagggacttgagaaccatatgtttaacagtaacatttttgttatgttatcagtgaccattggaggaagaacacacctattcttgggaaaacacatagggtgtactcaatcgatcttatcggatatggatactccgataaaccgaatccgcgtgagtttggtggagaaccattctacacttttgagacatggggtgagcaactcaatgatttctgtctggatgtggtcaaagatgaagctttctttatttgcaactgtataggaggtagagctctgaagttccaacgctttcagatttaagcttttttcccctttcggttcagtaatgacagagagattggtgttcattaggacttgttggtcttcaggcagcagtaagtaagccagagatatgcagagggcttatgcttattaacatatccctccggatgcttcatatcaagaaacaaccattcattggaagacctttcatcaaatcattccataatttacttaggtattgtatagctgtttcaacaagatcctctctggggttgcagctgaatatattatcatgtcggtctcaggaacactccggttggaaaattatttttcaagagcattgctaaaccagagacagtaaagagcattctttgccaggtattggtggttgcatctgaaaacacaagaatgagttttatattttatagtgagcttaaggcaatcttgttcgttgttgtgaatttgcaattagtgttaccatgatagctcgcaagtgacagatgaactagttgaggcaattctacgtccagggcttgagcctggtgcagttgatgtcttccttgaatttatctgttactccggaggaccacttccagaggatttactcccactagtcaaggttcgttactctggtctcctccttggccatagttaaaactaaaccttagtctaagttctctaactgttgcagtgcccggttctaattgcatggggagagaaagatccatgggagcccatcgagcttggacgagcatatagcaattttgacgcggttgaagatttcgttgttcttccagatgccggccactgtcctcaggtatctctctctacctcccctgaagatcgaaatgcagcaaggaacctttgttttcatattattatgtttctataaaaaaattgcaggacgagaagccggagatggtgaacccacttattgaatcattcgttgcgagacattgaaagtccaatacatccatctccccagacatttgatctttctagtttttaatatatctgtacagaaacagtatacctgcacgaacactcagagttgtgcatgaacagtcacaggtgagatttttcagtagtgacaaaactgtgattgtaaggatacagatgttgatagagtaa

SEQ ID NO: 140985 - DNA, 1875 bp, Arabidopsis thaliana landsberg
  unsure (1)..(1875): unsure at all n locations
atttacttctatttgctgctcttttgatggaatttgctgcacagtcttcaaaagggatcactaatgatatttcccagtcctctgaggagttgtctcctctaaggttagctaagctacaatctgtgtccatatatatgaatttgatttgtaaatcaccctctgtttgctatgttctcctatcttatgtttggaataatatgtggctatgcatggaaccgtatggaaattgaaatgatttatctttaagtttagatttgtgcgtactcaatttagattatgggatagtcttagtgtgagtttgactcagttatgctcattgttggtcaagaagttgatttttgttgttctttctgttaggggaactgataatgatcatcaacgtgagagaaaacaggaggctacttctccaaaagttggttctccaaaagttgcttctcctaaatcgcccatctccacaaccagacctcagttttgggccatcttagatggaatgagacttatactagcatcaccttatcttttgctcgtgtctttgtttctttggctcggtgcggtcatctcctcattcttctatttccaagtaagaccactctttatattttgaatggtttcattttnnnnnnnnnnnnnnnnnnnnnnnnnnnnnnnnntaatatcagaaatagttgacgatggaatataggcttctcatgtgaaccatctctacgtgttatactattcatttacctgatctggaaagaactatgatcattataagtttataaccaagactctttgttctttaacagccatttgaacgatttttcacaacataaagagtagaatatccctttgttattagtgcttgcaaattatcgcttatgatacgagctgttgctttaaaattcctttgttttctttgagtctatagaatcaatttctgctctttgcaaaaagaaagctgaacttcttacggtctcactgatgaaataaagttaaactgcagaaagtgaatataattgccacaacaatcaaatcatccattggtcgaagaagactgtttgcccagataaacagctttgttgcagttttcatactcattggacaactgactttaacggtaagtcatatgcgagacaaaattcacacattgattcaccatacctggaatatttgctatataagttagtatgctaaatcttacaggggcggatcttgactgtagctggtgtcacggttgcaatatctgcatctccatttgttgcacttgggaatttggttgctattgccatatggccaacttgggttacagttgctgtgtctgaaaccctgagaaaggtctgtggtttacaacaatctctctcatgttaacctactgttccattaatgacacttgattttttataacatggtaggtgacaacttatgttgtaactagacctggaagggaactcttgttcaccgttgtctcgcaagacgagaaatacaaagctaaggtacagaatctttcctttcctgaacttctagtaagaaaatcagtcctgcaaaagggaaagtttacactttggtttattatttctcattctgtgtgctatggtttcaggtatgcatagatgtgattgttcaacggcttggagatgctgcagcggcgggactatttgaagtccttaccattgctcttggcggtcaaacgtcaactgcttcactctatgccctgccagtataataaaagcttcctactttcagacagttcgtctgtgtatgagtattatttctccatgaaactcctcatcaagtctccattttttttttaacaggtgtgtttaatatggatagtcacagcgttcttcttgggccggcgacaagaacaattggcgaaactccaggtgggttcat

SEQ ID NO: 140986 - DNA, 853 bp, Arabidopsis thaliana landsberg
aagaacctgaagaacggaacccacttgagggggtaagtcttgcttgaaaacagatttcagattcgactcattggatactttttgtctaactcatttttctttcttcacttgaaaacaaatcttgtgctttcagagacatcaacatgatgatggttggtgatccatctgttgccaaatctcaacttctgagagcgataatgaatattgcacctttggctatatcaaccacaggccgtggttcttccggtgttgggttaactgctgctgtgacttctgaccaagaaacaggtaaaaagcacacaaaagcgtttccacatttttttatcaaatgctaaaatcaaaatttgaaggaaggtcaaaagtgctatttctcattaaaatcaaattctcattttcatcaggggaacgaagactagaagctggtgcaatggtcctcgctgtaaaggtatcgtgtgcattgacgagtttgataagatgaatgatcaggaccgagttgctatacacgaagtgatggagcaacagactgtaacaattgcaaaagccggtatccatgcatcactgaatgctagatgcagtgtggttgcagctgcaaatcccatatacggaactgtaagttctcaccgaagttttcataatctacttactctactgactagtatttttttgtcctaatacctactcttgctcctgcagtatgacagatcactgactccaacaaagaacattggacttccagattcgctgctttctcgttttgatgtactgtttattgtgttggatcaaatggatgctggtatcgacagcatgatttcagaacatgtcttgcgcatgcatcgttacaagaacgatagag

SEQ ID NO: 140987 - DNA, 967 bp, Arabidopsis thaliana landsberg
tccgtcaccgccatctaaacaccactccttcacctgagccgcggcgaagaaggtggaagcgaatctattagattagggtttatacgattataggaggacgaaatcagaaagacgagctagaggaagctgcgatttttctggaagataaacaatggcacaagattcagagaagagattccaccaaatcatggataaactctttaccccatcgaaatctcagcttccttcttcctccaccaggtcagtctcttcttgctggttactgttttacactgtgcatcgattcatctccattatctgagttccattgtttcgctgattgaagtgtggataaattgcttaatctcagagatgattttgtatttgtgttcatatacattgctctttggattgatttcagatgttagttgattttgtgatatttgcatcagagcttgtgttcatgttatgattctgcgtcagcttatgtatatatcctttggtttgtgtagttcttctgtagagcaacaatcaagaggcaagaagcgtcaaaatccttcatctgcgttagcattggttgagccaaagattgtattagctaccattgataggtcttcagctttgaaggttcctgctggaacatcgccttctggtctttgcaggccgtgggatagaggagatcttatgaggaggcttgctactttcaagtccatgacttggtttgccaagccacaggtttgcttcttgtgacctttaaaccacaattttccttccgttagaatttaagtcatttctatctcgttgttgtatgttcctagctataaaattcttagctcattctattttttttgtgtgtgctggtaggttattagtgctgtaaattgtgcgaggagagggtgggtgaatgatgacgcagattctatagcttgtgaatcttgtggagctcatctttacttttcagccccatcttcttggtctaagcaacaag

SEQ ID NO: 140988 - DNA, 705 bp, Arabidopsis thaliana landsberg
ttcagactctgctaatctgataagtgctgcagaagtaagtttctcttagtttgttaggataattttagatcagatgttgtaatacagtttttttattatatcgctcctcatttggatatcgtgcagatcatgattagaagtggaagaacaccagaggaagctctaatgattcttgtccctgaggcatacaagaatcatccaaccttatctgtcaaatatcctgaggtaacaacatctgagtctgatttgttcttcaagaacccattgcaaaactcaccattttctctgcttcttttttcaacttcaggttgtagatttctatgactactacaaaggacaaatggaggcttgggatggtcctgccttacttttgttcaggtaaatcttttgagtacctagctgtatttgaccttcttactagatcaggtaatctaataaagttatagtgttgtggagtaagtcaagggagtttcttgtcactgcattcttgttgtttgcaatgttgtgtctgagctcaggcttcttctattccctgtcgtttctccattcttttttcggcttctcctcaggtttatctgacacttgctacttgaattcgtcacctagtgatggaaaaacagttggggcttgtcttgaccgtaatggccttcgtcctgctcgatattggcggactagtgacaatttcgtctatgttgcatctgaggt

SEQ ID NO: 140989 - DNA, 3002 bp, Arabidopsis thaliana landsberg
gaaaaatagtgggaaagactcctctgagctactctcattcgattttcctcaggcgattttggtgtatggtcgtccctttcactgtatttcttagtcaatagcatcttctccgatcatcgacgtccggagatttcttcagccctctcatacttgaggttttgtactctttactccctcaaatttttccaaaacttgcgcttcttagatttgggcgtcttcgttatttattgtaaaattcagctttatgcctcttagactagttatagatcgacgaatcagtaaaattaccttcaaggtgaatggtctctaggtatagagaatttgtcaaaatgacgaatttgattgaaacattggtaactttttttaatctcttcgttagttagttgaacttattggtttggggggaccatttgctttcatcgaaaaccctagcttgcgagggagggaccttgattgggatcgtaacctaacttactgtcactttttttatcgttcaatctttattgctgcagataggtccactaatggctgagcttgctgccgttttctttgacatatagttaattcaatgtgtaaagttgtaagctttttagtctttggttttgaggaagttagttaggaaccttctccaagtacaaaggaggaatgggtagggaagggtttgcaattacaatgtgtacatcgtgtttcttgacaagttactgatagatactttggggaaatttttgatttgaggagtgtaggaccaattcaataaatgccacttagtttttgtgtgatggagatgagaagatgaaaagtaatacccttcctctcttgccctttttgctggtctgggtgaaacatagaaaagtttctcttgctcaagttaatgataaaagggtgagagcaataaacgctgataagccttgtctggtccttggaattttgaattttctttttctatcttacttatagtattggtagttgagggtgtcgtcgataaggtatctatttgcctagccagagttatatataggattgattgtctagtcttttcttatatgatttttgttctcatttactaatcaaagttctgcaaacttgtagttgttgtaggatttgttgctctggctctggtggtaggtctatgaaatcaacccatatcgtgaatggactgcaacatggtatcttcgtcccagtgggattgggagcatttgatcatgtccaatccgtcaaggactgaagatgacagcaaacagctacctactgagtgggaaattgaaaaaggtgaaggaattgaatctatagttccacatttctcaggccttgagagagtcagtagtggctctgccaccagcttctggcacactgctgtatcgaaaagctcacagtcgacctctatcaactcatcatctcccgaagccaaacgatgcaagcttgcatcagaaagttcccctggagattcttgcagcaacatagactttgtccaggtgaaggctcccacagctctcgaggtatccgttgcctcagctgaatcagatctttgtttaaaactaggaaagcggacatactctgaagaatactggggtagaaacaataatgaaatttcagcggtttctatgaagttgttaactccatctgttgtcgctgggaaatccaaattgtgtggtcagagcatgccagtcccgcgttgccaaattgatggctgtgaactggatctctcatctgctaagggttatcatcgtaagcacaaagtctgcgaaaagcattcaaagtgcccaaaagttagcgtgagtggcctggaacgtcggttctgccaacagtgtagcaggtaaaaccggtggttatgttctggcctcaataattcttaagttgcattctctttagattttactgtagagtgcccattcagtttgattgtgtcaaatcaacttttacatgctcctatttatattatacggtagagagttgatcatgattctaatattcaggttccatgctgtctctgaatttgatgagaagaaacgaagctgccgaaaacgtctttctcatcataatgcgaggcgtcgtaagccacaaggagtattttcaatgaatcccgagagggtgtatggtatgaacctatactgcaacttgatgtaatcaatatttcctcaggactttccatcagtctctaccacacgcactcacacatacacacacaattcattcatggaaatctaatgtaacgtgtttactcctgcagatcgaagacagcatacaaatatgttgtggaatggggtgtcccttaacgcgagatctgaagaaatgtatgaatggggtaataacacttatgatacaaagcctagacaaacggaaaaaagctttactctgagcttccagagaggtaatggctctgaggaccagctggttgctagtagcagccgtatgttctctacatctcaaacctcaggtgggttcccagcaggaaagtccaagtttcaacttcatggcgaaggttggtatatgcacttcttcactagtcctttaatatgtggagggagtaaatatctgttgatttgatctctagtccttaaacaattggttaaatcttttggcagatgtgggagaatactcaggagtcctccatgaatctcaagatatccaccgtgctctctctcttctgtcaacctcttcggatcccctggcccaaccacatgtgcagccattttctctactctgttcatatgatgttgtaccaaaatagatgagtaagtaatgtgtaatttgtaaacctgttactcagttggtggatacttttccaaacctatgataaaaacctcgtcctagatcccgttaaatgccaaactttcggctactataactatgttatcgttatcattatcattgtttaacaccctagtaacaaagtcattgtcaacaaaactctataaacagtaaatatatctctatacctcggataggctcttcaatgtatctctctgtattgatagcaaatcaaggagaagctgtaagagtag

SEQ ID NO: 140990 - DNA, 556 bp, Arabidopsis thaliana landsberg
cagacttctatgcaggctactgacgaccatctcgttgagttctctgaggctttgagatttaagttatatttcgatatgtgtaacatgagctgtactatatcctttggatatgggatttaatttttcagtttctgggatattgtaactgttgcaaaggcactaaggggagctgctgaaggaaaggcgttggctcaagctgaggctgctgaatggaagcgtagatacgagttagagaggtctaagaacgtggagttgcagcataaaggttctctactaacttcaaagggttgttataaaatgttcaccatttagttctagtaattttgatttgaatggtgtttttggccatggatatgtttgaataacagaattcctggcttgttttacagaactgtcaaatggagtgtgtgccgatgaatctaatggtcaaaggatggagcacttagcaaagtctccgcggctttatgctcaggaaatcagttctaatggcatggagactatttgctctcataagtgctccaagatggtggatttaacagttttaataacaaattga

SEQ ID NO: 140991 - DNA, 2691 bp, Arabidopsis thaliana landsberg
acatccatgtgtaatcatcgtgattgtttcaggtggatatatatgattcgaggacattcattggtggcaaagtgggttcttttgtagatagacgtgggaaccatattgaaatgggattacatgttttcttcggatgctacaacaatctcttccgtttgatgaaaaaggtttttgtttctcaaagcttctgctcaaatttactgatgattgaaactcatactcatgtatggttttttttgtggtgatgtatgtgggtgctgagaaaaaccttctagtcaaagaccatactcatacatttataaacaaagacggcacaattggaggtatggctcagttcattattctcttgctattgtgattttatcgtactgagatgtgcatattatttgtagagcttgattttcggtttcctgttggagctccaatccatggtattcgcgcatttttggtcacaaatcaactcaaggtataaatcaaacttttaaattgatttatcttttaaatctttggattcatatcaatgcacttttccgccgtggaaaatcggcaacagttttctcaaatgttcatagcaaaagattagtaatttcttgctttatgtaccaatatcgagcttgctaactgcttattcttgttttgaccgaacagccctatgacaaactaaggaattcactggctcttgcattaagccctgttgttaaagctcttgtcgaccccgatggagcaatgagagacattcgcaaccttgacagcgtaaagaatgataacctgttcttcttctcatctgtactactatttgtgttctctaaattttctgaaatactttttgcagataagtttctcggattggttcctgtcaaaaggtgggacacgggcaagtatccagagaatgtgggatcctgttgcttatgctctaggtttcatagactgcgataacatgagtgcgcgatgcatgcttaccatattctcattattcgctaccaaaacagaagcttctctgttgcgtatgctcaagggctctcctgatgtttacttgagtggtcctatcaaacaatatatcacagatagaggtggcaggtgtgtatctgctataactacaagaactgattctcgcatttattatgtcattggcttatcgggtatttataatattgtcttcaaacagaatccatctaaggtggggttgcagggagatactttatgataaatcagcagatggagaaacttatgtcactggactagcaatttctaaggtgaaatttagcttcagacgtaggattttagtggactgcgaaaatgtctacatacattctgaaggttgcagcttctgggtagagaaaaagcacaaaactttgatatgaaagtaaaggactttttttgttttttggtttgctttcaggctacgaacaagaagattgtgaaagctgatgtatatgttgcagcatgtgatgtgccgggaatcaaaaggttacttccaaaagaatggagggaatctcggtttttcaacgatatatatgaactcgagggagtacctgtggttacagtacagctcagatacaatggttgggtcacggagttacaagacattgaactggctaggttggcaatctagaatcctatgttttgggatgatcgtgatggatcgattctgttttggttttaagtctttgtttttgtgttttggaaaatcgtaggcagttgaaacgagcggttggcttagataatcttctctacactcctgatgctgatttctcgtgctttgcggatcttgcactagcttcgcctgcagattattacatcgaaggacaaggcactttacttcagtaagaaagaataacgtttttctttgtttacaaaatcgcatgcaggtctctcagtgtcttgaaactgaattctgttttcacaggtgcgttctaacaccaggagatccgtatatgcgaatgccaaatgataagatcatagagaaagtagcgatgcaggtaaagaacatggctaaattcaactcttgagaaaacttttgtctagctggtttgttgttgattctcaaatcttgttcaggtcactgagttgtttccatcgtcacgaggcctagaagtcacttggtcgtcggttgtaaaaatcgctcagtctctgtaccgtgaagcacccggaaaagatccattcagacccgatcagaagacgcccataaagaatttcttcctcgccggttcatacacaaagcaggtaacatttttcacttactatctttcagccagatccccgatagctacaaatgcaagcaagaacagcctccaaattgtgtctgagaaatccgaaagatcagtgagaattttgtttctggacttgttacaggattacatagatagtatggaaggagcaacattatcagggagacaagcttcgtcatacatctgtgatgctggtgaagaactagcagagctaaacaagaagctttcttcttctgcaactgcagttcctgatgagctaagtctggtctaatgatgaaaaatgtttgaaagtagttaccaatggctaattgatgaagatttgagacactatgggtacatgaagaagaagcatatgtagaaaccctttatatagtgttcataagagaaagtatttgtaatattacaccatcttttgaaatcaaagattcttacaaagtacatcaatttaagaaagtttactctc

SEQ ID NO: 140992 - DNA, 4155 bp, Arabidopsis thaliana landsberg
gccattagagacctcagaagaagagaagtttttgattcttcgtcgagactttactcgattttgcatcgaagaagagaggaagaaaaagtgaaaaatttcagggtttcgattttgggtgagagataacaaaccctaggtgttgtgtaaatcgtgatcacatatatgctttttgagtcgacgattagagaagacgaagaagagtagcaagcaaacactatgatgaacacttctaatggaatgatatcagcgccatcttcgtcgtcttcaccggcggcgaatcctcagtcgccgggaattaagacttatttcaagacgcctgaagggaagtataagcttcactacgagaaaacgcattcctctggtctccttcattacgcacatggcaaaactgttactcaggtaaagatcaaatttttatatttgggtttaatagtttgattcgtcattaggatttctaatcattcaaatcggcaatttcagagaattagtatcgatcgttaaatttttgttagtgaaattttgcattttgatgcactagttggttagctgatcaatcgatttgaatagcattgctttccaatgatggaatttggaaattttcgttttcaggtaactatagctcagcttaaggaaagagctgctccttcgactccaactggtacttcgtcgggttatagtgctagtagcgggtttcgttcagcaacagcgaggttgctaggaactggaaatgggagccgtgcgcttagttttgttggaggtaatggtggcggtaaaagtatgagtacaagttcaagaattagtggctccttcgctgcttctaattctaatacttcgatgacaaatacgaattttgatgggaaaggaacttacttggtcttcaatgtgagtgatgctatttttatctgtgacttgaactcacaagaaaaggtaatttcttcttttctttgttttccttttagtgatttggctgtaatgttctgctttttgttttgttttggaagtaatggtttaggaaacttctttgatgtaggatccagtaaagtctatccatttcagtaattcaaaccctatgtgtcatgcttttgatccggatgctaaggatgggcatgacttacttattgggctgaattctggggatggtaatgtagaaatttgagcttaccgttttcaccgctgatctagatgccttgtctcatggatttattttgttatgatgtgttattgtagtgtacacagtatcactgagacagcagttacaggacgtctctaagaagctagttggtgctctgcattataacaaggacggttctgtgaataacaggcaagagtttatctttttccgtgtatctttaattttccttccatctttttcctttactattatttgttagtgaaacttgaagaattgattccactggttcaagtgattccgctttcatgtcttggattgagctagtgaaacttgaagaattgattccactggttcacaatacttcacatttactttgtctaaggatctctatgtgttcttcgtttgtgcttgtgctagtatttatgtcagcgtaacaaatttatataagtttctgtcattgtaatagattgtgttctaggaaactctcagtgacagtagattagttaaattataacagaacagtatgtttccttagaggagttcgtttttaagtaggttaagttgaaacatgaatcaattttggcgtcatgactcttgccttctctaagtttaaaataaagtttgttgctttgtaacagtcgttgcactagtgtttcttgggtgcctggaggtgatggagcatttgtcgttgctcatgccgatggcaatttgtatgtgtatgagaaggcaagctcagatatcagaatttgttttcttgcatatgacttttaagttgcctgattttgtctaatccctgatcctgattaatttaacttaatagaacaaagatggtgccactgaatcaacatttcctgctataagagatcctacacaattttcagttgacaaggcaaaatatagcaaggtatgtgagtatgcaaccatttcaattgatccttatataggtgcgggaagcacatggtacatgcatatcctctactagtatcatcatttgctagtggttataagaaattattgtattacatactttcttttctatctttgagcatattttgatgtactattgtttattcatatgagtattcatgcagagtaatcctgttgcgagatggcatatatgtcaaggttcaattaacagcattgcattctcaaatgatggggcacaaaaggcaactgttggaagagatggtaagatgcgtctattatgtcgtgtgttctttttctttctctatgtatttctttactaagcagtaaacttttttaccattcacaggctatcttcgcatttttgacttcttaacccagaagctagtatgtggtggaaaaagttattatggtgctctgctgtgctgttcttggaggtgatgggatataattcctttggcaacttttcttataattgaatttacaaaagttatcttaaatagataccagtgttgtgagcatatcacccccgtatgatactgtttattgacattgtgattgtattgacactgacagtatggatggaaagtacattttgactggaggtgaagatgatttagttcaagtgtggagtatggaggatcggaaagttgtggcgtggggtgagggacataattcgtgggtaaggttcttgatgtcaataagatttcttttatttaacttacacagcacttgactcatgtcggaatggttgctctcaggtaagtggagtagcgtttgattccaattggtcgtcaccaaactcggatgggtcaggagagcatgtcatgtaccgttttggatcagttggtcaggtatttcttcataccttgacccattttgctggtagtcctttgcattaccaaagaactgaaatgtgtttaaactacgggagttgtgcgtagcgtatctatattgcttgattggctttatcattcaaccagtgatctcattttcttatcattttaatgatgaggaaaaggaaaaagacaatattttataggagataggttcttaggatgatcagaaaataaggggaaatcgtagtagtgtagtttcatatggtctgataaagattcgttagcatatcaaattgtagataacgatttgttggtctgctagttagaaactttgttagaaagtgaagtgtttcgtagtatgaagcagccttaattaggatgctaatgagatcatttccacaaacatgttttctgaaagtcttctttttaagaacttaatttgctattaaaaaccatagactcctacgatttcagtctcttgattctcctatatatgatctgcaagtgtcttgcctcatacacactgctgctttcttctgctgaatccccaggacacacagttacttctctgggaccttgagatggacgagatcgtagttccacttaggcgagctccaggaggatctccaacttacagcacaggaagctcagctcactgggacaatgtcataccaatgggaactcttcaaccggctccttgcaaacgcgatgttccaaagctgtcaccgatcatagcacaccgagttcacacagagcccctctctggcttgatgttcacacaagaatcagtcgttacggcttgtcgagaaggccatataaagatctggacacggcccagtgaatcagaaacccaaactaacagctcagaagcaaatcctacaactgccctcttgagcacaagcttcacgaaagacaataaagcttcactgagcagcaagatcatcagtggctctactttcaagcaatgacagagagatgctacttgtctgaaaatcaatcaggtgctattatttagtcatgtttctccttctaaagtgaaagaaaatctttaaagaaaagccctgtgaataaaattcgactgggttttgtttttgtttttaatattttaaaagaaggatcaaaatctgaattctgactgtaaattggaggctgacaaattaagtttgtgagaggggggaggggcatagaagagaaaatatgggagaattttcggatgtaattataagaaagaaaacaaaatctgtttacataataagagtc

SEQ ID NO: 140993 - DNA, 750 bp, Arabidopsis thaliana landsberg
gatcgaggtggctgcacagtggaagacttctgtaaccacgtccacaggactctggtgaaggatatgaagtatgcactcgtttggggcacaagcacaaggcacaatccacagaattgtggtctttctcaacatcttgaagacgaagatgttgttcagatcgtcaagaaaaaggtacataaaacgaaaatctttccattgacatactctcattcaaatctatgattatgatctctgttccttgatgagactatctaactttgtactgctgattctggaatctttaggagagagacgaaggaggaagaggccggttcaagtcacactcaaacgcccctgctagaattgcagacagagagaaaaaagctcctcttaagcaataagcttttagctgataagtcatctccatacatccatctccaccatcatagtcgtggatggtttcacctgagtaagatttactatgttgtatctgaatccgttttgttgttttctctcacaatataagttttggaacaattttacttttttgagatacaaatggaagtacgagttcctatttaccctttttggtaagctaagtttttgatttttgtttacaagtctgcctttaattcttgatatcttattataaacaatactagcattcatatggaaggttaaacaaacaaggagaaacgaaatcgactctgattccaagttattgagaagtggcctaagtagccaaattacaagctcaaataactcatcaat

SEQ ID NO: 140994 - DNA, 1678 bp, Arabidopsis thaliana landsberg; identical to SEQ ID NO: 6747

SEQ ID NO: 140995 - DNA, 1314 bp, Arabidopsis thaliana landsberg
ccaaaaaagcttctctagctgatgtgggcgttgtgggggatctgagcaatgaagatgggaacaaagcatctgctgcatcgtactactcaggctggtccatgggtgcaggatccgggcttggtaaaactggcctatacagtacacagcagcagcagcaacaacaacaacaacaacaagcacctgatatctcagacgatttcttctccagcctcagtaaccaaaggtaccaatctggtggctttaagcagtgaaattgtctgtgatttggtgttgagatgaaaaggcatatcaagtttgattctacattccatactggaaatgtaagtttttttaatgggtttgttgttcttgcacttcattcatgggacaatctggtcggtgactgatgtgccattgttgttgtggcgtttactttgggtttaaatgagagagagaagaattgtctttatgttttttttgataagagagtacttttattattggtttaaagtttcgatttgttcatagaacaaaagtatatgtatctcttcccactcaacaaatattttttttatcgcgtgtgattcttaatccgaaagagactccaactttcttctcagttgttttattcacattcatattgaccaagttcattcttagtgattatgttaacactaatcttatcttacacaatttagttctccggtcacgaatgattaaaatatagaatagtcttatctacaaagaaaatgagtagttgtgacaaaaaaaaatagtccaacaccaaaataaaaaatgtcatctcttcactggtttcccaatatcttcatcgttgtcgtcgtcttcttctccttgagaagttcacaagttgtactagaagaagaagaatccacagtcgttggatacggctacgtcgttagatcagtgggcgttgattctaaccggcaagttttgacggcgaagcttgatctgataaaaccatcgtccgtttacgcaccagatattaaatcgcttaatcttcatgtcaggtcattataatctcctctctcaaaccaatctccaaaaaaactaaatttagcaagtttttcaaactaatttaaaatgtgcgattatataggaaagttttcgccattatgattatgtatatatatgtgcagcttggagacaagtgagcgtttgagaatcagaatcacagactctagtcaacaaagatgggagataccggaaaccgttattcctcgtgccggaaaccactctcctcgccgtttctcaacggaggaagacggaggaaactctccggagaacaatttcttagcagatccctcatcggacttg

SEQ ID NO: 140996 - DNA, 793 bp, Arabidopsis thaliana landsberg
gacatactgcgtcttctgacattgtggttcaaccatggagctacagctgatgtccaaaccgcattgaagacaggattcagtcatgtcaacattaacacatggcttgttgtgctacctcaaatcattgctaggatacattctaataatcgtgctgtcagggaactgattcagtctcttctcatccgcataggcgaaaaccacccacaggtttgcagccttctagaaattttataaatcttcatcagtattacaattctatggtgggaattaagacatacataaagttttactctgccattttgattgcatatgtacttcgattttggatgcataatttctccttgactatttatttttcaaatgttttcaggctctgatgtatccccttctcgttgcatgtaaatcaataagcaatcttcggagagctgcggctcaagaggtggttgataaagttcgccagcacagtggtgcactcgtggatcaggttaaaagtcatctcttgtgtttgtcgattttattgaattatatatttttacctgagctaattagtgacccccttcctctacacccataacaacaaaaaaacaggcgcaacttgtatcacatgaacttatcagggttgccatactttggcatgaaatgtggcatgaagcactagaagaagctagtcgcttgtattttggtgaacataacattgaaggcatgctgaaagtacttgaacccttacatgacatgctcgacgaaggtgtaaaaaaggacagtacgaccatacaggaaagagcatttatagagg

SEQ ID NO: 140997 - DNA, 7100 bp, Arabidopsis thaliana landsberg
atgacaggtgggttatttgactgtattcgagtgggttaattattaatgacgtgtaatccacgtggcagtttaaccgcatttgccggatttgttcgaaaacttccgtttttttattctttacccaaattgccctttaaaaaataacataaaaattggcttattattattttatttttccctcccatgataacagcatttgtcaaagtcgtctttcttttttccttgtcgagagttttgcttcttcatctaaaagatctatacatcttccccaagtagatatgtttcataagcctaacctaacattcttcccctcattcgcgtaggatctgttcttcccaaaacgactcatgccgtccattcgattcggaatatagttgtagaggagatttcatttctaatcaatttcttcggtgatgagttccaccgcggcatcttccaccgtcggaggaggcggatcgtctgagatttccggtgtcaaaaaaacctccaagcgaccaaaatgtgatctttctatctctatctatccttctaatcttctgatttggtcgaactttttgtatagtcatggatcgtccttagaaatttcgtcttctttttttctttctttcctggaattcgtattgaattgacaaaaagttctctgttgatggtgttgctatacctcgatcaccatgtgtttttgcatgtttctttgatttctaatagcattcttgtatactctgggtttgatgtagattcgtatatacaagaggtgtataggttcatcagcttggtttttcaagttgtcctacaccgtgtagttgaaactcacgtttagttgttgggttttgatgtgacattggttgaaatcttttgttcgaaaactttaaacattgttctcccattaaacaaactgtatggttgctttggattctctgttcttaacttcacaaggaaccaattttctttaccagattctaggtttactcagcaagagcttccagcgtgcaagccaattcttactccaagatgggtaagttcaatgttacaatagtggaaaaggatgactcttactctttttgctgttttcttattgttcatggccatttgcaggtgatcttgacatttcttgtcgctggggttgtcttcattccccttggagtgatctgcttatttgcttctcagggagtatgtgcatcatgctattgtttttctgccttttctaatggtttattttccagcttcggttttgtggttttattgaggatatgtttcattcatacttgaaggtagtcgagattgttgatcgatatgacacagactgtattccaacatcttctagaaacaacatggtcgcttacatacagggtgaaggagataagatctgtaagagaacaataacggtacatgtcttcttctatggcaatttagttccttctatgattgtgtatattagctgttcttctagatatggctctttctaaagcctttcatttttttcaggtgacaaaagctatgaagcatcctgtctatgtatactaccaacttgagaatttctaccaaaaccatagacggtactttgccttatctgcttagtaatagttatcgcttttgcctgttactttccctgcactaatacagttactcctctggttgattgtatatgattaggtatgtgaaaagtcgaaacgatgcacaactaagaagtccaaaagaagagcatgatgtgaagacctgtgcacctgaggataatgtgggtggagaaccaattgtgccatgtggtcttgttgcttggagtttgttcaacgatacttatagcttttcaagaaatagccaacaacttcttgtgaataagaaaggtatctcatggaagagtgacagagaaaacaagtttgggaaaaatgtcttccctaaaaattttcagaaaggagcaccaataggcggtggaactcttaatatttctaaaccggtaaaaaatccttgaatatcgatcaatttagattccttcttctgataggattttaacaagtgtaagagttgtccgttggatagttgagtgagcaagaagacctcatagtctggatgcgaaccgcggctttgccaacgtttaggaagctgtatgggaagattgagacagacctacacgcgggtgataccataacggtcttgttgcagaacaactacaacacttacagcttcaatgggcagaagaagctagtgctgtcaacaactagctggctcggcggaaggaatgatttcctcgggattgcttatctgactgtaggcagtatttgcttgttcttggctgttacatttgccgtattgtatctagttaagccaaggtacgtcactctcagggtcatgcatgcttcattttgttaagacattattacacttttcagattttggaacgtgtacagtgaaatgatcttctgtattaatggtttcaggcaactcggagacccctcgtacctttcgtggaacagaagtgctggaggtttacagtaatagagcccttcgagcatcaggcgttgatccctccatcgtcaaacggcgtagttttggcttagctaacaaaagagaaaaaacgaaaataagtatatagttcgtttataattttgatattgttgaaaacaaacgtttgtgttttgtcctgttgttgttaagatactagccagtaaatggtgtttagaaaataatgtaaatgaattacagttggaaattgcaaaataagcagagaattttgttcagtctttagatttaatcatatgttcttcagttcttgtaataatctcataaaagtagttttttgttgagtcgatatctgcggtccacctgttcggttgatatacacatgtacacgttatttcctgattttgattatcctttgtcgtaatgtaattggtcaaaaaagatttatttgtatggtaatgacttgtaataatctactatttattaagccagatttccagatattttcgggtcctacggtcgtcgtcagtcatcaaggctaattcgtcgcgagtatgtatatttctctctctgtcgctttcatttttgattttattgttttcgtttcacaatctggaattgactctcactgtcactgttgatgatgatgacatctcaccaggttgctacgacgccgtttcggttgcttctggtttctttatgtctatcaaccttcgctcctccggttgatcgtctccgatctcaggttactgtactctcactctcgatatctctcttttttcatttccggcattggttgatttcttcccttgcatgtacttggtgattaaatggaattgaagcaaactggcattattctgtatttttacgctactctgcgaattgctgcctgatttgatcttttggattatacgaaatgctcatttcgtcagttcaattgaaattgattttcttacataatcttcctttagtgaggatttaggactgatatcaatgaagtaaataattgttgctacactctcttacctgaatcaaatggcaatgttctcttgttatgcagctactttggaacggagattggactcagaagtacagacaagagctaacaatgtggtaaataaacaaaacagctgatttttgcttgcttttacataagagaataattctggtctagaccaactaatactcttaaactatccagagctttgagcaaacaaaggagaagattaggaagatgttggagaaagtggagctttctgtttcggcctacgatactagttgggtagcaatggttccatcaccgagctcccaaaatgctccacttttcccacagtgtgtgaaatggttattggataatcaacatgaagatggatcttggggacttgataaccatgaccatcaatctcttaagaaggatgtgttatcatctacactggctagtatcctcgcgttaaagaagtggggaattggtgaaagacaaataaacaagggtcggttttttactttctcttttgttactgtttcacttttggaagattcatggattgatgagtgtcaaataaaaatccaggtctccagtttattgagctgaattctgcattagtcactgatgaaaccatacagaaaccaacagggtttgatattatatttcctgggatgattaaatatgctagagatttgaatctgacgattccattgggctcagaagtggtggatgacatgatacgaaaaagagatctggatcttaaatggtatactcctgctcttttattagcatactcagacgaaactgaaagatggtcttgtacagaagtcttcgttttcataactttttgttgatttaatatttgatcagtgatagtgaaaagttttcaaagggaagagaagcatatctggcctatgttttagaggggacaagaaacctaaaagattgggatttgatagtcaaatatcaaaggaaaaatgggtcactgtttgattctccagccacaacagcagctgcttttactcagtttgggaatgatggttgtctccgttatctctgttctctccttcagaaattcgaggctgcaggtatatctttcaacatgactatcatttcctttgtatatagagagttccgctgctaataagtttgcttatcttttcagttccttcagtttatccatttgatcaatatgcacgccttagtataattgtcactcttgaaagcttaggaattgatagagatttcaaaaccgaaatcaaaagcatattggatgaaacctataggtaaatgccttcatcaaatatggaaacttgttatgatgattttgtagtttaacttgtaaaccatcattgaccaatgaacagatattggcttcgtggggatgaagaaatatgtttggacttggccacttgtgctttggctttccgattattgcttgctcatggctatgatgtgtcttacggtgaagtgacctctttatttcagataattatagcctagatttgagttaaatgcatgtccatgttaagttgagacgctgtatttgttgcagatccgctaaaaccatttgcagaagaatctggtttctctgatactttggaaggatatgttaagaatacgttttctgtgttagaatcatttaaggctgctcaaagttatccacatgaatcagctttgaagaagcagtgttgttggactaaacaatatctggagatggaattgtccagctgggttaagacctctgttcgagataaatacctcaagaaagaggtaatctcttttgcttatctatcctcctgtgagagctatctgagaatcgaagctttttcaggtcgaggatgctcttgcttttccctcctatgcaagcctagaaagatcagatcacaggagaaaaatactcaatggttctgctgtggaaaacaccagagttacaaaaacctcatatcggtaaattcctcttctttcctttctagcctgtgttgccatatgttttggcacagccagcttccattaaacgacaatctaatcagggcattcattctcattcttgttttcttctgtgttctagtttgcacaatatttgcacctctgatatcctgaagttagctgtggatgacttcaatttctgccagtccatacaccgtgaagaaatggaacgtcttgataggtgcgctcccagctaagctttttcatttattcagccttcttgcataagctaattagttttactaatatataaccacacacttgaacgagttcacgttatgaattcaggtgtgacttctatttgttatgtagtcacaattcagcaatgctgctcaccaacttgcaggtggattgtggagaatagattgcaggaactgaaatttgccagacagaagctggcttactgttatttctctggggctgcaactttattttctccagaactatctgatgctcgtatatcgtgggccaaaggtggagtacttacaacggttgtagacgacttctttgatgttggagggtccaaagaagaactggaaaacctcatacacttggtcgaaaagtatgttgatttggctccttcttctgagctcttcctctgcttgttccctcgtaaaagcataatcgttcttcgcttacaaatttcaggtgggatttgaacggtgttcctgagtacagctcagaacatgttgagatcatattctcagttctaagggacaccattctcgaaacaggagacaaagcattcacctatcaaggacgcaatgtgacacaccacattgtgaaaattgttaagtatcaatcatcccacacaattatattctctgttatcatagcctaacaactcatctgaccatacttcattggtgctatatcttacgcagtggttggatctgctcaagtctatgttgagagaagccgagtggtccagtgacaagtcaacaccaagcttggaggattacatggaaaatgcgtacatatcatttgcattaggaccaattgtcctcccagctacctatctgatcggacctccacttccagagaagacagtcgatagccaccaatataatcagctctacaagctcgtgagcactatgggtcgtcttctaaatgacatacaaggttttaaggtaagactcttcttaaaatctcaaactttttactaaactgtacagttgaaagatgggcaaagacgcctaaatccaacaaaataatggtaattaacaaacctctgctcatagatttgggattatatatcccttttgatgtttttttgcagagagaaagcgcggaagggaagctgaatgcggtttcattgcacatgaaacacgagagagacaatcgcagcaaagaagtgatcatagaatcgatgaaaggtttagcagagagaaagagggaagaattgcataagctagttttggaggagaaaggaagtgtggttccaagggaatgcaaagaagcgttcttgaaaatgagcaaagtgtggaacttgttttacaggaaggacgatggattcacatcaaatgatctgatgagtcttgttaaatcagtgatctacgagcctgttagcttacaggaagaatctttaacttgatccaagttgatctggcaggtaaactcagtaaatgaaaataagactttggtcttcttctttgttgcttcagaacaagaagag

SEQ ID NO: 140998 - DNA, 1992 bp, Arabidopsis thaliana landsberg
ctgaaactttgagcaaatccaagagaacatggcggataaatcagaaaccactccaccgtcaattgatggcaacgttctcgtggccaagtcactctctcatctcggcgtaacccacatgttcggcgtcgttggaatccccgtcacatctctagctagccgagctatggctttaggtatacgtttcatcgccttccacaacgaacaatccgctggttacgccgcttcagcttacggttacctcacgggtaaaccgggtatccttttaacggtttcgggtccgggttgtgttcatgggctcgcgggtctttccaacgcttgggttaatacatggccgatggtgatgatctctggttcttgtgatcagagagatgttggtcgtgggatttccaggagcttgatcagatcgaagctgttaaagctttctcgaaattatcagagaaagcgaaagatgttcgtgaaatccctaattgtgtttctagggttttggatcgagctgtttcgggtcgacccggtgggtgttatctggatattccgactgatgtgttgcgtcagaagatatcggaatcggaagctgataaattggtggatgaggttgagagatcacggaaggaagaaccgattcgtggatctctgagatcggagattgaatcggcggtttcgttgctgaggaaagctgagaggccgttgattgtgtttggtaaaggagctgcgtattcgagagcagaagatgagctgaagaagcttgttgaaattactggaataccctttttaccaactccgatgggtaaaggtttgttaccggacacacacgagttctcggcgactgcggcgaggtctcttgctattgggaaatgtgatgtcgcgttggtggttggagctaggcttaactggcttcttcatttcggagagtcgcctaaatgggataaagatgtaaaatttatattggtggatgtctctgaggaagagattgagctaaggaaacctcatttggggattgttggagatgctaaaactgtgattggattgttgaatagagagatcaaagacgatcctttttgtttagggaagtctaattcatgggtggaatcgatttcgaagaaggcgaaagagaatggtgagaagatggagatacagcttgctaaagatgtggttcctttcaatttcttgactcctatgaggataatcagagacgctattttggctgtggaaggaccgagtcctgttgtggtatcggaaggagctaatacaatggatgtaggaagatctgttttggttcagaaagagccaaggacaaggcttgatgcaggaacttggggaactatgggtgttggtttaggttattgtattgctgctgctgttgcttctcctgatcggcttgttgtcgctgttgaaggagactctggttttggcttcagcgccatggaagtcgaggtagtaaaaagatttacatacttattagcataatgtggaaattgtcttttgtctgaacttttgtctttaatgatgattgcagacattggttcgatacaatcttgctgtggtgattatagtcttcaacaatggtggtgtctacggcggtgatcgaaggggacctgaagaaatctccggtcctcataaagaagatccagcaccaacatcatttgttccaaatgcaggctaccacaagctcattgaagcctttggaggcaaaggttatattgtggaaacacccgatgagcttaaatccgctctcgctgagtcgttcgccgcaagaaaacccgcggtggtaaatgttattattgatccttttgctggtgctgagagtgggagattacagcacaagaactaaaaagctttgtggagagtccctttaaataatgttgaagttgtttgttgtgaacaaaaaggatatacgtattagttttctgtttttcactattgtaaaccggatcataaaccggtccattttaaaccataattgaataaaaacacgtttccggttcaattcttgaa

SEQ ID NO: 140999 - DNA, 4102 bp, Arabidopsis thaliana landsberg
  unsure (1)..(4102): unsure at all n locations
gaggcggagaagcatctatcggagatggtagtgtcaaaagcactgattgcaaaaatagacagaccatctggaattgtgtgcttccagatcgcaaaggacagcaacgagattctaaactcgtgggcagggaatttggagaagcttctagatcttgtggaaaagagttgccaccaaattcacaaggaaaccatggttcacaaagccgctctcagaccttgaaaacatgcggtcttcttcatgaaaacttttcaggatcttcttcgttgagttattagcatctttatgtggtaaaaactcgaatcagtgtttccttttaaaaattgtactatggatctgtacactaacgaagtgttttgccacttattggttatttcaagtgttggtggattagtttttggttaaattgttagaaaatttacatgaatttactgaacgagaagaataatctcgtgtgtgccccaggagatagatccaaaccttgcgctgacaaaaagtcagacgataaaaaattgcttcatcaaagattgcaagttaataataaaaactaaaattatgatggcactggcacatgtgtagtcttccatactctaaaaaaaactaataaaatttgtttattgttgttaattaatgtgattaaatttaatagagaggagacagctttgccagttcatctctggtaaatagtccacgttctggcgtctttgggatttcaccaacaccgtgacagctccttagatctctcctcgattacttcctttttaatttccatggctctctaaaaatctctctctctttctctctctcttacttgtattgttacgatctctgcttgaagattatggacggcgccgatggaaccgttcgcgtcaagcctggtcgcggattcgaaacggagacggatgttgcggtttcgtcgccagtgacacgtcagaaagctgctgcagctaagcaattcatcgagaatcattataagaattacttgcaaggcttgcacgaacgaatggagaggtttggattcgggatttttgtttgttttcaaatctgatctggtctttgcttcatttcgaaagatgacttgtgtttgacttgagattttttttgaaaattacagacgcagggagtttcagaggaaagtgcaagaagctcagttacctgttgaggaacaagacgagatgatgaggaatctggctcgtcgtgaaactgagtatatgagacttcagagacgtaaaattgggattgatgattttgagcttttgaccgttattggcaaaggtgcctttggtgaggtacaatatcactaactatttcctaaatcgagcttgtttatacagagatctatgcgtttctctagaaattgactacttaaggaatcgattactcttcaggatatcttgtaatctctgaaattgtgttttcaggttagattatgtcgtttgagatctacatctgaagtttatgccatgaagaaattgaaaaaaactgagatgcttagccgtggacaggtacaaaaatcccctctatttttgttgtttgagaatagtagtactagcaagtgcaagattgatgcctgatatgagctgataaacttcgtacctttttcttatcatttgactggcttcactaggttgcttgcagtttttgtgcttgtgaagaaacaagtgaataattggacactttttcctttaattggttttgtgtctctaggtagagcatgtcaggtccgagaggaacttacttgcagaagttgacagccgttacattgtaaagcttttttactcttttcaagattctgaatgtttgtatcttatcatggagtatttacctgggggtgacatcatgacactactcatgagagaagacattctttctgaagatgttgcccgtttttatattgctgagagcattcttgccatccattcaattcatcaacacaactatgttcacaggtataataagttttgacatcatttttattgctagtgatttagggtgtaaaagagatctctacgtattgttaaaagtccatgtatactatttggctctttggttcttgatttgagtttgtttcttcttgcctgtagggacatcaaacctgataatttgatactagacaaaagtgggcatttgaagctttcagattttggtttatgtaagccacttgatgacaagtattcttcattgctattagaagacgatgaaatgttgtctcaggattcagagaaccagtcaggaaaatcagacgctgacaaagcaccctggcaaatgcctaaagagcagttactgcagtggaaacgcaatcgccgtgcattggtacttatgctgcttctctaattgaattacatgggctactcattttatgctacacaatagagatcagttaccacatccaaaatatcttgggtaatcaataggtctctcaattttataggcttattcaaccgttggaactcttgattacatggctccagaagtactcctaaagaaaggatatggaatggaatgtgattggtggtctctcggcgcaattttgtatgagatgttagttgggtatcccccattcagttatgatgacccccgtataacatgccgcaaggtaggtgtatacaattggtcagtcatataaaattttatctatattngaaaattcatgcttgtttaaaaagacttgtgcttcttatgtgagataattaattggagggtatgcttgaagttccctgaagaaccaaaaatatcagatgaagccagagacttgatttgtcggttgctttgtgatgttgattcaaggttgggaaccagaggtgttgaggagataaaggtgcgacttctgaaaaggatatgtaaaattacgattcagtttcatgatccttgatatcattgtattatattttgttcatgtttcagtcgcatccatggttcaaaggcaccccatgggacaaactgtatgacatggaggcagcttatagacccattgtcgatggagaactagacacacaaaattttgagaagtttcctgaagtaagtttgatagaatctcaaaaaacttgtcatgacataatttgtggcatgaggcattatgttgaaaccgactagtttggtgaacctaaaacttgttttaaaactgcttgttagaagtcaaaactgtcttatggatcttagtattgctaaaatgagaaagtcaaaccgtctaatatcctcatcaattttcttgatattttcttgtaggttgaaggatcaccatccgaagcaccacaagttggtccttggagaaaggtgaatcactccactagattcctatcgtataatctgtgttgcaaattgacatatgcgaaaatttctctgaacatgataaaactagcagattatgttttgttatggttgagactagtatcaactagtttggacagtatgctattgatgaaaacaatttggtgctaactttataaattgggttgagcagatgttgacgtccaaggacaccaacttcataggatttacatttaagaagtcagacatcacaagatcaatggaaagttcaggtagtcttcatatctcttgtctctactgcttatgtgtttgcttattataacttgctcttaagataaattgtcttctagaaaaaggtccaatagttggatatagatctaagtatcagttgtgacattgaaatgtaggtgcagacatgaaatcaaatggatcaggggaagccccgtcgttgatatcattgttaggtatgtaaccaaactgtgaacgccgcaaagcgagtgatagttttgtggttgtagaagagagattgaatgtgaatgtttatatgattcaggtcggatcaatatggaagaaggtgaaggtggtgagttaaaccacaagacatagggaaaatacaaatattattgattttttatccgcttgcagttgttttgatcatttggcagaggcaatggagaggcgatggtagttttttaaccacatcacttatgatggggttcataaaaacttctatttcctttttttttttcttgtaacatatttgtttttttttcaatctaaaaaagaaactgtaaagcatggaagaataatttctggaacattttacccacaagttatc

SEQ ID NO: 141000 - DNA, 2364 bp, Arabidopsis thaliana landsberg
tctttacgcgctatttcaagaccaaaccttttctctcttctagagtgaaactgtggaagcaactctcacagagcagcaatggcggagaagtcgagcttcttcgttcatttcagctgtcttctgcttcttctaactatcataataacatgtggagagggagtgaggaatccggtgaggccaagatcatcggagagaagagcattgatggacggccaagatctctcgaggccattgaagctgacatttggtgggccttctcgtaattggactgacgctattcccatcggtaatggccgtctcggagccacgatctggggcggcgtctcctctgagattctcaacatcaatggtaaatgttaaaacggcgtcgttttttttggatttttgtccttttctctcccattctttgtgttgttttttattttggagatttggttaataaatgctatctgctgtgttctctaaaatctattgtcagagatcaatcaatgttcttgtttctgaacaggggattatgcttgagacttgaaataaattgtgtaaatgaaatacattgctacaaaagcataagcatttctgaatcttgtttccgctaagatgattttgtggattttgattgatagaggacacaatttggactggagtaccagcagactacacgaaccagaaggcccctgaagcattagcagaagtgaggaggcttgttgatgaaagaaactatgctgaagctacttcagaagctgtcaaattatcaggccagccttctgatgtatgttctattcttttggtgaaaatgttgctttcacttcttgttttttgtttattatgtgtaaagactaatccttttgtttgtggcctctaaaggtttaccagattgtgggagatttgaatttagagtttgacagttcgcatcggaagtacactcaagcctcttatcgccgtgaactcgacttggaaactgctgtagctaaagtaagttactcggttggggctgtggacttctcaagggagtttttcgcttctaatccggatcaagtaatagtagccaagatctatgcaagcaaaccgggatcattgtcttttaaggtgtcttttgacagcgagttgcaccatcattcagagacaaatcccaaggctaatcagattttgatgcggggaagttgtcgccccaagcgacttcctgtgaacttgaagaaaagtatcaacgcgacaaatataccctatgatgatcacaaaggattgcagtttgcttcgattcttgaagtgagagtcagcaacggtggctctgtgtcttccttaggtggcaagaaactaagtgttgaaaaggcagactgggcggttctgcttctggcggcttcatctaactttgatgggccatttactatgcctgttgattctaagatagaccctgcaaaggaatgcgttaacagaatcagctcagtccagaaatactcgtactctgatctttatgctcgtcatttgggtgactatcagaaacttttcaaccgggtctctttacacctttctggaagctcaacaaatgaaactgtgcaacaggcaacttcaactgctgaaagggtgcgatcatttaaaaccgatcaagacccttcattggtggaacttctattccaatatggtcgatacctgcttatatcttcttcaagacccgggactcaggtggctaacttgcagggtatatggaacagggacattcagccaccatgggagtgcgttttcgccttactatcttttcttggactttcatagcttttgttgtatcactaactccacttcttcttctgcggtattgcagtggtgctcctcacctgaacattaatctgcagatgaactattggcattctcttcctggtaatatccgggaatgtcaggaaccattgtttgattatatgtctgctttagcaattaatggccgcaagacagcacaagtaagtttctatccttttttctaatgatgacctttgcaatgcatttgtgctccatcactagagacattagtctaagtatcattttgttgcgctgtataggtgaactacggagcaagtggttgggtggcacatcaagtatcagacatatgggcaaaaacttcaccagatagaggtgaggcagtgtgggcactctggcccatgggtggagcttggctctgcactcatgcatgggagcattatacatacacaatggacaaggtatggacctcaattttctgattttcaaatcagtttctttaaccggtactatgtttaatcagcttttacttgttgattcatttctaggaatttcttaaaaagaaaggatatccattgttggaaggatgtacgtcgtttcttttggactggctgatcaaag

SEQ ID NO: 141001 - DNA, 1236 bp, Arabidopsis thaliana landsberg
atgtttgagtgtccgatctgtaagaatcaattcacgtcagaggaagaagtctctgttcatgtcgagagctgtcttggggacactaatggagacgaatcttcatttgagaaggataatgttgataacgataattccgaaatggagaaacttgtggttgtgtatctctctgggaagccaagtgagagttctattgatgttttgcttaggttgtttaagaacatagtgaaagaacctgagaatgctaagtttagaaaagttagaatgagtaatgctaagattaaagaagctattggtgatgttgctggaggtgtcgagcttcttgagttggttggttttgaattgaaagaggaaaatgatgagatttgggctgttatggatgttcctagtgaagaacaatctatattgatcaataaagttgtcggatatctagaaaagagaaagacagagagttcaggatcttcagctcaggttatggaacctgtggctccaaagaagattgatagagaggtatagttctttgcttgatcacatttttggtgatgaatatgtttagtttgtgacttgttcttagaatggttgtttcttggttcagattcgtgtctttttctcggtttctgaaaacgtagcatcgagaatagaggtacctgattcgttctatagtctctcggcggatgaaataaagagagaagcggatttacggaggaaaaagattgcggagtcacagcttttgattccaagatcttataaggagaaacaagcgaaagcagctagaaagagatacaaaagaagtatgataagagtgcagtttcctgacggagttgtgcttcaaggtgtgtttgctccatgggaacctacttttgctctctatgaggttaacatctgaattctctttgggttttactcaatgaaggccaaagtttttgaaatttctgtggtttttgttttcttctcagtttgtgagctctgctttgaaagaaccaagtttgcagtttgagcttctggatcctgtgctggttaaacggcgtgtgattccacatactccagccccgggacagaaaccgataacgttagaggacgaagagcttgttccgtcagcgctcatcaggttcagaccgatcgaaacagactctctcgtctttacaggactccgcaatgaactcctggagatcagtgaaccactctcgtgatcatttgtgttccactgatgatttagcttgagcccatgaaataagttta

SEQ ID NO: 141002 - DNA, 1066 bp, Arabidopsis thaliana landsberg
ccatttccgattgttctttcttcttgaccaaacccagatagataaaaattcgttccaattccagtgagctcggaaaatggcgtccttcaagttgatgtctcttccaattccgacatgtctcgccgtaattcttcttatgcttcatcttccccttctataagatcatcgcaccatctccgaccaaatcctcacgccgatcactccagaatcagtttcgcttacggcggaggagtcaacgattacactttcgcgtctgattcaaagcccttcgagatggcgattgatgttgatcggagtatcggagatcggaacagcgttaacaacggaaagagtgttgacgatgtttggaaagagattgtatctggagagcaaaagacgatcatgatgaaggaagaagaaccagaagatataatgacacttgaggatttcttagcgaaagcagaaatggacgagggagcttcagatgaaatcgatgtgaagattccaacggagagactcaacaacgacggtagctatacatttgattttccgatgcagcgacacagttcgttccagatggttgaaggatcaatgggtggaggagtaacgagaggaaagagagggagagtgatgatggaggcaatggataaagctgcagctcagagacagaagaggatgatcaagaaccgtgaatccgctgctaggtctcgagagaggaaacaggcttatcaggttgagttagagactttggctgccaagttagaggaggagaatgagcagcttttgaaggagattgaagagagcactaaagagagatacaagaagctcatggaggttctgattccggtcgatgagaaaccaaggccaccgtcgaggcccttaagcaggagccattccttggaatggtgaagtgtggtaaaaaaaacttttgtatgtaaaaaaaataaaaacatatgggcttgattactatattataatctatatagtaaagtgatggtgatatggttagtacttagttacatgtaatgtatctaagggatgtaatggataatacatagctttttgctgatttataagatatctatgg

SEQ ID NO: 141003 - DNA, 1202 bp, Arabidopsis thaliana landsberg
gaaagacgaagatctccaagtcccaagtacgtaactactttctccatctacattcaattgtttctccttaatttctctagtacatatttacttgtgctataagtaattgattttatatcacccatgtgcaggttgttaacacaagacgtaaacatgggtcatcttgggttcttagttatgattatggtaggagtcatggcttcttctgtgagcggctacggtggcggttggatcaacgctcacgccactttttacggtggtggtgatgcttccggcacaatgggtaaaaaccgttatttacataactcattccttacaaattatcatatttactaatcttcaatgttacttctttgtaggtggtgcttgtggatatggtaatctatatagccaaggctacgggacgagcacggcggctctaagcacagctctcttcaacaatggacttagctgtggttcttgctttgagataagatgtgaaaacgatggtaaatggtgtttacctggctcaatcgttgtaaccgctacaaacttctgcccgccaaataacgcgttagcgaacaataatggcggttggtgtaatcctcctcttgaacactttgaccttgctcagcctgtttttcaacgcattgctcagtacagagctggaatcgtccctgtttcctacagaaggtaacattttattcagcttctctgtttcaaaacagaggatatcaaatttctctagatgctctgtttttttttcttaaaacagagtatatgctaagtttaataacagagttcttgaaaaaaaaagatcctaaatataaacttttcgatactttggtgttttgtagggttccttgcaggagaagaggaggaataagattcacgataaacggccactcatacttcaaccttgtgctgatcacaaacgtcggtggtgccggagacgttcactcggcggcgatcaagggttcaagaacagtgtggcaagctatgtcaaggaactgggggcaaaattggcaaagcaactcttacctcaacggtcaagcactttcctttaaggtcaccaccagcgacggccgcacagttgtctccttcacgccgctcctgccggctggtcttatggccagacttttgccggtggacagttccgttaaaaagggcaagttggttaatctctctccatatatctaaagtaactcatttgtgtggtatat

SEQ ID NO: 141004 - DNA, 2255 bp, Arabidopsis thaliana landsberg
atcagtatcagcaaccgtacactgattcttattatgtccctcaagtttcacatccacccatgcaacaaccaaccatgtttatgccacaccaagctcagccagctccgcaggtttctaaagttttggttttgttgcattttcttttcttattcttccttgcaccatcatgcattaatgaccatccttatctagcagttctcagatgtctagatcaggaaagtgtccgtttctttatgtttttgtctaagggattggtcaagcttttgagatatgatgacatctgaaatatgtatgtggtgctcaaatgcatagtctcttcgtttgtgtgatttttttagtcagaatagtagatggattataataggtatgtggttctttgacctaaaacaaaactccccaaaactgaacattttcagcctctaaacccatgtcctagagaaacggataatctagacctttacttttattcactgctgtagaatctatatcctagagaggtcgtgagaaaattttgtcgtgggaaagtgttttgtttgctatgtacaggtttcttgggccaacttgttgactatagtgtgtttatgcagccatcttttactccagctcctacaagcaatgctcagccatccatgagaactacatttgttccttcaactccccctgcactgaagaatgcagatcaatatcagcagccaaccatgagttctcattcattcacggtatgagaaattttgcctccagtgtgtttgatgttacccgcagttttagtttaatgaagctaacttctaaattttcatcagggaccatctaacaatgcataccctgttcccccgggtcctggtcaatatgcaccttctggcccttcacaacttgggcaatatcctaaccctaagatgccccaagttgttgctccagcagctggacccataggatttacgcccatggcaactccaggagttgctccaagatctgtgcaaccagcaagtcctccaacacagcaggcagctgcacaggcagcccctgcgcctgcaactccgccaccaactgttcagactgcagatacttccaacgttccaggtatcgtacgacgtttcattagcaccttatgtctgttttgtttctgagtaaagtcatataatgatcacctcttgtaaactgatccagcccaccagaaacctgtgatagcaacgttgacaaggcttttcaatgagacatcggaagcactgggaggcgcacgtgcgaatactactaagaagcgtgagatagaagacaactcgagaaaattaggtgctctgtttgtgaaactcaacagcggagacatctccaagaatgctgcggacaaactcgcacagctatgccaagctctggacaacaatgacttcagcacagcccttcaaatacaggtaagctagtaaattgatctcttctgggttccttgtagatgatttcgtgtttaataatcagttttattgacctcaaaaacaaacaaacaggtacttctgactaccagcgaatgggacgaatgcaacttctggctggcaacactaaagcggatgatggtcaaggccaggcaaaatgtgcggtgattatttattttctgggttcatggatttttttttttataaatctaaaggagggacgtgtgtatcaaactccttttgctttcttaattttggtctttttaaaacgccgttgctgctctaatcttcttttttttttttttttgtcatttatgaacctcatctgctacttccagttactcttttgtttagatagtatagagatcatcagattgctgaaacattctcatgtttttggatgttactttaccggacaagtttgttcgtctttctttctacgaattttgttagatttttacgctctttgtttttcttgtcatatttgaaacatggattaagcaaaaagtagcatttataaaatattgttgagcaacaactaaatattccgccagaatctcttactaataaaagggagacacgggtagcgggagtatcctagaacgcgctgagcaaacttttaaaagaaacgtgccagtcaccatcatggcctttttgaggtcgatctcggccatggtgcagattccatgtaggaggaagaaagacatcatcccccacgactacgagggcctcatccttcgaatgtacattataggtattattactttgattaggacaataaggaaaggagtattgaagaaactggatgtaaaagatgatggtacgaaagcgacatga

SEQ ID NO: 141005 - DNA, 963 bp, Arabidopsis thaliana landsberg; identical to SEQ ID NO: 54785

SEQ ID NO: 141006 - DNA, 2406 bp, Arabidopsis thaliana landsberg
atgggttgtgtattgggtcgacccggatcatcaggatcagtttctgggtctagagacgaagttagtactaggattgagtctaatcgacatcaagttaacaatgtgtctgtgaccaaaaccgaaacaacagagagcactagtgctgttgttgttgcttctgcttctaatggtgaggaagttaggaatcatgaagatgttgtggatcagaagaaagagaatggctttgttgtgactgaggccaaggagaggaaatcgaaaggcgaaagaaaaaggtctaagcctcctgacccgagacggagcaacccgccaaagaatttgctcggtgagcaagttgctgctggatggccctcgtggttgtctgaagtttgtggggaagcgttaagcggatggcttccaagaaaagcggattcctttgagaagattgataaggtgagatcaaaatctgtttttgtttgttctttgcaatgattttgggtaattgaagtttgttggttatgtgtgtgtgtgtgtgtagattggatcaggaacgtatagtaatgtgtacaaggcgaaagattcgctgacaggaaacattgtggctttaaagaaagtgcggtgtgatgttaatgaacgggagagtttaaaatttatggctagagagattctgattttgaggagattggatcatcctaatgtcattaaattggaaggtttggttacttcgaggatgtcgagtagtttatacttggttttccgttatatggatcatgatttagctggtctcgccgctagcccggagataaaattcactgagcaacaggttaggccttggtgaaatagattcacaaatacaaaatccgaggcagatcctaaccttgttaataatgtctatgttttcaggttaaatgctatatgaagcaactactttcagggctcgagcattgccataaccgaggagttctacaccgtgatattaaaggatcaaaccttcttatagatgacggtggagttcttagaataggtgatttcgggcttgcaacgttttttgatgcgagtaagaggcaagagatgacgaatcgggttgttactttatggtacagatcaccagagcttcttcatggtgttgttgagtatagtgtcggagttgatttgtggagtgctggttgcattttagctgagttattagctggtagagcgataatgccaggtcgtaacgaggttagttctcaagtaatgatctttttctttccgatttgagttatttcatatgaaatgtgaactggcttaatgttcacgagcaggtcgagcagttgcataggatatataagttatgtggatcgccttcagaagaatattggaagaagattagacttccttctactcataagcatgctcatcacaagcctttaccacagtataagagaagaataagagaggtttacaaagatttctctcctgaggcgctttctctactcgatacgcttctagcgctcgatccagctgaacgccagacagctacagatgtgttgatgagtgatgtaagttttttgcaatggaaattttgaaactttgaatagaacaaactagttaggggtatcaagttagattacagaaatgagagtgacgctaagaatgaaaaatgcttggaacttgtgaatctttaggcgtgtgacttgatagtggttaaaacttccatggccgattttgttgttgttgttgtgcagttcttcacgacggagccattggcatgtcaaccttctgatctcccgaaatatcctccaagtaaagagattgatgccaagagacgagacgaagagtatcggaggtaaagcgtttctgttctagtatggataggtttggtacaatctcagttttagtcagaatatgttttggtttggtatatggttgcttgagagatgtattcatttctgcagacaaagagaagcgcgcaaggcccaaggagagagcggaagaagaatgagaccccgagaacgagccccaagagcaatgccggctcctgaagccaacgccgagaaccagtctaacattgatgtaagaatttaaaacaaaaaaagaagtgaatctttgattggttaatgtcttgagtactttgaacttgttctcttaaaacagaggatgcgtatcatcacacacgcgaatgcaaagagcaagagcgagaagtttcctccaccgcatcaagacgggtcactcggttttcaggtgggatcttcaaggcgactggatccatcagagataccgtatagcacaaactcattcacatcatcatactccaaagagccatttcaaacttggtcaggccctttggctcccattggagcacctgactcaaccacaaggagaagaaacgatattaacaaagagagaagaatggcttctaaggtcaaaggcaaaagaatcgttgtttga

SEQ ID NO: 141007 - DNA, 490 bp, Arabidopsis thaliana landsberg
tcataccgacttccaatctatggggtactttgcttacatggccatcgacagcctcccgggaaatcaattcttcgaacgcttaacgcttctcttcgttccaacaagccggagattcaagtacatgttctgaaaatgatctgttttttatttcttcaagttattattattcagatttctcttcaaagactgatcatgcattgttgttttcagggtcttggagggagcacacgcgtcgttcgtggagaaagttccttacaagtcaatggctgcgttcacactgttgcagatattctactttgggctgtgctatggggtgacgtggattccggtggctggaatcatgtttccggttcctttcttcctcttaatagctatcagacagtacattctcccgaagctctttaacccggcccatctccgagaactcgatgccgctgagtacgaggaaatccccggtactccgagaaacccgctggaactgtctttccgg

SEQ ID NO: 141008 - DNA, 1388 bp, Arabidopsis thaliana landsberg
  unsure (1)..(1388): unsure at all n locations
atgaaccttgatgagcttttgaagagtgtctgttctgttgaagctaatcagccatcgtctatggctgtcaatggtggagcagctgctcaggagggtctttctcgccaggggagtttgactttgcctcgggatctcagcaaaaagactgttgatgaggtttggaaagacattcagcagaataagaatggaggtagtgctcatgagaggagggataagcagcctacacttggggaaatgacgcttgaagacctgttgttgaaaaaaanaaaaccnaanngctccaggtgagctggctcactgagactatccctggttcgaaccatgatggtcctgttggtggtggtagtgctggttcaggtgctggtttagggcaaaacattactcaagttggcccatggattcaatatcatcagctcccatcaatgccacagcctcaagcatttatgccctatccggtttcagatatgcaagcaatggtgtctcagtcttctttgatgggtggtttgtcagatacacaaactcctggaaggaagagggtagcttcaggagaagttgtagagaagactgtagagaggaggcagaagagaatgataaagaacagagagtctgctgctcgttcccgagctaggaaacaggtgagaaacaactaatttgttgttgttattcttcttgtcaagtcatgctcgtttttgttttaacattggatattgatgagcaggcttacactcatgagctagagatcaaagtttcacggttagaagaagaaaacgaaagactcaggaagcaaaaggtaatgcattgtaggtttttctccctttttacaacacatgcattgattaaatttgtgattactagaaacttgtaagagctgatcgttgattagttctggattcatattaaagggaatgatagatgatagaagatgtagtgaagtatagaatagggcacacgcatagtagacaatatatgatagaaaatataaccacgaacaagagacaggaggaataggtttagaccaaacgtcttagaagacatagttttcctttacccggaacaagttggtcttgctggtttctagtcttcatggactttctgttcttcaattttgtctgcgtttatgtgtggccaaagctaatccttacattactttgcaggaggtggaaaaaatcctcccaagtgtaccaccgcctgatcccaatcgtcagctccgacggacaagctcggctcctttctgatctctaaactcttttagtctttttctttttttctcttctgtgtcggttcacttataaaaaagagaggaaaacagctttgtttctttgtacattccgtagactttcttgacttggagcaattctgttaactttaaaatattctcgagttattgt

SEQ ID NO: 141009 - DNA, 749 bp, Arabidopsis thaliana landsberg
tcaggaaaatctcactatctcaaggtttacattatgctgctgttcgtagtactgcacttggtgccccttttcgtccaatcaccgtgagagacacaattggtgatcttccatcagtagaaaacggagactctaggacaaacaaagaggtatgataacacatctggagaaaatatctatacatacatatttgctaaacacaaatgacgtgaacccattaatttattaatttatgtgggggaaattcttgtttcttgcagtataaagaggttgcagtctcgtggttccaaaaggagataagaggaaacacgattgctctcactgatcatatctgcaaggctatgaatgagcttaacctcattcgatgcaaattaatcccaactaggcctggggctgattggcatgacttgccaaagagaaaggtcagtcttatacatcctacctcaggaatacctttgtcaggttgactacggtcaaaagaattgcttttgaaactagaaatcaacccaaatcgctttgttttaatatcacaggttacgttatctgatgggcgcgtagaagaaatgattcctttttgtctcccaaacacagctgagcgccacaacggttggaagggactatatgggagattagattggcaaggaaactttccgacttccgtcacggatcctcagcccatgggtaaggttggaatgtgctttcatcctgaacagcacagaatccttacagtccgtgaatgcgcccgatctcag

SEQ ID NO: 141010 - DNA, 3118 bp, Arabidopsis thaliana landsberg
aactgttaatttccccctcgttccagcagcaaccgctacaaaagatgcaacatcctccttctgagctagctcagctcttgtcgcagcaaactcagagtctacaagcaacattccaatcgtctcagcaagcaatttctcagctgcagcagcaggtgcagtctatgcagcaaccaaaccaaaatttaccactctcacagaatggccgagctggtaaacaacaggtatgaatatagtctctcagttgcgtctgcccagacgggttcttcagctgctattgtgttgttttaacttaaaattatttcctgatagacatcccgttttttatccttcatgtgttttagtattctccccttttctaatgttcctctcggctgcttctttatcagtgggctggatctgcaattccaagagtggctagcaccactggttcgacaccagtgagctatgtgcaaacagctgcacctgcagtaagtcagagcgtaggttctgtcaaatgtacctggaccgagcatacctcgcctgatggatttaaatattattacaatggtctaacgggtgaaagcaaggtgagaaacgtggttcctctttaatatatttccttgtgagtttcaggagtattcctcctggtttattgtgctattgataatccttacacatgtatattttatatttgaagtccttcagtacgtgccatattatgtatataattcacttttgcagtgggaaaaacctgaggaaatgatagtgttcgaacgagagcaacagaaacagcaacaacatcaagagaagccaactatacagcagtcccagacccaattacagccgttgcagcaacaaccacaacaagttcagcagcaatatcagggccagcaattacagcagccgttttattcttcactggttggtttcgttttcatgctggttacattcaaatatttttgtcacatggtttctaatttgcatatttactcttgttcatttggagttgcagtatccaactccaggggccagccataatactcaggtgtatatctgtttaatctgtttacttatttttcatttcaagatttgattcttgatatgctaatcttgtggtagaaggagattgaccaccttaaagtaaaattcagtagccatggttttgccagcattttgaaatacagataacaaatctctaacgtgaatgcctattttcctttctaaaatgcagtatccatcattgccagttggtcaaaatagccaggtacatatctgaatctgtggacttatttttcattgaactgattgattctcagttacaacattgacttcctctgatgcgtagtttttgtaacatatcagaataaaaaaaacttcatctgattcgtatattctctggttgaaaatctttttttcttttttggaaaatgcagtttcctatgtcaggaattggtcagaatgctcaggtatatatctcattttgtattaacaatttcccataccttctgtacctttgaatttaatcacagaacataatgagttcttggatttaatgtcattttaaaaagaaacatcagtgatatgacttccttccttggttaaaaatggtttaggcagagcttattttctattctgtttggattgtctaggattatgctcggacacatatacccgtgggagctgcttcaatgaatgatatatcaagaactcaacaggtagttatggtttttatcagtgattcagaacttctctctgttcataattcgtcctttggtattcagatgttctttttcgttgaaaccgtttttttccttaattctctttacaatcatatctctttttcccagagccgtcaatctccccaagaactcatgtggaagaataaagcttgaggttcatatctaccctttctctcctctctcttgtattttctccataccgaaacacattccaatgtatgtggtttctttagttgaagttacctctgtgttgatcgatactctacttcaggtacatgagacgaggagctaaactatctcagtagctagatagaaatttctggaactaattagtcaaggagaggaaaagcagcaatggtagtgtccttagtctctgatttttttagttaaccccttcagttataatagataggcgatcgtagaccatctgcattctatcttttctctaatcagatatctcctcctttttcattttaagagctgccaaacaatggcctgttgtaacatagctagcgcaagttatgtctcatgttgtgttactagtagtaacttagctgggtaaaccaaactttgatccagattaggagtcatatataattatataaatagaatatgtacattcatagatagctcatcacttataatgagactagatcttagcaaaatccaactctaattgtcattttcagagatctatcaatttgtagtttcctgatcttcatatatgtgttcgctcttctaatgattacggtaaaatcagagtcctacgttggtggacttctttaatttttatatagataattagatatcattcaataagtcgggcgtttatttttagttaatcattctacaattcttcctaatctcgctattactaccaccgggtatccctcccattttaaccatagcgttcttaaaatcctcaaagaaaaccgactgatctgttgcgtaggtctcaacaatcgcccttgtccctgggtcttgaaccgctaaagcctggtctgatggaagcaatccctcacccgagaggaggtttacatagtactggttgtcaaatgttgatggagtcaccaagtcaagctgagtgatacctacactgggcccaacagtcgagcataactgttgcagtgactcgaggaactcaaggttgtctccgtggttagctggttgtccagtttgcagtggctgcaaccgagctgtaaacgaagtgcaccgtgcctttcccaatgtatgtccacctggtttccatatgtgtaagtatcaataacttgggttggtctagagaaagataaagaagagtacaagagaatgtataccggaaagagcgaccatgtcggtttgtgaaaggccaagattctggaaagtagagatgagagttgatacggttgagtttggtgagg

SEQ ID NO: 141011 - DNA, 2384 bp, Arabidopsis thaliana landsberg
tgtcaatgggtaaaaccgaggatgatgtgagtctccgtgtcgccggcggaagctacctggcgattcgacggtgaggaatgctcggtgtgggtgttgcaaatggatctcaagcttcgttgggttcaaatgtttattcgtgctgcttttatcagtcgctttgtttctttcggctttgtttttgttgcttccgtttcctatggatcgtgaggattcgaatcttgatcccagatttagaggtaaatctcctctttctgaattcgtgcaaaagtttcaatttttgctaaaagctattttagctgctgaggtcctatttggacaatgaatttactctatagctttaacattgatttgagtctatgtttctcatcttctatgtcctgaattttgcttattactaattagaaagctattttgggaatgagattttgactgtgatttgtgctttaatggtcagggatgagtcaaaactgcttcctctttgaagtttttagataggaagattatgttattgaggagaaataaatctgtgaacctttttaaagctatcctgaatcatagttacttgacattattagtagtgatgcgtgttcatatctcagtgactctgtcttggctttcacttgagacacctgtaaattttccatgagtagtgaagagaagacatcttcttacaagttttaactcagggaaaatggatgatcaatactctgatttataggttttagggtcatggatatggttatcgatcactgttaggatattcgttccttgttaattgtttctcacattttgatgcaggtcatgctatagtggccagttttagcatcaatagatcggcttcttttcttaatgaaaatacattgcagcttcagaatgacatctttcaagagatgagctacatttccatcaaagtatgatgttttcatctttttcttaacttttaaattattgtttctgattcgttttgtcatctcgtttctcttctgatctaacttggctctaatgaaacaataggtaactatcctggctgttgagccgtcagatgaattgaacataacaaaggttgtgtttggaattgaccctgatactggataccgagaaatcttacctctgtccctgagttctatcaaagagatgtttgaatcggtgctcataaatcaatctactctccagcttacaaaatccttgtttggggaaaccttcctttttgaagtgctaaaatttccaggaggaatcactgtgattccaccacaaagtgctttccctctgcagaaattcaagattgttttcaactttaccctaaactactctattcaccagatacagataaacttcaatacccttgctagtcaactcaaaaatgggctgaatctcgcaccatacgaggtttgtcatttctatcacaatacattattttctaaatctttcaatcatgttgaagttatgaattcattagcaactgttaatgccttgagttagattgttctgaaacatggatttaaccagactgcagaattggtatgtaagcttatcgaactcagaagggtcgaccgtgtctcccccgacaactgttcactgatcagttttgctaatagtcgggacttcaaattcaagcccaaggttgaaacaactgactgataccatcacaggttcacgctcgaaaaaccttggcctgaataataccatatttggtaaggtcaagcaagttcgtctgtcatctttcttgccaaacagcagtgatagtagcaccaaatctccatcaccctcacctagtccccattcgaagcatcaccatcaccatcaccatcaccatcaccaccaccaccatcaccatcacaaccatcatcaccaccaccaccacaatcttagcccgaaaatggctcccgaggtttcacctgtggcctctcctgctcctcacagaagccgtaagagagctccatctgcacctccaccctgcaacccagggaatagagtacatttcaaggagaaacgcgtgcagttttcatccacacctgcgcctgctccttctgctggggcaccacatcatcagctgcactcaccggccccaatttctgcagccaagtctcatatagttccaatctctgcccctctaccacatgtggtgtttgcccatgcagctcaaccacccataacggaaccacgggaaccacatgcaaacgaagttgctcatcctcaaccgcagtcctcttcatgtaagttgctacttaaagtcttccaatttagcaaagatatatcaaatcatagactcccaattctaatcaaatgccttcttctttctgtgtttggcagcagcgattgaggttttaccagctatgccatggattgtccttctcatgctgatagtggcctggcttcatgaataa

SEQ ID NO: 141012 - DNA, 4499 bp, Arabidopsis thaliana landsberg
atggttgttctgagcactttggcgttggtaagagccgcttactcgctcaacagtttcgtctttgaagccgaggacatccgattcggttctccgtggtggttcgtcgtcgtcggtgtcgcgtgtttcctcgtactcttcgccggaataatgtcgggtctcacactcggactaatgtcccttggtctcgttgagctcgagattctccaacagagtggttcctccgccgagaaaaaacaggccggtacgcctctttaatttttttcgactttcgatatctgtgtgttgttggctcaaaattacatacctgacttgttcaattcgtaatggctatagaatttcttaaaacttgatttctaatttcttattctgtaatttttgttaaaagcagagtgatagagtctctatttttactcttgacggagttacttgaattgtttttggatattgcagctgcaatcttaccagtggtaaagaagcagcatcaacttcttgtgactctacttctttgcaatgcagctgctatggaggttaattattgttgatttgttaccctagtttttctgatttacaacgataaattactgtctttgtgcacctcagaatcagtgaattttgttcttggatcttttgtctcaggctcttcctatatgcctggataagatattccatccttttgtggctgttttactctcagttacttttgttcttgcttttggagaggtaacttactttacatatcttcttggtatcaaattgtgttctcttcagttatgactgatacaaactatgttgttgcaattctaaccagataattccgcaagctatatgctctagatatggacttgctgttggcgcaaactttttgtggttggttcgcattttgatgataatctgctatccgattgcttaccctatcggaaaggtgatgttgttgtagactactctttaatagagcactaaatgtcataataaatggttttgtttcactagttgctacaatagtcagaacgttatgttacaaccatggaagatttggaaatttgttgaaaaatctagcaatgtctttaagaagtggtacttgttagagctaactgcattgattatatcatcaacacaagttgatacatttattatgccacagtggtatggagctgtagatgtttacttttatcaacgttttacatgcctcaggttcttgatgctgtaattgggcataatgacacactatttaggcgagctcagcttaaagcccttgtctcaattcacagccaggaggtagtttccctttatgatctaacctggcgaatccagaataggaaaaggacagatattacgctgtaaccttgtctgatttgtgaagtagttagttacgttgcttgattatcaaaagtattgttgtttccagctcccattgacatgctatttctctccaacataggctggtaaggggggtgaactgacacacgaggaaacaatgattataagcggagctctggatttgagccagaaggtatgtatttgaattagatgtgcgtatctgaaacctacacaggtcatgctgatgaacaagttatgttgtaaatgaaatgatttacttgctattccccattgatctggatttagattctccatgaaaacttgttgcacgaggatgagtttactttgttgaactgatgcatatactttgattctttcgccttccagttcagaacatatcatatactgcttcaatattacttccaatgatctaattcatatactttcgtttactggaagttcagactgctgaggaggctatgacgccaattgaatcaacattttcgctggatgtaaatacaaagttagactggtgagttaaggttagagttggccttttttcgacaaattgttttctctatctggcaagtctttgaaaagtaaactattttccttggtctatctgcttagtaataacgcatggtttgaaatcatgaattttcacctcctaaatgcagggaaacaattggaaaaatactgtcacggggtcatagccgaatcccggtctacttagggaatccgaaaaatatcattgggcttctattggtacacctgtcaaacttttgcattacttcattttactaaatcctactagattacatacgtctgtatccgctggtatcatctaggttaagagtcttctaactgtacgagcagagacagaggcacctgtaagctctgtttccatcaggaagatcccaaggtatatctgacttccctgagtataagttgacctactcatattatgtttctagatagaagtataagttcccatacattgcctttccagggttccatcagacatgccattgtatgatatcctcaatgagtttcaaaagggaagcagtcacatggctgcagttgtcaaagtcaaagacaaagataaaaagaataacatgcagttactgagtaatggcgaaacacccaaagaaaatatgaagttttaccagagtagtaatttaacagctcctttgttgaagcatgaatcccatgatgtagttgttgatattgataaagtaccaaagcatgtgaaaaataggggaagaaacttccaacagaacggtactgtgacgagagacttaccgtgtttgttggaagataacgaggatgcagaagtgattggcatcatcaccttagaggatgtctttgaagaacttctacaagtacgatcttatgcttttcgtttttccttttctgacctcaaaaatctctcttttatgcatatttttttctatatacatttcactttacggagctttcctttggtgatttactgaaaatgcaggcagaaattgtggatgaaactgatgtttacatcgatgtacataaaaggtattgtagtggtatttattacttctgagtcacttatctaatgtttaccaaaggaaggttctcactaaaaagtaaaagtgcatcatattttgctattatttcagggtacgtgtggcggcggctgcagcagcagctgtatcatctataacacgtgcttcaccagcggtaagcaagcaacattggctgatcaaatcttcggcatctcttaaccaataaatttgaaaacttgtgaggggttaacggttattttgtgtgatacaggagattcaaagcaaggtaggacaaacggtgaagaagctagttgggaaagaagcacgaggtacaaagaattacacaacaaaaatcacagagcctcttttagcagaatcagatagatagtagttaaaaaggtttaaggttcagtagcacttactttgttgtatgtttgtgtgtgtctatatataaagttgaaataatgaacaaaaaaaagagaagaaaagagttttgtttctttcaaaaccaataaaatggtacatcccgatttcatcagcttgaacgatatgaagtatgagcacaaaagtggccgatgactcaaaatgtatttccatctttctccttaatgcccaaacgagagatatcatctatagctcgataccaaatccattaagtaagtattcacgtaatgtagtaagcaacttctcaaaaggccaatcccatggccatgagtaagtgaatggcatgtcgtttaagcaatgcatatgggtcaatccaatctctggtaatatttttcttccgtggaatgttaatggatttgatgatttgagttcatttatccaggcaaaatcttgttattaattccattataatcaactaaaataaaagcaaattttttgctaattacagatccaaataaaatcaattatggaaattgaaatgaaaattaaaatgaggttgatctatatacggtaattggtaaatgttaacaccaaaaacagataaaaacacaaaaaagggtagacagagaaaaaacaacacagagacctctccgtcgtgttctctccccctctcttgaactttccggtaagcttcgtcgattttcctgttggacaagtgattgtaaaagtagatagttttgattaacctagatatctccattcttgtagaaacttcacctatagctcagtcgggtctgattgttacttcgaattgagtcgattgatctgccttataaaccctaatttcgtggtccttgtgcactctcacagtttccgaacccttattcttgattttctgaatttcctgagctctctcttgttactaatttgatttgaaagatggatttgggagtcaattcttctcatcgatggctctgggttttgaaattgagttcgttgtttctatgatttttgagcaaatatcatctccgttggttacttttagtgtgtttaagtttttgaacagctaatctctgttagttacttatacggtgattgatctgttttcagtttattctctgtatcaatgcagattttgtatcaaacacgaacctaatactgcttccttgactggtaatgtaagtatttgggttgttaactccatggaaaaatcaggcccggtgcagaaagccgttgttctccagccatttgtcaagt

SEQ ID NO: 141013 - DNA, 216 bp, Arabidopsis thaliana landsberg
attacccatttgatcaaagaaaaaaaatggaacaagatcatgtaaaagtcaaaaagagagtagcttttgttctaatcgatggtttaggagatgtaacaataccaaaactaggttacaaaactccattacaagcagcaaacatacctaatctcgacgcaattgcatcagctggtatcaacggtttaatggatccagtagaagttggtttaggttgtg

SEQ ID NO: 141014 - DNA, 2283 bp, Arabidopsis thaliana landsberg
  unsure (1)..(2283): unsure at all n locations
ggagaaaacggcaagatactcactgcttctaactttttacattttttaataaacgaaaaatcatcagaaggcatttgcggcggaatcggattcattgggtacagagaagcaagacctaagaagaggaagctgcagcagcagcagaacttgttcaccagtcgctatcttcttctcaaaacgagaacaatgtcttcaatgaaatccgtctcggctttggacaatgtagtggtgaagtcaccaaacgatcggaggttatacagagtgattgaattggagaatggattgtgtgctctgctcattcacgatccagatatttaccccgaaggctctgttccggatcaaattgatgaagatgacgaggacggtgaagaagaagatagtgacgggagctctgaagatgatgatgatgatgaagatgatgaggaagatggggaaggagatgaagaagatgaggatgaggatgaagatgaagtgaaagggaaaggggatcatcagaccaaaaaggttttcaattaaaagctatatctctgttttcttcttgtatcgggttttgatttttaaactagtatattttgtgttgtgtgtctcaggctgctgcagctatgtgtgtttcaatgggaagcttcttggatctctccggaggcacaaggcctggctcactttcttggtattttcttctttctatgagtttgaactacattttgaatgcacttcttctgattttttttactaattgaatcactctcatgtttatgtttggtgaagaacacatgctttttatgggtagcactgagttccccgatgagaatgaagtaagcattgcattattttctatggtttcaatggtttggcattatttatagattcatatgaaataagtattctgcttactttagaattttctatctttgaatcaagaaactaaccgagttagaatgattagatataacaatgaatctttacggagcttggatataatggatatggacttcgttttgttagcatgatgtatcttttaattcttccggttttgacttcttgcagtatgatagttacttgtctaagcatggtggatcctctaacgcatacacagaaatggagcatacatgctatcacttcgaagtcaagagagaatttcttcaaggggccttgaaaaggtacaaaaattgcttgagctgctacttcacatatctagataaacgtcattttgctgtaaaatttaccaaggcagtcgatatttatgtcggtatgcatgcccagagattgttatcattgtaaggaagatgcatagttttttatccttcctggtcgtcattatgtaattacttgtctttcctataccagttgttgtaaaaaaattccgtacgcaatatttgagctttctgttaagtttaatcttttccttttcatttttcttattcaaaatgcttatttgaccttagaactgttttctcgttattattagattctctcagttttttgttgcaccgctcatgaagactgaagctatggaacgggaagtcctggccgttgattcaggtttatcttgcttgtttcgtactcttatttctttgtttgaaattatcaaaagatccatctccaatcaacattcagatatataaatctttctatatagttaaaagtgtcttgtttacaaaatccaaatttgatgaattacccaggccctccaaaatgatgcatgtcgcctgcaacaacttncagtctatacatctgcaaagggtcatccttttaataggtttgcatggggtaaggataccgcaagtgtgccttacttgccacatttaagatattcttgagaggatttattgttaatatgtccttcatgtgctctggaaggtaacaagaagagcttaagtggtgcaatggaaaatggggttgatctacgggaatgtattgtgaaattatacaaggaatattaccatggtggactgatgaagctcgttgtcattgggggaggtaaaattctctaggtgtatgatctggctgtgattcttggaaaatctttatattcattcctaaatattggcttgtctttactgtttgagtttattgtagtttaatggttacctttaatatcctgcagaatcacgtgacatgcttgaaagctgcgtcgatccaaaaccaacaaaatcaggaaagaggatatatactaaagatgaaaaatacatgaaggacaaatgtttaggagccaatatcagttgggaacaaaccccaaaagatgcagtttctgaaacagaagtggaacctgaagattcgtattag

SEQ ID NO: 141015 - DNA, 3202 bp, Arabidopsis thaliana landsberg
  unsure (1)..(3202): unsure at all n locations
atgaagtttacggaagatcaaatcgggcaactgttatctgcattttggatacaatcagcacttcctgatatcttaccttcaaacattgaagctattgctcattcttttagcttggtgcttctgtccttgcgactaaaggtcaacataaaagtttctcctcttttctggctctcttaatatttctctttcatagaggaagttttcactttcatgacgctatacttaaagcttctcatgattattttaattacagaatcctgatgacgggcttgttgttcgagccttccagcttctcttctcattgaggactctttcgttggaccttaataacggtactgattgatgaaactctcttaaactgatcaaagtttaagaaatcgcttatgtgcagtcaaactttctctttttcnnnnnnnnnnnnnnnnnnnnnnnnnnnnntgatccttgctttatccacaagtatgctgatgttcgctgccaaaatatatcagattcctcatatttgtgaaatgttgaaggcccaacttcctggtgatgtgagttcccaatgtgttgtttcagttattacttttattttatccatggagattgtgtatcacttgattatatactcaaaattttcaggtggatccttatcttttcattggagatgacttacaacttcacgtaagaccacaggcaaatatgaaagattttgggtcctcaagcgatagccagatggctacttcaatgctgtttgagatgcgaagcaaagtagaactgtccaacattattataaccgatattgtcgcaaaaaatctacctaaactttcgaaggtaaatcttatattttctgtttcttagtgaacaataccttttaagccccaatgttcgattctcttgtgctgatttgattttatgtactctcttgttaagctcgaggaagctgatgtgaagatgcaaatcttggagcaatttacacctgatgatgcttttatgtttggatcaaggccaaacattgaacctcaaccaaaccaaagtatctctaaggaatcgctgtccttcgatgaggtaaactattctctgaagttccatattccattgggattttgataatattcagaactgttaacacttatgtttctttattacaggacatacctgccggttcaatggttgaggacgaagtgacgagtgaactctctgtgcgtttccccccaagaggatctccctcaccatctattcctcaagttatcagcattggacagctcatggaatctgtaagcatagaccacattcgacataaagaagaaactggctgatatatatatttgtgtcttcttataattggtttgtgatatgttatctaggcgcttgaggtcgctggtcaagtggttgggtcatctgtctctacttctccgcttccttatgacacaatgactaaccgctgtgaaacctttgggactggtactagagagaagctctcaaggtggttggccactgagaaccgtcagatgaatgggctctatggaaattcacttgaggaatcatctgcacttgagaaggtacgtaacagctgagttggtaaacacattagaactacaaactgttaaaatctgctatggtccttagtaatagtgagaaagatcataactttgtgataccaaatgggctggttaagagaaaggtagaaactttatcatacgaggcttacacgttgagacacgttgttacaggtagtagaagatgggaacatctatgggagagaatctggaatgttgcaggattcatggtccatgatgagactacctccagctagtccctttgacaatttcctcaaagcagcaggagctggaagatgattcaactaacttgatcatatcaatctctgtagaaagtgtgtaatcttgttgttcttattggatttgtagagaactaacttatctagggccaatcacgatgcttctcgtagtaatctagaatcagtagtaagtaatgcttgtttcgttaggacaagaatctctgttagtgttgttgttataatcagtagagaaccaatgctatctagatttgtatcaaattctcttcattacctttaaacgcatcatcaaaacaaaatcgaagataaagttcacaactttaaaggccacatcttttactaatggcggtgaagcaaacggctttagttggccggaccggtttggttttctgataaccggaaaattcaatgaaccgacgccaaaacgacgtcgtattattgtgaaggcaaaatggtgttgttctctctgctgcctttaaaattggggttttgcttcgtcggggtttatgaagggctttgatactaatcttcgtctacaggcttcttctccagaattctccaatggtttcttgcctaaaaggcaaaactttataaaactcaatcgcagaaattgttaccccagatcttctttctctcccaccatgttaaagctcttcacttcctccgcctctcgagtccaccatttgactccggtaagtagggtcgtcgggtcttctccagtggagtgtccattgttcaaagcgttgagtcaaatcactgggtggaatcggcgatctacttcgttgggtcatcgtgctttcttctgctctgagcctaccaatggagaggcggcggctgaagctgaaactaaggcggtggagtccgattctgaagtgtctgactccaaatcttcgtctgcgattgtgcccactaaccctaggcctgaagattgtttaacggtttgtgtaactatggctttttgttcctttctctgtggaagatttgttagtgcatttgtatatgcgttattggatcgttggcaatctaattgtataggaaaatttcaattcttgttggaattattacaaagttgtaaactttggtaataactgagtggatgatgcttatgaggtgctttacatctttgttgttctattagtggagaaagttgaagcttctgatattgtatgttgttctatggtgtttgcttagagcatttttgaatctgtatttagtggtttgttgttaacagtcaagcaaagactaattggattttgtgaacattttacatttgatcattttcattttagcggagttatgtttctcctgatggagttttccgttgtttaattgcaggttctagcattgccggtgccacataggccgctttttcctggtttttacatgccaatctatgtcaaggct

SEQ ID NO: 141016 - DNA, 765 bp, Arabidopsis thaliana landsberg
tctcttatccaaagagggacacacagaaggagagtgatagagagcgagacgcgaagctctaaaaaatggcgataacacctctgcgaatcacgaacccattcccatctctccgctttattcccgccggaaagcccaatgctttaagaatcttcaccgtccacgctaccgacgttgagtccacggaggatactcaacccgacccggaaactacacagtccgaatccggcactgatccggaccaattcgagtctcgtctctcaaacatcagactcagataccgaagcgggacgggtaagaaagcagaagtgagaaaatcgaagaaagggtcaagtgggtctccgtcgaaaggtacgggaatatatttgccgccggtaagcttaaaagaagcggtttcaggtggtttgaaagtggaaccagggtttagtcccttcagcgaaaggattaatggaaggattgcgggattagggctcacggctttgcttctagttgagcttgcgacgggtaagagtgtgttgaattaccacacgccttctgtggtgtttcttcagatctatttcgttgcggctgtttctgctatgtttgtcaagattgagaaggagaaggttagtgtttggcctaaggattaagaaagacttgagagattgtgaaaattgttgcttttgttattgaaatgtgtatgcttttgttttaagaatgtatgtatttgtatactcacagagttcaagatcatctgatcatggatataagattttactattaaagaat

SEQ ID NO: 141017 - DNA, 244 bp, Arabidopsis thaliana landsberg
caactatatcccaactgttgctagaagcaactttgagccatatggacgggactttgttggtggaaagccgaccggacggttttgtaacggaaagattgcgacggattttatgtccgaagccttagggcttaaaccaatcattccggcgtacttggatccttcttataacatttcggattttgcaacaggtgttacctttgcttctgctgccactggctatgacaacgccacttctgatgttctg

SEQ ID NO: 141018 - DNA, 1429 bp, Arabidopsis thaliana landsberg
gccatcagcatggactatgacaggaaaatggactatccatctaatggtgtatccatacttggatgccttaggcccgctttccttgacgaggaatcttatataagaagattatttctttcggaagatagagatgactatagctgggaggttcaaggtcctttcatattttctagtcctcaaaatgctgtttttgattttgtaccacctcttttacatagaacttagaggaatctctgtactatacacgtacacatttctgtttgacatcctggattcacctccctttggatatttatcttcaggtgatgataatccaatcactagttccagacgtgacgagaatgatatgagttcaagtctatatagattagagattgtgggaatagagcttctctccctctatggagcagaggtatgtttttgccacctgtcaggtcatttggatgttgaaaaaattgcttgaaacgatggctaacatatgttgagctgttttgcgaacattgactttcatacaaactctctgtgtgtcatttttgtctcccacagtctcaccgtgagttgatctagattctttgactattttcagtcttctataagtttgcaagattttcaagatgctgaaccagacatcctagtgcactctacttctgcaatcatcgagcgcttcaacaacagggggattaactccagcattgcacttaaagctctctgcaaaaagaagggtcttcatgcagaggtattgtatccatgtctctgaatataatctggaagtacagttctggtttacatacctaccacattttgtaacccagttttgctactttgtggtaatctcatgcaggaagctaacctgatcagtgttgatagtcttggtatggatgtgagagttttcgcaggtgcacaagtccaaactcaccgtttccctttcaaaaccagggtgagagaaatctcaaactaaaacatcaaacaaagatacacctttttcaacaagaaaacaaattcataaggactctgatatgataatgcttctctcatcattgtttatgacaggctacaacagaaatggcagcagagaagaagatccaccagctactgttccctcgttcacgcagaaggaagttgaagtctcatgacgagagtttgaaggatgcattttcgttaaaaaaaccgttgctgatcaaagtcactaaactagaaaatgaggaaacagagaagaagctgttttgccactggatctgtctagtacttataagagttctttggcctggcgattgtgtacataacgatgagctttaaagtgactgttctagaactgtgtggagattcagcctcttacgttttagtagtaagtaaactaaattaaacccaagaataaagagaagttgatacaattgaagtaacttctataatagtccaatgttgttcttac

SEQ ID NO: 141019 - DNA, 1400 bp, Arabidopsis thaliana landsberg
tgaactggtgaaaagcacccggtctttggttctctccctcgtatgtaattaccgtggactgggaatcgcccacgaagatttaattcaggttcatctctctccttagaatcgtattaagagtcttgcaaaaattctatgttttagattaggattacagaaagaacagataggaaacgtctggcttggtttcatgattctgcttggtacacaaatgatgaaactttgcaagtggaaagaattaaaattgtcattgtagttccttttgtcctaatgttgtggctttttcaggcagggtatgtgggggtgttacaaggagcagagaggtttgatcacacaaggggttacaagttttcaacatatgtgcagtattggataagaaaatcaatgtctacgatggtgtcacggcatgcaagaggcgtccatattcctgtttgtgcattttgatttttggccctttttgtctcattttcaacaaagctagaacctcacttgttttcctttattgtttctgtttttttggcagtcatcaataatccgaactatcaatcatatacaaaaggctcgtaagaccctgaaaacgagccatggtataaaatatgcggctgatgaggagattgcaaaactaacaggccactcggtgaagaagattcgagcagctaaccaatgcctaaaagtggtcggttcaattgacaagaaagttggggattgctttactacaaaattcctggtatgtctgtttagtttggttcaatctttggttttgagaaatgtctatcgaacaaggaccaagatttgattagtttaagtttaaatttggttttttggatatgaaaatactgttaccatcaggtttatcataaagattggttcagtttagatttaagctattctttttgttcagtttggttcagttttgagactcaacgtttgttttccgagtatgcaggaatttacaccagacacaacgatggagagtcctgaggaggccgtgatgaggcagagcgcgaggagagacatacatgatcttctagaagggttagagccaagagagaagcaagtgatggtcctacgttatggtcttcaagactacaggcccaagtccctggaagagattgggaagcttcttaaagttagcaaagaatggattcggaagatcgaacggagagcaatggctaaactcagagaccaacccaacgccgaagacctcagatattatttgaatcagtaaaaaatagagatttttggctccaatgactcttatgtcttctgtcacagtgtgattgtgtaatcttgtgtgtttataatagtaacattggagatcctcgagtgtaaaatgtcttgtacggggttgtaaacttatatagttatattacagtgaaaatagatattgtacaagttat

SEQ ID NO: 141020 - DNA, 940 bp, Arabidopsis thaliana landsberg
cagttcttcccggaagcaaatgaagtcaaatttgctcaaaagacagtctttggaggaacttacttcaagttggactatctaacaaaaccatctctttttgaggattttggtttctttgagagagtaaaaatggcagatcgagtgaagccagaagacgaactgtttcttgtcgcatacccgtattttaatgtcaacggtagttccctgaaaacctcttatcatctatactgttaaacaaaatccacgttctgactcattcctttgttgttcttctttttccactcagagatgcttgtagtggaagagctctacaaggaagctgttgtgaacactgaccgaaaactaatcatcttcaatggagaacttgaccgcatacgatcgggttgtatcctttttcttctcataaatgaaacaaagtagattcttttttccatttgcatcacaacttgagagccaaatgagaaagctgaatcaagagagagagactcttgttttccttaaaagaagacaaaacaatagactatccaaagttcttttatccgaaactggctgcacttaccaagacacttcttccaaagatggagacagtgtactacatccacaatttcaaaggacagaaaggaggtgtacttttcaggtttctgctataaacctgcaaattaatcttcccttgtttctttatctttagctgaacggtgttgtgtttcgaatggattagatgttatccaggtccatggcaagtactgaggagaacaaggaacaaatacatttgtgttcatcagcaagaatccatgccttctcttaaggaagttgccctcgacattcttgcgtccgcttgagatttttgtattgaaactttttcatgcatccacttgtaagtacatgtcaaaattaattgttttgtgctgatatgagttatagtgatccatactttatatac

SEQ ID NO: 141021 - DNA, 787 bp, Arabidopsis thaliana landsberg
caaaatggccccaagctcttagcattcaggtaagtatttgactttccctgtttcatgttaagctcaagccaattctgatgtttaatgtattatctcattggtgaaacaggcgcatcctctgaatgtcccaacgagttttaagcaacgggcaatgttagttgatgagatatggcatgctgttggagatggagcctcggatttagattggtatgtcaagcgtactattcttggaggcgtttactcaactaccgagatttacatgctcaccgatgactccttaggttggtttttagtcttcctctcttggatgcattgctatgccgtcaaagaaaatgttcaaagtttgatatcgtttcgttttgagcagaacatcgcgatacatgggcattcttggatgacagagtcaaagatgcttttgatcttaagaagagcatacaagaggtaaagtaaaacctttctcgctatgcttcattcttgttgatacaaatctacaacattggaatgaaatcttctcatgcacaaatccacaaatgttttggcaggccaagtattttgcagaagacataggagctggagttgggaagtcggttcaaggactgatgaatggagttatgcagacaatgtccagaagaagtggtggctctgcgttttgaaaagatcacacctttacacatgattctgcttcacactccttacggattctccaatattttgagttgggatttactataataatgagattaggcttatatgagttcaagtgaaggcatatgaactaaatatatat

SEQ ID NO: 141022 - DNA, 1356 bp, Arabidopsis thaliana landsberg
atagagaaatctagagtccacgaggagtttctttctaaggaagtggaaaatctgaagcaagagaaagagagatttgaaaaggagtgggaaatattggatgagaagcaagcagaatacaataaagagcggataagaatatctgaagaaaaagaaaagttcgagaggtttcaactactggaaggagaaagattgaagaaagaagagagtgctttgagggtgcagataatgcaggaactggatgacattagactgcagagagaatcatttgaagccaatatggaacatgaacgatcagcgttacaggaaaaagtcaaacttgagcaatctaaggtgattgacgatcttgaaatgatgagaaggaatcttgaaattgaacttcaggaaagaaaagaacaagacgagaaagatctactagacagaatggctcagttcgaggacaaaagaatggcagagcttagtgatatcaatcaccagaagcaggctttgaacagggagatggaagaaatgatgtccaaaaggagtgctctccaaaaggaaagtgaagaaattgcaaagcacaaggacaaactaaaagagcagcaagtagagatgcataatgacatcagtgaacttagtacactcagcatcaacctcaagaaacgtagggaagtgtttggccgtgaaagatctcgttttctagcatttgttcaaaagctcaaggattgtgggagttgtgggcagctggtaaatgactttgtactctctgatctccagctaccatctaatgatgaagtagctattctaccacctattggagttttgaatgaccttccaggaagctctaatgcatctgactcttgtaatatcaagaaatctctagacggagatgcctctggaagtgggggatctagaaggcccagcatgtcgatactgcagaagtgcacttcaataattttctcaccaagtaaaagagttgaacatgggattgacactggcaagcctgagcagcgtctatcctcctcagtggcagttggtatggaaacaaaaggtgaaaagcctctgccagttgatctacgtctgcgaccatctagtagctccattccggaggaggatgaggaatatacagacagtagagtacaagaaacatctgagggttctcagctatctgagtttcaaagttccaggcgtggacgtggcagacctagaaaagccaagcctgctttgaatcctacaagttcggtgaagcataccagccttgaagaatcatcaaaagatgaattgagtggtcacgtttctgttactagtaagaagacaacaggcggaggtggaaggaaaagacaacatattgatgatactgctactggtggaaagccgtag

SEQ ID NO: 141023 - DNA, 1049 bp, Arabidopsis thaliana landsberg
atggatgaaaacttccccactctaggtcttttcactcagagattttccaatcgaatgatcgagatggctgatgatgttgatatgtctgcagctgtatgtgctatagggctttgtaagcaactgctaaggtattccccctcaagatcattttctcaaccaaagcgtcaccgcaaatatgttgaactgccatgagttaaaacctgagctcttttttgttttgcagacaccagctgatacctgatgatgacctatgccctttgtacgatttgcttattgatcaacctcaagaaatcagacgtgcgataggagagttagtgtatgaccacttgatcgcacagaagtttaacagttctccgtccagtcttacaggttttcctctgatagatagtccatgtcctgggtaccagagtttttactcttagaacttagttcagagttattacatcctctttcaggtcatgatgattcttcctctgagatccatatcttcagaatgttacaaatattacgggagttctccacagatccgattttatgtgtatatgtaattgatgatgtttgggagtacatgaaggccatgaaggtagagtctaagagaaattacttttcactgttgcacgttcattatatagctgtgacgtgtaccttctgcagtttttataccatcgtcatgatgctgcttttcttacaggactggaagtgtatcatctctatgcttttggatcagaatcctcgaactgggtctactactgacgaggactcgacaaacttgatcagacttctgtttgtgtcaatcagaaaggctgtcggggagaagataattccttcaacggataatcgaaagcagtatcacagtaaagctcagcgagtaagattgtctttgctctttttgagaaaatctcatgttgttactatgatataacgttgcagaagcatgaagacatacatcagttttttccttttttcttgagcgaaactaggaaggacaaaatacatttaaatgatcttataaggcactttactccatttatacctttttgtatgctcgt

SEQ ID NO: 141024 - DNA, 1735 bp, Arabidopsis thaliana landsberg
  unsure (1)..(1735): unsure at all n locations
cacaagtagaaaaaaacacaaacatcctgaaactagaagagagagacaaaatgttatacttcatccttctccctcttctatttcttgtaataagttacaaatttctctactccnnnnnnnnnnnnnnnnnnnnnnctccaggaccaccgtcacgacccttcgtcggccatctccacctcatgaaaccgccgatccaccgtctcctccaacgctactccaaccaatacggcccaatcttttccctccgtttcggctcccgacgcgtcgtggtcataacatccccttctctcgcccaagaatccttcaccggccaaaacgacatcgttctctccagccggccgctccaactcaccgccaaatacgtcgcatacaaccacacaaccgttggtacagctccttacggcgaccactggcgtaacctccgccgcatttgctcccaagagattctctcctctcaccgtctcatcaacttccaacacatccgcaaagacgagatcttacggatgctcacacgcctctcacgttacacacaaacctccaacgaaagcaacgatttcactcacatcgagctagaaccgctcttatctgatctaacattcaacaacatagtaagaatggttacagggaagagatattacggcgacgacgtcaacaacaaagaagaagcagagctattcaagaagctagtctacgatatcgccatgtatagcggcgctaatcattccgctgattacttaccaatactaaaactattcggaaacaaattcgagaaagaagttaaagctataggcaaatcaatggatgatattttgcagcgtttgttagatgaatgtagaagagataaagaaggtaacacaatggtcaatcatttgatctctctacaacaacaacaacctgagtattacactgacgttatcatcaaaggccttatgatggtaaaattctataaacttctgtgagatttcaatgaagtgaattgtgagattcgattttaacctgattgtttttgaaattgtgaagtcgatgatgctcgccggaactgagacctccgctgtgacattagagtgggcgatggcgaatctactgagaaatccagaagtactggagaaggcgagatcggagatcgatgagaagatcggaaaagatcgactaatcgacgaatcagacatcgcagtgcttccttacctccaaaacgtcgtctccgaaacattccggctatttccggtggcgccgtttctaatccctcgatcaccgacggacgacatgaaaatcggaggttacgacgtcccgcgagatacgatagtgatggttaacgcttgggctatacatagagatccggagatttggcaggagccagagaagtttaatccagatcgatataatgacggatgcggaagcgattactatgtttacaagctgatgccgtttgggaatggccggagaacttgtcccggcgccggattaggtcagaggattgtgacattggcgcttggatcgttgattcaatgctttgaatgggagaatgtgaaaggggaagagatggatatgtctgagagtactgggttgggtatgcgtaagatggatcctttacgggccatgtgtaggcctaggcccattatgtcaaagcttttactctaataagatgagtagaggttaaaaaagaaaaaataacttattggatgtaactggtaattatctttaagataaagatgaataaaatgaatctttgcctcat

SEQ ID NO: 141025 - DNA, 293 bp, Arabidopsis thaliana landsberg
aaaccaatgggtgactatgtatatccttagaagcatgataaagcaccattgaaatatatcaagaagattcagatggaagtttttttaacattgtcaaaaggagttccaatcgaacaaagtgtacattttggaagctcttaaaaaaagtagaaatggcttagagagtgggagctctctcggcagttccagcgatgacggtaagcaagttgtttccaaaaggatcactgagatgctttgcaaggttctcaacaggaccttctccggtaacatacgcttggataaagaaaccgagc

SEQ ID NO: 141026 - DNA, 2270 bp, Arabidopsis thaliana landsberg
  unsure (1)..(2270): unsure at all n locations
ccaatagagaaaaccattacacgagaaaggaaaaaaatggtgaatccttcttcacctggaattgccatactcggagctgggatcttcgtcaaaactcaatacattccgagattagctgagatctccgatctcgtcgacctgaaagcgatttggagccgtactgaggtgacatttcgatcaatgcgcttgatttttgggagatgtttatgccaaatgtctaaaaagatgaaaactttggcgaattgtgatttttgttatggttgaaggaatctgcaaaaggagctgtggagatagcaagaaagcattttcctgaagtgaagtgcaaatggggagatgagggtctcaatgagatcattcaagacagttcaatagttggtgttgctgtagttgtagctgcagaaaccatggtatgtttgatcttagacttgagagatgcgtatgaatctagttgggacagtgcataggatatttcttactcaaagtcttgtgctttaggttgaattgtcactgaagatgctcaaggcaggaaagcacgtccttcaaggtgacttgtccacttcatttctgctctgcttttatgatcgtcttctttagcaatgttattgcttcttggaaatgtgtcccaacttaaaaagctaaagatatttcttttttcttgatatgtatattgctgtcctggatcggtctgcagagaagccagctgctgcttgtaagttgatcactgctcttgtttaaaccaacttggcatgttgtttaagttccactactctagcccagagtcaatttttcctgttgagcatgacccatttaacgtgaaactatagtcttcctggttatgccactctaaagtgcagatgaaatgctttattcctattgttttacaagtttttttgttgcagcaatcagtgagatagaaactgcaatgtcaagctatagaaatatttctgctgattccccatgccgtccaatttgggctgtggctgaaaattatcgttttgagccagcttttgttgaggtaactgttacttattgtcttcttggcactacctatttgagcaagtaatattgtccttgaaaaattgaagtatttcatggttgctttcggcagttgaagaaactgatagcagaaattggagatatgatgaacgtccagcttattattgagggatcaatgaacagttctaatccttatttctcaagctcctggaggcgaaatttgagtgtatgtaatactttctattccgtcacattcttattttgtcagactctgttgcattgcatcttcctaacacgctgcttacttagactgtaacataagaattacactgacatatatatcaatcacccatatatatcttgaagaaactgtgttatctgttaatattttacagaaagttcttcatatgcagggtggtttcatcttggatatgggtgtacattacattgcaggattaagaatggtaccgtgtaacttcattagctgataagcttatcttgctgtggatcccaagtatgatatattggtttttcatgaacagcttgttggatgtgaggtaacatcagtctcagccaccactacccatgtggataagactttacctggaccagacaatataacatcaaacttgtaagtgtaaatacatcaatcttgtttcttagcacactaatttcacatgaacatactaatccaggatgtttgctctatagtcagctcgagaacggatgctctggggtttttgttatggttgtgtcttcaaggtctccaaaggcatgtagtaagacttagattttcttctttccacaccggtttagcctaataaccatagtttttcttacataacttctatttgttagatactatggagaatcgtaggactaaagggcactgttcaactagagcgtggagtggaaggtggccgacatggttacatggtttgtatactttaacatgtgaccatctgaatgatccagattttgcttgaaactactcaactcaaatggctgtgatcttatgaaattttnnnnnnnnnnnnnnnnnngaaggagggacatcaaggaccatcttttacccattcagcggagtgactgaagagttaaaagcgttcttcaatgatatttcagaaacttcaaaggtaatcctagaatcttagccttggaatgcaggaactcataacatgagtattctattacctaaactctcctattatggatccgtttcaggagcaagagcctcgtctatcatatgtggaaggtgctcgtgacgttgcagt

SEQ ID NO: 141027 - DNA, 488 bp, Arabidopsis thaliana landsberg
agtgcacgagcaagattcagaagcagagatgggttgctgggattcagtctaatctccgcttagtaagttgcctcgaggctgccaaatgctctctggaatctctgagtctcagcaatcgcatgcgatagagaatcctgtaaatatttactattcacagttttttctgctgtaaatactgcaaatgaatcaacaatcttatagaaattcgtatcaccttttcttgagatgttcaaacaaagaatcagatgagaatcgtagttattgctttcttaactagaatacaacagtcttgtttgtaccataaggtaatacccttagttcgcagtaagattttatagctctcgtgaggcattttttctctaggtcctcggatttctggacaaagctccttaagttgtctcggtgggaaacactctcaacctgtgaaaagttccattcaaacagataaattgagaaagctgcagaagaaaattgacaatccccagaag

SEQ ID NO: 141028 - DNA, 2383 bp, Arabidopsis thaliana landsberg; identical to SEQ ID NO: 4131
  unsure (1)..(2383): unsure at all n locations

SEQ ID NO: 141029 - DNA, 772 bp, Arabidopsis thaliana landsberg
atgactctacaggatcatattgctccaagtggttatatcaagattcctacagtacgtaaactcaaacccttttctttgtaatccttaaatcatttcctattagatttagatgaatacttcaactgagaaagcatgaaactggttttcaggatataaaagattacctggaacactccaagtatctgccaaagatcaacaacgagagacctaacgaaaggaacaccacttttaaagaccggttcactagcttgcacaacttggtccttgtcatggtgcctctctttcttaaaccacctaaatcttgagcaacattgttaagtagcttcattaatattgttttcttcatttcctaaacagtttgagggtgatgcagtagtgattcctaaagaaagttcttggttcggatattacccggatggagcttccacacctcttttgtctcctcaacaggtgaaaccttcttgatcatctccatgtcatttctttgcctgatcatcaaccacttgtttctaacttgatattggttatccagacaaagctctatactgaggattggattggtctgaaaacattggatgctgccagaaaagttaagtttgtcagtgtccctggcgagcacctaagaatagcgcaagacgacgttgtaaaacacgtcgtgccttacctcaagaaccagcctgcgtctatgagtgaagatttggagatactgcatctatgattgagacttcattgttatgcttctcttagaatcaatttaaaagtgaagaacttt

SEQ ID NO: 141030 - DNA, 4793 bp, Arabidopsis thaliana landsberg
atggaaattggaataagtagctttacttgtattaaggcgaagaaaataagcacggtgagagcgccaaacaagaagggtccaaggaaattaaagtcatatcctttcctagcagcccaaaaagtatataatgtgagcgaaagcaccactaccgatgtcaagatcactgactcgagaatcactttccctgtgtccaacacagaataagctttaaacatatacacaatcagaatcaaagaaaaaactgagagatgaaatttgctaagagctagttccccaatagcaaaaacagaactttgttgcctaatggatccttaacaggtaaccaaacgtggttgatcaagtcataccattggtgaaggcacatgttaatccaacaacaaaagccagagccaaagtgaaaatccccaagagcaagtaattcaccggatgtttctgatggtaatagtacaacggacacaacactatacatcggagagaaacacaaatccaagtttcagcttttgagattattaccaaacttcgaaaaagattgaaccttttgatttgtaaaacaagtgtgcgtgatgattgtacctatgagaggtgtgatgatgatgactatgtaaagagctaatccaagtccggtggtggcgaagaacagagcgattggacggacggtgaccaccgtggcagcgacagcgacggtggctagaagctgaaaggcgattatagagtagaccttgcgtataaatccccaccggagctcgggattttcatgcatcgctgggtatagtaaaggccttcttgagctaacgcctgtttccacgtcatctttccggtacggtaagttccactgatacattatttacgatagcagagtctttataaagtgaaggaacgcgcgggaaaattcgaatcctttcgattactactgtatcacgatctacagagagagaaccacaagcgagagagaaaagttgatgcggtgctttgcttgagcttcttcggattttcctgggagaagcggtgatgccaagaggaagaagaaagttcatgaaagctctcggctaaaccgtagatgacgcgtggcaactggagatgtcgcataagcggtgacaaggatttgatgtgtccaaagggaaagtgttcttttttttggctcaacacaatacttgcttaaccaaacttcacaaaatagtaacaaaattttttacatatatatatatttttattactatttaaaccgtacaatattttatctataattaatttgcatttttccaattgaaacttaactaaaagaaattagttgatcaatagcatcattcttgcatttaatatagagggttttcaatcaatatatgtaggatatttttaatcaattatttaaactgaaataattaaaagtaaaaattgatttgaaatttggataaaaagtaaacaaaaataaaattttaaagaaattaatttgggatatattttcatcgttgataaataacattgaaactgaaattacttaaaatgatgcagttttaaattttaacgctagtttttataaactttttttttggtttcggtggtgttaaatgattgagttgatagtttaacttgttaaatgaaaatataattataatgtagattcttgactaatcatagtttatatttttaatcgtaattgagacacaaaaggctgttatgcttgatcatttttgtatacattattgtagaatataaaaaattataattaatagaaaaaataataatttagttcaaaaaatagaatttttcacaatctcttgaagagtggcctaagaatccgatagtggtggttactgtttgtgttgagatatagcatatgagcaaaaacaattgaaaaggagaaaaactttcccttttaccaatgaaacaaaagagctctcagataattagaaaagtgtcaatttgtataacatttcccactctctctctcacttcgattcacttttgctcaaacttgacaacttgtccgaatctgtccatagcacacctctctctctgttttagggttttctcttcactggtgctttcttccttgtctcgctggttcaaagattcttactttttgatgtctaagacatcttagatttgttagactctctttaatttttctgggtttagccactagattatgttatactgctagaagattagggtttggtcgagaaagctctaattttggtgatttatcctcttaatttcgcaaagggttatcttttcaatggcaattgcgagtgagttttgttattctcacttatgtatttagtaattgttccgtcagctgtacataagtggttggtttcatagagaaatgctttagctttaggtgttgtaagatctcataataccaaagttcagatttttttgtataggattccattaagtagcccatctccacttagtttctggtctgggtagtgtgtaaccgacaagaaaatagtgttttgactatcctctggctatcctggagatctgggatttgtttcatctgttatgtcagatgaggactttttacccttctgattcttgtaaagaatcacaactcgattccttgaatccacagtcatggcttcaagttgagagagggaagctatcttcctctgcttcttcatctgcgtaagtttcatttatttttcttgaactttgagatgttttggatatggagtaataatatttggtctttttgtagtccactgtgtagagaatcatttatcaaagttcccgagcctcagatactgccgcattataagcctctcgactatgtagaagttctagctcagattcatgaagaactcgacacttgccctttgcaggagagatcgattctgtatttgttgcagtatcaagtgtttagaggtcttggagagaccaaacttagacggagaagccttcaatcagcttggcaagaggctactactgtccatgagaaagttgtgtttggatcttggttgaggtatgagaaacaaggagaagaagttatcacagatttgctttcctcttgtggtaaatattctgaagaatttgtgccactagatattgcatcttatttcccagctactactgcttcttcccctgaggcagcatctgtgaagacgaaccgcagtgtatctaaaaatgttgtgtttaagataggagaagagaagatagcttgccaaaggcggaaaattgcgagtctttcagctccatttcatgctatgctttatggtaatttcacggaatcgcttcttgatgagatagatatgtcagaaaaccatgtatcctcatcagctatgcgggttgttagagatttcagcgttgttggtgtactaatcggagtttccaagaaccttcttttggaagttttagttttcgcaaacaagttttgctgcgagcgacttaaagatgcatgcgatagagaattggcatctttgatttcttctatggaatgtgccattgagcttatggactttgcacttgaagagaattcccccatcctagcttcatcgtgtctgcaagtttttctttatgagatgcctgatagtttgaatgatgagcgtgttgttgaggttttgactcgagttaatagatctcaagtctcaaccatggcaggaaaagctccattctccttatattcttgtttaagtgaagtctcgatgtgtatagatcctcggtctgacagaacactcggtttcttggagaaattagttgactttgcagaaaatgaccggcaacaagtattggggttccatcggttaggttgtatgaggctattgacgaaacaataccgggaggctgaagaagcttttgaaacagcttttaacttaggccatgtgtattccgctactggtttagcaagactaggatacatccaagggcatcggctttgggcttatgagaagctaagctcggtaatctcctctgtttcgccgcctctcgggtggatgtatcaggaaaggtctttctattgtgagggtgacaagaaattggaagatctcgagaaggcaaccgaattggatccgactttgacatatccttacatgtatagagctgtcacacgaatgtcgaaacaaaatgctaaggctgctcttgaagaaatcaatcggatcttggggtttaaacttgctttagaatgcttagaaattcggttttgtctttatcttggtatggatgactatgaagcggctcttcgtgatattcaggctgctcttacgctgtgtcctgattatagaatgttcgatgggaaagtagctgggaggcagctccagacgcttgtgtatgagcatgtcgagaattggacaaccgcagattgttggatgcagctatatgagaagtggtctaatgttgatgatataggttctctttctgtaatctatcagatgctcgaatccgatgcttgcaaaggtgttctctacttcaggcaatctttgcttctcctaaggtaatttttctaaataaaggtgttctttaccattatttaagcatctcattgtcatacctttgttttgttcaggttgaattgtccagaagcagcgatgcgcagtttacagttagcccgcgagcatgcctcaagtgaccacgagcgtctagtttacgaaggatggatcttgtatgatacaggtcactgcgaagaagggcttcaaaaggctaaggaatccattggaataaagagatcatttgaagcttatttcctccaagcttatgccttagcagaatctagccttgatccatcgagttcttctactgttgtttcacttcttgaagatgctcttaaatgcccctctgataggttgcgcaaaggt

SEQ ID NO: 141031 - DNA, 2018 bp, Arabidopsis thaliana landsberg
ggcgacacgctctgagtgtacgcgttccagaagcattgattggggaatcaacagttattttcacatcagaattacgcgtaaggcaacggggtattgctgaaatcactgaaatgatacacgtgagtaactatagttttactcataacattcattaaagatcaagatccagtatcctcccttttaaaattagtaatgctcgggtcattgtaggtcgcaagtctactgcacgatgatgtcttggatgatgccgatacaaggcgtggtgttggttccttaaatgttgtaatgggtaacaaggtactcacttgacagtagaagctaagacatgattaaatatgctttttggcgattgtgctgcaatttggatatgaagatcaccattggcttcatgttgtagatgtcggtattagcaggagacttcttgctctcccgggcttgtggggctctcgctgctttaaagaacacagaggtaaaagaaactaataaacgtgaccctggtattttaaacttttcgaagaaatctttactttttataagatactgtggttgacaggctatattgaatctcccgtgatatacaatctagaatcaatgacatctgtcttcagaattaattatcacttcttcgaagccatacatcttcattgtgtctctttttttgtaggttgtagcattacttgcaactgctgtagaacatcttgttaccggtgaaaccatggaaataactagttcaaccgagcagcgttataggtataatcttcttttctggtcgataaaaacagagactactcaagtcttctatgctactaatgtatgtttgagaatcaaaacaagagtcgattttatcatcaataacccgatcgcggcttatataggaactggaaatcatataatagtgatcggtaatgcaaatatgatttttttcatgattgcagtatggactactacatgcagaagacatattataagacagcatcgctaatctctaacagctgcaaagctgttgccgttctcactggacaaacagcagaagttgccgtgttagcttttgagtatgggaggaatctggttcgttgtcttcttctgaaaactttggctccattgcaactaattttcttacagtactttgatgaacttctaatttttcagggtttagcattccaattaatagacgacattcttgatttcacgggcacatctgcctctctcggaaagggatcgttgtcagatattcgccatggagtcataacagccccaatcctctttgccatggaagagtttcctcaactacgcgaagttgttgatcaagttgaaaaagatcctaggaatgttgacattgtaagtttgaaagaaacaaatctcctaaaatctataatatgttttcatagtctctaatactattatatcacacaggctttagagtatcttgggaagagcaagggaatacagagggcaagagaattagccatggaacatgcgaatctagcagcagctgcaatcgggtctctacctgaaacagacaatgaagatgtcaaaagatcgaggcgggcacttattgacttgacccatagagtcatcaccagaaacaagtgagattaagtaatgtttctctctatacaccaaaacattcctcatttcatttgtaggattttgttggtccaattcgtttcacgaaacaataatgttggacaagctgtggctttggttttaaactacacatgacaaaaaaaggagacagatactaattgtgaaatcatattccttgcgaattcggtttaggtcttgttttaacagattaaaccgtctcaagctgaactaaacaggatgcagtacagttaacaaatcactttcaaaactctataaattcaatcaaaaatatttgaattccatatgatacaaatcacttgcaaaactcaaatccactcctaaatgatatcatcccttccaagtatacaagccaaaaccagtgaaggaaaaagttgccctaaataacgtctttacataagaaatacgaaaaa

SEQ ID NO: 141032 - DNA, 598 bp, Arabidopsis thaliana landsberg
agctgaacaagcaactttggctccattgatcggatcatccatacaatcagctactggtgtcgtctacaacatcactggtggaaaagacataactttgcaggaagtgaaccgagtatcacaggtacggtatttttgtcttggtttactcggctttgtttcaattgggtatacactgtattataatgcagtcttctcatgttttgggggggttttgcaggtcgtgacaagtttggcagacccatcggccaacatcatatttggagctgttgtggatgatcgctacaccggagagattcatgtaacgataatcgccacaggcttctctcagtcattccagaagacacttctgactgatccaagagcagctaaactccttgacaaaatgggatcatcaggtcaacaagagaacaaaggaatgtctctgcctcaccagaagcagtctccatcaactatctctaccaaatcgtcttctccccgtagacttttcttctagttttctttttttccttttcggtttcaagcatcaaaaatgtaacgatcttcaggctcaaatatcaattacatttgattttcctccaaaatgtctctaaatcagaaa

SEQ ID NO: 141033 - DNA, 2065 bp, Arabidopsis thaliana landsberg
ttttggtgggtttgggttcgtgttagattttactttcacagattcaggtatgtatttgatcttatttagctttggtaatactcaaaccaactagtatttgatcttaattaggtgacgttgatattttgtgtgttgtgggtcaatcatacactctaggttgatctgcgtctatgtttagtcctaattttgaagaatcattctaattgctgatgtttatttatgacaattttatgtcttacttcgaatttagctaagataataaatctagacgagtgcctttataaacagtttatgtatgaacaatgcttcgcttgtgggattgttgatttcactacatttgattaagaatgtacatactattacaaatgttatcgattaaaaacgtcattttcagatattagttctccagcgagttgacacaaaacccgattacgtttcatccggcgactcgctttgatattccatggattctcagttgaatccttccaagagacgcaagataaggttcgcgtctctcatcttttccccagttttttttcttattcgaatcacttaaggcttgagaaattagtggttagggtgtgtaaattgcgtttgatatagtgtcaggcacagatgcgttgcgtgctataagatgttcaatagacgagaacacctcgttgagcacatgaagatttcctaccactcacttcaccagcctcgctgtggggtttgcctcaagcactgtaaatccttcgaatccgtgagggaacaccttaacggtatgtttggatttgtattccttttccaccacacatcgtatgaatatggtggatgatgatgtttgtttgatttcgtctttcaactatttcagtttcagaccatctttccaaaggaaactgcaaagccattttcactaaacgaggctgtactctctgtcttcaaatctgtgaggaggccttgtgtctcgccgagcataaaaacaagtgtcacctctccgcacctcgtcctcttgtaagttttgttgggaattatttagataatgtggactatatatgctctgccgcctccaatattcccgagtctattctttctgattattgaaatatcagcagttttccccttaaatgatctgattagtgctttattcatatcagggaacatctacccaaaggaatccttctagttcacttgctggttcacgtctcaaggctgtggcacttgactgtgaaatggttggtggtggtgctgatgggactattgatcagtgcgcatcggtttgcctggttgacgatgacgagaatgtgatcttctccactcacgttcaaccactgctccctgtcaccgattacaggttctgcttgtggaccatttgtgcttgttttgttttataattcttccttttaaatctcaccccgcctcatgttcaggcacgagataactggattgactaaggaagatttgaaggatggtatgccacttgagcatgtacgagagagagttttttcgttcttgtgcggtggacagaatgatggggctggaaggcttcttcttgttggtcatgaccttaggcatgatatgagttgcttgaagcttgaataccctagccatttgttgaggtaactaactgacccgtttttgttgactctttgcttgaaatctaatgtaattgctatgcttcacctcagagacacagcaaaatacgtgccgttgatgaagacaaatcttgtaagccaatcgctcaagtacctcacaaagtcatatctcgggtaagttatgcttgggctttgatttgttgacattggattatgaaaacttggaacatgagatagaaactggttttgtttgtatgtgtagatacaagatccagtgcgggaagcacgaggtttacgaggactgtgtatctgcgatgagactgtacaagagaatgcgggatcaagagcatgtttgtagtggaaaggcagaagggaatggtctgaactcgcggaaacagagcgatctagagaagatgaatgcggaagagctgtaccaaaaatcaacgtcagagtaccggtgctggtgccttgaccgactcagcaatccatga

SEQ ID NO: 141034 - DNA, 1209 bp, Arabidopsis thaliana landsberg
gaaaagaagagaaacatcaaacatctttggtttgcttccctagctcgtacccgttcttcatacaagtatgatcatctgctgtctctatatagacatacatacaaaaaaaacttgtataagatttgaaactaaaatattaaatttatcctctattttgcaggcacgcctttaattatggattgtcatagaaagacgttcttgttgaagtttttgtgcgtggcatttctgttaaactacagcaatgttggctttgtagacgcagcaacaaacattggcttgaactacggcctccttggagacaacctcccgcctccatctgaagttatcaacctctacaagtccttaagtgttaccaatattcggatcttcgacacaactacggatgtccttaacgcctttcgagggaatcgcaatatcggagttatggtaggcgtgaagaaccaagacttagaggctctttcggtcagcgaagaagctgttaacacctggttcgtgaccaacattaagccttacttagctgatgtcaacatcacgttcattgctgtcgggaacgaagtcatcccaggggaaatcggctcttatgtgctacccgtcatgaaatctctcaccaacattgtcaagtcgaggagtctcccgatcttgatcagcaccacggtggctatgaccaaccttggccagtcatatccaccttcggccggagatttcatgcctcaagcacgtgaacaacttaccccggtgctgaagtttttgtctcaaacaaatacgcctatcctcgtcaacatctacccctacttcgcatatgctgctgatcctatcaacattcagctcgactatgccatcttcaacaccaacaaggtcgtggtccaagacgggccacttggttatacaaacatgttcgatgtgatatttgatgcgttcgtatgggcaatggagaaagaaggtgtgaaggatttaccaatggtggtaacagaaactggatggccatctgctggtaacggaaacttaacgactccagatatcgcatctatatacaataccaattttgttaaacatgtggaaagcggtaaagggacgccaaagagaccaaagagtggcattagtggatttctatttgcgacgttcaatgagaatcaaaagccagcgggaaccgaacaaaattttgggttatataatccaacagatatgaagcccatctacaagatgttttga

SEQ ID NO: 141035 - DNA, 1946 bp, Arabidopsis thaliana landsberg
ccttgtccgtctacttggagtacgtgtcaggtggttcaatccataaactacttaaggtttatggttctttcactgaacccgttatccaaaactacacgcggcagattcttgctgggcttgcctatttacatggacgaaatacagtacataggtattcaaaatgacatcttaaaggttgaatggaattcaatttgtctcttcttggacatttaataaagagttattttgttctaacagggacatcaaaggagcaaatatattagtggatccgaatggtgaaatcaagttggcagactttgggatggccaaacatgtaagtatatctatgtacttcataaaaatgatctctagaatgtcatcaatgggcaacagaagatatcaattgttttatcgccttattatcatatagttcctgaaacttttgcatgcataagctctaatagccaattttttcggcaacaggtaacagccttttctactatgctttcttttaaagggagtccttactggatggcacccgaggtagttctactattctaccttttttttttataacttttctctggcaagttgtgcagtggaaggccattatgttgttgcagctgatagaaaatcacatcatgcttccgttcttttccaggttgtgatgagccaaaatggctacactcatgcagtcgatatctggagtttgggttgtactattctggaaatggcaacatcaaagccaccttggagccagtttgaaggggtataggatactgacgactggacataatcttttgtgtactcttcttcttaatagtctgaattttttctaattcctaagttatcttgtgccattatttgtatcaggttgctgcgattttcaaaatcggaaacagtaaagacaccccggaaatacctgatcacctttcaaatgatgcaaagaattttataaggctttgtctgcaacgaaatccgacagtacgtcctacagcttctcagcttctagaacacccttttctacgtaacacaacaagagtggctagtactagtttgcccaaagacttccccccacgttcctatgatggaaacttctcactggtatgtgtataatgcatatgttgggggctgggtcaatttgatttcctaccatcaagttaaacttgactttcttctttagcagcctacaagggaaccctatccagggagactgagccatgataattatgcaaaacagccattgtctagaactataaagagcccgaggtaaaagtgttgtagctcaatctatttgatacttggtcgtgtcaagtgtcaactaatttcgtatttggttcttgcagcagagaaaacgtaagagctatcacatccttaccagtatctccatgttcaagccctttacgccaacttgggccagcatacaaaagttgtttcctgtcacctcctcacccgtcttacgcatttcctgggcaagacagtgggtacaacctagcagagtttgctgcaagccctttcaggatgaagaaagacgcaatgatggaaccatctagtttcaggactcaaacaccgaattcaccattgagatcaagactggtgtagaaatggagcaaagattgagagactgaaagccacatactataaacaaggcccaatgaccatgtataaaacagtgtctacccctagttttggccttctccttctcaacacccagggaaatatgaagttatgagaccttagttgtgtgtgtgtggagcatctcctagaagtggagatttttggtacaagaaggagaaatttggggggaaaacagaaagatgtaaagagaaacatgaaaatgaatcaaagtttatagagtgtgagaagtatagatagtaagttgtgttgtcacacaaagataatattcaaccatttgttttcaacctacagtgtgaatatacttttcagaaagtaaattagttactcat

SEQ ID NO: 141036 - DNA, 1702 bp, Arabidopsis thaliana landsberg
gttgttttctttcctggaggggaaggcaaatgcttcttgtgtggtcaagaggggcaccgagcagcagattgtgagggaaagataaagaggaagacaggagaaatgcttgataatactgaggcagatgttgtggtgaagaagccatatgaggtacttttcaggattatacacctcaatactatattttcgaaattacatcgtatgtaaagggctcattattatctttaccagtatcattaactatccttactttttggcagtttgtcaatatatggatactacgagagtatttggaacacgacatgcagattcctggagcaaaaaaaaatttggaccgcttaattgatgacttcatcttcatctgttttttcgttgggaatgatttcctgccacatatgcctacgctcgagatacgggaggtttgtagttttctgttgataatactttcttccagttgtcgaaatgcctggtagagtgtgcccttccatttgttagtcatgtagcattatcttagttttttcaaaaacatctgttgaaaaatgaggtttcttagatataggagatgttcctatatcatacttttctatgtcagagtcataaatcacttcataaaaatctttataaaaaatttcatttgtagttgagattactttggtattgaataacgtggtacatatttactcatagtttgtgttctatcaaaaaagtttgtcgcatctttgcatcattgaaagtcttatgagcttacttagaaacccttgagaagtttaaaaaaagtttttcaacttattattgttgttgtgttgcagggtgctatagaactgctgatgtctgtgtacaagaataagtttagatcagcaaaaaaatacttaaccgattcaagcaaggtgcagaaattaaacattctttatcttacttggtgtagctgttggattgtatagtttttaaacttttgtttactaactttcagctgaacttaagaaatgttgagcgtttcatcaaggccgttgggatgtatgaaaatcaaatatttcagaagagagcacaagtacagcaggttaatgtccacatacaataattttgttttctgcagtaatctgcattttccttgcattttaagatattaggttgaaagcgacaagattaaataacattagcctccatctaatgctatgggtgtctcatctgttacatgtcccggccaggctattaatcacttctctctggcatgtaaaaaactttgtttcattgtacaaccgtatttcctctaggtgaatagtagctcagtggatttttaggccagggaaagtcgcaacttaaagttgagtaggagatacttaagacaaagtggaaaaacttaggaatggttaaagaacgtgaatgttttggggtaacaaccatgtataataaaaatattgtcagtttgcttctctagggaagatacttgtgtattttttttataagaatagaatagtacttagcggttttctttctgaaagatggccatatgcctctctttccatgggttaaaaccttgtctacactagctgacgaatttaatacccctctgatccagggaaaatgaagattagaaaacatgaaaaatttataaattctgtttcatttctatggatagtttttcattggtgcaagtgttatgatgtctgttacagaggcaatcagaaaggtttcgtcgtgacaa

SEQ ID NO: 141037 - DNA, 758 bp, Arabidopsis thaliana landsberg; identical to SEQ ID NO: 45296

SEQ ID NO: 141038 - DNA, 841 bp, Arabidopsis thaliana landsberg
tccagcaaagatcgaaggctaagctcagacgacgtagatgcagcagaccgattacctctactgaatgatacctattatcgagatatcctttgtgaaattggaggaatgttttctgtcgcaaataaagtggatagcattcacatgagaccttggattggatttcagtcatggcgtgctgctggtaggaaggtagttctttaaaagtagtgttgttgataactaatttacaaagttacagtttataaatatcagtctatttgaacttatttgaatgcttgagtcgattactttttgaaacaatacgtatccatctttacatccattgtgtaacttcgacactgtttgatgatacttttgttgtggagacaggtctcgttatcatctaaagctgaagagtctctggaaaacattataaagcaagaaacaaagggggagattatttacttctggacaagattagacatcgatggtgatgcgtatggaagtaaaaatgctcttacattctggtctatgtgcgatatccttaaccaaggaaactgcaggtattcctgcgctctaactgttgctccatttatgctgatactggcgaggaaagtatacagttgcataatattgaactaacccatatctttacttgagacatgccgtacatgtaataaccataagttatgctgataatggcgatttctcgatatgtgaatttacttctctttaggtattttgatattcagatagctgcgctcacattggttcctcgtgttttgtaattgatgcagaaccacttttgaagatgcattccggcatatgtatgggttaccagaacacattgaagcgcgtcctc

SEQ ID NO: 141039 - DNA, 5498 bp, Arabidopsis thaliana landsberg
cgttaaactggatcacatacctgatgaatttagcaccgagaatcgacacaaagatcgggtagagatcacaaatggaaaccagtcaccgttcaagtgtcaattgtcacaaagttagacattatatctctcttcaatcattcttttatagacaaaggaaaagaaaccataaagagacacaaatgattttggcgtctactgagaaatcacttcctcaaaactaaaccagtttggcatcctgccatatcataagcgcaagccacccataaaccaacataaagtacataataaatttgctcatcgtttcgatttcacaccggttcatctaaatggagaatggtagtggacttgtatttttccaagcacttcactctctttcgtggaatcaaaacttttgcaacaacggcttatgctagtctcacatgatgcgttttacacactctagatagattgacctcgcatgttagatcggaattctagtgatgccctctactaacatataattgatatcaatcaccatccataatcttatttggttttagatctcttgcaacactagctctttcttcctatcacaataggcttttcatttgggcatttgcaacttttttttttatatttttcatgattatgaaaaccttaatagagtagaaaaggtggtaaatagatatttatgcgtgtggattcaaattgcgtattgcattaacgatatcgacaattttattggttaaaccggcgggagtacacttttatttatagtctatttttacgccacgtcatctctaccttgaaaaattgaaattcatcatttttcttcctccttaagacttttttttttcttttctaattaacgacaacacgacgaagatgaatccttctcacggtggcgacgacaagcaacgaccggcgatgtatccccaagcgatcaatccattcctgataatccttttgcttctacaaatccttacgtcgcttcttccccttatctctatccttctctatcctctcacaatctcggacctaatctcttcccagaccacggagatgcatccaacgaccaatcaccatctgctcctcctcaggcgacggaggaggttctcatccgtgttcccggcgctattctcaaccttatcgacaaatcctacagcgttgaactcgcgtgcggtgatttcaccatctttcgaatcatccaggggcaaaatattgtagcggttctagctaatgttgggaatgagattcaatggccgttgacgaagaacgaggttgctgcgaaggttgatggatcacactatttcttttcgattcatccgccaaaggagaaaggtcaaggatctgggtctgattcagatgatgaacaagggcaaaagagtaaatcgaaatcggatgatgagattcttaattacggattgaccattgcttcgaaagggcaagagaatgtattacttgtgcttgatcaggttttacgagactacagttgtttcacagagcagagaatgtctgaaaaagccaaggagactggagaagaggtgctgggaaattcagtggtggcggagacttcgccggaggagcttaagggtgagagaaaggatgttgtggaaggtcaatgtgcggcgtattggacaacacttgcgccgaatgtcgaggattacactcacagtactgctaaaatgatagcttccgggtcaggtaagctgatcagagggatactgtggtgtggggatgtaactgtggagagacttaagaagggaaacgaggttatgaagaataggcttagtcgtgctgagaaggagaaagatgttagccctgagacactgaggagaatcaagaggtatggttatacttaggaatttagcatctttgacttgaaaataactgcttaggaatctagttccttgtttcatgatcactagagaactgagtggtaagggatgattattgtttgcagaggaccaattctgtgagaagtgatgaaatttcttgtttaaaaatgtttgaacattgtgcattctcatggtagtatagcttgaatgaaatcaatttttatgcctttgcttatctccctcacgtggtttctatgtaaagggttaagagagtgacacaaatgacagagaaagttgccactggtgttctttctggtgttgtcaaagtctcgggattcatcactggttcaatggcaaactcaaaagctggaaagaagctttttggtctcttgcctggagagattgttctcgcatccctcgatggatttagtaagtagattacttgtttttggtttctcatatttcctatcccatgcttggagggtcgtaaaagcttcttgattcacgagttgccttgctttctttcatctcacttgaatacatgttttgacatgaccagcattacaattcttgttaaaccaactttccttctgatggccattcccataatttttccatttatttttcgaatatgacatttagcagaagttccttgatatagtgtattagtgcttggatctgcttcttgcattgaacaagttaggctgatggactttggagcattattctttttgtggggtgtttgatttcaaagttaccaaatgttttgtaatcgttggcttcccttacataccgaaccctctttcttttatgttttactaaacaagggcatggttttcgcttctatagtggaaggtgctttaaaagtatcttctttcctctagttctcttgggaactcgtctatcagtcggcgatttacattcaaaacctgctgtttttttgtttgtttaaggcacatggcattagtaaccttcttttcatgtttacttcttgcaggcaagatctgtgatgctgttgaagtggctgggaaaaacgtaatgtcgacttcatcaactgtcacaacagaactagtcaatcacaggtattgattagcaaaggcatatataaacaatcacatatctccgcatgagtgatcttcagcaagagtgatcaaagtttccttagatcttaaagaaacctcatggattctgtttcgaaattacaggtacggcacaaaagcagcagaggctactaacgaagggctagacgcagcgggacatgcatttggaacggcatgggttgctttcaagattcgaaaggcatttaaccccaaaaatgtcataaagccttcatcattggccaagtctgtttcggaactaaaggctaagaaaggctccaagtaaacactaaacagccttcgactgttctgtgttcatctaaacttgcatttaatttttcattttggaaaagtatatgaagattgattgatgtaatctatatttagtttctgtgtatattgtgattctatgtaaactatataaacagtttcttctaatcttctcccatttatgggtttgattagtaacttcttaatgtgtcgagaagcagtgttagtactctttattttcttttgtactgctatttctgaccgctacctctcatctctggtgactaatcctgccttcgtttaccttttttagtgtttgcttggaaacactaaattggacctatgttatgtatttctaccagattaatttgacaaaaaaacatgttaggagtttttagagttttgaagaagtgggccagatgtttggagttttgggccaaagaagctcatattgggcccactagagaaataaatctagtgatgcttgattggctggaaggtgtgtaaacgtgaacctgtccgcaggtgattaaaacagaactgggcatttggcttgtcgcctaagttgggaatcgtttactgtgaaataaagacgaaagaaaggttttgaagaagaagaaagaaggctcacaagatccagaaaaaggtaaaagatggcgagatatgatcgagcaatcactgtattctcccccgatggtcacctcttccaagtagagtatgccctagaagccgtccgaaagggtaacgccgccgtcggagtccgcggcacagatactgtcgtcctcgccgtcgaaaagaaatccacccctaagctccaggattccaggtattgctccgatctctaccgatacaagatgcttaaaccggagttagtccatttacttttgtttctgcactttgattttggttttaagcttcacctggatagctcgcttgatttactcaattgctacttgtatgatcactgtttcaatccttctgaactaaatcctgatgttgggattttgtatcacttcgtaattgcgaatctagtattgttagatcgtagaatctgagctgaaccctagtttaagtctttttctctacgagtgtacaattacagttcctgtatctcagacgtgtttttttgtataagaacacgtgtttggttatactctgcaaattgatcattccctgcgtaaaaatataattttggtgttgaacttgctgaaatctaagcaatatcgtcttcgtatctgttggctaagctcttgctccaatagatctgagtttttttacctattgttatccgtatataggatctggttggtgttccttcccaatcatatgagttttgataatttttttgcttctcagatcagcaaggaagatagtgagccttgataatcacattgcattggcctgtgctggactgaaagcagatgctcgtgtcttgataaacaaggcgaggatagagtgtcaaagccacaggcttacgttggaggacccagttactgttgagtacattactcggtacatagcagggcttcaacagaagtatactcaaagtggtggtgtgagaccttttggtctttccactcttattgttgggtttgatccctacactcgtatacccgcgctttatcagaccgatccatctggtacattctctgcttggaaagctaatgcaactgggagaaactctaactcaattagggagtttctggagaaaaactacaaagaaagcgctggccaagaaactgttaagcttgctatccgtgctctgcttgaggttagtttgctctatcatgttctataactaaaccttgtagttttcttttgagctattgtcggggtgccctgttagtgaatgttctataactaaacctagtagttttagttgacaatgagatctgacctattaattattttgctgcgtgacccggtgattttgtgagcaacatgccaaactttgaacctcattatgattcttcattatttataggtgtggctttaggttaaaagtgaatgttagagaatgttaaagtttttgaaaatgtagaagaccttactaattgagttggattataatgttagatgagcttacttagcaaacgcacaagtagtggtggaacttgtaaagaagctgaaaaggatttgcattttgcaggttgttgagagtgggggaaagaacattgaggttgctgtaatgacacgagaggaaggtgttctgaagcaactagaagaagaagaaattgatatcattgtggctgagatcgaagcagagaaggctgcagctgaagcggccaagaaaggccctgcgaaggaaacatga

SEQ ID NO: 141040 - DNA, 1235 bp, Arabidopsis thaliana landsberg
agatatcaacaaacctatatgaattactaaccaatatgtgaaggaaattaaagcaaaattgcccttttgtacacacctacttctacttgtaatacaaggtatctttaaaattatccgcagggaaaagtggcactcgtgacaggaggagattcagggataggtaaagcagtgtgtcactgctatgcacttgaaggagcgagcgtggctttcacgtacgttaaaggtagagaggacaaagacgcagaagaaacgctgcgtttgcttcacgaggttaagacaagggaagctaaagagccgatcatgatcgctactgatttagggtttgaagagaattgcaagagggtcgttgaggaagttgtgaactcctttggacgcatcgatgtgcttgtgaattgtgcagctgagcagcatgaggtttccattgaggatatcgatgaggctaggcttgagagagtgttccgtaccaacatcttctcgcagtttttcttggttaagtgagtaaaaaaaaaaaaaactgaaactcgaactttggttctgaaactaattgatccggttagagttaattggtcgtaatttattgtagatatgcgttaaagcacatgaaggaagggagcagcatcatcaatacgacgtcggttgttgcatacgcaggaaactcaagcttactagagtacacagctacgaaaggagccatcgtttctttcacacgtgggttagctcttcagcttgcaccaaagggcattcgtgtgaacggtgtcgctcctggtccggtctggactccactgatacccgcatcgttctctgaagaagcgatcaaacagtttgggtcagagacaccgatgaaaagagcggctcagcctgtggaagtggctccttcctacgttttcttggcttgtaaccattgctcatcttactacaccggccaaatcctccatccaaacggtaagttctaatttgacgtggttagaccggattgggcattccatcagagtcctctgtttctttggtttaacaaattgatctctgttttggtctattataacacaaacgtgtttttgtgcaggtggtcttatcgtgaacgcttgagcttgcaataagtgcttatgtacatgactctgtttaggaagttcttacaaagagagtatatccagtagtatagtcgtgtgatgtaataaggtgatatgttgttatgtcgtttttttaaaagtagtataatatgaagatgcagagagaga

SEQ ID NO: 141041 - DNA, 1133 bp, Arabidopsis thaliana landsberg
aggcgacactgtataggacaagttcaattgagacaaagataagacaagcaactaaggaagcgttgaaagtggttagatcaaagggtttggtatgtgtctgccggagaccggttaccgacggttgtcgtagctgtttacgcggcgaagtatctcgcctcctccgagaagctggctatgattgcgtcattttcaaatctatgtggagaagctctcatgagatccctgcaggtaataaatcaaacccaattttactcttatctttaaattcctagtattcttattttcctaattatggaaggtgatttgtgattcttttatggattagtattgtttatgaagattccgtatgaatttagacatgttttgaaactttcacgtatctttatcaataacattactaattaagaaaccacatcaacggaattatctatatattctatataaataaatagaataaatatatcttgaacgttttcgcccctaaaacaagttgtcattaactataattaacaatttgaattaaccatgacgtttacttatcaaatttaggtgagcatgaatacttggaggtcgtggacaaatcggtttcaaagaaaggcgagatccgggtggtgatcgaactatgttttagggcggagtttgagatggcgagaggcagtgaagagtacaagcgactcatcggaatgttaccggaagtgtatgtcgggaaaacggagaggctaaaatcattaataaagatattgtgcaccgcagcgaagaagtgtatgaaagacaagaagatgcacatgggtccttggagaaaacacaaatacatgcaggctaaatggtttggaacttgtgagagaaaatctgtgtcgccagtatccgaaactgaggagaatatgtttccggtggcaaagcagagggtttctatgttgaattatggtctttttggtgctggaataggccgtccgaccgttgtagcggttgtgtgaaacatctatatagacgtacgaatacgataagttaggaggaaataaagtgaaatgagtttcactttgaaattttgcatgatattgtctcagttagaattttgtgtgtccaaaacagggtaatttctgggactattatggtatacaaagcggtattttaat

SEQ ID NO: 141042 - DNA, 866 bp, Arabidopsis thaliana landsberg
  unsure (1)..(866): unsure at all n locations
atcagggagaaataccctgatcgaattcctgtaagttatgttctgtttttaatctgattntgtactggtcatgtaaggttctcttatggtaatagatctctgtttgcgtgtctttcaatttatgatgtagcatgagtctgtgtatgtaatttaatagtttagtttgggatgcatctgtctttgtgttgtttttgttaatttgatcagttctgttctgttcttgtaaggttttcttatgtttttgtacctgtgtttgcgtatttatcaatgtatgctgaattcggtttcacaaacaatatcatgaatcttcgtggtgaaatttagtttaggttacagaacattagcttcgttgtttgagaatccaatactgtttgttttttctacaagattcagattatcttacattgtattttggttgcaggtgattgtggaaaaggctgagaaaagtgaagtcccaaatatagacaagaagaagtaagtaccttttgttgatcatgttaaacttgttatttgttcaatgttttcaagacttgtatgtaattttggaattgttctggattttgataaatgcaggtaccttgtgccatcagacctaacagttggtcaatttgtgtatgtgattcggaagagaatcaaactaagtgcagagaaagctatcttcattttcgtagacaatgttcttcctccaacaggagagctaatgtcaagcgtttacgaggataagaaagacgaagatggcttcctttacatcacttacagtggcgagaacacattcggtgcttcttcaatctaatctcagacctctgagaatccgccacgttttaatgcttcttcccaactttcaatttgtgtgtatagtttgttcc

SEQ ID NO: 141043 - DNA, 1382 bp, Arabidopsis thaliana landsberg
  unsure (1)..(1382): unsure at all n locations
aaatcatcaaaaatcaaaatctctaaaatcaaaaattcgcattttctctctcgccggagagatgcaacggtttcttctacctttactcttccttgcactatcgccgccggcgatttgtcattactcttcctcaacctcttcaccttcttcgtcctccgtttcttccgacgcctcnnnnnnnnnnnnnnnnnnnnnnncctactacgccgctacgaatcctcgagacgcggtgggcggtgcgtgtggatacggagatctcgtcaaatctgggtacggtatggctactgttggtctaagcgagactctgtttgagcgtggtcagatctgtggtgcttgtttcgagctcagatgtgttgatgatctccgttggtgtatccctggaacttcaattatactcaccgctacgaatttctgtgctcctaattacggttttgatcccgacggtggtggtcattgtaatccacctaacaaacatttcgtgcttccgatcgaagcgtttgagaagatcgctatttggaaagctgggaacatgccggtgcagtatcgaaggtgcgtttctctccgctttttcccaatttgtttcgcgttttgttaaaaaaatgcgtttgcggtggtggggaacgcggttctgcttttagacgccactatcgatttaaaaaatccggcgatgcttttgcttttgtgtcttcttcgatatccgtgtgctttattatgtgagatgggtttaccctaaatctcttcctcaatatgcaatttactttattgcccctaatcgttttatcttagtgtgtacaagattctgagaaatggtagataggtttgctcatcatagttgagtagctttgctctcattttcatcttagccatgagaggactgaaattgactgtttctgtgaagttctaggcacaatgcggtaaactactatttaggttcatgatacaatggatcattagatcctttattagtttgtgaagtgttttggagctgagcctataaatagttagttgcatatcacttaagttatgagttatgacttacaaccatttttgttggcttttaccaaaacaggatcaactgtagaaaggaagggagcatgcggtttacagtcgatggtggaggcattttcatttcggttttgatcaccaatgttgcagggtccggtgatatagttgctgtgaagatcaaagggtcgagaaccgggtggttacctatgggtcgtaattggggacaaaattggcatattaatgctgatctcaggaaccaagctctctcatttgaagtaacttctagtgacaggtcaaccgtgacatcttacaatgtctcccctaaaaactggaattatggacagaccttcgaagggaaacaattcgagactccgtga

SEQ ID NO: 141044 - DNA, 571 bp, Arabidopsis thaliana landsberg
cagccatctctaatcacattttacaatcgcctcttcaaatttcccgataaacaaaaaatgagttccggcgccggcagtggaacaactaaaggtggcagaggaaagccaaaagctacaaagtccgtctctcgatcttctaaagctggtcttcaatttcccgttggaagaatcgctagattccttaaagccggtaaatacgccgaacgtgttggtgccggtgctcccgtttatctctccgccgttctcgaatacctcgccgctgaggtaacaaacaatcttctgtttggtatttagtcttttagtctctatgatgagaatcactcgtaattgatatatcactagatttttcgatgtttaccgaatctttgattttgatttgatgttaaggtgtcttctagagtctgatctcttatatgatgttgatataatcattaggtattggagctagctggaaatgcagcaagagataacaagaagacacgtatcgtaccacggcacattcagcttgcagtgaggaacgatgaagagcttagtaaacttcttggaagtgtaacaattgctaatggaggag

SEQ ID NO: 141045 - DNA, 1201 bp, Arabidopsis thaliana landsberg
gaatgagttggtctctctgcagcacccatggggtctcctcttccatagctctcactctatggctttcgccatagaagaagatccaccttccgtattttcgccacctctgacggattagaacccaaggacgacccgccggaatctcctctcccttcctcatcctctgctctcggtaaagacttgaaaaaggtccgccttttttctatatcatttacgatttttctgttgaaaccataggaagacatgaaaatgaaaatgcaccatgttagattggtctctagtgcttgaacctgttgaaagagttgctcaagcttatgacttttcaattcaagcaggttgttaacaagactgctgcaacctttgcccctagagcttccaccgccagtaaaaaccctgctctccctggaactactctttacaaagtttttgaggttcaaggctatgcatcgatgttcctcggaggtgtcctttctttcaacctcctctttccctccagcgaacctgatttatggaggttgatgggcatgtggtccatttggatgttcagtatgtctccttctctactttcttctaactttatttattccaaggctgcatttttgcccctaatcctttactttctttccagctattccttctcttcgggcacgagactgtccaagtaaagagaaagaggctcttaactacctctttctcatcgtccccttgctcaatgttgctattcccttcttttggaaatcatttgctcttgtctggtctgctgacacggttgccttctttgctatgtatgcctggaaggtatgtcgaatggtaattattgaggggcgcttatatagttatatgtgcttgctcagattatttttttcactttttgcctcttacttcagcttggatggctggaaagaacagagtagggactactcgtgaatcatgatgggattagagcatgaagattctttgtcttttcttccttagaatggtacttcattcagcttatcgtgttaggtacgtgggtttaaggcaaatgaatgtgaacattgctctagaatgatatatgaactagccccttaaggaatatttcttgtaaatcttaaagttctgagatgaattattgttcaaaatacaagtgggagtacatatacgttttgttatcaagaatgcagctggtaaatttgaccaaagtaaaagaattgagtatata

SEQ ID NO: 141046 - DNA, 2121 bp, Arabidopsis thaliana landsberg
ctctcatcgacacccattggagtaaaaccgtccactgatccatctcttctggttcgtttactttctctgaccaactgagcaggatcatatccttcccaagaatcggggtttgacctcatagggcgcctcgtaccttgtgcaggagatgggaggattccaggtcctgttggagatgggagtaatccagttccatttgcagatggcctcctccagtttggctccttaccaacaacgtcattgtattctgcaccattatatgaacgctcatttgtacctctgaggggcctcatagacccaggaattccagtagaatgaggagaagatacaaatgaaggatcattattgaacatatctgtccttgaccgtttcataccagagtaaaaactagtatcgtcttgctcaggaggcaactcatcgtttgagtacataattttgattctaggattattgaataacctcccctgtaggccttccttgcattggcgagcttcctccgcgctcctaaactccacaagtgcaaaattccttgatgggtaactttttaccctctcgatctcaccaaagagtatcatcgcattgtgcagaatttgctcatcattgcattgtgtagcagtaggagggaacccaatccacagaaccttacttggctggacatctcctttaaagtcttcatatgagtgaggatactgtaagaatataacaaaacgtcaaaaccagtaacctatacatatcactagtaacaagagacatactttcaacattcaagactaacctgcggtttatgattcatattgccatttctgttatcgtaagagccagcccattgttcctgaagataacacaaaggtaacttgatttcagacttaagaagttgagcctactctacaatgaaatagagacgagtaaatactgctcctaggggcacaagacagagctcagccctatcagtttgacgcaaattatgaaactaaacaaaatgtttactggagcgttttcaaaagtaaaaatcaaatgccacaagagtgcttactttttttggcgcttgtgaccggagaaaatcaacacgcaaaaagctaccacccataggctttccattcatgctcttagcctgtaaagcatcatccatctcataataatcaatgaaagctgtcttgcgttctctgagaaacctaaaatcctcgattttcccaaacttgctgaactcttcctccaggtcatccttggagacattagggccgattccacccacccatagactcttacaaggttttgcctgcaacaagaaaaggtcgataagaaggcgatactacccagataggttgccaagaataaagcatcaaacatcaaggaaactaaacacacaaactaactagtaatttcaactacactacgacaccaattcatatcaattgctttcctaaacaaataaaattgccgcaaggagaaaccatctcctctttctctgttaaatcagtgttaatagtttctcttgcctaaacatcagattttgtctgtaggagaagtatgtagtccccaaagccggaaagacattaatactttctgcaaaacattcctgtctttatccattgcctgagtcccaaataaaccaatccctgaacactccatttaagtactcaaagccggcaagacattgaaatctgagtctgcctgcaaatgaatatttgtcttgtccactgcaactgtaccaatcccagaatggttgtgaagaagtcaacttctctaggaactacaatgggaaagcccagattgtacgtagggatgggaattgaggaacaaacatggttcttcgaataaagcgtttctgattggtagagttagccgccttaacaaccacgtaatttgtcttcctgaagcatcgagccaaaacaagcccaaaactccctcacactgatatggatatgtgccagcgatactaggagttaggacgatacggttgccagaattttctgtttcgcagatgcagttattgatatctacgtaccgccatagacaaatttctccacgcggtttgatttttgcaggaaactgaacttttaaactccaagatttcttatctgtttggccgatgatagagtttgctcgcttccaaattttcaccat

SEQ ID NO: 141047 - DNA, 1602 bp, Arabidopsis thaliana landsberg
cggatcttgtctcgttgaatcagtggatgaagaataacttaagcgtttgacaaaggtatactgctttaaataaatttctatcatacctgaaagaacatcgatacaagaatcttcagttttcctctgcaaaagcaatagtattaacaatgggtttgtttataattgtcatgcaggtcgcccaattcttgtcttgggaacttggacttgaatctgatgcaaatgcaataatttcaaatggaagggtgtgtaaaccatcttttatccttttctgtaattatatagatcgtttaatactatttacatatccttagtgttagtttcaattgtatatttatgaaccttcatcacattaaagtatatatttgactaggtgatatttcctgtggatgagaggacatttttgggccaagatttacatcttcttgagtcaatggagttcaatcaaagagtaaagcctgttcaagaaattattgaaggcattgaatggcaagatgtggatcccgatctgctgacaaggtctcttgattcatgctttaactgtttcttcttgtttgccaaaccaaaacttcaaacagaatttttttggtcttatgctttttcttgtcaacatttttcctcctagttcttggcgagcaaagcttctttagctgcattattttttttcttctagatttggctcttgctgctaattgtttataggctttattcactctctagactgatggttctccttatagtttcttcttctatgagggatgatcccatgtatgttctgaaaatagctgataggatatggttcttcacttcttctaggaataatcccttacttgcatggtttgaaaaatagctgatagaatattgttattttttgtcacacttgcagtaaatattttagcgatgtcttcatgtttgtgtcatctgcaatggcaacacgggatcgtagttctgaaagtgcgcggtttgaggtgttgaattcagaatacaggtatgtatactggtggttgcttttcttttcaatttcttgggaatttaatgctatgcaactaagatgtccatacgttgtgtagtgcggttttgctgggaaatgaaaatgcaacgatacacattgatgctgttatcgatcctttaagccctactggtcaaaaactagcatcacttcttcaagttctacagaaacatgttcagacgagcatgaggattgttctgaatcccatggtgagtaaaatatatacagctaaccttattatttggaaatcactagaatgtcaaacttaatgttctgagccacctagatgttcaaaggacttattcttctggcctttattgtggttactggtactcttgctgagatcgatatttttatgatgttacagctgccttactgatgtgtttaattatgggtattttttcatgtgtattctgtttcaagggtaattgtttcttattttagacaaaaaaaaagggtaattgtttcttattggagaaaaggaaaatacatattgttcatgcgtctgacctagagttctttattcttcttattggcagagttcccttgtggacattcctctgaaaaattactacagatatgtcttacctaatacg

SEQ ID NO: 141048 - DNA, 2509 bp, Arabidopsis thaliana landsberg
atgcacggtcgtaagagagaggaggatccgaatccagaggagaccgcagctaaagccctggagctccggtccctccagtcccagttcatgtccaatcaccatcaaaagatgtacatacagtattcttcttcttcttcttctatttcctttctctctcaaccaaccaatcatttgattttggttttccagttacacaaaggaagcaattcaattaagcgcgaagcttctaataaccaatccagagttctacactgcttggaactatcggaagctcgccttcgagtcccgactcgacgaggactctgatacaagcgtggtcaactcaattatcgatgaagaactaggagtcgtgagtggtttataattgctagctgtgttagcttgcacattccattcatgtgaaattttgctcatgatctcttgcttgttaaatacttaggtaaaaaatgccttggagaggaatatcaagtcatatggggcttggtatcatcgaaagtgggttttgagtagaaaagggcattattatccctcctttagaaaatgaattgcaacttttgaacgactatcaaaagcaagccaatcaaaagcaagacgatgaaaagcaagacgatcccagcaggaactttcacgcttggaactatcgcaggtgagagatttagggagttgcttgattcacattgtcaatttcttcatatcttgtcttgtttcaggtttgttgtggagctaaccaagacgtcaaaagaggatgagttgcagtatacaactgatatgatcagtgatattagtttcaccatctattctgcgtggcactatcgtaggtatgcttgcatttttaaagaactagttagatggtgagagagagagagatgtatataatttgctgttgtttctgcagtgtacttgtttcaagtttagtggcaaaaaaggctgatgggtttatgccaaaggaaacgattcgtcgtgaattggattatgtacatagtgctatttttacgttagaagagaaacaaagtggctggttttattacctttggcttcttgatcagactgttaaaatggagactcctcttcgcttttcctcatggccttcagatggttccatcatcattctatctggacctgactgcttcaatgcctcttcttctactactaagttgactactttctgttccgagtctggttcttttccactgattctttactttgaccaagccgtaagtggagtaagctcgtctactgttacaattgattctgaactcaaagaccttgtttgggaaccagtttcggataagaaaaactctcaagtggactcttgtgtttgggttgctcgtctgaaatgtgacagtagagaaccttgctttagtcgcaaggaaaccaaagtcaaggtcagccttggaggaattgtttcttccatgggatgtaacttgaccgctccttatgagtttgtatttacactgcgtattcatgacactctcgaaggagagtcgtcacaacaagaaagcattgtttcatggacggatgatcttgacaattgggatgatgatgcattgtcgaatgatttgcattcttttatcgccttcaaagctgatactggttttgagtggcgtaagaaagctatcaagatagagattgaacattttcgtactttgcctgacaggtataaaataatctttctagatttaatggaaaagagaaatttgtatgcagtctcttgaccttttgagttcttgttctttccttgtttagcaaaattggaaagctcattcttgcaaggcttttgatggctgaggaaactatgatcgcaaatggtgtccattacaaagaaatcctccaactgtataacgatctaatggctcttgattcttggcatgcccagtactacaaggatgagcacagcgtagctctaatccacaaggtacatatactttttcgtgaatctcttaagttgactttttgctcttaaaactctcaagccataaagagaatgttgatgcacaggtgacttcaagaactgaatccatgtccagacacctctttcggtacaggagtatgaacaatattgtatgtttaaggctcaataacttaacactatctcggatagccgcggtcgagaagttgctatttgtccaaatgttagatctcagtcacaatgagtttcattcagctgaaggtaacattatctaacgttttttgagccttgttcaatatcagttgttgcatcttttaaatatgtatgggtctgtatgtaggattgaaggcgatgcagcttctctgttgcctaaatctgagtcacaacagaatcaggagcttttcagcgcttaactctttaagacatcttaagcagcttagagtgttggatgtttcacataaccacatctgtggggaactcccagtagacacaacaaggtacctttgttcttcgccgctctctaattcgggtgaaactggaagagaggtgcataataaaccccagcctgcgtatttggtgcttagagatttgatgaaactg

SEQ ID NO: 141049 - DNA, 2399 bp, Arabidopsis thaliana landsberg
tgaatggagagatttataaccatgaagagctgaggaaacgtctgaagaatcacaagttccgtactggtagtgattgtgaagtcattgctcacttggtaagtgtggtatcatttttaattcttctgctaatgtggttatcaagttttgatttgagtttgatgtgttttatggacatagtacgaggagtatggtgtggattttgttgatatgttggatggaatattctcctttgtgttgctcgacacacgagataactctttcatggtggctcgtgatgcgattggtgtcacttcgctctacattggttggggactagacggatctgtgtggatatcttcagagatgaaaggcctaaacgatgactgtgagcatttcgaaacgtttcctccaggtcatttttattcaagcaaattaggagggtttaagcaatggtataatcctccttggttcaatgaatctgttccttcaacgccttatgagcctcttgcgataagacgcgcctttgaaaacgtaagaaaacatctcttctttttaattgtatgtggtgtgtgagagggtaatctgaaatatgtttgtttttctctctaggctgtgattaagcggttgatgactgatgttccatttggagttttgctctctggtggtcttgattcttcccttgttgcctccatcactgcacgtcacttggccggtactaaggcggctaagcaatggggtcctcagctccattccttttgcgttggtcttgaggtgagatatagaacagagttcctctgtttccaaagcagagttggatgattttttttgataggagagttggatgatttaaaagtgttttctctaattcgaaattcaaacttagcatcatttatggttgttctgttagggctcaccggacttgaaggcagggaaagaggtggcggaatatttggggacggtgcaccacgagttccacttctcggtgcaggacgggattgatgcgatagaggatgtgatttaccatgttgagacctatgatgtgacgactatcagagcgagcacaccgatgttcttgatgtcccggaaaatcaagtctctaggggtcaagatggttctctccggcgaaggtgcggacgagatctttggagggtacctctatttccacaaggcacctaacaagaaagagtttcaccaagaaacttgtcgcaaggtattcaattcaaccaccaaataagacatcatcaattttttttacttatcttgatatgattgttcggtgataacttgcagatcaaggctcttcacaagtatgactgtctaagagccaacaaatctacctctgcctttggactagaggcacgtgttcctttccttgacaaagacttcatcaacacagctatgtctctcgaccctgaatccaagatggtaactacaaaactcacatcacaaactcaataccttccttcacaagttaacgttgaacaaattttctatatgggtttttctagatcaagccagaggaaggaaggatcgagaaatgggttctaaggagagcctttgacgacgaagaacgtccttatctaccaaaacacattctctacagacagaaagaacagttcagtgatggtgttggctacagttggatcgatggcctgaaagatcacgctgctcaaaatgtacacataaaaaatttcatatctcccctaattagctaaaatataacatttggattcatgttcagatctaatgattctgttctgttttaaggtcaatgacaagatgatgtcgaacgcggggcatatcttccctcacaacactccaaacactaaagaagcttactactacagaatgatctttgaaaggttcttcccgcaggtgagagtcttataagtctccatgatgtaacagaatctcctattcgttttgcgttaactaattcacaaacttccgtgttacgttttttctaagaactctgcgagactaacggttcctggaggtgccaccgtggcttgttcgactgcaaaggcagtggagtgggatgcaagctggtccaacaatatggatccatcaggaagagccgctatcggagttcacctttcggcctacgatggcaagaacgtggcattgaccataccaccacttaaggcaattgacaacatgccgatgatgatgggtcaaggagttgtgattcagtcataacttcgaaggagaaatggatgaaatatgtgttatatcttcccaatgggtgaagtgttttgtatgattttaataataagaatgtgatcctttttttttcctatgaagatctgaatgtattatctatcttgtaaaaatttgtttctttgtaagatttgaatgtaccgcttttacgtagatcgatgtacatcaatcttataagtttcaattatgtattatattat

SEQ ID NO: 141050 - DNA, 923 bp, Arabidopsis thaliana landsberg
agaatcgatatggtgttgatggaagccaaacacagaaatattcatatcagtactcaactgggtctgagagtgccccatggacagggcattctgttgaaaatcaggctgtggagaatgggaactattcaaattcaaactattaccatccacagccgacagggccagccacaggcaatgtgcaagagataccgaatactgtatccttcactatctcatcgacgtccggaactgcaaatgtggcacaagattatagtggatatacgccataccagacctcttctgacccacacaactattcaaacacgggatattccaattactacagtggctatcaacagcaacctagccagtcatatcctcagcctgtaggggcttatcaaaacacaggtgctcctcagcctctttcctcatttcagaatccaggatcttatgctgggactccaagttattcaggaacttactacaatcctgctgattatcagactgctggaggttaccaaagtacgaactataacaaccaaacggctggaagttacccaagtacaaattacagcaatcagactcctgcttcgaaccagggaaactatacggattacacctcaaacccttatcaaaattatactcctgatgctgctaacacacatagctctactattgcgaccacaccacctgtacattatcaacagaactaccaacaatggacagaatattacagccaaacagaagtcccctgtgccccaggcacagaaaagctgtctaccccaaccacaagtgcatatagtcagagctttccagttcctggtgttactagtgaaatgcctgcttcaaatagtcagcctgccccgtcttatgtccaaccttggaggccggaaactgactcatcccatccaccttctcaacaggttcagatattactttcatga

SEQ ID NO: 141051 - DNA, 1032 bp, Arabidopsis thaliana landsberg; identical to SEQ ID NO: 47136
  unsure (1)..(1032): unsure at all n locations

SEQ ID NO: 141052 - DNA, 476 bp, Arabidopsis thaliana landsberg
atggtagatattaagtcattagtcagtgtacaaggcagaagcgcgttaacttggaatttagttggtgagtccgatgattcactctatttctgtatatatacagaccatttgatgcattttaacaaagagaatcagttaatatgtctaaagagaaatcatatgtaattgctcttcttctatctttgcttctctgtctttcttttcaagttggtgtctctgaggccaactacaacgcaggtctggtatatataattgtctatgcatatttttatctgttcaagttatcacattatttttgaaagaatcctgaggaaagctcaaccaaatatagctcgaatgttttatgatatttttgatggtagttttggaaaacaaaacctacaagtgtgtataatgttcaacattttttctagttactacaaggtactcggattctcctcgatgcgccaatggatcttctgcaagtccaccaacaa

SEQ ID NO: 141053 - DNA, 2084 bp, Arabidopsis thaliana landsberg
attcatgctaataaacgtcgtcgtttatatggcagatttaggcgcattcgtagcacgtgcgaaaggtggggattgtgaatgaatgggatcaagcaactccacgcgcactgtctgagaacaggcgtagacgaaaccaaagatctcttacaacgattgcttctgataccaaaccttgtttatgcccgaaaactcttcgatcatcatcaaaattcttgtactttcctctacaacaagctcattcaagcttactatgttcatccccagccccatgaatctatcgtcctctataatctcctctccttcgatggtctccgtccaagtcgccacactttcaatttcattttcgcagcttctgcttcgttttcttccgctcgacctttacggttgcttcattctcagttttttagatctgggtttgagtccgattcgttctgctgcactaccctaatcactgcctatgcgaagctaggagctttgtgttgtgcgcgcagagtgttcgacgaaatgtctaagagagatgtacccgtgtggaatgcaatgatcacgggctaccaacgacgaggtgatatgaaggcggcgatggagttgtttgattcaatgcctcgtaagaacgtaacctcgtggaccaccgtcatttctgggttttctcagaacgggaattactctgaagctttaaagatgtttttgtgtatggagaaagacaagtccgtgaaaccaaaccatattactgtagttagtgtactccccgcttgtgcgaatctgggggaattggagattggccgaagattagaaggctatgctagagagaacgggttctttgataacatttacgtgtgtaatgccacaatagagatgtactcaaaatgtggaatgattgatgtagcgaaacgcttattcgaggaacttggaaaccagagaaatttgtgctcatggaactccatgattggtagtctagctactcacgggaaacatgacgaagctcttacgctttttgcccaaatgttggtgagctgcatttttgtttgttccttcaattcaagcatgttgattccttggattgtaagagttttccaccccccatggtttttctgttgttcttcaacgagaaggtgagaaacccgatgcagtgacatttgttggaatgttgctagcttgtgttcatggtgggatggtggtgaagggccaagaattgttcaagtccatggaggaagttcacaagatttccccaaagctagagcattatggatgcatgatcgatctcttggggcgtgttggaaagctgcaagaagcctatgatctcatcaaaacaatgccaatgaaaccagatgctgtcgtatggggaacccttctgggtgcttgtagtttccacggaaatgttgagatagcagagatagcaagtgaggcactgttcaagcttgaacctacaaatccaggtaactgtgtgatcatgtcaaatatctacgccgccaatgagaagtgggatggagttttgaggatgcggaagttgatgaagaaggaaacgatgacaaaggctgctggatatagctattttgtggaagttggagttgatgttcataaatttactgtggaagataaatcacacccaagatcttatgagatctatcaggttcttgaggagattttcaggagaatgaaactggaaaagagtcgctttgattctttgcttcagcctgaacaactatgcatatgaaagtagatgttttgttcactttgccaataacaatgactgaatcttttgaaactgtatgtgattttggtgtctttacattcctatgttcaatcaaatgaacgttggtacacattgagtaagaagactagttggatatcgaggtagatcgaacacgaagagatgagacggaatagttgaagaaagctgacatggattgagacgatattatcactggttttcactattccttttgaaattccatgtcaggtgcagatcatatgtgtcctaaatgtgattaatagagggtgtgcttgctataaaatatctgcgtatttcttatgttattctttgtaatctgcttctgtttttcttcaactacgaattttctgtcaca

SEQ ID NO: 141054 - DNA, 1690 bp, Arabidopsis thaliana landsberg
gcagcaatgaccaccactgagtttcaaagctgcttcatcttcctcctcttatgtctcttctcactcgtctgttactctctctttttcaggaaaccaagctcaagacgggacgcccatggctgtgatctgcctccgagccctccttctttgccagtcatcggccatcttcaccttatcctctcttcccttgtccacaagtcttttcaaaagatctcctccaactacggacctctcctccatctccgcatcttcaacgttcccatagtcctcgtctcctctgcgtcagtggcctacgatatcttcagggtgcatgacttgaacgtctcttctcgcggctcccctccgtttgaggagtcactgttgttcggatctaccggcttcattagtgctccctatggagattatttcaagttcatgaagaaacacctggtcacaaagctccttggaccacaggcactcgagcgctcacgcctcatccggacaaatgaactagaacggttttacataaacctgcttgataaggcgacgaagaaggagagcgttgaaattggtaaggaagcgatgaagctcagtaacaacagcatctgcaagatgatcatggggaggagttgtttagaggaaaagggtgaggcattttttgtcaggggtttgattatcgagtcgttttacttgacgaagaaatttttcttggcattcactttgcgcgggctgctcgagaagcttggaatctcgctgttcaaaaaagaaataatgggagtttcccgcagatttgatgatttgctcgaaaggtatcttagggaacatgaagagaaaccagatgctgagcatcaagatacggacatgattgatgcactattggcagcttatcgagacgaaaaggccgagtataagatcactaggaaccagatcaaggcgtttttagtggtaaatgtttccatcatcagttttgatttattatgataaaccatacttaaacaccattgatcttccttgactaagataagttttacaaatgcaggatattttcattgcgggcactgacatctcggcgctaacaacgcagggaacaatggctgagatcattaacaaccctaacatatttgtgagaattagagaagaaatcgattctgttgtagggaaatcaaggctgattcaagaaacggatctaccaaagctcccttacttgcaagcggtagtcaaagaagggcttagattgcacccgcctacgcctctcatggtaagggagttccaagaagggtgtaaggtcaaaggtttctacataccagcgagcacaacccttgttgttaatggttatgctgtgatgagagatccaaatgtctgggaagaccctgaggagttcaagccggagaggtttttagcttcttcaagattaatgcaagaggacgagataagagagcaagccctcaagtacatcgctttcggtagtggaaggagaggctgcccaggagcaaatgtagcttatatctatgtaggaaccgcgattggaatgatggtgcaatgctttgactggagaatcaatggagacaaggttgacatgaaagaggccattcgaggactgaacctgaccatggctcatccccttaagtgcattcctgttgctagaaacctaaaccctttggcttgctcgaaccttaaaccctgtaactttgaatttgcaaaaaagttgttg

SEQ ID NO: 141055 - DNA, 1507 bp, Arabidopsis thaliana landsberg
ggtcatagatgataaacttcctccattttcatgggaaagaaagttgaacagtcaagcaaagactccttctgagttcaaattgagtaaacgagatcacatgcatctggtaatttcatcatttctttggctgaaattgattttgattatgagacatattcttaaacgaggaatcatctttcttgctggaaaagttatgtttttttaagtcaaggcgctctgttttttttctggaaatttaaaacttaaactcctctccctatctctgttttggcttttccaaagtttccattaggctacagattgtggcgtcacaccaaagacgaagccgccaaaggaagagtaagagatatatctctcataaccttcttttaatgctcacaaacatttgatgactttttgttttcatcaaatactaaatacttcccaaaacctgcaggcttcgatcttcgatatcttcagaaaacaccatattacgggagatcacggtgtccctttggaggaattgggtatgggaatatacacatttgctttagaaactgcatagaacacaaagttgcaatgctctcgagttttaagatcctctattacaatttcctaatgtacaaaaccgcggggtaaaaaaccgtgattcagttcaggaagcattggaaggagttacaagggtgagtttcagcagttcaagctgttcccaaaaatttgtgaggaagctccaatcctcacaaaccaattctctgtaagtaaacaatcatgaacattgcttggtttcttctattgtaaaccaaaacctgtgtgtttgatgtctttgtgaagtatcactctcatgcttcttgatctgttcaaattataggcttttgtttctcgtcctggaggtgtgaaacactcaactgttctatgtccatcaaagccacaagttgtcaagtaagccaaatacattattttcttgtgtctcaatcagatctatagttaaaagaaacagagtaaatgtgtgaatgatattaactatgttattgtatatgtttgtgcagagacaatggaggctatttatgccaaggccaagctccaaatatgggaattgagtcttgggactggaacatgacaggggaaaaatctacttaccatgctctttatccgaggtcttggaccgtctatgatggtataatattcgacctaaatgtctctaatcatgtttactacagattaatttactgcaaattcttgatgtatattaaggttatgaaaatgtttttacttgatgaacaggtgaacctgaccctgaactcagaatagtttcacgtcaagtctctccctttatacctcataattacgaggaaagcagtcttccggtttcggttttcaacttcacggtatgattattctacggcgcttaccctcaagattataactaattaggtcacaacttgttctaagctgatggagttttgttatgtttcaggtgactaatactggagcagaaccagcaattgtaactttgctctttacttgggag

SEQ ID NO: 141056 - DNA, 826 bp, Arabidopsis thaliana landsberg
  unsure (1)..(826): unsure at all n locations
ccacatgagccntgagctccgatgcgccggtgtaacggtggctcgcatcacccttcagcccaattccattttcttgcccgctttctttagcccacctgcccttgcttacgttgtccaaggtaagaaaataaataaannnnnnnnnnnnnnnnnncctaattaaaaactcgcaacctatagaaaatctaaaaaaagtggtcttttattttaattgttttcaggagaaggagttatggggacgattgcttctggttgtcctgagacttttgcagaagttgaaggatcatcaggaagaggaggaggaggagacccgggtcgacgttttgaggacatgcaccagaagttggagaatttccggcgaggggatgtgtttgcttcgcttgccggagtttcacagtggtggtacaaccgcggtgattccgatgccgtcattgtcattgttcttgatgtcaccaacagagaaaaccagcttgaccaagtccctagggtaatcatcaaattcaagaaagtccaaatttgtactgcatgcaaactatatgactaccactcagtgattaaaatagtgattcatatatataacacataatgtcatttttttgtgaacccttcatatgtagatgttccaactagccgggagcagaacgcaagaagaagaacaaccattaacgtggccatcaggcaacaacgctttcagcggtttcgacccaaacataatcgcggaagcattcaaaatcaacatcgagacagctaagcaactacaaaaccagaaggacaacagaggaaacataatccgagcaaatggtcctctccatttcgtcatcccacc

SEQ ID NO: 141057 - DNA, 244 bp, Arabidopsis thaliana landsberg
ttgtcagttgaggggaaccatgtcgggagtgtgaagagccatctcttgtgtagatcaatcttagacttgtacattggtgaagaaccgtttgataagaatgcaagagaagattttctagacaatgcagcttctctagccttcgacaactagttcacaacaaaatgttgctttctttctttcttaacggattctctatatatacggcataatgttgaggaatgtatttgaaataaattgcttgggg

SEQ ID NO: 141058 - DNA, 1550 bp, Arabidopsis thaliana landsberg
gcgacgacggtgatgacgatggacagagaaaaggagagagaacttgagctcgagagtgcaatgtacacaaactgtttgcttttaggtttggatccgaatgtgatcggactcggagcctccaatggcacgcctcgggtcgggttatttcgccattcgaatccaaagctcggtgaacagcttctctacttcatcctctcttctcttcgtggccctgctcagtcttcaaaggtgcgaatcttcactgtctctctctcgctcactcgttacgaaattgatttttgaaattctgggtttcgcacatagtgattttggagtcagtcgtttgattttgttttgtcttgatctctcaggattttgataaggtttggccaattttcgattcggctcaatctcgcgattttcgtaaggtaaagagggcttgagtaatcaagtttcttttagtgttttgtgagcaatttcttttcttattgaattcatagtttacttaacactagaattatgaatctgaaggttgttcaagcgattataagcgagcttgaatcacaaggggcattaccaaggagtaattcgagggtttcatcactagccacttgctgtggaccaaggttggttgaggctacgctgatgtggttcttatgtatgtttgttcattaggtttttttttctagtgattgataacgagcaactagtttagtcatctccacttcgtattcgttgggcgctttaggcttagtattaagctcttggggtgattgcgcagcattaggtgatctgatatgtatatgtggtacttcctgttttgattgcagatttgtggagctcttgtggcaactttcactgcatgcgttaagagaagttcataggcggacatttcctgctgatgtagcttccaatcctctaccttcttctctaactgacgtttctttctcacatgcagctactttgcttcctgtaaccaaggtagtaccgaaagcattaccttcaagattgtgtgttatagtttcactggtctatgtgaaccttgttgactagttcatgggataacgtagaaatgtgtgtgtaaatgattttcaggcccggatagtgcttgagcgccgtcggtttcttaaaaatgcagagactgcggtacaaagacaggccatgtggtctaatttagcccatgagatgactgcagagttccgtggtctctgtgctgaagaggtaagacgttattttttggtgagaggtactccattttcttgtctggttattatggcttttattgatgcatttcattttctatttctttggcatcaggcttaccttcaacaggaactagagaaacttaacgatttgagaaacaaagtgaagcaggaaggagaagtgtgggatgaccttgtgtctagctccagtcagaattctcatctagtttcaaaggcaactaggttatgggattctataatggctcgtaaaggtaagggtttatgctgttctattttgtcttagttcttacaagttaatacagagataagttctcacatacagaattatgcaggagttatatagtttac

SEQ ID NO: 141059 - DNA, 2478 bp, Arabidopsis thaliana landsberg
agcttgctgcttcttctgctcgtgtttctcctggtactcttctcctttctcctcaaaactcctcttttttttctcaaactaattacaggggatttggaaatgggagcttcgagttatctagtttcaatagaagtattcaatgataagcaataaaaagagtgaatttttgagcaaagttcttgtctttcttataggggttttgtttgtgtttttcggattgcaataatgatgaatgctgttagttcttgttgctaatgtagtgaatgaatcattctattgtggttgtgttggttggatggatacaggtgtatatgctgtgaagccgattgatcttctgttaaaaggacgaactcatcgaagtagaagatgtgtagctcctgtgaaaaggagaattggatgtatcaaagcggtggctgctccagttgcaccgccttcagctgacagtgcagaagacagggaacagttagcagaaagctatggattcagacaaattggagaagatcttcctgagaatgtcaccttaaaagatatcatggatacacttcccaaagaggtatgcctttttcaataagccttatgtgtgatttttatggaacttcttactcatttttggaatacaaattgtcttcaggtgtttgagattgatgatctgaaagctttgaagtctgtgttgatatctgtgacttcatacactttggggctcttcatgattgcaaaatcgccgtggtatctgctaccgttggcttgggcatggacaggaactgcaattaccggggtaagctctcctccactgtcctcttctgtgtgtcagcttgttactgttgtctaaccagatttttctttcttagttctttgtgataggtcatgattgtgcacataagtcattttcaaagaacaaattggtggaagacattgtgggtactctcgccttcctaccacttgtctacccatatgagccatggcggtttaagcacgaccgccatcacgccaaaaccaacatgtaagtctttcttagactgttaaagatatccgcaatagaatgagagataggaactcatgtttccgttttgttctctctataggttagttcatgacacagcttggcagccagttccgccagaggagtttgagtcatcacccgtgatgagaaaggcaatcatttttggatatggcccaattagaccttggttgtccatagctcactggtatatatagattaactcttacgcagtgatcaatttttttcaattttttttctctctttatatatctctttactcaactataataagcgttctaatagggtgaactggcacttcaatctgaaaaagttcagagcgagcgaggtgaatagggtgaagataagtttggcttgtgttttcgccttcatggccgttgggtggccactgatcgtatacaaagttggtatattgggatgggtaaaattctggttaatgccatggttgggctatcacttctgggtaaatgcttctattttatgctttttccctattctctctttttcgatatagcaccagaagctaagttggtttcgcattattgtttctctatagatgagcacattcacaatggttcatcatacggctccgcatatacctttcaagcctgcggatgagtggaacgcggctcaggcccagctgaatggaactgttcattgtgactaccctagttggtaatgcataccacttgctcagatggttaagttgctgagagctatcgtttggtttcatatgtactaatatttgtgtgttacgacaggattgaaattctctgccatgatatcaacgttcacatcccgcatcatattagcccaagaataccgagctacaatctccgtgcagctcatgagtctatacaagagaactggggaaaggtactaaccactttcttatctcgtaaatttgttgtgaataacatgacagtaatttgaaccacaacataataagtgttcctttgggaagttaataagacactaaaagtttcctgggctacttcttttggggtgttgttgcagtatacaaacttggctacatggaactggcgattgatgaagacgataatgactgtgtgtcatgtctatgacaaagaggagaactacattccttttgaccggttagcccctgaagaatctcagccaataaccttcctcaagaaagcaatgcctaactacacagcctgattcgccatggtctcaaactagtcttttgaaatctcaatatctttttgcagtcgccgatgttatatgtaagctttccaagcgatgagcttctctaacacttcaccaacgctttatactgttatcttctttccaatcttatcagaagagagaaactggtcaaattatctcagcaattgcaattcttttatcagtttcttagctataagaagattgaacagtctatatagtttgcaatgtactgtaatgtgatgaaaatttagttgatgagaatctttgaa

SEQ ID NO: 141060 - DNA, 2369 bp, Arabidopsis thaliana landsberg
tattacaattatggaactacgaccacgacaatccttgttcatggcgaggtgtgttgtgtaataacgattcaagagttgttactttatctctcccaaactctaacctcgttggttcgattccttccgatctgggtttcctccaaaacctccaaagtcttaatctttccaataattcactcaatgggtcattaccggttgagtttttcgccgccgataagctccggtttcttgatttatcaaataacttgatctccggcgagatccctgtatcaatcggaggtttacacaacctccagacgttaaatctctccgataacatcttcaccgggaaactaccagctaacttagcgtctcttggaagcttaacggaggtttctctgaagaacaactacttctccggcgagtttcccggcggcggatggagatcggttcagtatctagacatttcctcaaatctaatcaacggttcactcccacctgatttctccggcgacaatctccgatacctgaatgtctcgtataaccaaatctccggagagattcctccgaatgttggtgccggttttcctcaaaacgccaccgttgatttctccttcaacaatttaaccggttcaatcccagattctccggtttaccttaaccagaaatcaatttcgttttccggaaacccgggtttatgcggaggtccgacccgaaacccgtgtcccattccttcatctccggccaccgtctcgccaccaacctctacacctgcactcgcagctatacctaaatcaatcgggtccaatcgagaaaccgaaccgaacaacaactcaaatcctcgaaccgggttaagaccaggagttataatcggaatcatagtcggagatatcgccggaatcggaatcctcgctcttatcttcttctacgtttataaatacaaaaacaacaagacagtggagaagaagaacaatcatagcctagaagctcatgaagctaaagacacaacttcgttatcaccatcatcatcaacaactacatcttcttcatctccagaacaatcaagcagatttgcaaaatggtcatgtctccgtaagaatcaagaaaccgatgaaaccgaagaagaagacgaagaaaatcaacggtcaggagagattggagagaataagaaagggactttagtaaccattgatggaggagagaaagagcttgaagttgaaactttgcttaaggcttctgcttacattttaggagccactggttcgagtataatgtacaagactgttcttgaggacggtacggttctcgcggttcgtcggttaggtgagaatggtttgagtcaacaacgccggtttaaagactttgaggcacatattcgagctattggtaaattggttcacccgaatttggtacgtcttcgtggattctattggggcaccgacgagaaattggtcatttacgattttgttcctaacggcagtctcgtcaacgcccgttacagtgagtcaaaatcatctctttcacatttcaatctttttcctcgctttatgataaaggcacatgttagcataagatcaagtcgcacgctagcatcaccagggttttgctactgtgttcatattagttggtagtagttaaattacacctgtattaataaagtcaacggctggtcaaattttgattctttgtgctattggacagggaaaggagggtcttcgccgtgccatttaccgtgggagactcggctcaagatagtaaaaggtttggctcgtgggcttgcttacctccacgacaagaaacatgtgcacggtaacttgaagcctagtaacatactcttgggccaagatatggagcccaagatcggcgatttcgggctcgaaaggcttctcgccggggatactagctataaccgagctagtggatcatctcggattttcagtagcaagcgattgacagcatcctcgcgtgaatttggtaccatcgggcccacaccgagcccaagtccaagctccgttgggcccatatctccctattgcgcacccgagtcgctccgcaatctcaaaccaaacccgaaatgggatgtgtttgggtttggagtgatcctcctcgagctgctcacgggaaaaatagtgtcgatagacgaggtgggggtaggaaatgggctgaccgtagaggacgggaaccgggcgctaataatggctgatgtagcgatccgctccgaattggaaggcaaagaggactttttacttggccttttcaaattgggatatagttgtgcatctcaaattccacaaaagagaccgaccatgaaagaggcgttagtagtgtttgaaagatatcctattagctcatcggctaagagtccatcgtaccattacggacactattaa

SEQ ID NO: 141061 - DNA, 1411 bp, Arabidopsis thaliana landsberg
atgaagtttggatttccgttggccttcttgacaacaatgctagcttggagcaatatagagatggcaacacagcttaaggcccatcaagagcaagaaaacgccctcgctgctctcaagtgggccaccgattttctcattaaagcccatcctgagcccaatgtcttgtacggacaggtgggcgatggaaactcggaccacgagtgctggatgaggcctgaggatatgacaactccacgtccttcatttcgcattgatgctcaacatccaggttctgacctagcaggtgagacagcagcagcaatggctgctgcgtctatcgcctttgcaccatctgatgaagcctatgcccaaatactcattggtcatgcgaaagaattatttgaattcgctaaggcgtaccctggcatttaccaaaactccattactaacgcgggtggcttctacgcgagcagtggatacgaagatgagttgttatgggctgcagcttggctccaccgtgccaccaacgaccagatttatcttgattatctaacacaagcatctggtacaggaggtccgaggactgctttttcctgggatgataagttcgtgggtgcacaagtcttggtcgccaaggtactatttcactaaagacaacatatcagtaacttatgtgacaagaaataaacatatataacacaaagtttttgcaaatgcagcttgcacttgaagggaaagtagagagcaatggaaagatcgcagagtacaagagtatggcagagcagtttatctgcaactgtgctcaaaaaggttccaacaacgttaagaaaacccctggcggtttgctctacttcttgccgtggaacaacctccaatacaccacagccgctactttcgtcctctcagcatattctaaatatcttacagacgcaaaagcctccatccaatgtcccaatggtgctcttcaagcttctgatcttctcgacctcgctcgttcccaggtagttaactaaccctaatatagtacataccataagacatgttctgatgttcatacaatattaatgtgtgatttctacaacatgttatataggtagactatatacttgggtcgaacccccagaacatgagctacatggttggagttgggaccaattatcccaaaaaaccacaccatagagcagcctctattgtatcgatcaccaaggacaaaacaccagtgacgtgtagtgaaggattcgatgcatggtttaacaatcctgcaccaaaccctaacgttttaatgggagcagttgtcggaggacccaacgataacgatgtttatggagatgagaggactgattaccagcatgctgagcctgctccggccactgctgctccatttgttggtgtcttggcggccgtgcttatcttctctatgtttgcaatttga

SEQ ID NO: 141062 - DNA, 815 bp, Arabidopsis thaliana landsberg
gcaagattccaacccaagatttcttcaccaatgagtttggcctcccactcaccatgaacccaagtatgtaacatatctccttttgaccatccttatacattggtgtttgttttcattagccatctctccattttggtttgtagattatgaagacatgagctgcgagatgatatacgggcaagcacctccggcctttgaggaggatgtagccaccaagcaaccttgtctagcagatatatgtaagtcttacaatgctcagattgcatacatgcatgcaagatgtatctaacatgatggtgatgatgttgcctgcaggttctatgtcgaatccaagctccccaatctgccctaaactagaggcatgagtggagtggatcagcagccacttctttgacgggatgtgcaatttccaagcgatatacatactttttttcttttccaaacacatacattacatataaaagacagttgtgaagacgagttagtgttctgtgttactattctggttgggttgtgtaaagtatacgattaatacacttgagcttactcatcttctttgtgttttaagtttgaactcgccatgttggttataacttggatctcaagtgttacttgccgtttgtattgtaatataaaaccaaaaactgagattagcttagctttaaagtaaccctctctacttatatgagtaagccaactgtagttttgcttttacgacttactttcatagattgtttagtttgcggtttggtactttgatacacactgaaagacttaactttcatttgacttgcacacaaaaatagagaaaagaa

SEQ ID NO: 141063 - DNA, 1814 bp, Arabidopsis thaliana landsberg
ctttctctatctctctttcgaacccaccggtggttcgggtatctctctattcactcttcaagtcacctaattggttagtggatctgcttcgattagggtttttaaaaggcttttcctttttccgtttcaaattttttcttctttcgactctcaaaattttcccggattttttttttggattctttaacactttctgtgttagctctttttcttttgactcgagttccgttttttctcagctgaggtttagtgggtatttttggaagctcactcgattgaagttttttttttttttttgaggaatcagtttcagatttgtagaatctgcgttttatttatatttataggttagcgattgaagtttcgaattcgattttgttttactatctaaaatttaaacaattttctcaacacattttctcaaattttggattcaaagctcctgatgttcgtgtttcgccactgtgggtaattgattccttaaattggtgtgttttttaaaatacccaaattctgattttcgtaaatatttcctctcatctcgattactgcagctatttatcttccccaacactgctttttactgatccaagaattggttctactcttttgttaaaaaacgtgagttttgatttttcttagctttaatcgacgtcttgatttttcccctggtgaaatgttgaaattcgtagtttgtacatgtcttagaggaagccaaatttgcttatcgacttagtgtcgtatcttgtccgtatcagtttaaagtgtgtcttttgtcacaattgcattttttggtttctaactatatatttgaatatacttgtgcagagatacgtgcaaatggcaccagttaggaagtcgaggagtgtgaacaagcgtttcaccaatgaaacttccccaagaaaagatgctgggaaatcgaaaaaaaataagctacgtgtgagtaaattggtcttcatttcttgaatgttgaatgagatgttactctcatgtatttattctgtgcgttctttttcttatcatagaagaagaaattgtctgacaagcttggacctcagtggaccagattagaacttgagcgtttctatgatgcttaccgcaagcacggacaagagtggagaagggtaaatagctgtttcactcacttatgtttatgtgagtttcagtggcaatcagagttcttaaagactgttttttgtataggtggctgctgcaattcggaatagcaggtctgttgacatggtggaagctctatttaatatgaatcgggtatgagtaaggacatgctatgtttcagttttagttagtatcgatgtggcaagtttcttttccaagctttagtttagatgttgtaaaacctacataactttgcattcacaagatatgcttcttcttccaggcgtatttatctctccccgagggaactgcctctgtagctggccttattgcgatgatgacagatcattacagtgtcatggtgagaaatctattttattaaggctgccacacaaaggatattatgtgaagtgacctgccagtagatgagaaaatgaaatttcttggttgaaaatgtgggtggttggtgaaaaacctttaattgttaacgtgagtagacagtaacaccaatgacattgaaaactttgagttttgtgtaccctatctggcctatctgttgggccagtttgtatgtttgataaagttatgtggaccgatttgtaactcattcatatgatatttcttctaggaagggagtggcagtgaaggagaaggccatgatgcttcagaagtaccaaggaaacaacaaaagcgcaaac

SEQ ID NO: 141064 - DNA, 542 bp, Arabidopsis thaliana landsberg
gcctgcgaattgttaagaaacccatctctacaaccataccttcttcaatgccaaaacctgtcgcctatttatcttccggttttcccgataaagccggtaaatagtccgaaggataaagcaagaagaaactcattgccaggaaagtttggaaaggaaagagtttcaagagagaagagcgaggtgtcccgcagtttggaaaatctatatccattttggacgaatacagagactggatctagcagctcatcgcaaccggcatcatctacgaatggtgcagaagacaaacttgaaacaaaaagaatcgatccaagctgtgacacattgaagatttctgagtttacaagccagaagtcggatgagagcttaattgatcctgatattgcagtttactctacagaaacgccagccgaagaaaatgctctgccaaaagaaactgaaaatatattctctgaggaatctcagttacgtgatgttgatgttggggttgtgagtgcacaagaagtagcatgttcccctccaagagccatcgaagaagctgaaac

SEQ ID NO: 141065 - DNA, 503 bp, Arabidopsis thaliana landsberg; identical to SEQ ID NO: 43603

SEQ ID NO: 141066 - DNA, 2732 bp, Arabidopsis thaliana landsberg
atgactaaccagaggtaaagagaagagctaagaagaagatggtgaatgtgaaggagcttttcatgtttctttctgctaaaagtctaaaccgtgtgtttgagaagagacaaagacttgtgaaattttgtgtgattttttatcccattgaatatatacaaatattttagggagatagtttgattagaaggaaattaacgttagctattttagtacctaagcgttttgaatttgactaaacaaatatatttttctatatagtctctgtttgtttgaaaagaaacaatgacttgtaagattttgtgtgatgtgttattccattgatatgcaaatattttagggagataatttgattaaaaagaaatttactttagctattttggtaactaagccaatttaatttgactaaacaatatggtttatgaaaaaaatcagtttttctatataaaatattttaaattttcaaaacatggccaaaatttcaaaaaatcattgtattatccatttttcttcctaacactttttttcttataaacttgtccctaattcatgaaattatccatttagttaaacttgacagagatttcatgaatttaaaatattaaaaaacttaatcatagagaaagtgattagagagccttccggcttgaaaacaacgccacaagaataggaagaaaaaaaaagaatgaaaaaacaatcttccaaggaagcgttaaagagacgcaggcaaagtcaaagtcaaatctctcgtttgtttataaaatgaaacctcaaagtgctcttttccttcatcagaagatcaccatttcttttgcctcagtaagctcctctttcactatctccgtcgttgctccgcttcctactggttcaaaggttcgatttgtgattcttgaaacatttctaatactgatctctgtctttgttttgcttgatttgggttagatcatattttccttttgcaattagggttcttgagttgcttcttttgcacgctttctcatactgtttccttatcttctactttgattctctgttttcgtttgtaagtatcgattcaacagctttgtatcgattctctgtttttcttttttcttctttgttaacagtttgaaagacaaaagaagaatgagggttgatttttctgagccagagtacaggaactgttaccattgtcgcgattcaggcatacttaatactcaagaatctgaaccgaacaatgtgattggctcatccatcacttcagttccggttagttccggaccatttcaagctcttggacatgcttctgctgctattggttcaacctcaacatcatctccagttcaaagttcttcatcattcaactttggatccgctcctgctgccaccacatctgttggtgtgtctagtacttccacacccacacccattagcttcctcccatttggttacgtcccaccacctccaccgagttcttcactgtctgggccagcgcaaaatgtgccttggagtattagtgcttattctactgcagggcgcggtgttgaatgggcctgggccagacccgatgttgctgtctatccagcatcctcctcctcctcctctactagtacagtagtttttggtacaacaccagtgagtgtttcttcactgtttgggccgtcccaagatttccccaagactacttttgcttgttgttcaagcaccccagcacctacaaggtgtgaatgttcttttgctaaacctttttttggttcctcacctgcatcttcctcttctaacctttttggaccaaacccatcgacgactactgcatcagtttttggtacatctgcaacgagtggttcttcattttttgggccagcgcaacatccactaagttacgactctgttggtggttcagcctttgctggtgttaaaacatcatctcctcaacctcttggcttcaatgaagctactactctgttgccgaggtcgcatgatggacaaaacatatcttctttcaagccttatctagataaatgccatgatgaattaaggtgggaagattacaagaaaggagctaaaggtaactaactcatcatttatatctttggtatgtacattttctcttatatatctctctgtaattttgactaatctcatgttcaggtgggtcgtttcctgctgctcatgcctctcccatagccataggctcaaggccaaacgctgttttttcaccatcaacggtatcaccatcaatatttgcttctccaagtgtacctgatcatcaacagaggacaaattttagtacaacgcaaggaaactttactggtcctgcttttggtttcttccctgctgctgctggtggtgctacaacattttcacctagccgttttggtcaacctaatgcgcctttcactggtttcggtccccaatttcagagctctttttcatcattctcaaccacatttcctgccgtaagctcgagtgttcagagaccccatgaaacagctgctgtttcttccccagcatttggatgtacagcgtgtggagcaacaagtagcaactctgcttctggtcatttcacctctcatggagccacaagtcctccatcagctgctacaactcctcccgggttgttctttcctaccactagttctggtcctatgatgtttggaacaactcttgctgctcaaggcacaactccagcacttcaaacctatcctgttcaaggtttcattattctcccatttgccaccatgagtctgcagtaa

SEQ ID NO: 141067 - DNA, 4604 bp, Arabidopsis thaliana landsberg
ttcaatcactagaaccccccaaagtttacaaggagtaccgagatttcattatcaataagtttagagaggacacttgtcggagactcaccttcaccagtgtccgcaagtttcttgttggcgatgtcaatttgctccagaaagtttttctcttcctcgaaaaatggggattgatcaattttagctcttccctgaagaaaaatgaccatctgttgtccgtggataatgctaaaatagaacaagggactcctgctggaattcgagttactgcaacccctaattctcttaggcctataaccgcaccgccccttgttgaggaaagagttgagactggcatcaaagtaccaccgcttacctcttattcagatgttttcagtgatttgaagaagccggatcatgtattggtttgtgcgcattgtggagaacgttgcgattctcctttctatcaacataacaaggtagtttttttttgctttttttcgattagcatatttcatactctctagtctgttttgtttatgcttcttttttttttgacatatgatgttggcagggtatagtcaacatatgcgaaaagtgtttcaagaatggaaactatggggagaacaacgctgcagatgattttaagttgattgggaattcagctgcagctgtgtggacagaggaagagatcctcctcttgctagaatctgtgctgaaacatggagatgattgggaactcatttcacaaagtgtttctaccaagagtagactagattgcatttctaaactcattgagctcccgtttggagagtttctgatgggttctgcttctggaagactcaatccctctatcctcaccgaggatgaaaacacggaacaggtgcaaactgatgggcaggaacatgaggaaacagagacaagggaagaaaaagaagatcgcgtgaatgaagatgagcttccagcaaaaaggaaacgtgttgcactgatatcagacggtgatagttcacttatgaaacaggtgaatgtttggttaaactatatgccttgtgttcattattttccatatgagtgtaacattcgggttcttctctgacctttaaccgtcgcaaagaatgccctttttaactccactggaaaagaatgttcaagagataacatgtttacatattgcacaacaggtcgctgccatggcaagtaaagttggtccatctgtcgcaactgctgctgcaaaagctgcacttgcagctctttgtgatgaagcctcatgtccaaaagagatttttgacactgatgactacagcaatttcacagttgataggttcgattctctaagccctcaatttgcttgtggtttggcttctcatgtcctacactaatctcaagatacaaaactttgctcacagagccgatggagagaaagatacagatatggaggaacaacaagaagacaaaggtaaattgtgttgtgattcaatttgcattcctaggtttataatgaaagctcaagacttaagatttggaatggttatatatatatttgcagacgggcctcagggtctacctgtaaagttaaggatgagagcgtctgtggcaacagctctaggagctgcggctgcacaagcgaaaatactggctgatcaagaagaaagagaaatggaacagttagctgcgccattaatagaccaacagtttggttgtaacttgtaacaacattaaaacatttgtgtctgttccactgtgtttgtctcttgaaccggacgggttttgcttctctttgttgtactcagctgaagaaactgcagagcaagttgaagtttctagacgacttggaatcgataatggatgaagaagagaaagtgatagagggtgtaaaggaaacaatcatccaagagagggttagcgttttgcaatgcgcgtttagaagcggtattaccaaacgttgggatcatacgtacgtgaaatgatcttcttctttcattcgtactttttttttctcttggggtagagttgttttctcattccttatggatttgttatgttgacttttgaggattatatgtatttagtattaatgtgttttattgacttaatgaggagagtaggtttaggttacatacctcttttgtcgatatgtctgaccaatggatgggtctctctactaattcacacgcgcccagtgtgacgtcaataaataaaattccgaaaacattttctgagctttccataatttggaaaaaagtgaattgaaaaaaagaacagtgacactcttgtttctataaattggtgagaccgtcctcaaaaccccttcgtcaccttcagtgtctctctctcaagatctagctccggtcatgaagtcgtcggaattccaataccacgaggttctctctctctccctctctctgcttagagattttagatgtagtagtaatagtttaacaggagagtgaagatgtcaagaggtgttgagatgattgattagatctttgaataaacaaatatgtgtatgaattggtgacaggaatacgtgagaaattcaagaggtgtagagttgttcgcatgtagatggatcccatcttcttcgtcttctcccaaagctctggttttcctctgccatggttgcagttatttccttacttattatttctaaaagccgctttcttcattacacataataaagctgaacaagttggtggtgattttgtgcaggttatggaatggagtgtagcgactccatgaaaggtttttcattattcttcttccctccaatttatgattcacatgcacaatagtaatgcattagatctaacaaatctccaaaaatatggattttttgtttctcttgccttgatttggcggtgggattttagatttaattagcaagttttttttttttgttgcttctatcagttctctgaatcagattacgcatgatactgagaaaaaagtcatttctttcactgcttatcattttttttaacttttatattttagatttgatgcattatactagttaggatttgtgtagtgatagtagcagatcatggatcttaaattcactgtggaccttagaacatttatgtgtgtagtaatacttcttaaatgcctctagaaagcaagtcatggagggtgttaggaccggtaggtcaacaagtcttactttatgtggttggttttggttggagaacgaccctcagactaaatttattttatttcatttttttggtctttcctcgtttagagtgttgtatttgatcccttgcaaattaaattacctttctttctatggctagcttggtggttgagaaaatttattcggaagttgatacatgtttgaaactaaacaaactgatacatgttttgattttagaatgcggaatcaggctggcttcagctggatacgcggtttttggtatggactatgaaggtcatggaaggtccatgggatctcgttgctacatcaagaagtttgcgaatgttgtgaatgattgctatgactactacacatctatttgtggtatttcatttgacatatataacaataacattcctctctctcttcttctccgtttatcagtaagaagagattttctcaaccccttaagttaatccggttaattttatgtgacaccagcgcaagaggagtacatggacaaaggcagattcttgtatggagaatccatgggaggcgcagtcactttattgcttcacaaaaaagatcctttgttttggaacggcgccattctagttgctccaatgtgtaaggtaaaaaacctgcaactataattttagattgcagagtcgtaggtgataataatattgaaatgcaaagtatattgttatgtttaaatatgcagatatctgagaaggtgaagccacaccctatagtgattaatctgttaactagagtcgaagaaatcatacctaaatggaaaatagttccaacaaaagacgtgattgacgctgctttcaaggacctcgtcaagcgagaagaggtctgtatagtgtataccaaccctctgatcaccatcgaaattggttatatgtaaataatttggtgtgtgtaaatgcaggtaaggaacaacaagctgatatatcaagacaagcctaggctcaaaaccgcacttgagatgcttaggacaagcatgaacctagaagacactctccacgaggttcatgtctcttattgattgttcttgatcccgtgttatgacattatttctgaccaagacaacatgatattgcagataacaatgccattctttgtattacacggagaagcagatacagtgacggatccagaggtaagcaaagctctgtacgagaaagctagcacaagggacaagacgctcaagttgtatccagggatgtggcacgctctgacgtcaggtgagcctgactgtaacgtggaccttgtttttgctgacatcatcaattggcttgaccttcgaaccgctgaccctgcctctctcactgtcactcctatacgagttggtaacactacgagcgtccagagggtaactactgttaacggcgttagtaacggtcataggaggcctaaacgtcccttcttcaatctcctttgtggtttgaaccgtggccgtttggttccacgatccactgtgtaa

SEQ ID NO: 141068 - DNA, 1537 bp, Arabidopsis thaliana landsberg
acattctttatttcctctccaaaaccccaacaactacgtgaagactattctctctcaaaagcttacggaacgaaatgactcaccgtatagctcctcgatgtttctccaccatcatgcttctatgtcttctatatacttcacgtaatctctctgcgtctgatacatatgaataagctttgttttttttcttcgcattctgaaaatttaaggatgcaacaaactaacttgatttttgtgatgattgatttcagctctagatgttatagctcagggtcagggaggacaaggtgatataccagttgttaatcctacagctccaggtggtagtaccacaacaccaaccataacacaaccgtcaccgccttccttgacattcccaggtccaactacaccaactggtggttatccacctcttgacggtaccacgccaaccggtggttacccaccactttatggtactacaccgccaggtggaggtgatgtaggtggtggaggaggcggatatggtggtggtacacctggtggaggtggaggtggaggtggtgacactggtgcaggtgctggaggtgggggttatggtggtggtggtgacactggtgcaggtggaggtgttggtagtggccagtggtgtatagcgaaagcaaatgcttcgccaacatcattacaggtggctttagattacgcttgtgggtatggaggagctgattgtggccagatacaacaaggtgcagcatgttacgagcctaacacaattcgtgaccatgcttcctttgctttcaatagttattaccagaagcatcctggttcagacagctgcaattttggaggggcagcacaacttactagcacagatccaagtaagacatcttaactttttatgtactagtccacacagatttgaccataagaaccgggaaagtagaattaagttacccgcatactagcttccatatttccagcttttatctttgctgtctccatgagcggcataagctacttgagacctccacaactgatagatgttgagtgtctagaaatagttcctgaacctagtaatactagcccaccatatgattccagtgggtcaaagaatctgataataactagagtttatacctttcaacgctaaagataaatctgagactggtattcaaatctgctcttatactgctccaggtaaaggaagctgtcacttctcatcatcatcaggaacagtcaggtatgtgtttctttttccacaaatcaacttcttaacctgtcaaaaaagtgagaaaaataattgtgattaatatctgccaattgcagcacaagccccccaagtcaaatgagtccaccagattttagttccccaccatcatctacatacccaccgccaataacaactccaactacaggcataactggctctggaccacccttcggcgtagcagagccaacagggcttccgaattcagcaacctctgtatcacatagccttctctcaatatttacagcagttgggatactaatgccactgctcagggaaaattatctttaa

SEQ ID NO: 141069 - DNA, 1536 bp, Arabidopsis thaliana landsberg
aaaaaacgacaatttcgattgtggataatggaccgaacacctataataggccttttgtctttggccccaaaaaagaaaaagaagcaaattgaatatgtgcgacatatagttatacaagtcaaggggtactttagtcaatgccaatagcaactacctaccgaaactcaattcgacgtttagaaaacgtgtcgcttcttctgatctcagcttcaaaattcgagaaagagtgatcgggaaaaataatcatcggcaatgggttggtataccagtttcttagtagtggtggcgtccttagccgtcggagttatattctcgccggagacattcggatcgttgacgaatggagagaattcggcgaagatttcgatattcctgaagctagctcatctactcagtttcgctacagcttggggagctgctctctgggctaccttcatcggaggaatcatcatgttcaagtacgcatctctatctctatccaatcaatttggattctgtgtgatttatttttctctcttgtattgactgatcaggaatttaccgaggcatcagtttggtaatcttcagagcaagttgtttccagcttacttcactttggttggttcttgctgcgcaatttcactctctgcttttggttatttgcatccatggaagtcatcttctacggtcgagaaatatcagatagggtttctcctatccgcttttgctttcaatctcaccaatttgtttgtcttcactcccatgaccatcgatgtaagtggctattcccctccaattgcatagaaaaatgcatacaagatcctaatgaaccagtcaatggcctttgctttggtgtatgtagatgatgaaacaaaggcacaaagtagagagggaaaacaacattggagatgaagttggttggtccaagaacagagaaaaggcaaagagtatcccaaagctagctgctatgaacaagaagtttggaatgattcacgggttatcatcccttgctaacatcttttcatttggaagccttgctatgcattcttggtatctagctgggaagttgaatctctagtttcctcctcaatactcatcttgtcacaaaggtctgaccttttacgcccccttaatgaataaatctcttgcatttcctcgccaatcccttagtaagattgtgtcagactccaaacatatttcagtgaaatcatgaaagaaattgttaccaagcactcttgtacgaagatacttcctgtctttctctaaaaataatccatgtttgatagattctattacagaataggcctaagctgcttcacttgaagaaactaaaatgtgcttgtgaatggtgaaagaccacactgtagacactcattattaacaatctaattgggagaaagaagatgatcactagttgactactccttgatgccacgaatcttgttatgagtttcaaagaatctctcccactaaataaaatgtttataataaagaacttgcgcagccattgatcccgctcagctttcatctgcttcagctccttccggatcacatgcc

SEQ ID NO: 141070 - DNA, 1646 bp, Arabidopsis thaliana landsberg
gaaactacaggctcctgcttcagtcacacacttacacacacacaaaaatccccaaattaggaaaaagtaagaatcctagtttctcgacttcgattgagaaggttttcgatttgattctctaagatcttgagaatcaatcggagattttattgtcggtaacccgaatttagggagaagactaccattttgggatttttatgcacttgacgagcgaaaggagaagaaatttgtagcaattttgagtctcggagatggcttctcgcaaccagaatcgtcctcctcgcagtccaaacgccgtaagctccctttttcatgcttttccactacatttcgtcgtcacttttgagtgttctggaggatgggtttgagaaaaaccctaggactggtcgaattattaatttcgcattttgggttttgtttgtgagcttaccagatgaatttattaaggtgttatcttcatcggctttgcatttcttactctgatgggtgttatcaatagaatttagagtggtcgtgggttctgggattctacatttcttgtagctggatattggttttgttatgaaactgatgaaaaatctgtggcttttgattcaatttcagaaaaaggagggtctcggtggcatttcatttgacaagcgaaggaaagtggaaacgcaaggaggtactgggagaagacaagctttttcggctgtgaataaacaagatgtcacgatgaacagcgatgtagggagcattgaagaatgtggtaaagttgactttacaaaagatgaaatattggcgttgctcagtgagagagcaaaagctggaaagtttgatactaaggtatattgattgagttacacttgctctgtgctctaagcattgtagatgttttcatttatggtttcactcagaaggagtttttttttgtctctgtccctgcaggctaagattgagcaaatgacggatattatcaagaggctgaaggtttgtgtaaaatggttccaacaagctgatgaaacccatgtccaagagaaggaaaatttgaaggtttctttggaatcttcagaacaaaaatacaaccacaaaggttattttcttcttgcgatttttttacatgaaacaagttattcactcatttggtggtagtccctaactttttgactcttatagagttggaggctaggacaaaagaggaagagctacaggccactatctcaaagttggaagagaatgtagtgtcactacatgaaaagcttgcaaaggaggagtctagtacacaggcaagggttttggtgcctggtttttctaattgtgaatgttttcttttaatgaaattcattacttgactttgctttcctcttacttattgaacactaggacgccattgaatgtcatagaagagaaaaagaagctagagttgcagctgaaaaagtgcaggcttctctcggagaagaacttgataaagttaaggaagagaaaatggctgccaagcagaaggtatataacatatgtcttctggtgttttcttaggtgtttcatttctgtttctcgtgattagttccacatgatctgctagttaatatggaaattgtcttgtggttatcggagacgtcacctgacgatatttaccaaaggctgcaatagttcaacatcaagcttgc

SEQ ID NO: 141071 - DNA, 238 bp, Arabidopsis thaliana landsberg
aataaatcttcgcatgtgtcctcaaaactcgtgcgaaggtccaaatgggtcgagattagcagcgagtatgaacaacatatcgtttatcacaccaagtcacgtggacatactaaaagcttattactatcacattaaaggcgtttatggaacgcggtttccggagtttccaccgttgatttttaatttcaccgcagaaaatcagccattgtttttggaaactccgagactcgcgactgag

SEQ ID NO: 141072 - DNA, 518 bp, Arabidopsis thaliana landsberg
gtactgttggacaatgagattgcgttcaatgaggctgttattgaggaaagagagcaagggatacaagaaattcagcagcaaattggcgaggtgcacgagatcttcaaagacttggcagtgttggtgcacgatcaaggaaacatgataggtaaaactgattccaactcttgttatgctaaaactctcacttatgtcttcaaaacctaagacgtaagacctatttttgtgtagatgatattggtactcacatcgataactcttacgctgcaactgcccaaggaaaatcccatctcgtaaaagcatcaaagacacaaagatcaaattcttctctggtaatatattaaagcttttgatcgtaccatgaaatgtgtttttgaggattttggatgatcagatcagcctactaacttcttctttccattgttttttctttttcttgtagacgtgcttgctcttggtgatttttggtatcgtgcacatgaatgttattatagtgctcgcagtttgatttccccaag

SEQ ID NO: 141073 - DNA, 580 bp, Arabidopsis thaliana landsberg
cactgaaattgcctcttcttatgatgatgtcaatgcaaccaaatctcagagaaaccccaatggcttaccaaacccttctcatcgaagaatttccggtggatctgatgcttcaaagactaaacagacgctccaaaatagctctgtgagtactatctactcttagttgttaattctaaggcctatgcaaatgcttaggcatcagtttggacgagaaccggttcccaatatctgatttcaagtcttgtattcagggaaactcggatggcgaaatggcggaagaagatgttcttgacattgtatttggttgttcagaagcaacagagagcattcctgcgccagttatttcaaaacttgctagcaaaacccaaactcgcaaacagaaaagagctcaacggagacagaggcttaaaaaccgtgaagcttccacaaatactcctcagtatgaacttgcatagagaaaacaaaacaattatgcttcttctgctttatgtttatcacacatgtatttgtctctttatcgattgcttaagttcttattccaatttatcattttgaatctcattttatgaaggatgattat

SEQ ID NO: 141074 - DNA, 564 bp, Arabidopsis thaliana landsberg
tgggggaaggctgtgcccccggctggtacgggcccggaattccggggtcgacccacgcgtccgcccacgcgtccgcaacaatggcaacggcttctcctccatttatctcaactctcagcttcactcactcttctttcaaaacttcttcttcttcttcattttctccgaagcttcttcgacccctcttaagcttttccgtcaaagcttccagaaagcaagtagagatagtgtttgatcctgatgagaggcttaataagataggtgatgatgttgacaaagaagctcctttgtccaggcttaagctcttctcaccttgcaagatcaatgttttcttgaggatcaccggaaagcgagaagatgggtttcatgatttagcctctttgtttcatgtgattagcttaggagacactattaaattctcattgtcaccatcaaagtctaaagatcgtttgtctactaacgttcaaggagtccctgttgatgggagaaatctgattataaaagcacttaacctttacaggaagaaaactggtagtaacagattcttctggattcatttagata

SEQ ID NO: 141075 - DNA, 392 bp, Arabidopsis thaliana landsberg
acaaaggtccagcagcttatgaaagacggaggagtccagattatggacgaaggagttctgattatggtagacaaaggagccctggttatgaccgatacagaaggtaaaaaaaaaaaaaaatggctttggcttcttactgttcactcaagtcccattgatgttcttatgtaatgtttttgattgaacagtcgttctccagtcccaagaggaagaccttgatcaatgcagaaaacagaagcttcgaagaatgagtttttcgaaagggtaaatttatctatgttgtgttttgagttagaagatgctttttgatgttttgaaatccttgttaactttgggatcttagacttttatcttaaaatcagtagaaacttcataatggcgctttgtcacga

SEQ ID NO: 141076 - DNA, 1782 bp, Arabidopsis thaliana landsberg
aacacaaaagaagaagaagaaaatggcagtgttcaagaagaagaagacatcgttgacatctctgttcttgggatgttacaaggcaaagaacgtaagcaaatacgaaggaggggagaaggctgtaatgaaaataagaacttgtccggcgttcaagaggctgtctttatcggacataagcgatccaagctcgcccatgtcggttatggatgatctctctcactccttcacatcgcagaagcttcgtttgttcacgttgtctgagctgagagtgattacgcataatttctctagaagtaacatgttgggggaaggagggtttgggccggtttacaaagggtttattgatgataaggttaaacctggtatcgaagcccaaccggttgctgtaaaggctcttgatcttcatggccatcaaggccatagagaatggctggtaacatttctttctcttaaagtatgtttttgtctacattcaagacttttctattcagaaggaacaatttaattacgaagaccgtctcgattattttatatattttttgaattttggtttatcttgttaattagctatatgaatctggccatttttcagtatgttattaaatatatgtatcttttgtgaaatttcttcataaagtttttttttcagtgtatacaaaatttatttttgtttgcaggcggagatattatttttgggacaactaagtaacaaacatcttgtgaagctgatagggttttgttgtgaagaagagcaaagagttcttgtttatgagtacatgcctcgaggtagcttggagaatcagctctttcgaagtacgtcatctactatatttttacctaacttgctaaaagttgtttcaattttgctatatatgttctagaccgcgttacaaaacattttttctgtttaaacctaaaagaacaactccacgaagactttaattacgttttaggtatagaatgacacgaataaaaaatattgaagaaaagaatccatatggttcacgttaacttcgtcaagttcttactttatttatgggtcgtacactacattaataacttcttaaaaaactatatattttttacaatttagataatattcaatagtattactaactttgaaaagtgtgtgaattgggacaggaaatagcttagcaatggcttggggaataaggatgaagatagctctcggagccgccaaaggtttagcttttctccatgaagcagagaaacctgtcatctacagagactttaaaacctctaacatattgttagactccgtgagtttttttttcctttttaaattttgtatccactattaaatcaaattaaagtggtatttctcaactgactctttgatatttcaggactataacgccaaattatctgacttcggtctagccaaagatggacctgaaggcgaacatacgcatgtaactacccgagtgatgggaacacaaggttatgctgcgcccgaatatatcatgactggtaacatttttgtaaggaatttatttcttttaccgtgaagcgatattctttgagatatgtctttaatggtttacatgtgttgtaggtcatttgacgacgatgaatgatgtatacagttttggagtagttttgttagagctgataaccggaaaacggtcaatggacaatacccgaacacggagggaacaaagcctagtggaatgggcgcggcctatgttaagggaccaaagaaagttagagaggataattgacccgaggctcgcgaaccagcacaaaacagaagcggctcag

SEQ ID NO: 141077 - DNA, 1480 bp, Arabidopsis thaliana landsberg
aaagagcttatcaaaattcttctgaatgaataatcggcgattatgtctttgaaaaacgatgcgagtagtagccacgacggcggaagcaacggagaaagcgtaatcgatgatcatggccgccgtagaagcacttgcggctactgtaaatccccagctcggtccagtatctctcacggttcgtttaattttgcttttcttacggattaggttgttgaatcgatcgattagagtagaatcttctcgaattgctcctatgcttgataagaattgattttgtttatgatcttaaagttccaatgaataaatgattgataaacatagtgaatgtcaatgcaggtttatcagcacagactcttaccgtttatgactaccaaggtttgttgctattattggactctatgtgtgatgaaccaattttgttgacagaatagagatcttttatgtatctttgctttatttttctgtagctcttattgaccgaggctggagaagatctggtacttatctttacaaacatgagatggataaaacgtgttgccctccttatacgatacgtttgaaagcaagtgattttgttcctactaaagagcagcagcgagtttctagaagactagaaaggtgcatatagcttcactttgcttctctttttggatcaatagatgaaagtttttgtggtgttagttgttcatgttattggcttagtcggaaaggttttacctttgaaacatgcatatgaggagagatctatgattctgatgtgtaaatattcttcacgatcttcagatttctctaatgaagtcgttcattgaagagcttcctgaattttcttaataatgttttgtcaaaggttcttggatggcaaactagatgtgcagcccagggaacaaagaggtgcttcttcctctggtgatgtttcagatacaaggagaaaaacacttggagctgctaaaagtgaagagaataagaaagttgaagcagttatggatgatttgtctaaaaacattgaccaagctgtgcaattatgcatacggagtggggaattcccgtctaatatgcagataccaaaagcttcagtgaagaaggttttctgtgctagaagaaagaaactagctgaaggaacagaacaactcttatacaccagcaacattgcttttccaatagcagctgcaataaaacgcatccagacatctgagaaagaggggataaatagtgcagaaggaaatagattatcacctgaaactatttctgagatgttgttgagtgcaatgcataaggtgggggaaactcctgatgtgtctattaaagtctgtaagggccatatcaatttcctttcatctgccaaagattctttttctgatagagatgttgtacctaatggtaacatctcgagaggagccaattctttagatggaagtgaaacccttcacgctaagaaggattcagaaaaccatcaggcaagaaagcgaaagctggagataca

SEQ ID NO: 141078 - DNA, 2102 bp, Arabidopsis thaliana landsberg
aatttccgctttcgttctctttctctctcctccatttcagtaataaacactccttcctctttaatttttctgggtttcttcttcttccctcttttgttgtttctgtgtgattcagttctcgatccatcttttcgtgaaaagtatcaatcttttaattctctagttgtttgtcaaatctggttagtttcttctcttgtatttatttgatgaacttcggtagtctcttcgataacacacccggtggtggctctaccggagcaagacttctctccggtttaagttatggcaaccacaccgccgcaactaacgtcttacccggtggtgctatggctcaagccgcggcggctgctagtctcttctctcctcctctaacgaaatctgtttacgcttcttctggcctctctctagccctcgtacgacgtcgtcttcctctactactaatacttatctttttatacttaaacctaatttgtgttttggataggagcaaccggagagaggaaccaaccgtggagaagcatcgatgaggaacaataataacgtcggaggaggaggcgatactttcgatgggagtgtgaacagaagaagccgagaagaagaacatgagagtagatctggtagtgataacgttgaaggtatctccggtgaagatcaagacgctgctgataagcctcctcggaagaaacgttatcaccgacacactcctcaacaaatccaagaactcgaatcgtaattatacctttcgatccaatatccatattgttattaccatcatctcttttattcgatctaatgaatctgagtttttgctttcagtatgttcaaagagtgtccgcatccagacgagaaacaaagattagaactaagtaagagactttgcttagagacaagacaagtcaagttctggttccagaatcgtcgcactcagatgaaggtatgtggagattaaatcacatctttaatcccaaaaaatgaattcttttgtaataaaatcatattgtggcgcagactcaattagagaggcatgagaacgcgttattgagacaagagaacgataagttaagagctgagaacatgtctattcgtgaagcaatgaggaatccaatctgcaccaattgtggtggacctgccatgcttggtgatgtctctcttgaagaacatcatctccgtatcgaaaacgctcgtttaaaagacgagcttgatcgtgtctgtaacctcaccggtaagttccttggccaccaccataatcaccactacaactcctccttagaactcgctgtcggcaccaacaacggtggacatttcgctttccctcctgatttcggcggtggtggtggttgcttactccgcagcagcagcagtcgacggtgattaatgggattgatcagaagtcagttttgctggagctggctttaactgctatggatgagttagtgaagcttgctcagagtgaagaaccgttatgggtcaaaagcttggacggtgagagagacgagcttaaccaagatgagtacatgagaacattttcatctactaaaccaaccggtttagctactgaagcttctagaacctctggtatggtcatcatcaatagcttagctctcgtcgagactttaatggactccgtaagttttcaattttttgcgattttttgtttttattcccacatcttttttttgttctctgattatattttttgttcatcagaatcggtggacggagatgttcccgtgtaacgtcgcaagagctacaaccaccgacgttatatccggtgggatggctggaacaataaatggtgcacttcaactggtaaaccaaatatcttcttaatcaatcacattccggtttaatgttatagtaaaccggtttgaatatactaatgtacgtacgtgcagatgaatgcagagctacaagttttgtctccactggttccggttcgtaatgttaatttcctccggttctgcaaacagcacgcggagggtgtgtgggcggtggtggatgtatcaattgatcctgtcagggaaaactctggtggtgccccggtaatccggcgactaccatcaggatgtgtggtgcaggatgtgtataatggatactctaag

SEQ ID NO: 141079 - DNA, 2541 bp, Arabidopsis thaliana landsberg
ccttgtggacggctacaaaatcaagagttcagattaaagtacacaagttatggttgggcaccttcttcattgaaagatgagagatttctacttgtgggacatgtaggaggcgtcgattgctttagtgtaaggaattgtgggaaaggtgatgacggttatctaacccattatatatgtaccataccgtttacggttaatagccctttgcagagtggtccgaccagcatatttgcaaaacctctgtctaattcttgtggaaagacatttaaaagtaacagatttttgctcctgagtgtatggatgaaagagaaacggtttgatgctctgtcatggagtgtaaccttacatcattttgatacagcaggaagtacctgcgattgtcattttcatgattttgatagtattggattgggaaagtggttgttcgaagatacttttgctggcaagacgaattgccttgctattagatcatgctcttcagaaatacctgaatctcaccgtgaggatgaagttacgagttttgctgtggtcaatccaagtgggagggatctagagaatggtgtgaacagtgaaagtcaagcttatactattgcaactggtcaagctgatggctctttaaaactttggagaagtagttttcaggaaagttcaacaccttccggtctgtgggagctagttggcatgcttacggttggccaaaatcctgtcagtgctatatctctgactgattcgggacacaagatagcagccctctgtacagagagtcattcaaaagctgcccgcgcagttagtatatgggagattgtacaccttatagattcaggggttttcatactagaggataaggtacatgttgatgcagaagttgttgctgtaagatggtcaactacgggtaatgatcagctattacttggagtttgcacacagattgagatgcgggtgtatggtattgctcggcagccttgcaaaagtaccagtttcgcggcctatgattattcttcagaggcacagatttggcaatgcttcgctgttactcgtacattttcggctatacatgatttatggtggggacccaaagccatgacttgtcttgttcacaatgattatattagtctacatggtcaatggctggctgttgttgataagaagcaaaagattgataactatccagaaatatttgcatccaatcttcccaacttagtaaatgctacagaagaaggcagagactctgaattcttatctgattctggtactaatgatatcaacgaagctgataccacatctactagcagaggttgtattcctctaccttcaactagtaatgcaattgatgacgggcaagtcaatagtatgtcactgattgggaccgcatatggctcaaatactattgatgacattatgagcatgggacatatggtggagaagttaggaggtgctttaccactttatcatcctcatgccctccttgtagctatacgttcaggtaaaatgctgctagtgttttctggttttcccttcttcagtcaattctgaaactaagctgtttagcttttatttagctttcctgtcttatttttccttcgtgcaggagcataatctgtgtcatgcggttaattttaccttagctaaagattgttaactctgatgtgttcaggcaattggaaacgagcaagtgcagctcttagacatcttgctgaatatattacttcaagtgatacctccgagaagggatatgctgtaaagtcagttctttgtccagatatccttttgtcaaaatattatgaaggatctctctccaatggcccaaatcctaaggatttccaatggggtgggacgtctggttcaatgctacagtattcgcagtttcagtcagggttgcagtcaaaatttaatatggaatcgtatagtcccaattcacctgcaacagacttggaatttagtggcttctgcgagcagctcaagaagttatcagatgaaggaaatatttccaggatagaaaaattgcaatattttgcaattgttgaccttctttgtgaaattagtaacccacattctacgtctgtctatgcaagtcttgatgaacctgggagaaggtacgatagttcttcaaacttttttaattctagtttacgaaataccaatgaaatatggtgttttccatgaaatatgttccattgagcatgttcgtattttcctttaacctgtaaagactgaaagatcacatttatgtttaattagcaaggccacattgctcccttgttcaaaaaaagaaagaaaaaaaaaaatctagctggtttgcggcttcttatgttcacattagttaccaaatattgatctgagagtattgtagtactgggggcagtttttcgctttgcttcttgaatgatactttatgctgcttggtattcatggaattttgtgttctttctgctgtgtagattttgggtcacacttaggtttaaacagctattcttagctcgaagttctggtaaaacagcatctctggaagagcttgatattgactctagtatgatagcatag

SEQ ID NO: 141080 - DNA, 867 bp, Arabidopsis thaliana landsberg
caggaaaataaaaactttgttaatggaagagagttcttttagtgaaaaggatggtaagtggcttcatgagcttgctcagcacaacacatctcttgaggttttaaacttctacatgacggagtttgccaaaatcagtcccaaagacttggaaaccatagctagaaattgccgctctctggtatctgtgaaggtcggtgactttgagattttggaactagttgggttctttaaggctgcagctaatcttgaagaattttgtggtggctccttgaatgaggatattggaatgcctgagaagtacatgaatctggtttttccccgaaaactatgtcggcttggtctctcttacatgggacctaatgaaatgccaatactatttccattcgcggcccaaatccgaaagctggatttgctttatgcattgctagaaactgaagaccattgtacgcttatccaaaagtgtcctaatttggaagttctcgaggtaaacgtttaactttgctgtctttactacatacttgggaatgcgtccttagtactaaattgtgttcctattttttcacgaaatatttggggagataagggatatgaatgcaatattggttctctttagtctttacatctatataagactgacaacacttgttgtttttcttcagacaaggaatgtaatcggagataggggtctagaggtccttgcacagtactgtaagcagttgaagcggctgaggattgaacgcggtgcagatgaacaaggaatggaggacgaagaaggcttagtctcacaaagaggattaatcgctttggctcagggctgacaggagctagaatacatggcggtgaatgtctcagatataactgacgtat

SEQ ID NO: 141081 - DNA, 5035 bp, Arabidopsis thaliana landsberg
  unsure (1)..(5035): unsure at all n locations
atgttttatgaaatcgtggttgctccaaagtatactgctaaaggtcttgaagtcctcaaagggaaatcaaaaactttgaggatcctcgaagctaaaaagaatgaccaagggaaactatcgctcagacaggttggtggcggctggttggctcaggactcggacgatttaactccagaagacatcagcttcaattctgtctcagacaaaactccgactgaaagcgaacttgcggatgcaaaatttgcctggctctgcgttaagcatgtcaagagcaatgccattgtgatagcaaaggttggattttcctctctgattccttttcttgtttctctttctgtacttgtttgctagtagtttattctgattcttgggttggctcatagaacaattgtatgctggggatgggaagcggacagccaaaccgagtagagagtctgagaatagctttcaagaaagctggggaggaagctaaaggagctgccttggccagtgacgcattcttcccattcggtatatatatttttctctccgaaaccattcttctgtctgaaatgactcatcaatcaacaaatgttagccgttctgaattggaaatttgttgttgtgtgaattgcagcttggaaagatgcggtggaagaggcgtgccagatgggaataggagtgatagcagaacctggaggcagtattagagaccaagacgctattgattgctgcaaaaagtatggagtctctctgctcttcaccaacgttagacatttccgccattaaggacacatccctccagttttgctcttataaacacatccaagagagtttctgaagaagaaaacccaccaaacaaaacacaaagagtgggaaataaaactgttgtaacattaatttggattgcgttcgagtttatgtatgattagaacctgagagctgttcctacttataaatttgacatttttcacccaaaatcatatctttctctacatccagaaactgatgagatttgcatataaaatattcaacatttctactcaaactggagtgagaaagtcgacgacagtgtggagagagatcagagatggcgacagggaaagtggtggtggagaaagtggnnnnnnnnnnnnnnnnnnnnngctgcttctcgaagtatcctctcaagttcttactttctagcttggtctcctctctctctctacgtagagttcacagtttcgaattttcaatctttagttattaaagttccggcgacactgaactttcaggcagctcctgctggaactgacgttgtctggatttacagtatcacttatggtggcggcattgtctctgtatttccctatttctctgtctctttattaatgaatttgccatcgatgcgcttgaatcaatctagttcttgttcaaattatgtagggcgattcgatttcatgtgaattcacaattggtgatggatgcactgcagttattacaacgcagtcttctactaaggttgaatcaatttagggcttttctctctctttgcaatggacactaatttcatcctacgtggttgactttctgttgatggatcttgtgatttcacacaggtgtacaaggcaataggatcaaagtgttctgaacagatattggaagtaatgtttctttcacatttctactaaaatcattttgagctttcttagtagaacagagtgctattgcaatagaataggaccattttctttgattcatgttcctgattgatctttcggtttgttgtgtgcagtaggcgagaatcgggagtgaagctcttttggttgtgataccagatccagtgacttgcttctccactgcccggtactatcagaaacagatctttagattgctttcagattccaatctggtccttgtggattggatcacaagcgggcgtcacgctaatggcgaaaaatgggatttcgagttttataagagcatcaacaacgtctacctggaagatgatcaccctttattccttgacacagttagttaaaatctcatacccactttcagatttgtagagaatggtttaccttaaaccaagtaaaatcccgcttgcaaatcgtgtatgaagtattgatagaacattcatgagcgtggttagaccttcctttggtaatggtttattcattgcaggtgctactagagaagaggagcatccaaagcatagccgaacggatgcaagactatcaagctatagcaatggtcatactcttcgggtatgcaattgcaaaacatttagaacacgttttagagttggtagtgctctctatgagaatttggatctttgctaaatatgtttgaaaatggatcaagggcaaagctgaaggaaatccaaaagcaagtccaagaaaatgtgaaaaacatgatgtcagaacaattacagctctcttatagttctcggagacacaagtctgagtcaagctctcgtaatcgcttcatgaaaccagagtttatagcttcctgtagcactttcggccctgaggttggtatcatcctttctttccacttcctacaatcaggaaaccgtgaaccatatatagctttacataaaactagacaatattaaaagactgtaaatggctaatcaaagttgtatatgttgcagggaaagggagttgtggttagaatagcttcggattctacagagtctgtctacaattttttgaggcaacaattggctgagcttgaaccagttcttggtcaagctccttatgcttgactcttttttcttcttcttttttgacttgactcaaaggtccatacaattgaaatgaataaggtaataggaaaccaaatatcaaaatatgatttgtcttgtgccaaacacgacatacaagccaaaatgagcttgttttgctgcaaaagtcccctattttcaaagttcacttataacagggggtcactttgtaataaagtataaatattatgggtcactttgtaaaatcagtgttcttccgagagtttgttcttcctagcatacaatgttttacaaacgccattgacgaccacgacaggagcaaagcctcagtttttgacaactcgagtatctctgagaaaaagctccttggtcgcttcaacacttgtctttccctattatcgacctacgcagtaaataagattacttattgctatcttttagctgatgcaatctcgcgcattgtcgcgcctgagaagttactacaaaagatcatcggtatttcccagctcagacaatgaccgatccgtgcaactatttaatctcgtacgttcgatttactcttccagctcaagaccacgtgtgccacaacccgaatggctgattggggagctgtgcaaagtaggtaaaattgcagaagcacgcaaactgttcgacggattgcctgagagagatgtggtcacatggacgcatgtgattactgggtatattaagttaggggatatgagagaagctagggaattgttcgatagggttgattctaggaaaaatgtggtgacttggacagccatggttagtgggtacttgagatctaagcagctttctatagctgagatgctttttcaggaaatgcctgagagaaatgtagtttcttggaatactatgattgatgggtatgctcaaagtgggagaattgataaagccctggaactgtttgatgaaatgcctgagagaaacattgtttcttggaactcaatggttaaagcgctggtgcagcgtgggaggatagatgaggcgatgaatctattcgaaagaatgcctagaagggatgtcgtttcatggactgctatggtcgatggattggcaaagaacggtaaggtagatgaagcgagacgactttttgattgtatgcctgagagaaatatcatttcttggaatgcaatgatcacaggttatgcacaaaacaataggatagacgaagctgaccaactctttcaagtgatgccggagagggactttgcttcatggaatacaatgatcacaggatttatacggaatagggaaatgaacaaagcatgtggtttatttgaccggatgcctgaaaagaatgtcatttcctggaccacgatgattacaggatatgtcgagaataaagagaacgaagaggcacttaatgttttctcaaagatgttaagggatggcagtgttaagcctaacgtaggaacttatgtgagcattttaagcgcctgtagtgacttggctgggcttgtagaagggcagcagattcaccagttgatatctaagtcggtccaccaaaagaacgaaattgtgacttcagcgcttcttaacatgtactcgaaatccggtgaactgattgctgctaggaagatgttcgataatggactggtatgccagcgggatttgatatcatggaacagtatgattgcggtttatgcacatcacgggcatgggaaggaagcaattgaaatgtataaccagatgcggaaacacgggttcaaacctagtgcggtgacctatctgaacttgctatttgcgtgcagccatgccggactggtagagaaaggaatggagttctttaaggatcttgtgagagacgagtcacttcctctgcgagaagagcactatacgtgtcttgtggatctctgcggtcgtgctggtagattgaaagatgttacaaattttatcaactgtgatgacgctaggctgtcaagatcgttctatggagcgatcttatccgcttgtaatgttcacaatgaagtgagtattgctaaggaggtggtgaagaaggtattagaaacagggtcggatgatgctgggacttatgtattgatgtctaatatatatgcggcgaacgggaaaagggaagaagctgcagagatgagaatgaagatgaaggagaaagggttgaagaagcagccgggttgcagttgggttaaggtggggaagcagaaccatctttttgttgttggagacaagtcacatcctcagtttgaagccttggattcgatattatccgatcttcgcaacaaaatgagaaagaacaagaacgtgacttcagatgcggaagaagctgagttcttggttatttga

SEQ ID NO: 141082 - DNA, 304 bp, Arabidopsis thaliana landsberg
gagcagattctgcaacactgtacactagaacagctgaagcacatagaggatgctactgacgtaacaagcttttctcattatatggcacgattaatcttttgtatgttttgctgggggtttttttaatcgtaagttatgctttttcgttgtttttgttctgctagacacagatcttagtccgatcaccgataagttttggaagggattctataagaagcactatggagaagaggacatgaaggatcttatagaggacctggagtggaataaagtaaatgatttcaaatggaggaacttatatgag

SEQ ID NO: 141083 - DNA, 1483 bp, Arabidopsis thaliana landsberg
gagagcttctcacagtgaagcaaacaatggagtcttttcggcgattcttcttgctatccttcattgccctacttgcctacttcgctttcctcgcttctgctgaacatcacgtccatcaattcgtggtaagctagctactaatgttacattaaagctttttggtatgttcttacgtttatagaatgcccttaatttaagtttaaacgacgatgactttagatcacaccgacaccagtgaagaggctgtgcagaactcaccaaagcatcactgtgaatggtcagtaccctggtccaacgcttgtggttaggaacggtgactctctcgcaatcactgtaatcaacagagcccgttacaacattagtattcattggtaattcaacagatttgaccatcaacttcaacaaacatatgttatgttatgttctctgttttcatactctgtttttttgctctgtttttgggataggcatggaatcagacagctgcggaatccgtgggccgatggtccagagtatataacacaatgtccgatccgtccaggacaaacctacacttacagattcaaaatcgaggatcaagagggtacgctttggtggcacgctcatagccgctggctcagagccacggtctatggtgctctcatcatttaccctcgtcttggttctccttatcccttctctatgcccaaacgtgacattccaattcttcttggtaaacaactaaacattttgtaacttctaatcacttcaaattatattttcatgatcacaactaataataatacttactaaaataggggaatggtgggatagaaacccaatggatgttttgaagcaagcacaatttacgggagcagcagctaatgtctctgacgcttacacaatcaacggtcaaccaggcgatctttaccgctgctcgcgggctgggacaatccgttttccaattttccccggggagacggtgcaactccgtgtcatcaacgctggtatgaaccaagagctcttcttctcagtcgccaaccaccagttcacagttgtagaaactgattccgcctacacgaaaccattcaccacaaatgtcatcatgatcggtcctggccaaaccactaacgtcctcctcacggcaaaccagagaccaggccgctactacatggcagctcgagcctacaacagcgcaaacgccccgttcgacaacacaaccactactgctatcttacaatacgtcaacgctccaacaagacgtggccgtggtcgtggtcaaatcgctcctgttttcccagtcctccccgggttcaacgacaccgcaaccgcaactgctttcaccaaccgtctccgatactggaaacgagctccagtaccacaacaagtcgacgagaacctctttttcaccgtcggattagggctaatcaactgtgccaaccccaacaggccccgttgccaaggtcctaacgggacccgattcgcagcaagcatgaacaacatg

SEQ ID NO: 141084 - DNA, 7313 bp, Arabidopsis thaliana landsberg
ttgtcatatcgtaaactaacattgcaccaacagcacctttgtagtaggcttatgtaatagctctgtgtctactcacagcaaaagaacaagaatgtcactaatcaaaccaaccacattgctatgtacaatggagaaaacatgccatgcacaatgattagccacttggatgtgaatgtgatcatcactacataatttgattcttcaggagaatgctataacaacacattacaatgttgccgaagaacaaaatcgaacaattccaacactaatggtccaacttctaaaagagtcgattactctctagtcaaaatgaggtcactctcaggtacacacgaagatcaaaatcgaaattgaacagcaacactgtaacatcatcgagttcgaagcaatattttatccattgttaaatcagagaagatagaactaagatcggagaaggatatagtaccgtttctggcctgcgatgtcccagatctgagctttgatgttcttatcgtcaataacgagcgttcgagtattgaaatcgacaccgaattgtggctttggaatccatactgaatacgtctcttgtgaaccgagcccgtatctgtgatttcccaaccgcggaatcgccgatcaacaccactttgaacacataatcaatcttctgcgacggatctccgtatcctcctccactagtcatcttcttcaacctctctctctcgctaaatcctctcttgctaaatcctctgttttaagcttttaccgaaaagtgagcttttttgaagttttaaacgcagagagagatctgatacggtcgtattgtcgtcgttgtcaactattagtcaatatttttaattaatgatgacgtgtctaaatattaaccgttggattctgccggctcggtgagatttgacggattcgacaattatctttctgtcaggcgcatgtttttgggtgatgatgtcatcaaatagggtaatttcgaatgttaaaagtcttttaaaattgggccttattaggcccattaagttataataaagggccgttatttggttgattacgtgtcgctatccgaattgacaaaaagtgacctaagcgttttcagaagaaaacaaagcaaacgtcgcgacggagagagagcgagagagacgatggaggaagaggagcacgaggtttacggtggtgaaattccagacgtcggagagatggatggagatatggaggttctcaaccccgatttggatatggctgctgctgatgatgatgcggttaaggtctactattatctctttctctcttactgttttgctcatctttatttgactgagctcgattgatttgttatcgcgtgtatatgtgtttgattgttgtgttattgctgttgtaattctaggagttggatgaaatgaagaaacgattgaaagagatggaggacgaagctgctgctctgcgtgagatgcaggctaaggtcgagaaggaaatgggagctcaaggttttcgtctctttgatttggttttgctataactcgcttctttgatatgattatcatcgtgcttcccgcaattcgctaggtttttgataattggtagctacttggtggtgtttgaatccatcttagaattccactgtgaattatgatatgtatatggagtttttttttgcttcttgactaaagtttttggttcaattttgttattccagatcctgctagtattgcagcgaatcaagcaggcaaggaggaggttgatgctcgatcagtttttgttggcaatgtaagaaaataaatgtaagagcgcctctatcaaacctcaagccatcttagcatgctcctgcgtgatgttcatgggtcaaaactcaaatggaactatatgagcctaggataagactatgaattgtgccttttttagctctcttgatacaaaaccttttatctagggtgttagaattattatcgtagaaatctattatctgattatgttctcttcctgatccatgattgcattctctacatttagtgcttgtatatatcactagtttactctgacttttggtgtaatgtcacatctttgttgctatggattcttgtctattcagtgagaactcttattagatgaaattgttgaatggtaaaaagttggtgcttagcgtgaagactttatcttcaaatgaaaactagtgaggggtttctgttgttagtgatattgagggttttggaaagtagattgagtcttcatattactggtggaaccttagccttcaaatataattgaaaacttcatatgtttagtaacttttctgtgcaaatttgaggatgctatagtttttgttttctggcgttgagttttacttttcttatgatttttctcactacaatcgcaggattttgttcctgaagttcttaattgctctgggttatatcaattaggttttgtggggtctttacattttccttttatggagttgaaaaagatctgttctgttttgttgtggaacatgatgaaaaaagctaaaaaaaagatgcaaaaaagcattgaataaagctatgaaaaaagaataaagaaaaggaaatgaatacgctttagagcaatatatgagggaaaaagagatatctggagaggggacaatgtttgagtggagtatttctcaatccatcctcgaggagatagcgtttgaagtgctgcatcaagatgctggatgctttctagtcaaggctcattagctgcgttggtgagaagcagctgtttgatggtaacataaaattaagcttggcataaagtttatgctcggtacacagcgtaagggatcttttcaactcaaaggctgctcaagtatactagattccactttgctttcctattgttctgctttaccttgcacatatatttatgttggtgtgtgtgtaatgaaggatagtaaaagaggaatgtctttgctacgttttcttgtttagctgaactaattaatttgatggattactctttgtgtgctcggtgaaggactccatgggtttatgctagtttgttatatactataactgcatatttgactgtgcaggttgattacgcttgcacacctgaagaagttcagcagcatttccaaacatgcggcactgtccatcgggtgaccattctgacagacaaattcgggcagccaaagggatttgcatatgtagaattcgtcgaagtggaagctgtacaagaggctctacaactgaatgaatcagagctacatggtcgtcaattaaaggtacacatcttactataccatcaaacaaaacactttttaccatgaaaaaaccccttatgattccatcgttttctcatctggcttaaaataatttcaggtcttgcagaagagaacaaacgttcctggattgaaacagttccgtggtagacgattcaatccatacatgggttaccggttccgcagacctttcatgtctccttatatgtattccccatatggatacgggtaagttggtttaacatcaagacatatatgttgattgtggtcacacagctttatccacttctcacactttttggtgttttttttttgcagaaaagctcctaggtttagaaggcctatgcgttacatgccgtaccaataaaaccgtcatcatggttaagcatagaacggattcgctatccagtgtggatgcgtgtattggctatatccatccttcattgagctttctttatgactttggctctttcgccttttagaactttgcgcgtaaacattttcgaacctagactggtattataagtttcatatcgttttgatatggtgcatataatgattggatcaagtgttgcttatataatggggactattgggttatagctgaaatctgttaaatgaaagtgttgactctttttattcgcttagcaaatcaactccaaagatgttccgcgcattttaaacttttattgtcgaggctttgctaccatgcgcctgtaagaggttctcttctgatgatggacgtcaaggtcgtagccatttcttgcaatgacctgagatttaaccagtcacttgtcacagacccgaaaagacgataatgtccttatcgcttccttctcgatacgctctcttctccggctcgactcctgttcgcatcagcaggaggagcaacctctgcttcgccgtctccgccacacgagcttctcgccgggattctatatcattcccccagcctatcttcctccgccacgtcatctctacccagtcgaatttcgagatcgatcgaaattatagagctcatgcgtcctctatcggatcattcgaggatagctcttcttctaacttactagaagacgccagttccgatggtatcgatttgggcagctttgtttctttcgcggaagcgctttgtattttatcatccgccgtgatttcagtggttctcgcggtgaattacgtggtggttggtgaaattgggaaaaaggttttgtctttaggtttcgttggattggttggctcagtcgccactggttcttggcttagacgacgacaatggatgaggatttgcaaaggcgcgagagaaagtgaggggactaatctaattcgaaggttggagaaacttgaaaaggatttaaaaagctcgacttctattgttagagttctttctaggcatctggagaagctgggaattcggtttcgggtcacacgaaaagctctaaaggaacccatttctgaggtattgttatctttctcgagctttgcttcatcaaatgattccattgaaaacgtcccattctctatgtcactatgtgagtgaaattgcatgaaagtggaacaagtgatgatttgggaattgatctagagttgttgaatgtctgaggaagtaacaaatgttctagtgtttgaatcaatattttggagatttaggataatcttgcagaaaatatcagtttttgagtttatgactggtcaatgtagctgtctttgtggctgtatgtatctgaagagtttggtttgttttgtccaaaagactgcagctttagctcaaaagaattctgaggctacgagggtattagtttgcacggcaagagattctacagaaggagcttggcgaatgtcaagaggtgctgcttgctatgcaggtatatatctattaaccaatgatccgatttgttttggtattagttatttgagtgtgtaaaagggtatcttctaagattttgccatggctgaattgaagaagtccatactagtgtcgtttgagctcatgaaagctggttgcttgctttgctatgcaggaacaacagcgaaagcaactcgagcttatccttacaattgcaaagagcagcaagctgtttgagagcagtactagtagcaagcaagcccctagtgaacaacggaaaaataaagcagaggaaccctcaacacccaaacagatactcgttcaataaacagacgtaatgacaatgtgtaagttttgtatggacaatactctttgaagtcaagagagcgataacactgaatatggagaaactcactgtggttacgtagctgtattatcatcattgttttgggttttgtaattttcacttgtttcgaattaaagtttttttccttctaataagaaagttcttgatgacgaataatgttaaaaagtttggacataaaccaaacctattcgtaatcaacaagtaacgattatcatatagattttcttgggcttttgggcctcttccagttgtcgaaaaggccttattgtttttattcgattttcttaatttctttgttaatgacagtcaaagcatcatcatgatttattattatttaaatcacgcacgaaaagcagttttacgacgaatgtcggcttttttagtctcaactctgactggacacaacgactgtcataattgcgatttgtttcgaaagacttttccatctaacaacagctccaacaaatgtaaacgaagaaagaaaatcaaaagtttggtttttctttgtaaaagacagagttttacagttttactttctcttcctaaagagttttcaactagccgaagtggaaccatccaagcctaagtattgttggttttattcgtcgagtgaatctttcttgctggaattattctctttccctttttggattttcttctccgcatcgatttttttttttgttgggcactttctttttctttttgctgttcccaaatctgagtttctcaaattttcttgagatttggggtcaatatctctgtttttccgtgaaaactgaagaattctctgagttatttggatttttatcttttgggtaactgaaaaaagttcgtttttttattactattgtagaattttgaatttagaaagtctcggattcctatagtaaatccactctatctaatctacaaacttaaaaatatgttttaacttttgtttcaaaggtttcttgtagatgtcacaatttcttagagaatccaacgttttcaattttggtagctcttagaaaaatggctctgcttattatcactgccttagtttttagtagtttatggtcatctgtgtcaccagatgctcaaggtaatttcattctccttcataactctctttggtggtttctaagtttgtcaaagtaaagatttttttgttaaactcttgcaatttcgttattaggggatgcattatttgcgttgaggagctcgttacgtgcatctcctgaacagcttagtgattggaaccagaatcaagtcgatccttgtacttggtctcaagttatttgtgatgacaagaaacatgttacttctgtgtaagtttcatgttacttggtctaaattggtcaaaacttcagtttagttatggttttaactatatatggttgtgatttgcagaaccttgtcttacatgaacttctcctcgggaacactgtcttcaggaataggaatcttgacaactctcaagactctgtaagtgcctactttggaactgtgaacttgtggaaagttctgttacatgtgttttgttatatgaaattttctgttgtgttattttttcgcttgtagtacattgaagggaaatggaataatgggtggaataccagaatccattggaaatctgtctagcttgaccagcttagatttggaggataatcacttaactggtcgcattccatccactctcggtaatctcaagaatctacagttcttgtaagtatattcttctcccccacaagtgtctttgaacttgtttgagatctctaggacacagaatgaagatcatatcattgtttctctgtttggccacgcaggaccttgagtaggaataaccttaatggttctatcccggattcacttacaggtctatcaaaactgataaatat

SEQ ID NO: 141085 - DNA, 387 bp, Arabidopsis thaliana landsberg
  unsure (1)..(387): unsure at all n locations
gaccatgtactgcaaccgttgacttgttatggtggctcatgtgatgcactccatntgcatttagacaaagggttatatgaatctctcatacgcaatactaagacagcgaaacaatcgtcgactgttgatttcaacatgccagagactttgaaacacaatgtcatcaacaataactatgagtttaagatggcgaaagaagctgcaatggcaccacagtctaactagctagctaatgaagttgagtctttattgtatagtatgtatcaataaacgtaacggcctacgaatctcatcagactgagatggtatcacaagattatagttataaacttaattataatgtagaaaaggaaatcaaagcagtaatatatatgcttgttcaatagc

SEQ ID NO: 141086 - DNA, 751 bp, Arabidopsis thaliana landsberg
aacttcgacttggaattctttcagccgccgtccaaattgctttgccgccaccggtaaatttgttcccccttttcccactctgcttatagcctcacttcttctagggttgagttcagtctctgtttataaacttttttcgcaaaaaaattcaatctgacaatctgttttgtgttgtagaagcaaagagtagagagataatggctgaggaagaagctaagggtttggattacataccggagatagtactgaagaagaggaagaacagagatgagcttgcctttatcaggaagaagcaacttgagttgggtaattccggcaagaagaagaagaaagtctctgatatcaaacgtcctgaagattttgttcatgagttcagggctaaggtacacttctttttttccagattctctgaaaaacttttgctttgtctttttctattcgttttactgcctcaagttctgatttttgcttcttgacttttgtctacaccttagaagaacttgtttttgcttattctttgagttaaattaaagctatacatcaacctttatgattaggttttgtcacttatctcttagactgtaacttttctacagataattatgtgtttctcctttgagatttctccctagtttgtgcttaagacttgttgtttcttctgtcaatcctgcattgttctctgtaatttgactgtttcctttttgctaattttatctctacttaaggaagtagatatgatccggatgaagca

SEQ ID NO: 141087 - DNA, 905 bp, Arabidopsis thaliana landsberg
ggaccttaatcctttgcatcagttgactgaccagacggattaccaagacaagtattataacaagataatgtccatatatcacaaatatgctgaggtgaccacaagaatacactaaattactcaattgcaagtaaacctaatgctgaggtataaatgactgatcttgagatttatttgcagactttcccatggggagggaaattgactggtgaatccataaagtttttctcgcctttggtgatgtggactaggttttcgtctagcaaagaaaaacataaggctttgttctctgcgtttctagagtactatcaggtatatactcagcggccaaaagctaaggttttattggaaactaagactgagaatctatcatcttcttcctacaggcatggcttgagatgacgatccaagtgagggaggagatggaaccatctcatgtgagagccaattgtgaagcacaacacaagtacctgacatggcgagcacaaaaggtgatttcatttccttttgtgtaatttgcatgtttgaacagacactgtatctgtattgttacaatggatattgatttggtgtttgcaggatcctggacatggtcttcttaaaagattagtaggtgaagcaaaggcaaaggtataaaagatttgatcccattagtgtccccattattaattagcttgtgaagatattgaaaatgatttgaacaaaatcaggagctgctaagggatttcctgttcaatggggtggatgagttaggcacaaaaacattcattgattactttccagagtaccaaacagaagatggaactgtaagcgataaacgaagtatcattgggaagtcatatgaaactcgtccatgggatttaacaggacaatttatcggctaacaatgatatatgtgaacaagt

SEQ ID NO: 141088 - DNA, 628 bp, Arabidopsis thaliana landsberg
atgtgggaaaattctgaagtctcagaggcagagggaagcttagaactcgggctcagtaaatggaaagttgaactacttgccgcactacaagtgggtgctacagaggtccaatctatgattctgaaggtagtcttgttttaaggtgtttcactttttaaaataatatctttgttctcaagcttgtgtttttgtttcttcaattttcttgcagggtggtggcatgatcacattcgccaaagtttatcagttggtatgaaatcgataacagtttgtgtgtttaaacttcttcttctctgaggcgatacaaataactggtatattctggccctatatagttggctaagaaactatctggaaaagtattccttgaagctgccaactaccagattaggaaagagatgctaaaaaaggtttgcatctgtatttatttcatcatgctgcataagaatttttcatcatcactcagggatttgcgatgcactatatcatgaagttcctgagaagcattacatgtcaatgatgtaactgattgatatgttgatacgttaacctctttttacagggtgggcagtttgctgccattaacttggaatctcgagcagctctgttagcaacgaagcatgtattt

SEQ ID NO: 141089 - DNA, 845 bp, Arabidopsis thaliana landsberg
ttctcgaagaagcagagaatgagagaatgcacttaatgacattcatggaagtagcgaaacccaaatggtacgaacgagctcttgtgatctctgttcaaggggttttcttcaacgcttatttaatcggatacataatctctcccaagtttgctcatcgtatggttggataccttgaggaagaagcaatacattcttacactgagtttctcaaagaactcgataacggtaacatcgaaaacgttcctgcaccggctatcgctgttgattactggaggcttgaagctgatgcaacgcttcgtgatgttgttatggtggttcgtgctgatgaggcgcatcaccgtgacattaaccactatgcatccgtaagtgtgtactctaaatgaatggagattatatatgttaaagatcgatgattaattcttttcatatgtttgtcaggatattcactaccaaggtcatgagctgaaagaagctccagctcctatgggatatcactgaatcagaagagcttctagttttgttttgtcgctcttaagctaacacggtccagatttcttttgttgaagtactcatgtcctttttaattggatggtacggtggagatgagccaccaccacattatttagtttcctttctacttttgttttggaaaatcttagtttctctacattacgtaaccaaaatcctactatatagttcacgtttgctcaatggtttttcattcgaagctctcctccgtgaaagtggctctgttttgctctgttttaaggttcaaattactctgtttttttcagttcctaaacatgttttaaattagctaaactgtctcaaactcttgttattat

SEQ ID NO: 141090 - DNA, 878 bp, Arabidopsis thaliana landsberg
gtaagcattcattgttgggacagaaattcggcatacagagttacagaagaattacatcaaccatggcttaagagactattaatcggttttgcacgaacgtcagaagctaatggacccaggaagcctaacagctttccaatccttttaatccaagaaattgattcagaacttccagttgtgcagcctgcgcttcaactgacacacagaatatttggttcttgccctccaatgcaaagttttgacccagcaaagttgctcacggtagtttcttttctgttgcaacttccttttaaatttagttgctttaatatgagcccatgtttctaatcacaaatttggattgtaggactctgggaagctgcagacacttgatatattattgaagcggcttcgagctggaaatcacagggtgctcctgtttgcacaaatgacaaagatgctgaacattctcgaggtagtatctagacacaagtctttgacctcactgtacaaatgaatttgtaattacatataacaagcatccctatctacacctttgctttacatttcttttattttatgtttatgcaggattatatgaactatagaaagtacaagtacctcaggcttgatggatcctccaccatcatggatcgccgagatatggttagggattttcagcataggtaggatttaactttctcaagcttttttttttacgttcccatgaggctttctgtgcacaattgtaaaccatatatggttgcaggagcgatatttttgtattcttgctgagcaccagagctggaggacttggtatcaacttgacggctgcagacactgtcattttctatgaaagtgattggaatcccaccttggatttacaagctatggacagg

SEQ ID NO: 141091 - DNA, 3073 bp, Arabidopsis thaliana landsberg
attatctggaactctgcaactcgatcagagcttttaaattttgtggatgaacaacgcgcctgccagtgccctgatggttcatatgatctgaaaaatgctcaatctttttcgtatgacgcactgtcaaaagaggtctttgttggcaatgtttacttgaaggtctataatgatcaacccgactcagagatcagtgaaccagaatcattctgcaatgccctaatcgactttatatcatcattagtgcatactgagttgccctctgtttccgaggaccaaaatttgatcgaagacagaaactcatctaatgatactccagagcttcaaagtagcgtcgcagaaccgtcgttgattgaagaacattccgatcatcagccatcatctgaggggatgaagaacgaagaatgttttctgattgatcacctccaattaggattgactgctcttcaggtaattatctggcgcatgtgaatgtgtagatatcaaataatagcatgcctaaccttttctttgcgttttttgtagaacttgcttacaaagtatccagatctggcttcagtgttttcgtctaaggagagattgttacctctctttgaatgtttttcggtggccattgcatcaaaaacagatattccaaaactctgcctcaatgtcctctctcggttaacagcttatgctccttgcttggagacgatggtatctgatggatctagtcttcttctcctcttacaaatgcttcattctgcaccttcttttcgcgagggtgctctccatgttctttatgctttggcaagcacaccagaacttgcttgggctgctgcaaaacatggtggagtagtatacattctggaacttttattgcctttgcaaagtaatcattctcaactctttttcttctcccattggctttctgattacataaagtggaatcaatgacacaaaatggtcttgtgcagaagaaattcccttgcagcaaagagctgcagcggcttctttgttggggaagctcgtcgcacaaccaatgcatgggcctagagttgctatcacacttgtgagattccttcctgacggtcttgtatctataattcgtgatggacctggggaggctgttgtccatgcacttgagcggaccactgagactccagaacttgtgtggacaccagcaatggcagcatctttatccgcacagattgcaaccatggcatcagatatttatcgtgaacaacagaagggttctgttattgaatgggatgtaccagagcagtcagctggtcaacaagaaatgagagacgagccacaggttattttatttatttaaccctatatatgaatcagagcagcagggaaagagttcctttaagtggaagcataattattgatgaaatttttctctctaggttggtggaatctatgtcaggcgtttcttaaaagatccaaaatttcctctgagaaatccaaaacgattcttggaaggactgctggatcagtatttgtcagcaatggccgcaacacattacgaacaacatcctgttgaccctgagctccctctccttctctctgctgcattggtttctttgttgcgtgtgcatcctgcacttgcagatcacattggacatcttgggtatgtcccaaaacttgtcgctgctgtggcatatgaggggaggcgggaaacaatgtcttctggcgaagtgaaggctgaagaaattggctctgatggagtgaatgagtctactgatccctcaagtctacctgggcaaacccctcaagaacgtgtgcgccttagttgtttacgtgtgcttcatcaacttgcagctagtaccacatgtgctgaagcaatggctgcaactagtgctggaaatgcacaggttctctactctatttctctcctcctactctaccacacgctgttaaaaatggaaactagttgttggtgttacctatgacatgtataatgactcttaagttgattaaacaccaggtggttccacttctcatgaaagcaataggatggcttggtggaagcattttagcactcgagacacttaagcgtgttgttgttgctggaaatcgggccagagatgcgcttgttgcgcagggtctaaagtgagtaatcatgttactatatgataatgtctttggtactcaagctgacgggtgctcacatcttaattatctctaactgcaaaactctgttaagactgctgaagtgttaatctgacagtacctagttacagaataaaattgtggaaaatagtcgtttagaagaagtggatttgggtgagatatatctaattgtctgatacaaatgattgtgaaaattggtagggttggtctcattgaggttcttcttgggctgcttgactggaggacggggggtaggtatgggctcagttctcacatgaaatggaatgaatcggaagcatcaatcgggcgggtacttgcagttgaggttagtgttgaatttgttagcgagatgtttgttatgtgtgttacacatgtgaatgatgaaataattaatatatgtctcaggtattgcatggttttgcaacagaaggagcacattgctcaaaagtgcgtgagatacttgacgcgtcagaagtaagttgtgatattgaaacactaggaataaagtcttgttcaacatagtagttctctgttgttaaaaaaactcatatgaatctgtcacaggtgtggagtgcatataaagaccaaaagcatgacttgttcctgccatcaaacacacaatcagcggcaggggtggctggctttattgagaactcatccaacagtctcacttacgctcttaccgctcctcctccgccttcgcatccttgaccatttcttccttgtatatccttttgtaaagtccaatcattaccgtgctttttttttttctttctatagagaaatactgtcgtttgtaaatgtttgatgagaaagtagaaaatatttgtggtttccttggaccaacaatgaaaactacggtctgatgacaggatttgtagttgttgggtcgtagacgatatccaaacaacttgtccctttatattttgggattaaacttgttgcttattaa

SEQ ID NO: 141092 - DNA, 3920 bp, Arabidopsis thaliana landsberg
atggcagatggaacggttttcaaattgggaactgagaagctacattggatgagttccatacaaaatattgctccgatcttggatttttcggttatggatgaccagaatgaaaaacgagaccaaatatttgcttgttgtggtgtaacccctgaaggctctctgagaattattcgtagtggcattaatgtagaaaaacttctgaaaaccgcgcctgtttatcaaggaataactggtacttggactgttaaaatgaagcttactgatgtataccattcatttcttgttttgtcatttgttgaggagaccagggttttatcagttggattaagttttaaagatgtcactgattcagttggtttccagtctgatgtttgcaccttcgcatgtgggcttgttgctgatggtttgttggttcagattcatcaagatgcaattaggctgtgcatgcctacaatggatgctcattctgatggtattcctgtttcttcaccatttttctcatcgtggtttccagaaaatgtcagtatcagcttgggggcagttggtcaaaatttgatagttgtctctacgtctaacccttgtttcttgtctattcttggggtcaaatcagtatcatctcaatgctgtgaaatctatgaaattcaacgagtaacattgcagtatgaagtttcctgcatctcagttcctcaaaaacatattggaaaaaagagatcccgtgattcttccccggataatttttgcaaagctgcgattccttctgctatggagcaaggctatacatttttgattggcacacataagccttctgttgaggtcctttccttcacagaagatggtgttggtgttcgagtccttgcttctgggttggtatcgctaacaaatacaatgggaactgttattagtgggtgcattcctcaagatgtaagactcgtgttagttgatcaactttatgtcctttctgggttgagaaatgggatgcttctccgttttgagtgggcccctttttcaaattcatccgggttgaattgtccagattattttagtcactgtaaagaggagatggacactgttgtgggcaaaaaagacaatttaccagtcaaccttctgttaattgctacccgacgcattggcatcacacctgttttcttggttccgttcagtgattcactggattcagacatcatagctcttagtgacaggccatggttgttacaaacagctcgacaaagcctttcctatacttccatctcattccaaccttctactcatgcaactcctgtatgctcgtttgaatgcccccaaggaattctttttgtttcagagaactgtttacatctggtaattatttaatttcagattttcactgaccattttgttgctctttggacaaagatgcaaattccatcgatcaatcgttaatgttttgatatggtttacttgaaaaatagttaccaacaaacaactgaatttgctaattgctttcatttgtgttttcgtagtcgtatacattatagacagttgtgggaatgcgttggagctattatttgggtccggctatgatagcctgatgtatatgcttattttgtaggtggagatggtgcacagcaaacggcgtaatgcgcaaaagtttcagcttggaggcaccccgcgaaaggttatctaccacagtgaaagcaaattattgattgtgatgagaactgatctgtatgatacatgtacgtctgatatatgctgtgtagacccgctcagtgggtcagtgttatcatcctacaagctcaaacctggagagactggaaagtcaatggagcttgtacgtgtgggaaatgaacatgtccttgtggttgggacgagtttgtcttctggtcctgctatactacccagtggtgaagctgaaaggtttgaaatctgtttttttgccactttttaatttgaccatggagtgaaagtggagactgatgtaagacgaactttatgctgacctttgaatgcctttgaatgccttgttacagtacaaaaggacgagtaatcatcctctgcttagaacacactcaaaactcggatagtggttcaatgacaatttgttcaaaggcttgttcgtcttcccaacgtacatcacctttccatgatgttgtgggatacacaacagaaaacctatcaagcagtagcctctgcagcagtccagatgattacagctatgatggaatcaaacttgatgaagctgaaacatggcagttaagattggcctcttcaaccacttggccgggtatggtacttgcaatctgtccataccttgatcattacttcctggcatctgccggcaatgctgtaagcctcactttgatgatctatagttttgttgccaattctttagcatgttaatctactaacaaatatcctggtcttcaatagttctatgtctgtggttttccgaacgatagtcctgagagaatgaagaggtttgcggtaggaaggacccgtttcatgataacatctctgcgcacatacttcactagaattgttgttggggattgccgtgatggtgttctattttattcttatcacgaggtttgttctgttgctgaatattaccttctgttgttcctttgttatatatatgtcttctctttgtttgcctacttaattttggctgaaaatattagagattttttgtttatgttattgaaggaatcaaagaaacttcaccaaatatattgtgatccagcgcagaggttagttgctgactgttttctaatggatgctaattccgttgctgtatctgatcgcaaggggagtatagcaatcctgtcttgcaaagatcattcagactttggtatgaagcaccttggtacgaagcacctaccttttctcttttgtctcgtccttaattcaaatatagcttttatcaaacaattttcacttcagttagaaaagtgtgatcttgtgatcttccttgttcttacgattcttctaggtgctataaaccctgggattcgaaaatactcttatagaggctgattgttatgattcagtagaatttgctaagtgaaaatacctcatgataatccagaatattcaagtcccgagtccaacctgaatctaaactgtgcttattacatgggagagattgccatgtctataaaaaaggtaaatcctagttttgcagcgatcatttcacttaattgctttctgttcagtggtgtgcttatactgtaagaaacttgatcttatgttattaccttctataagaaagtatagtcttaggccatagaaaaagactaattggcgcattggtctaacatttctcaagcttaacgtagcttaccttgaatgaaattattgcaattccaatttctattctaggaattttcatggataatttttgtcaagtttcttgttacaacattgcagttacctcattaaccaataaaatatacatatatagtcaattcatttctgcttgcacccaccttcttaatagggttgcaacatctacaaacttccagctgatgatgtactgcgaagttatggtcttagtaaaagtattgacacagctgatgacactatcatagcaggcacgctattggaaagtatatttgtgtttgctcctatttcaaggtatgatttgaatatctgactgatgacatagctagtttttgaaaatatattggcgtgaccttcttttccatcaaataaaaggcctttttttttgtcttgtgttatacatagttacccttaattaaacttgcaccagaaattctgtttgtgcttattttccttagttagttcaatgaccggtcaccaatttctgtagcgaggaatatgagctcttagaaggtgtccaagcaaagcttgggatccatcccctgactgctcctgtacttggtaatgatcataatgagttccgaggtcgagagaatccg

SEQ ID NO: 141093 - DNA, 2218 bp, Arabidopsis thaliana landsberg
gagagttaaaagtattataggacagaacaaaggtagctttgtcttagaacttcaacaaagatccctggagttcagttcagttattcaaaagcatcagaatataaggtaattctttcgatgctactggacatatctgttttcatcaatttgaatgagagagtcctatagatattgatctactaaattactcaacacgattgatataaatatgcagatcttctctggttgaaagaatgccggtccttgatgaggcaacatttagtggaaggagagctggttctttaccagcatctgtgtcaacttctggaaaatctccgcttggtattccaaacggtgttgctaaagcagcagctcctcttgttgatttactcgatctgggctctgatgatactcctgtgcctacctcctccagtaacaactttcttcaagatcttcttggtgttgatttatcgcagccttcagcacaacctggttagacttccaagcttacactattccacttcattagctcaaagaaaaaactaacttattgaagtttttcttgtattgcaactgataatattaattgttaaccatctgtatagcactatcttcctggaatagaagttagattataattcatatacgttttcttcagccagataattttctctggtcatgtcctcaacttattggcttcagctgcagtatggcctgtcctaactataacccgaagaaaactgtaaaaattttagtgaagataagtgtagtgttaagttttgtagagagtttgggatgttcagttgtgaagtttcatcatatattctaaatcgtcgacccctttgtttacccctgcatttttcaatttcaggtgccatgcagccatcgcaagctggtgcggatattcttatggatctgttgtcaatcggaactcctgcccctgtgcaaaatggctcggcgaatggagacttattatctattcaagataacaatgctccaatagcgccttctttgacttctcccactgcgccttcttcgatgatggatttattggatggatttggtcccaccccaccaaagagcggtaaagatgcgctatattaaacattgaaaagttacatagcacagtttctcccctctttcttcttgttttcaaatgtgatgatatcatctcttttcttccatgacagaggacaagagtgcagcatatccgtccattgttgcatttgaaagcagctccttgaagattgagttcaacttcacaaagcaatcagaaaatcctcaaacgacagacattgtggccaatttcataaatcttactcctaacgtgtacacagaatttcttttccaggctgcagttccaaaggtcaggtcccaaatttgctttttctgcttacgttataggccttatgattcatagctaataagaacacaatctttcctaaagaacaattctgccatgtgcttggttcttaacgttccacatttttatggtcgtgatagtgatagattcatgttttttgcaaagttcttattagtggaaatacttggaactgttttggagtaaattgggttcggtttaggtttccatgatatgttttgttgacgatgttctaatatattcatgttatcacacacattgcagtttctacaacttcacctggatcccgctagcagcaattctcttccagctaacggaaacatcaaacaaactatgagagttacaaatagccaaaaggggaaggtacattttcttctttttctttcttctcttcaccagatttatataacaacaagcacaaaacctcaatcttttgtgaaaccgataccacaaagcgctcagaataatcgctgttcttctctgttttcagaaacccattgtgatgcggatgagggtaggttacaagattaatggcaaagatgtgttggaggaaggacaaatcaacaatttcccacgtgggttatgagaacgtttcaggtattccaagattcatatacatattcctaatttatataatcacttcccatagactaaaacaaacttcttcatagaacctttgtatgtgtgattcgttggctttgtgtgaaatctgggtttaaagtgagataactttttgatggtctgagttacttatgagaatgtgtgacgtcaaatgtattcttcttgctgcttcaagttcttctctatcatttatatcattaataaaacgtttttgttttttccatagtaacattttga

SEQ ID NO: 141094 - DNA, 3523 bp, Arabidopsis thaliana landsberg
atggcaataaaccgttgcagaaacataaagattgaagatgtccgaatcatagcacccgatgagagtcctaacactgatggcattcacattcagctatctaccgatatcgaagtccgaaatgcttccatcaaaaccggagacgattgtatctcaatcggaccaggtacaaagaaccttatggtcgatgggatcacttgtggtcctggacatggaatcagcattgggagcttagcaaagtccatagaggagcaaggcgtggaaaacgtaactgtgaagaatgctgtgtttgtacggacggacaatgggcttaggatcaagtcgtggccgcgacatagcaacgggttcgtagagagggtccggttcttaggagctattatggttaatgtctcatatcctatcctcattgatcagaactattgccctggcgattcttcttgcccttctcaggtccgtttcatatacctttatcttgtttttgtatgttagtcaaataattactttagaatctaaccaaatatttgattgaaataatgagtttgattggtaaccatttacctctacagtatatataccatatatatgattgttaccggtcacaaaagagaaaaaattagcagcacaaaaagttaattagatatgaaattataaattttcaggagtcaggaatcaaaataaacgatgtaatatatagtggaatcatgggaacatcggccacagagattgctataaagatggattgcagtgagaaagtcccatgcactgggattcgaatgcaggcaattaatctaactttttacggtgaagcagcaaagacttcttgcacgaatgtttctggtaagcaacttggattggttacacctagtggatgtctatgacctctatacgtttgttcagaccaagatttgtaatattaaacatgacattggttgtacataaaaatatttgtgtagctattaaaatttattatatggttatatacttcgtaaccattgtgaataaatatttgtgtagaacataatattgtactggtatgtgtaattgaataaaaattaaagggccaacaatttcacgcaagaagacaacaatctaaaccggaggaaacccaatcaagtgggtgaaccaaaaaaaaccatacgcattaaatgacttcaaccaaaatttaaaaaacctacgcgtcacataaacgagaaacactcgtcttaccaaactctctcctacacaaccaaaaccatctctttgcaacaaaacttgttgtaactcatcttcttcttcttcttctccatcacagactcataacaaatgggagaagtttcagtggtggagaacaagaaagtgatactaaagaattatgtagatggtattcctacagaaacagacatggaagtgaaactcggagaaacaattgagctaaaagcaccaaaaggatcttcttgtttcctcgtcaaaaatctatacttgtcttgtgatccttacatgagaggtcgtatgcgtgattttcacggttcctatctcccgccttttgttcctggccaagtatagattattcccacattttcaagttttcagcttttttgtttttttttgtcgattggttctgtaattggtcttttgggtatcggtttttgctcattggaaaatcaaattttgaagagggataggtaagtagagtttttgtgtgatagagagatttttgcacaccaagtgttcgacgttttgatggaacttgtgttagttgtgtatgtatctagaaatgttgcgaagtcttgagatttgtcttgtttattgctgaattgttcatatttgaagagagagagatgtgtagatgctgtatatatgctttagagagatcatgcacaccaagttttcgatgttttgacgaatggatatattatatgctgaggaaacttgagatttgttatattttattggtgaaattgttcatattcttcaatgactctttaatatgtttctttggttgacgtttcctttgttatatgctctgtattaagcgactgatagttttgtaatcttgatgcagcgtatcgaagggtttggtttagcaagagtgatagattctgatgatactaattataagcccggcgatatagtctctggtatcattggttgggaagaatacagtttgctacgtagttcagataacctacagttgagaaatattcagttagacgacgacattccgctttcttatcatctcggacttctcggtacggcccgtcttttgtttagcataagaggaaggtagcaattatttgtttgatctaaacagtctgaattcaccttttttacagggatggctggatttacagcatatgcagggtttaatgagatatgttgtcctaagaaaggggacagtgtttttgtctctgcagcatgtggagcagttggacaacttgttggtcagctagctaagttgcacggctgctatgttgttggtagcgccggtagtaagcaaaaggttagtctctaaactaattttagcaactcttgttactcacttgtcgttgtgaagtaactttttgtggacatattttaggttgagatccttaaaaacgagcttggatatgatgaagcctttaactacaaggaagaggctgatcttgatactgctttgaagaggtaaatatatgtcaagattcaacctaaagaatcaattacagagtagtgcttgtcttgaggttaatatggcttgtctctaggcttttgaatgttccataagtcttttaaagttcaccatcattcaactatatttacacatttgatcaacactgtcactctagttagaacaaatgagacgcaatgcaattacaagataaatccataaaggtaatagtaagatactctgactatgtcacttaaactgatttcttgtggctagctctagggaatgagaaaggtatggtgcataatgtgagtctatacaaaaacgtgaagctgaactgtttcaatatctttactaaaacaggtacttcccggaggggatcgatatctacttcgataacgtgggtggatccatgcttgatgcagcgctcctcaacatgaaggttcgtggaagaatcgcgctctgtggaatggtgtctttacaaagcctctcaacttcatcacaaggaatcaagaacctatacagcgctatctacaaacgtttaaggctagaagggttcttgcagagtgattaccttcatatcttcccacagtttcttgaaaatgtcaagagatattacaaagaaggcaagattgtctacatcgaagatatatctgaaggcctcgacctcgctcccgctgcacttgttgggctgttttccgggaaaaatattcggaaacaggttgttcgggttgctaaagagtgattgtttctaaaaagtatattgtaagtgacttaagaacagacattatatgaaataaagccgccataagtctcttatggaaaaacgttagttaattaccttcaaaattgttttaaaaatcttcataataattagaactagattaaattaagaaatagtaa

SEQ ID NO: 141095 - DNA, 3776 bp, Arabidopsis thaliana landsberg
acaaaactgcacatcactttcagttgaaaggaagcgacatgctgaagaaactttcaaccaagcttgcctaatggcgcaactactcagaacggaatgcctgtggcaatttctctttctcgcatcattccaacaatacaatattatcttctgacagacgtcattatcgcaacttagtctgtaaattcttgtttcctaatacccgtctctgtaatttcacagcctcctttccagccgagtgggcaagacacgatgccaccaaacaacatactcttcattcataatcttcccattgagacgaatagtatgatgcttcagctgctctttgagcaatacccaggattcaaagagataagaatgatcgaagcaaaacccggaattgcgtttgtggagtatgaagacgatgttcagtcttccatggccatgcaggctcttcagggtttcaagatcactccgcagaatccaatggtcgtctcttttgccaagaagtgaaaaccatagttttgatatgcggatgaatggtaatgatatactaattagtagctgtttaaaagcaaactgtcttattttatttggttcgtttccgattagtggtgtgaatgaccccgaagctttagaccagaatgtaatgggatcgaagaattgagagtgatttggttggagaaaatctcattttaaatgccttattattattaggactttgggggaactaaaaccacgaatttagaaatgagaagattatggggttactgacatcaaccagccaaaaaatagtcgcattcgataaatagaggcaacaaatatgcttcatctctctctctctctttttctctcacttccctttttgtctctgacctttaaacaaaacttagataccattctagatctgatgatagcaagataatcaacaattccccaaaataaaaacagagtcctctgttttgttcttcatctctcactaagagattctcatctgtcggcatcaagtaggttctgcatatttagagagaaatctctcttcctccacgttcttctcactgtctttggtacgcacaaaaagaacagagcgatgtcaaagctagacctggaggaggtgaactcgatgcagagaggcaaagttcatgggccattcttggtggaaaacatggtgtgccagaaaaaccacatgttgacctcaaagggtgttttcttgggcagtgaccctctcaaatacgcaatgccacttatgttgctgcaaatgtccgtcatcatcatcacctcaaggcttctctaccgcctcctcaagcccttgaagcaaggcatgatctctgcccaagtcttggtaataagttgtctatatttctttctttttctgtaatcgaggaatctcagaacaaaacttagactagtctatggagtctggagctcttttcatttctctctttttgcgaaatttttaaacgcaggctgggatcatcctaggaccgtctctctttggccaaagcagcgcatatatgcagatgttcctccccataagcggcaaaatcactttacaaacgctctcaaacctcgggttcttcatccatctcttcttacttggactaagaatcgacgctagcatcattcgtaaagctggttccaaagccatactcattggcacagcttcctacgccttgccattctccctcggtaacctcactgtcctctttttgaaaaacacttacaacctcccgccagacgttgtccactgcataagcacagtgatctccctcaatgcaatgacctcattcccggtcaccacaaccgtcttagctgagcttaacatccttaactctgatcttggacggttagccacaaactgctccattgtctgtgaggcctttagctggatagttgcacttgttttcagaatgttcttgcgggatgggacactagctagcgtttggtctttcgtttgggtgactgctcttatcctcgtgattttcttcgtctgcagaccggctatcatctggttgacagagagaagaagcatttcgatcgataaagcaggcgagatcccattcttgccgatcataatggtcctgctgacgataagcttgacctccgaagttctcggggtccatgcggcgtttggagcgttctggctcggagtatcgctcccggatggacctcctttagggaccgggctcaccacaaagctcgaaatgtttgcaacgagccttatgctcccttgtttcatctccattagtggattgcagaccaatttcttcattatcggagaaagccacgtgaagatcattgaggccgttatactcatcacctacggctgcaaattcctaggaacagcagcagcttccgcttattgcaacatacaaatcggagacgcattttctttggccctcttgatgtgttgccaaggagtcattgagatttacacatgtgtcatgtggaaagacgaaaaggtatattgttttgtttgcatttgtgtgatcagatttctctaaacataagatcggtccatgaacacattatcaaactttttcattcatattttgcaggttctaaacacagaatgcttcaatctccttatcatcactctcttgctcgtgacaggtatttcgcggttcctcgtagtttgcctctatgaccagtctagccgccacaagagcaagagtaagcgatcgatcctcgatacgagacaacggaaccttcagttccggctcatgctctgtgtctacaacgttgaaaatgtaccttccatggttaatcttctagaagcttcttacccgagtaggttcagcccgatctctgtcttcacactccaccttgtcgagcttaaaggtcgagcgcacgccgtgctcgtgccgcatcatcagatgaacaaactcgatcccaacacagttcaatccactcacatcgtcaacggtttccaacgattcgaacagcagaaccaaggaaccctaatggctcagcatttcacagctgcagctccattctccagcatcaacgatgacatttgcactctcgccctcgacaagaaagcgacgctcatcgtcatccctttccacaaacagtacgcgatagacgggacggtagaccacgtgaacccatcaatccgtaacataaaccttaacgtgctagaaaaggcaccttgttctgtcggaatattcatcgatcgaggagaaacagaaggccgccgctcggtcctcatgagctacacatggcgaaacgtcgcagtgatcttcatcgaaggccgagatgacgcagaagccctagctttctccatgagaatcgcagagcacccggaagtaagcgtcacgatgatccatttccgccataagagctccctccagcagaaccacgtagtagatgtggaatccgaattagcagagtcctaccttataaacgatttcaagaatttcgcaatgagcaaaccgaaaatcagttacagagaagagatagtgagagatggcgtggaaaccacgcaagtgattagttcactaggggattcattcgatctggtggttgtgggtcgtgaccatgaccttgagtcgtcggtgttatacggacttacagactggagcgagtgccctgagctaggtgtgatcggagacatgtttgcgtcgtcggattttcatttctcggtgctagtgattcatcaacaagaaggagattctctagcgatggataatagctataaattgccagcttcacctcatagggttggggatccaagagtgcaccctcgtttctctgttgaagaaggctttacttctgttgatcttcacagcaaccgttaa

SEQ ID NO: 141096 - DNA, 545 bp, Arabidopsis thaliana landsberg
tctaaacagatgcaaacgcatcctctcctctttaaccaacgagttcatgttctgtatttggatacaacatattgcaatccgagatacaagtgagagcaaaaatttgtcaaatagtataacttgtgatggatttgaaggagcgtgtgctcgtaatgtaatgtttgatccattcttttttatgttattgttcagattcccttctaaagaagatgtgttaagttatgttgtgagaatcacaaaggatttcctcaggaagcaaccgaagactctgattgtggttggttcttacagcattggaaaagaatgtgtttatcttgctattgccaaagctcttggggtataaaatgctggagacattttctttctgttttagccatctttttgggactctatatgttctaactttttggagttttcaggttaagatatttgcaaatgcttcaagaagacgaatactgcaatcttttggttgggataatatttcgaagaatctttctacagatgggaaagccacatgtcttcatgttctgcctatgtcgtcattg

SEQ ID NO: 141097 - DNA, 4693 bp, Arabidopsis thaliana landsberg
  unsure (1)..(4693): unsure at all n locations
accatcatgagtgaccatggagagaagacttgtccactttgtgctgaagagatggatctgactgatcaacaattgaagccttgcaaatgtggttatcaggtcttgcatctaccttccattttctcttaatttcaattgatatgttacggcttaatcttgaaactgaaagttattgggagaacagttttgcttattgcaatgttcaatagctctcgtctttctctgttttcatgatcgctataatcactcttttatctgttaataattttgtgtatgtgattcagatttgtgtttggtgctggcatcacatagtggacatggcagagaaagatcaaatagaagggcgttgtccagcttgtcgcactccatatgacaaagaaaagattgtagggatgactgttaattgtgacaggtttgtaataacatttaattttagtctgggacagtctttttccgtttcttttgctgatcgcttttctctataattacctgttcccagtctggcttctgaaggcaatatggagcgcaagaagatccagaagtcaaaatcaaaatcttctgaagggagaaagcaacaactcaccagtgtgcgagtgatccagaggaatcttgtttacattgttgggttgcctcttaatctagccgatgaagatgtatgacaacttacatccaaacctttataatcattctttttgtagattactatctgattagcgcgccatttttctttcagctactccaacataaagaatattttggtcagtatggaaaagttctaaaggtttccatgtcccgaacagcatctggtgtcatccaacaattcccaaacaatacatgcagtgtgtgcgtttctgtatatacttcttatcaaacaatttccctctttatatatatatatttggtcagtgaagttgtctgataatgattttttgcatcgcagatatattacttatggaaaagaggaagaggctgttcgctgcattcaagctgttcatgggtttatcttggatggtaaaccattgaagtaagttttgacttgctttttctaaaaaaactagaattgtatttataagttattatattcacctaatgatcatatgaaagttctcgctctctatctatatttgcagggcatgtnttgggacaaccaagtattgtcatgcatggctgagaaatgtggtatgtctcctatagattcttgttcttctgcgttgttatttttgattacctcgcttcagatgcatgttgaagttgatgtctttggagtgatgaactgcatgtttttattccaggcatgcgtcaatcctgattgtctctatttgcacgaggttggttctcaagatgatagcttcacaaaagatgagatcatatcagcctatacaaggtatttgtatcatctgaaattttaaaataccctcttgctttcatgattgttctgtttcatggtaccagtatctttaggtaatgtaatatgatagttggtctagtatttttggatgattagttaagtcttatagtaattttgaaggagtagagttcaacaaatcactggagcaacaaatattctgcagcaccattcagggaacatgctacctccaccactggatgcttattgcagtgacagttcttctgcaaaaccaattataaaggttccttcaactgtaagttcagtttaatctcaactttcccttaacatgatgtgcaatttggcttgagtaatgtgttccaaagataatccacatctgaagtattttctatttgttaatcctagttggtgactaacttgatgatgtggcatgactagcttatgaaatctcttaattttcctgagcttaataatttatttcctatgtacagaatgcaactagtgttcccaggtattctccgccaagtgggagtgggagctccagcagatccactgcccttcctgctgcagcgtcatggttagttttcacttgatgctttttatgtcttttgattggtctatctaagaaataaggaaattctgttgcagggggacacatcagtctttagcaacttcggtcacctcaaatggatcttctgatatacaaagatcaacatcagtgaatggaaccttacccttttctgctgttgttgcaaacgcagctcatgggcctgtatcctctaatgacattcttaaaagaccatctcgcaaagaagaaagccaaatagttatggacaaagtcaaacctagtgtgttgaagcccttgcagcataatgttgtggtttctgggtccgagagaattaccgcacccgatagagatcctactagcaatcgtttatccagttcagtagactctgcctacggaggcagagacattgaccagccttcagcctacagtggcagagacattgacaagccttcatctactgttagctcgtttgatgctgcaaatgaagctgtagaagatgtccctactgtaagcaacttgttggatggtgttgcatgcatggggataactatgaattgtagggatgaacgtcctgatattacaatggcgattggtagtcaaagtgatcaaggttctattagacaacctggttctgaagtatcaaagttgccagatttagagcaatgtaggatagatagttctataaacactgataagaaagctatctcgttagaggataggatcccccgcactaggccagggtgggattggatatcagatttgcaatcgcaaatgcaaggaagctctaaattgcaagtggaggatatatcaacattggatagccaacggcctcaccctgaagaggatattatccactcgcggttgctgtctaatttgtcaagttccagtttggatacaaatcatatggcttctcgttcttccctaccttgtgaagttaggggcagtgatagattgcatcttccaaatggatttggtgagaaatccatgtccagtgtggagcactctctgttcgcaaatgaaggcaggaacaaagtcaacaatgcagaggatgctatactttcaaacattttgtcactcgattttgatccatgggatgaatccttgacttctccccacaatttggcagagttactaggtgaagttgatcagcgatctagtactcttaaaccttcaaacttcctaaagcaacataacaaccagtctagattttcttttgcacggtatgaagaatctagtaatcaagcatatgacagtgagaactatagcatttatgggcagttgtcaagagataaacctattcaggagtctgccatgagccgagatatctatcgaaataaccttgggagtgtaaatggatttgcttcaaacttcgctggtggattggataactttgccgctagtcctttattttcttcgcacaagaatcctggttagtagttttagtttatggctgttggttatttcttgtttgggtatttttctgctacatttccaatttttcttttctgttgtcctattgcagtttcacgacctcaagtttctgcgcctccaggattttctgctcccaacaggctacctcctcctggcttctcgtcacatgaaagagtgggcctatcatcagatactacactaggtattttctcttcttctatttgtggcatcatagagtacggatgatgctagagactaaaacttttgtccacttgtatcataggaaatcgatttcttgactctacttcattgaggaatgcatatcaagtaccaccttcagttggtaattcaaatggtgcatgtgatatcgactttgtggatcctgcaattctagctgttggaagagggatggtaaatgctgacttggacatgagatcaggattctcatcacaactgaattcttttgaaaacgaaacaggactccatatgttgagacagcagtctctgtcttctgcacaacaagttaatgggtttcatcatgatctcagaaacttatctccttcacttaacgacccttacggatttagctcaaggcttatggatcaaacacagggaagtagcttgtctcctttctcacagctcccaagacaacaaccatctgcaaattcaatcttgtccaatggtcatcactgggataagtggaatgaagggcaaagtgtgaacaatataggcatggccgagcttcttaggaatgaacggctgggttttaatgggagcttatacaacaacggatatnnnnnnnnnnnnnnnnnnnnnncaagtcccggtgatgtgtataacaggacatatgggatttgattctggcatgaagagaggtttctgctttgttggatctgctctggttggtcccgattcccaagtgagtggaaaattcatactcaaaaactgcttccgctgctgctgcgcatataggatcaattctcataccaaagatgcaggcccctaacatagattccccaagagcttaaaaggtactgaatcattttcttctataatatgtgattttggtttatccattcgtttataatgtgtgaatttgacttttgcaggagcaaggatgttaaattgtcaatgtttgggtgcttggataaattttgatttctgctgatgattggtttcgtcggaattctggcaaattttgagggtccaacgatgatagaggtagaagttgcgctctgattttttggttcttatataaagttgtaaatgaatttagttataaaaaacagtgaagcttttaaaagtattctatgaaaattcaaattgtt

SEQ ID NO: 141098 - DNA, 907 bp, Arabidopsis thaliana landsberg
gtgttcgaggtggattccatggagggggtggtagtggagatgacatgatggatgatcttgatgagatgatattcggtaagaaaaacggctgtgattcttcgactaatccagatcatgacccaaaaaaggagcagtcctcatccaaaaacgacgatctcattcgattctgagacggatactttcaggcgacataataaatcttttataatgtatttggtgtttaattggtagtatgaatgaacaggttcaatgtaagtaatctgtgtttggagatctctttgacttgtgtgatggtttataaaggagatttgttatgatggcacatgagatttgaaatacattctattctagtttctgctatcaaacacattttgacatctatccaattgctatcgcgcacatttgaacacaaactttgtttcaatttagcgtttacagtcgcagacgcaatcgcggttaagtgaagcgcatcgtcactttccacattcatagtaatatgcaacaactgagtaacagaaatttgtaatcgaactcagatttcgaagaagcagatctcacaatgtctggaaaacagcaaaatcatcgttctacttcctccagacccagatccaaaaccctaatcctcatcggctctctcttcaccgtctctctactcgtcatcctctacacctcttcttcctcctcccgagcctccatctccaatcccaacccgtcggaccgaccagagacgtccttcgttacctcgcttgagcatttcttaatatataaagctccgaagctctcgttaccggttagagacgacacggtgcgtggcgagagtgatgatgatgtgaggaagctcgatgagatggtgttcgagagagagaatcgttggttgaacgaagatccgggatatcctgtgaactga

SEQ ID NO: 141099 - DNA, 727 bp, Arabidopsis thaliana landsberg
aggaaagctttagtcttttaccagtttgatccaattctgggtttcactgaaaaaaagttgggagtttgattcttctaactgtagaagaaacagagtcaacagaagaaaactaaaaaagttgagatttttctctcacgcgctcaagaacttgagtatgtcttcttctgtagcagtgttatgggttgctacttcttctctaaatccagacccaatgaacaattgtgggttggtaagggttctagaatcttctagactgttctctccttgtcagaatcagagactaaacaaaggtaagaagaagcagataccaacttggagttcttcttttgtaatgaaccgaagtagaagaattggtgttgtgtcttcaagcttagtagcaagtccttctggagagatagctctttcatctgaagagaaggtttacaatgttgtgttgaaacaagctgctttggtgaacaaacagctaaggtcttcttcttatgatcttgatgtgaagaaaccacaagatgttgttcttcctgggagtttgagtttgttgggtgaagcttatgatcgatgcggtgaagtttgcgctgaatatgctaagacgttttatcttggtatggatctttttaactcttctttggctttggtgtaatgtagagtggtgttctgagttctaatgtttgtgttgcaggaactttgcttatgacacccgaaaggcgaaaggcgatttgggctatctacg

SEQ ID NO: 141100 - DNA, 408 bp, Arabidopsis thaliana landsberg
tctggttggagggtgttatcacagagaagaccaagaaagatgaaaacacagtgactgtgcattttcctggtgcgtaaaaaggccaatgtgcctgatgaatatacctcatttttgtgctctaaactgcttgtctgatccactgttctcaaaacgttcttattttctaaaacatatttctgcagcggaagaagaaactttgacgatcaaagcttggaatcttcgtccttctcttgtgtggaaagatggaaagtggattgaatgttctagttcaggagaaactatcagctcgtcacatgaggtattttcacccttttatggatctaccgggttctcttttggatgctttggcattttgtaaaactcaaaaatttgaattgcagggtgatactccaaaggagaagcgtcgta

SEQ ID NO: 141101 - DNA, 1235 bp, Arabidopsis thaliana landsberg
atggaggtaaagctaattccaaagttttcatctgaaattttcttttgcagtcgcagagcttaaagagaagaaagattcataacgaatattttgtagaagaagaagatgaacaaagctacaaaagccaagccggttcggttcttttgtttgaaataattttaggtccggtttgattataaatccactaattaacgttaaatatgacgaactacgcacagatttcgcgcgtgtacatcactgccacaaaacttgcttatgtttgcaggcgcgtgtgtttgtttatgtgttatataaacgtgtttaaggaaactaattaaaataaaaatccattggattttgtactaaacaaaggtaattaatagtgacacctcttaaagagataatgagtgtacgttagtaaaatgcacacgtcacatctcttcttcttcttcttcttttccacttcagactctgtttttagctctgtgatttgagtttttattttgcggtggcgttgtatggctatggcctttcctctttcttatactccgacgattactgttaaaccagtaacgtactctcggagatcgaactttgtagttttctcgtcgagttctaatggacgagatcctttagaggagaattcagtacctaatggtgtgaaaagcttggagaagcttcaagaagagaagcgtcgtgctgagttatctgctaggattgcttctggagctttcactgtacggaaatctaggtgaattcccatttaccaaatcaagaagcatgtattgtcctaatggagcattgattctgtaaatgttttgtcttgattctcttttggttcttgtgtgtttttgttttggtttgtacaagttttccatctacagtgaagaatggtttatctaagattggaataccaagcaatgttcttgatttcatgtttgattggactggttctgaccaagactaccccaaggttcctgaggctaaaggctcgattcaggcggtccggaacgaagctttcttcatccctttgtatgagcttttccttacttatggtggaattttcaggttgacctttgggcctaaggtttgtttctttctttatcttctgatttcttaactacagagtaaaaagtattggttaaagaatccaatcattttgtgtttgctatttgtattggtagtctttcttgatcgtgtcggatccttctattgctaaacatatattgaaggacaatgcaaaagcttactccaag

SEQ ID NO: 141102 - DNA, 659 bp, Arabidopsis thaliana landsberg
cgaaactgagaaagaagttttatttattaattaatggcggaagagaaaagctacaagtacgtgatcattggaggtggtgtagccggcgtaagtaaatgcattttcaattttgaacttttcttttgacaacaacatatcttttatcaagtttaaattcgattgtaacacaacaacaacaacaacaataacactaatacaaaccagtacaaaaataaaatacaaaccagtaaattacatgttttgcccaacatttttatcaactcgcattgttcagttttgtagatgatgagactttttttgttgactctgttttttttttgtttttttttttggcttaagaatcattgttcagtttgtgttcattctttgcttacaaatcatcgcttatttcgcatccgtgctttgcttacgaattcctttctctaactctctgttattttactctcacttttacatgtaaatccctttatgcttattaagttcttatacacaagaaattgtttatgattttcttctattaaatgttattcatgtaacgaatacgcatctctctgaattgactttttttttttttttttttgggcatttcggaatcacagggttacgcggcgagagagtttagtaatcagggcctgaagcctggtgaactcgcaatcatt

SEQ ID NO: 141103 - DNA, 267 bp, Arabidopsis thaliana landsberg
gtaccaatccaatctgtgaaagagcacgtacaagaggagcgcatagaagtcaggatctgagaattttctggtctgcgtgttaccataattcatgacacattcaacaagatagaatctttaccttcaataaattaaattaagtcggaaccatcggagctccaataggtctgagtgaatcctcttatagttgatttccttttgttgacagtaagactgatacaatttatggatttcccttgaaagtaagaaagcaacgtatgttcactt

SEQ ID NO: 141104 - DNA, 566 bp, Arabidopsis thaliana landsberg
tctaatcagagaaacgctattctgcagactgctgaagaagactcatctgtgaagacagcaaagaagatttatgacaagaaattcgccgaactttcaggaaacgacatattcaagggagatgcggcgtcatctaatgttgaaaagcatctgagtcaagcgaagctaaaggagataggaggaaacaacatatttgcagatgggaaagtagaagcaagagactatttaggcggtgtccgtaaaccaccaggtggagagacaagcatcgcacttgtttaaaatcatctttttcggtaacaacttaactcttttataaaccgcggttgttcggtgtgtgttcttgtggtttcccatacacttcagctcaaagtgtgatttgtattttgcggtttcgtggttgttatttttattgagttggtttttaagccgttagggctttctaatgtaagttcgagcttaaactgttgggagattataagcattactacgggacagaggatgttgcttgtttcagaagttattgtttttcttttccgggtcttctgaaaccggaaaaccaaacttgtttc

SEQ ID NO: 141105 - DNA, 939 bp, Arabidopsis thaliana landsberg
ctagattataagttatataaccatataatattttgtgttcgattagtgtaacaaaaatggggttagagaggaaagtgtacggtttggttatggtatctttggtacttatggctattgcaacgatgtgttgtgtccaagctacgatcgaggaagaagcggctaaggatgaatcatggactgattgggcaaaggagaagatcggtctcaagcacgaagacaacatccaacccactcacaccaccacgaccgttcaagacgacgcttggagagcgagtcaaaaagccgaggacgcaaaggaggcggctaaacgcaaagcagaggaagcggttggagccgcgaaggagaaagcgggttcggcatacgagacagctaaatcgaaagttggggagggtttgggttctgtaaaagacaaggcctcgcagagttacgactcagctggtcaagttaaggatgacgtgtctcacaagtcaaagcaagttaaagatagcttgtcgggagacgaaaacgatgagtcttggactggttgggccaaagagaaaatcggaatcaagaacgaagacatcaacagccctaacttgggagagacggtatctgagaaggcaaaagaagctaaggaagcggctaaacgcaaagcaggagatgctaaagagaagttggcggagacagttgagacggcgaaagagaaggcgagcgatatgacgagtgcagctaaggagaaggcggagaagttgaaggaggaagcagagagagagagtaagagtgcgaaggagaaaagtaaagaaagttatgagactgcaaaatcaaaagccgatgagactttagagtccgcgaaagataaggcgtcgcagagttacgactcagctgcgcgtaaatcggaggaagctaaagataccgtgtctcacaagtcaaaacgtggtaaagagagcttaaccgacctta

SEQ ID NO: 141106 - DNA, 776 bp, Arabidopsis thaliana landsberg
ggaaaagtaaaaaagagagatctgagaaatgggaaatgagacgaagaccaacggtggtcctgcaagtatggccggaggcggaggattcagagctaaaatggaacattacgtttacagtggtgaaaagaagcacgtcttggtcgggatcggaatcgtcaccatcatcttcggagttccttggtatttgatgactcaaggtccgatctctctctcatcgtttaataattgtataaccaaatcccttcttggggattgaaagggtaattggtagaagatgatattggaggattttgattgcaattagattctgattttggttttcttgcaaaatgagaaacatgacatagtgagtaaatggtttctcagtatatatggaaatggatcacattgtttcattctaacattcccataggacctgaatctgtatatctcttacatctgcttttggttacatcctatagtgttgactctgtttgggctaattggttgaagttctttggtttcttttagggtcaaagcatcaatctcaccaagattacatggacaaggccgataaagctcgaaaagcacgcctctcatcgtcttcatcagctaacaagtagtctgtctgaaggattgagtcatttgcacactgttatctcatactcattttcccacacaagttaaaacttagtcaaaatctgagtcttttttgtgatttagattcaaaatcattctcattttcatgcaccatgtttggttatccgttttttaataaaaagatcaaagattctatc

SEQ ID NO: 141107 - DNA, 994 bp, Arabidopsis thaliana landsberg
  unsure (1)..(994): unsure at all n locations
cgagataatcatctagtcgtcggtgtcgccgcctttctccgccgtctgaaatcgtccttgttcgattttccgaagacgaagcaggagaagatatgtctgggaggttgctgaagaaggttctccaggaacatgaagattcgaaacttcagaaacatcacgaagaagaagaagaagaggacgaagaagaatcaggagcccgttcttcgattaagccnnnnnnnnnnnnnnnnnatggtgatgaacatcctgaggtcagtctctcagattttgacgattagattgttcggtagatttagtatctagaattttatcctcctccgtgttctaaaatagctaatgtgttgataagtttgaatgtagatagtttcaatggtttgatcttcagattcttatggttttttattctgatgtctagagctgattcatattttgttggtcgtaggagtaatgattacaaagtgtttctgtaacaattgggtttgattgcaggagattgatgatgagactatagctgagaagaagaacgaagatgcggatcatcagtcaagtgtcgctgatcatgtgcagccggtgtcaaagaataagtcgaagaaaaagaaaaagaagaagaacaaagagagtggctctaatgtgcctaaagctgaaatgactttggatgaaactttggaagcacttggtctcaatgctaactctaagcaagataaggttcaggagacaaaaccaaatgctgattcttccaaaaaggcttcttcacgatttgtgttggaaatagattccaagtatctgaatcttgagaacgagttgaggagaacgtatggttcaaaggctatgcgatcatttgagagtgagagtggctctcaaggtggtagtagctctagacgagggggaaggcgtggagtccatcatatcacaaagacggttctggtatctccaaaagagaattggtctcgatgggatagatctttctcaatggagtttctagagactaaagatg

SEQ ID NO: 141108 - DNA, 635 bp, Arabidopsis thaliana landsberg; identical to SEQ ID NO: 43865

SEQ ID NO: 141109 - DNA, 536 bp, Arabidopsis thaliana landsberg
attatttgatgccattgctagtttatgtgtcccggtgattgtaagcgatgggattgagctaccttttgaagatgtcatagattacaggaagttctctatattcttgaggagagatgccgctttgaaaccagggtttgtggttaagaagctgaggaaagtgaaaccaggaaagattttgaagtaccaaaaggttatgaaagaggtaagaagagtttcttcatttgtcttctgaaagtttctttggattttatgaaaaccaatttgtgaagtttatggacttggtttgtgtaggttaggcgatattttgactatacacatctaaatggaagtgtgaacgagatctggagacaagttactaagaagataccgctaatcaaactgatgattaatcgggagaagcgcatgatcaagagagatggaagtgaccctcgatgttcttgtttatgctcaaaccaaaccgggatcatccatggtgtctagtaaggttaaatgcctagcaagctcatgctaagcaacaaaatgtgatcattattaat

SEQ ID NO: 141110 - DNA, 1152 bp, Arabidopsis thaliana landsberg
tctcggtgagtgttggtctggtggtgaaactggaaccgccaccgctacgattatgatccttggggatacatgtacacgcggctgcaggtatcatcctctcaccgaatttgcccagcttgattctctattttctctgaaagggattctattttaggttttgtaatgtgaagacatcgcgtacacctccaccgcctgatccaaatgaacctaacaatgtggctgaagcaattgcttcctggggggttgattatgttgtgatcaccagtgtagatcgagatgatttacctgatcaagggagtggtcattttgctgaaactgttcagagattgaaattcttgaagccggagatgttgattgaagcactaggtaatataatgatctggtgggattgatcatcatgagttttgttttttaatttgttttgttgtttgatgatgtagttcctgatttccgcggagatggtggatgtgttgagaaggtttccaagtcagggcttgatgtcttagctcacaacattgagacagttgaagagcttcagagttttgtgcgggaccatcgtgctaactttaagcagtcattggatgtgcttaagatggctaaggagtatgcacctgcaggcaccttaacaaagacttctgtaatgctgggatgtggagagacccctgatcaagtggttaagacaatggagaaggtgagagcagcaggggttgacgttatgacatttggccaatatatgcgaccatctaaacgccacatgccagtagctgagtacgtgacaccagatgccttcgagaggtatcgccttcttggcatggaaatggtaatggtctcttccttgttttcaagttttattagctgagaattgcaatgggaaagtaggctaatatggaatcttgtaaacagggattcagatacgtagcatcaggaccaatggtgaggtcgtcgtacaaagcgggagagtactacataaagtcgatgatagaagccgatcgagtggcttctccttctacatccccgtagattacacactataatatgtgaattctttcactttattgctttgtttcttctgcgggtaagccattcacaacacttatccgccacattctgaataatgtaatactattattgtccaatcttccatgtgtgtct

SEQ ID NO: 141111 - DNA, 1468 bp, Arabidopsis thaliana landsberg
  unsure (1)..(1468): unsure at all n locations
ctttctacatacctgaagaaaaaaataatctacgaattcgagccaaaaagatcgaaactttttaatctatgggtgcttcagggaaatgggtcaagtccattatcggtctcaagaagctagagaaggatgaaatcgtaagttcattatcttttttttttgttctctcgttcaaaggttaaagctttatcgagagatactctgttttcaggaaaagggtaatgggaaaaacaagaaatggaagctatggaggactacttcagtagattcatggaagggttttcgaggaaaacatcggtctgattcagacggtgttgattcttctactgtttactctgctgctgttgctactgttcttagagctcctcctaaagatttcaaagctgttagagaagaatgggctgctattagaatccaaaccgcttttcgtggattcttggtgagtttgctaattggttttgattagaattgagaggaatagaacttagtttaatttgaggatttgttgttaattaggcgagaagagcgttgagggcattgaaagggatagtgaggttacaagctttagtgagaggaagacaagttaggaaacaagcagctgttacattgagatgcatgcaagctttggtgagagtacaagctcgtgttagagctcgtcgtgtgaggatgactgttgaaggacaagctgttcaaaagcttttagatgaacatagaaccaaatctgatctcttgaaagaagtcgaggttcttgtctttacctttttagctcattggtttgatgattgtttattgttttgagatttgttatgttctcaggaagggtggtgtgataggaaaggtactgtggatgatattaagtcaaagttgcagcagagacaagaaggtgcttttaagagggaacgtgctnnnnnnnnnnnnnnnnnnnnnnnnnnnnnnnncttgtccacattcaacatcttgtttaagttcgtgtctgaagctgaatcgggaatcttgttttgtgtagcaatggaggtcaactactagctcaaaccttaagacgaatagttcgatttcgtatcttaaaagtcaagagtttgataagaatagttggggatggagttggttggagcgttggatggctgctaggccatgggagactagacttatggacactgttgataccgctgccacgcctcctcctctgcctcataaacatttgaaatcaccggaaactgcggatgttgttcaagttagaagaaacaatgtgaccactagagtatctgcaaaacctcctcctcatatgctgtcttcaagtcctggttatgagtttaacgagagctcaggttcatcctcgatttgtacttcaactacgcctgtttctggaaaaactggacttgtttcagataactctagcagtcaagcaaaaaagcacaagccaagttacatgagcttgactgaatcgacaaaggctaagcgaagaactaccgcg

SEQ ID NO: 141112 - DNA, 555 bp, Arabidopsis thaliana landsberg
tggtaatactggtgtcaatcctggtaagtggcagtttcgaaactttcgtatacactaggaacttatgttctcaatgtttcttattacatttgtaaatgtttgttgtagatgatgaagaatctgggcaatgctttcttactggtttggtgataagaaacctaagcattaggtaagcattttccttgatgtgtctttccattatcctccattttaatgtccctgacttcttgaattgtgaaatgttcagtacctcaaactggagatgcacgaagacacttgctgattatctaaccgaaagggacatcatgggagtttgtaagttccttgtattcaacatactatttagattgtgcatgagataaagttgcatttgaaaacatctctgattactctattttgggatgtttttgtaaacactatcagatgatcttgacactcgagcaataacccgtcggttaagagaagatggtagtcttatcggggtgttgagcacagaacagtccaaaacagatgatgaacttctgcaaatgtctcgttcatgggatatcgtaggtc

SEQ ID NO: 141113 - DNA, 1388 bp, Arabidopsis thaliana landsberg
gtagcaaccatggagaagccaaagttcaagactgtccaagaggtggttgcagccggtcaaggactaccggagagatatcttcatgcaccaaccggcgacgacaatggtcaaccacttaacgctgccgtgccggagatggatattccggccatcgatctcagtcttctcttctctccttctgatgacggtcaagaagagatgaataaacttcactcagcactctctacatggggcgttgttcaggtttgactatcttggttagtgatgatcagattcatgatttaaactctgtacaagttcttattgaagtaagcaggtgatgaatcatggaattactgaagcttttcttgacaagatttacaagctaaccaagcagttctttgcgcttccgaccgaagagaaacacaagtgtgctagagagacaggtaatatccaaggatatggtaacgatatgattctgtctgataatcaagttcttgattggatcgaccgtttgtttctcactacttaccctgaagataagcgtcaacttaaattctggcctcaagtccctgtcggattcaggtaagaaagtgacaccacattggttcattattgactgtggtggtgattttgactatagtttttttattcagcgagacgttagatgaatacacaatgaagcaacgggtattgattgagaaattctttaaggctatggctagatcattggaattggaagagaattgttttctagaaatgtatggagaaaatgctgtaatgaattcaagattcaacttctttcctccatgtccaaggccagacaaggttattgggattaaaccgcatgctgatggttcagctatcactcttctcttacccgacaaagatgtcgaagggcttcagtttcttaaagatgggaagtggtataaagctccaatagttcctgatacaattcttatcactttaggtgatcaaatggaggtacatcaatcctgtagagatatatgcatatgattttcaaagattgattggtgtaggtttgacataatctcttgtgtgtttagataatgagtaatgggatatataagagcccggttcatcgagtggtgaccaacagagagaaggaaaggatatctgtggcaacgttttgtgtaccgggtctagacaaagagattcaccctgcagatgggcttgtgactgaggcaagaccaagattgtataaaacagttaccaagtatgtggatctccactacaagtactatcaacagggtcgaagaactattgaagctgcattaatctgattatacttctttaagtctccttcttcaagtctcatttttttttccaaagaaaactggccaatcttttcaagtaacatttcaacaataaagagtctctaaaccctt

SEQ ID NO: 141114 - DNA, 1079 bp, Arabidopsis thaliana landsberg
  unsure (1)..(1079): unsure at all n locations
agacatatttctgatcgtgctgagtcaacgttttgagcggcgaacatttgcagacccctttgaagtttatagagcactaagagttgtgaatccaagtccgtatatgggttatttgcaggttggttacggagagaacatttcttcaacaactttgcattttgtacttgtggataaaccattaatactgttttcgttctgttattcaggctagaggatgcattttggtagcatcaagtccagaaattctcaccaaagtaannnnnnnnnnnnnnnnnnnnnnnaaagctgcattaatctttatatcatatttgaagctaacctttatatcatatttgaagcagaacaagatagtgaatcggccattggcaggaaccagcaagagagggaagaatgaagttgaggataagagattagaaaaggaactgctagagaatgaaaagcaatgtgctgagcacatcatgttggttgatctcggacgcaacgatgttggaaaggttacaaaatacggatcagtgaaagtagagaagcttatgaacatcgaacgttattcccatgttatgcatataagctccacggtaactgttaattagataactagtagtagatcaaatgtctaaagtctcgcatagtgtgttctttaatatcttaagttctaattctgtgtgtaggtgacaggagaattacaagatggtttgacttgctgggacgtactacgtgcggctttaccagtgggaacagttagtggtgcaccaaaggtcaaagctatggaactaatcgatgagctagagccaacgagacgtggaccatacagtggaggttttggtggagtctccttcactggtgacatggacattgctttatcccttaggacaatcgtttttccgacagcatgtcaatacaatacaatgtactcttacaaggatgctaacaaacggcgtgagtgggtggcttatcttcaagctggagctggtgtagtagctgatagtgacccgcaagacgaacactgtgagtgccagaacaaagccgctggtcttgctcgagccatcgacttggctgaatctgcatttgttaaaaaatga

SEQ ID NO: 141115 - DNA, 522 bp, Arabidopsis thaliana landsberg
atacatatccatctttgatctttttgtttttggcatacaagaaaagaaaatggcgtctcatgctgttacaagcggacaaaaaccacacgtagtttgcatacctttcccggctcaaggccacatcaatccgatgctcaaagtggctaaactcctctatgccagaggcttccatgttaccttcgtcaacactaactacaaccataaccgtctcatccggtcacgtggtcccaactcccttgatgggcttccttcttttcggttcgagtccatccctgacggtctaccggaggaaaacaaggacgtcatgcaggatgtccctaccctttgtgagtccaccatgaaaaactgtctagctcctttcaaggagcttctccggcggatcaacaccacaaaggatgttcctccggtaagctgtattgtatctgacggttgtatgagctttactcttgatgctgcagaggagcttggagtcccggatgttcttttttggacaaccaagtgcttgtggcttcttggcttatc

SEQ ID NO: 141116 - DNA, 782 bp, Arabidopsis thaliana landsberg
ggctgtcagatggacatagccttatgttgtctacctactggcgcagttgtcgagttatactcagcgtaaatttgctaaggtggctgatgaattaatatggaaagtttcagaatttcctcctgctgctgtactgactgatgaatatatcttgacaatattacagcggtgaagtgtcacgtgccagccctagtgattcagattattcatggaacgctcttgcgctagatggtgatagtattgttgctggtaaaatctcttgagcaagttcctaatctcagtgattatctgttacaataccatcttaaatacataccagacttgaaacaacattgcattttctttctctgagtagtgtctagcagcccggcgagtgttcctgaaattaagtatggaaagaaaggtctcgattcagctgggaagccttcatggctctggtcgaatattcaaagcccgatcagatactctgagaaggtaaaagcatatattgctagaccgttttgattcaaatgatgttaggctttttccttatctatcttttgttttaattgtggcaggttatggcagggctttcatctcttcagtttaaaattctaaaagtaccaattagtgatatttctgaaggtcttgccgaaggtaatttacatttaattttgattttgacaataagtattgtttcctagactttggctctgaatactctgttattgttcaaggcaggagccaaaaatcctattgaagccatatatgtatcgtcatccaagtctaaggagaatgggaaatgt

SEQ ID NO: 141117 - DNA, 1091 bp, Arabidopsis thaliana landsberg
attcatatagaaatttcaactaaaaatggccgtgaagatctcgaccattgaagtattgatcctatcccttgctctacttagcttcggccatggttgttatggccagcttcgactcggattctacagtcaaaattgccaaaacgtcgaaaacatcgtatctaaagttgttggagaggcattcatcaaggattcatcgattgcacccgcaatgatccgcctttattttcacgattgttttagcaacgtaagttggttgatacttcattatactacaaatttctctagaatatcctagagagtctcaaaagaaataaatattgatctttgttgtatcaaaaatgtatgtaggggtgtgatgcatcgcttcttctagatggttcgaacagtgagaaaaaggcgtcaccaaatctaagtgtacgcggatacgaagtgatagatgacattaagtctgcggtcgaaaaagaatgtgacagggtcgtttcttgtgctgatatcatagctctcgcgactagagatcttgttactcttgtaaacacatctcttttatctacaacttctattttatatatttatgtatgttctcctaatcaacttcaaaaatataatttaaatttttgtttgaaggcaagcggagggaaaacacgatatgagataccaacaggacgattagacggtaaaatctcttcggctttgcttgtcgatttgccgtctccaaagatgaccgtcgcggaaactgctgctaaatttgatcagaggaaacttagccttaccgatatggttctacttcttggtatgtgaagtaaacatattaaattcaaatcatatattttttgttgtttacaagtcaaacatcaccctaccgaatttgaatttagtttctaaaatgactagtaaaaacaactactaaatcttttggttttctaaatttatagtgacatttgttttgcgtttaactttataaatgtataggtggacatacgattggagtgacacattgttccttcattatggacagattatataactttcaaaacacgcaaaagcctgatccatctatggatcctaaattggtcgaagaactaagcggcaaa

SEQ ID NO: 141118 - DNA, 3008 bp, Arabidopsis thaliana landsberg
  unsure (1)..(3008): unsure at all n locations
atgactcaggcgcttcgatacttcaaagaatcaaccgaacaacacgttttggctcaggtctgggctcctgtgagaaagaatggtcgtgatttgctgacgactttgggtcaaccttttgttcttaatcctaatggtaatgggcttaatcaatacaggatgatctctctcacatatatgttttctgtggatagtgaaagtgacgtagagctcggactcccgggtcgagttttccgtcagaaattgcctgaatggactccaaatgttcagtactattccagcaaagaattctcgcggcttgatcacgccttgcactacaacgtgcgtggtacactggccttgcctgtctttaatccctctggtcagtcctgcataggtgttgtggaacttataatgacctcagagaagattcactatgcacccgaagtggacaaagtttgcaaagcccttgaggtctggctctcttttctcactactacacatactccaccctttactctgtttatcctttctctgaattgttcctagaacttggtgtgaatggattagatttttgagttgcaagttttgccttgccggttatattgaggaataaccgttaataaaaggtttctgctcatcatttggcctgctattttgaagctctttctattcaaagcatggtttattctttgataataacaacaaattgatatcagtatcttgttagcttctatcttagttatagctttttttaatatctttcattttcttgtatccaaatagttctgtgtttttgtgatttgcttgagctttgaagtattttttcgtacagagggatataattctaataccttattaatgataacaagatttggttatttttttaggcggtaaatctgaaaagctcggaaatacttgatcaccaaacaacacaggttagctacatgtatcattttgtggattaccaagaaccatttaagcactggtttctcactgttttcagttaacttgatatccacagatatgcaatgagagtcgccaaaacgcgcttgctgagattctcgaagtgctgacagttgtatgtgagacccataacttgcctctcgctcagacttgggttccatgtcagcatgggagcgttcttgccaatggtggcggtctaaagaaaaactgcaccagctttgacggtagctgcatgggtcaaatctgcatgtctacaaccgacatggcctgctatgtcgtggatgctcatgtctggggctttagagatgcctgtcttgaacaccatctccagaaaggccagggagtcgctggacgagcttttctnnnnnnnnnnnnnnnnnnnnnnnnnnnnnncaccaagttctgcaaaacgcagtacccactagtccattatgcgctcatgttcaagttgaccacttgttttgcaatatctctccagagctcttacacgggcgacgacagttacattcttgaattttttcttccttcgagtataacagacgaccaagagcaagatttgctgttgggttctattttggtgacaatgaaagaacattttcagagtctgagggttgcatctggggttgactttggtgaagatgacgacaaattgtctttcgagatcatccaagcattaccggacaagaaggttcattcaaaaatagaatccattcgagttcccttttctggttttaagtcaaatgcaacagagacgatgttgattcctcagcctgtggttcagtcttctgatccagtaaatgagaaaatcaacgtggccactgttaacggtgtggttaaggagaagaagaaaacagagaaaaagcgtgggaagactgagaaaacaatcagtctagatgtacttcagcagtatttcactggaagtctcaaagacgctgcaaagagcctaggaggtctatccatttacttttcatgttttggttagttactggctagagatatttcatctgaactctatattgttcttgtcacagtttgcccgacgacaatgaagcgaatttgcaggcaacacggaatctcgcggtggccatcgaggaagatcaagaaagtgaatcgttcaatcacaaagctgaaacgagtcatcgaatctgttcaaggtactgatggaggcctcgacctgacttccatggccgttagttccatcccttggacacacggtcaaacatcagcacagccactaaactcacccaatggttccaaaccacctgagctaccaaacaccaataattcacctaaccattggtcaagtgatcacagtccgaacgagccaaatggttcgcctgagttaccaccaagcaatggtcacaagcgatcacgaacggtggatgagagcgctgggactccaacctctcatggctcatgtgacggtaaccaattagatgaaccgaaagtcccaaatcaagatccgctcttcacggttggtggatcacccgggctcctttttccaccttattctagagatcatgatgtatctgcagcttccttcgcaatgccgaacaggcttcttggttctatagaccatttccgaggaatgctcattgaagacgctggaagttcaaaagatctgagaaatctctgccccactgcagcatttgacgataagtttcaagacacaaactggatgaacaatgataataatagcaacaacaacttatacgctcccccaaaggaagaggccattgcaaatgttgcatgcgaaccatcaggctcagaaatgagaacggtaacaatcaaagcaagttacaaagacgacataatacggttcagaatatcctcgggttcaggtataatggaattgaaggatgaagtggctaagaggctgaaagttgatgcaggaacgttcgatatcaagtatcttgacgatgataacgaatgggttttaatagcttgtgatgctgatcttcaagaatgtctcgagatccctagatcctcccgcacgaaaatcgtaaggctcttagttcatgatgtaacgacaaatctagggagctcctgcgagagcacggagaacg

SEQ ID NO: 141119 - DNA, 994 bp, Arabidopsis thaliana landsberg
aaaacctgaagtaaagccatctaaggaagtcacagagattctgatttataaaattgaccaaaacaagtcacagaggagaccccggaaaccaaacagtcgacgattacgaagatgaggatcactgtcatgaccgacagtgaacaaatcatcactctcgatgtcgattctcaggagactgtaagtttcttttccccggaaaaccctaactttcctgtttcttcgggttcttaatcacaatgtacttgtcgaattaatcgatggaggttcttgggtttcactactttagcacttattactcgacgttttcgaaagtttcgattttgctgatccttagtgctatattcctgtaggttgagaatgttaaagccttgctcgaggttgaggtaagagttttcagatctcttttgtctatttatatttggaattgtgtctcttgctactgagaaattaaagacttctgctgaaatctggggtttagggtttttgggacttaaagtttccttgttttccttttaatcaatgagcagtccaatgttccgattcagcagcagcagctgttgtataatggaaacgagatgggaaattccgataaattgagtgccttgggtgttaaggatgatgatttattgatgatgatggtttccaatgcctcatctgggtacgttggattgatttcctcttgcttctctattttgaaattttgcaattgctgtttgtgaacatgattctttgtttgtctcatttgcttgctcttcttcagtagtgccactagtgcggcggggaatgatttgggcatgaatcctgatgggtcagctttgaaccctgcagcctttcaacaacacattcgtggggattctaatcttatgggacagttatttcaggtctgaatttatagtaactagaactacgaaattcttcttggacttcgttttatgactctgttgccttggcttttgatgttgtgaattgtagaatgatcctgagcttgcacaag

SEQ ID NO: 141120 - DNA, 1840 bp, Arabidopsis thaliana landsberg
atgcatgaaaggtagagtgaatacatgtgcttaccggaaaattagaaaaagaggcggcgagatggcaagagcagacggaggaagacggagccgtcgctgattgagaaaagggaagcaagcaactggagagagacatgaggatagttcctcagggattatagctaaacatgttcaaagctttaaagctgctttaagtggatcaaagtggaagacgagtgcgagtttaagttttctgattgacgcctccattaatggttccaactttcagataatcgtcgggttcttctaaaccgaaccgtaccggttggttctcgaggaaagagaattgaatttgtggtttaggcgggggtgggtaggttgactttcgatatctcaacgtcaacgtctcttctggtcccgccgagtcggcgtcatcgttgagttggtgagatcatcttcttctcaacttcatcgatcttatcgtctcgaaaattgtcaccttttcttctcagctacttcaggcggagaaacactttccgtggtttagtgttgaggacgatcactgtttgtaattcgatggcgaggaagaagatcagagaatatgactccaagagacttctcaaggagcatttgaagcgtcttgctaatattgatctgcagattcgctctgctcaggtcattctcacgaattctagttttgttttcatcgatctgctttgtggaaattcgatagcacaattcaattggaactcttgaatgaatcgtgttttgtctgaatgttattgagagtaatcttggacttagatagagctaatgaaagtgagaatcttgggaaagatctctttctactgatgactttggacatggcatgattagttgattactagaactactgatgatgggtgattcgttttattgttgtatacttttaggcgacagaatctacggatttcactgagttaaccaaccaggagtcatggctatcgtccacaaagctagttgtgaaaccggatatgctatttgggaaacgcgggaaaagtggtttggtagctctaaagctggatcttgctgaagttgcagactttgtcaaagcccgcctcggcactgaggtgactcatcgcagccagagttatagatcagctggtaaattttgttgtggtattgatgtttgtttatgagtcgcaggtcgagatggagggatgtaaagcacctatcactacattcattgtggagccttttgtgcctcatgatcaagaatactacctctctatagtatctgatagacttggatgcactataagcttctcggaatgtggtggcattgaaatagaagagaattgggacaaagtactacctttttttttttttttgtgcttcttttcttgttttgttgcattatctttttcgactcacttcttttgttttctcctggggaacttggttttctggtatcaacaggtgaagactatatttcttcctgcggaaaagtcgatgacgctagaagtatgtgctccattaatagcaactcttcctcttgaggtaagtttctgttcccctgtgattaacttcctagtaagccagcggcaccctgcaactatttgctttagataaccctagaaatctggttttgatgtgcgtacattttcggtctttgtatggtgttctactttcaatcctatgcaaattcaaagatctgttagtctgaacttaggctgctcagtacttgcattcttttttaaggagattaataatttaggttgttttgaactatgctatgcctgctctaacaaatgcttctatctatttcaggttcgagctaaaatcggcaacttcataatgggtgcctttgctgtatttcaag

SEQ ID NO: 141121 - DNA, 2234 bp, Arabidopsis thaliana landsberg
atggattctgggtcgggtcatctcgatttcgattcggattctgactctgacgacgatgatgatattgattcgttgcattcatctcctctccatcatcatctagaagatgatgactcgaatccgaaatcgtatttgcatatgaattatatgaagaatagttatatgcctccttctttggtttatgagcagagaccttcgagtcctcagagagttcatttcggtgaatcatcatcatcatcaacctctgagtataatccatatctgaattcgaactacggatcgaaattgcctccgccgccaccgtcgccgccgagggaaaaggtttgggatttcttagacccttttgatacgtattatactccgtatactcctagtcgtgatacgagagagttaagagatgaattgggtgttccggatttagaggaagatgatgtagttgttaaggaagtacatgggaaacagaaatttgtagctgcagtttctgtggaagagccgttaggtaactccggtgctagcactagcggaggaggaggaggaggaggtaaggcttctttgtatcagactaggccaagtgtgtcagttgagaaagaagaaatggagcatgaggttcatattgtggagaaaaaaattgttgaggatagtggtggggatgaggtgaggaagagtaaggctgcggtggcacgtggtggtggcggtgtcagacgtggggttcctgaggttgcgaaagagatagaagctcagttcttgagagctgcagagtcaggaaatgagatcgcagtgatgcttgaagtggggaaacatccatatggtcgcaaaaatggtagctttcatcatctcttatttcattattttttttccttatttggagattgtgttgcagaaagtttgcttctttgtagaaatcagttgaatatttattatggttttgtgtcaatatatgattctgttgccactattgtcagcttgttgtgtttgaatcattcttgattttgtaaaaatggactgtgtttgtattggagcagtttcttcgaagaagctatatgaggggaccccatcaccgtctgtggtttcgtcagctcaatcatcaacctccaaaaaagctaaagctgaagcctcttcttcagtgactgctcctacttatgcagacattgaggcagagcttgctttaaagtctcgtaatctttcttcgacattgcacaagctccaccttggaagaagaagctttacgatgaggtcaaggtatgttgatgcataaactctctcgttggatactgagatgtgatctttttgtttgctctcttcttctgttgttacttttttccagtttgaactaaagtttgtgcatgtaggccgaggaaaaaatgcgtgtaaaccatgagaaaaagttaaggaagcttaagcgtatggatgaaagaggtgccgagaatcaaaaagtagattcaacacgaaaattagttagaagtttgtccacaaagataaggattgcgattcaagttgttgacaaaatatcagttacaattaacaagataagagacgaagagctatggctgcaactcaatgaattgatccaagggtaagctggacgaagtttaaatgcaatcggtatataactatgattggtttttacggtgagttctcattagatgctaactccatctttcaggcttagcaaaatgtggaaatccatgcttgagtgccataaaagtcagtgtgaggctattaaggaagccagaggtttaggccccattagagcaagcaaaaattttggtggggagcatctcgaggtaacaaggacgcttggatatgaacttataaattggattgtgggattttcgagttgggttagtgcgcaaaagggtttttgtaagagagctgaatagttggcttatgaagtgtcttttctatgaacctgaggaaactccagatggaatcgttcctttttctcctggtcgtattggggctccaatgattttcgtgatctgtaaccagtgggaacaagctctagatagaatatcagaaaaggaagttatcgaggctatacgccgtttcacaacgagtgtgcttcatctttgggaacaagataggttagcaacccgggagaggattatagggcatggtgatcctaggaatatggaccgagaggaacagagaatacagaaagagattcaagaattggaaatgaaaatggttctggttggtccaggggaagataacattgtctaccaaagcgacac

SEQ ID NO: 141122 - DNA, 380 bp, Arabidopsis thaliana landsberg
  unsure (1)..(380): unsure at all n locations
gtcaagtaatgatgaagagtaacgganagagtgttcggataacaaatgagaccggagaaaaagtaatgtctgacactttgtatggagacagtattaggcttcaacaagtcttggcagatttcatgctgatggctgtaaactttacaccatccggaggtcagctaactgtttcagcttccctgaggaaggatcagctcgggcgttctgtgcatcttgctaatctagagatcaggtaaaatagatatattcataatcagaatgcataatatgatgttaaaaacagtgcattgaggatattgggattatgaaaacaggttaacgcataccggagctgggatacctgagtttttactaaaccaaatgtttgggactgaggaaga

SEQ ID NO: 141123 - DNA, 642 bp, Arabidopsis thaliana landsberg
cgaaatggccgaatcttggcgtatgaagatgggtttaagcgttgatccattcttctccattgctcgtaaatcaatggatgctcgtatcgacgcggaagacttcgctgatgttttcggcggtccgccgcgaagcgttctcacccgaaaattttccggcgacttctctcgttccgactgtttctacgacgagatttttcagcctccgggaactttctcctccggcggctctcttgcgtcttctaaatctcacggaagaaacttaccggcattcagaattccgtccggcggggaaggattttacgacggcgtgtttggtggtcgcggcggttctgcgaaggaaggatcgaaaaaacagagctcgatgacgaaaccaagatcgaattcatcgtcgatgctctcttccgaggaggccaggcctcactatcctccaccagcggcagcttccggcgacgactccggattctcttctttcacttctagacttaggtgagtgagatttaccattttaccctccaattcggttctactctcgaggacaattcagtaattttgacatgctcttgtttttttccctcttcagaccgttaaacgtcccgtcgagaagtcataaacgagagtcaaagaaacagagtttctcggcgg

SEQ ID NO: 141124 - DNA, 1462 bp, Arabidopsis thaliana landsberg; identical to SEQ ID NO: 63772

SEQ ID NO: 141125 - DNA, 897 bp, Arabidopsis thaliana landsberg
caatcgttcctgattatcttggtaattgtattgatcacttcaaatatctataactatttattcatttgtgtttaatttgattgtttttttttcctttagctaaattcatgggaattcctaaaatctctccgattctcctaaccacggcggatttttctcacggagctaatttcgccatcgccgacgctaccgttcttggctctcctccggagacggtcagttttattttttgccaacgctaatttctctgtagtaatttaaattcacttgctggatttcattttatggttcttactttgatgcttgcaacttgagaatcactacttgtagcaaattcaaaatttggaattgagtttgattttttgtggtctctaaatgcaaaatcgatgttatctagaaacaatctaaaacttgagaaaaaaaaacagaaaattctaaaacttgagattgcaaaagtatagtgttaggtcaaatcttgaaggagttttaggttaaaatagatctttgaatgatttttatacagatgactttgtcacaacaagtgaagaaattctcggaaaacaagaacaagtggacaaatcaaacacgttctgaagctatctacttgatctacattggttctgatgattacttgagctatgctaagagtaatccaagtccatcagataatcagaaacaagcttttgttgatcaagtcatcactaccataaaagcagaaataaaggttagaactcgcagcagctacatcatctaagctttgattagcagttttcaatattttttatttgttttcgtatatcgaatttcaggtggtttacgggtctggcggaaggaaattcgcattccagaacttggcaccgttaggttgcttaccggccgtgaaacaagcaagcggaa

SEQ ID NO: 141126 - DNA, 3358 bp, Arabidopsis thaliana landsberg
atggcggacgaatctcaatactcatcggatacttactccaacaaacgcaaatacgaagaaccaaccgctcctcctccatcaactcgcagacctaccggcttctcttctggtccgatcccatctgcttcagttgatcccaccgcacctaccggtcttccaccttcttcttacaacagcgttcctcctccgatggatgaaatccagattgctaaacaaaaagcacaagaaatcgctgctcgtcttcttaatagcgctgatgctaaacgtcctcgtgttgacaatggtgcttcttatgattatggtgacaacaaaggatttagctcatatccctctggttcgttctttaaaatctcttttaacttcttttgtttatggaatttagggtttggaattgaaaacttactgattgtgatttgatcttgatttagagggtaagcagatgtcagggacggttccgtcttcgataccggtttcgtatggtagctttcaaggaactactaagaagattgatattccgaatatgagagttggtgttatcattggtaaaggtggagagactattaagtatcttcagcttcagtctggagctaagattcaggttactagagatatggatgcagaccctaattgtgctactaggactgttgacctaactggtacccctgatcagatctcaaaggctgaacagttgatcactgacgtccttcaagaggtagtagtcttagtctttgttgctaatgatagtgaatttaggtgattgatgtagatttactaatggtgtgtatgattattttggtttaggctgaggcaggcaatacagctggttcaggtggaggaggcggccgtaggatgggtggacaagcaggggctgatcaatttgttatgaaaattccgaataacaaggtacttaatgctctggagattgaccaatttttggtaatatgtgtcttgtatgtaatatgtaaactgttctaggttggtttgataattggtaaaggaggtgaaacaatcaaatctatgcaagctaagactggagctagaattcaggtatgtgttcttgtcaattatgtttaggttctgtttgtctccagctggtaaaatgtttattcatcccgtggttatttgtctgcaggttattcctttacatttgccccctggagacccaacgccagaacggactttgcagattgatgggataaccgaacagattgaacatgctaaacaattagttaatgaaatcatcagtggcgaggtatgtttgattgttgtgtttgtttatagattatgacaggcttctgctgtatctatttttatacatgaatttgatattgtgttgtgattacattatttagttgtcattagctttaggtctatctagtatacgtcatactctattattcagataataggtgatgtaggttatactagtttcacttagtcaatatattagctgctaaaacctatatactcttcttatgccttcatttcctttgatatttgctccacgataattgcatctgcattggattgcattgttcttctcttccgcttatttgcaggggaaggttctttattttattttaaaccacgtgaagatattttttgtgattttcttaacttacaaaaaatattccatcttgatatatcttactttgttattgcattgtaagattatatgttgcttcttcttcctctgctcatgctcattttgttgccgctaccttcctacacgagtttcatgtttctgttactatcttattgtggcagtttttatgggcattcgcttatatctacttttcatctttttcaatatccaatttacagtgtgcttagcatgattcttcataactcccattgctaccaagaaatattcttagcatattcacttttcaaatgctattttcatagtagaaatcttgttgtctatttttggagtatatatgctttacatttctcatcgcttctggtcacagccaaggtggccaatcctacataggtttgggatgcctttgtgaggctgctgactagtttcagtccaacctgctgtgacagtgtttctaaactgttttatacaatactgtttttgttacattgtgttcatcatttcttgggtcaacataacttccgttcagctagtacttctagtttcaatcatcaaggtaccaccaaaggtgggcgactgacatttgaagacctattagccgttgtgttgtgtcaataatttgctaaccgagtaactgttattattctgccttggtactttccccaatttttcttaaatccgtttttctttaccttcaccattatattctggtaatatacttccatgagtattgacattgttgaacactagactctttagttggtattaggttattttgctgcacaaccctttgagaaaataggttccatgtgagtatatatgatgctcctgactgcaaaagcttctatagtattcgttggttttgcttgcacccatttatctcgaatagggaaagggatgggcttctgcaggagtaacccaataatttcaccaatcagtacggtatgtaggcatcaccattacccttctagaatatgatatgatcttggttgatccgatttggactgatattggtaaatagcgtatccttgtatgcatctcaatttagtctttgttatccgctttatttgtctctgcctctgtgttatatgtgtttatatgctgtgtcattgttttattttcctgttaaaaagtgacctaagctatttattctaacgatttggtttatgcagaaccgtatgagaaactcagcaatgggtggaggctatccacaacaaggtggttatcaagcccgcccaccctcaagctgggcaccacctggtggtccgccagcacaacctggttatggtggttacatgcaaccaggagcatatccaggtccacctcagtatggtcaatcaccttacggaagttaccctcaacaaacttcagctggttactatgatcagtcctctgtgccaccatcccagcagagcgcgcaaggtgagtatgattattacggtcagcaacagtctcagcaaccaagcagtggtggtagctcagctccaccaacagataccacagggtacaattactaccagcatgcttctggttatggccaagctggtcagggataccagcaagatgggtatggagcttacaatgcctcgcagcaatcgggatatggtcaagctgctgggtatgatcaacagggtggttacggcagcaccactaatccaagtcaagaggaagatgcatctcaagccgctccaccatcgtcagctcagtctggacaggctgggtatggtacaactggtcaacagccgcctgctcaag

SEQ ID NO: 141127 - DNA, 1108 bp, Arabidopsis thaliana landsberg
gtaacaattgcgtttaatcactttggagagaaattgatacaaaggatgccgaggtgtcgacgtggatacatccatgtggttaataacgattttactcaatgggaaatgtatgccattggcggtagcggtaacccgactattaacagtcagggtaaccgctacaccgccccaaccaacccgtttgccaaagaggtaactaaaccctccacatgttttctatagtcttggttcgttagtccattcttagactttgcttttggtttcatgatattttgtgctatacaactttattaaggatttgtgaaactttcattaataagtgtaatctttaaaacattcatcttactaatggagagtgtcattgtgtaggtgacaaagagagtggaaacaccggatggtgattggaaagggtggaattggagatcggagggggacattttggtgaatggagccttcttcgtggcatccggggaaggtgcggaaatgaggtatgagaaggcatatagcgtcgagcctaaatccgcctcattcatcacccaaatcacatttcactctggtgttcttggcgttggtggcaggtttggattctacattttgtcaataaatgattcactctttgccaaatttttccctttgaaaaagaacatttcattttttaacaaatcaatactttgaaacttttattttaccaacacaaaccatattaaaaaatggtatgtctacatacccttttgttttcttctacttttggctttaactttattctttttcttttgtctaacttctttttaccccactattttcataattaacctcaaaaagtcaaaatggagctaatttagggtgtttgatttggtacaggaataacaatctggggatgtggactactactggatcggaaggtactagcggtttagattcttataatgactataccgatgaaatgtctggcgctggttcaaccaaccggttatctttttcagttcttgttttcttgctaagttcgatatcatatttggtcgtgttcacttcttcaacccaaatgtttatgttgtaacatgaattgaatttacctattttatcaaggaacaagcaaaaagttgtttcc

SEQ ID NO: 141128 - DNA, 3286 bp, Arabidopsis thaliana landsberg
gtagaacttcttcgacgtttggaagtccaagtgatagtaaattcttgcttgaaagcaaaggttgtggtgttgttgggttctatggacggtgttttagtagtatttttgaccttggagcatattttcgtccgctgccgcctccttccaacacagagaaagtagaagcaaaaggtggtgatggtggagcctcttgggatgatggtggttttgacggcattagaaatatatacataggacacaacaagatgggtatcgcattcgtcaagtttctttacgataaggacagtcagatcgtggtcggagatgatcatggtagcaacacattactaagagttgacgaggtacttatttactttttcttatgagcacataacagcaaaatcttcatcatcaattcgtctaatttccattagcttctatgcttttcttgaaatggatggactgaaaaattatgattccatggtttgaaaaattatgcttccatggtttcacttcttttttggcatgggattaatagaaaaggtttaaatcctaggactgtaaacctaaaacgttttgaaccaaaaaaaaaaatattctgttcttgatcaactaatcattacttggaattttctgtctatgtagtttgagttggagcatccgggtgaatacttgatatctgtcgagggtagttatgatgtagtagatggaagtgagtctgaagttatacgcatgcttaggttcaagactaatttgcgaacctctcaactctttggacacgagacaacgccaagcttcatactcgagaaggaatgtcacaagatcgtcgggttccatggaaaaatcggtaagatgcttcatcaaattggggtcaatgttttaccgattacagattgagcatcttcgtatatatatgagtatatgacatccaatgaaacagtctcgagccagtactctactacgtattatttcttaatgctttatggcttgcattccccagtttcatgtaataagacagcgtttgcttttaaaactcagttctttaatattcaattctttagagaaaaaccaagtgtcattagctcaattggtaaagactctaggcgaaccttagaggtcgccggttcgagtgacgtttgggacgaaactaaatattacatgctgtggtttcgggcctgggagattacgggctttgacccagaacctcctagatttcaaaaaaaaattatgattttaaatcgaaattttgttcttcaaaggtaaaatagtttaaaaatctttgggtattaaaatcatttggaaatgagttacataatactatccggtatataaagaaccaaatccaaaaacaaaccggttcccttaataatttaaaccggattattcatcgacggttcgtcaacatcctaataatttaaacccgatctcttcttctctatcgaaaacctccaacttttttttgttttatcagattgtaaatttagggaagagactttcgcaagcaatctagaagcaaatcgatcgccaaatctccggattatttgcaagaatcgttcccagataatcttccccagattctccacttctccaggtacatcgttatattcaattttttaggaaaatagtcgcacactctctctttcttagaactaccactcctgtgctgttttgagattaaagcttgaattttgactaaagccgtaaattactttgtatcactatctgatcacaaagtcaatttcttttggaaatagctctgatcggagtgttgctcgaacaggtattaatttcgtattgagtggattagattagatttcaagatatgagagcctcactggcgttctaatgtcactgtttcgtatttttatcaatcagcttgaagaagacgacgaagatatggtaattttgactcctcttatgagtctgttctttgtgttatttgatacaacttgatgatgggtttttggaaaactttaatctttatgcacgttgtgtgacctagttttaatcgtggcttgtcgcaggctacttcgaagaaaatgatcacacgtgaagaatgggagaagaaactaaatgctgtgaagcttaggaaagaagatatgaatactttggtgatgaattttcttgtgactgaaggatatgttgaagctgctgagaaattccaaagggagtctggaaccaaacgtatcctttttctgattctggttttgagtttttgtttatggaattggtgtgtttgatgtttagcttatctactccttttgaacttccttatcgagaaacagcagagatagatcttgcgaccattactgatcgaatggctgttaaaaaggctgttcaaaacggaaatgtcgaggatgcgattgaaaaagttaatgatttgaatcctgaggtacaatgcttcttcatatcttgtgtggagagtagtcattcacttttctgatgtaataaagaagcaaaatctgattcttctttgaacccatgcttgcagatactagacacgaatccggagctcttttttcatcttcagcagcaaaggttgatagaattaattcgacaagggaagacagaagaggccttggagtttgctcaggaggaacttgcaccacgtggcgaagaaaacgtaagtctttgtatttcactttgatttctgtcgttaaagatggtgttttccatgtgtattgctcattgactgtgtgtaatatctgttgttgctgaaacttcattcatatagtctgttatatctctctgcagcaagcgtttctggaagaattggaaaaaactgtagccctacttgtttttgacgatgcctctacctgcccggttaaagagcttcttgatctttcccaccgtcttaagacagcaagtgaagtaaatgcagcgattcttacaagccagagccacgaaaaaggtagcttttgaattttgatgttatactggttgtcttttagtggccacaaaataccattataatctcgagcatcattcattatcaatcttaagattcaaagtatatgcaactcttctctacataacaagtaaaaattttcattcattacttcacccacaacatgtatcatccaagttcttcttgaaactttccattttcctccatggttaatgtagcaactcaatgtttgtgaacaaacagatcctaaacttccaagcttgttgaagatgttgatttgggctcaaaatcgactggacgagaaagcagtgtatccgcacattaatgatttgtctaccggtaagctcgaagacccgtcagaatgattccgtacttctttcagccattggaaatcagtag

SEQ ID NO: 141129 - DNA, 2460 bp, Arabidopsis thaliana landsberg; identical to SEQ ID NO: 7209

SEQ ID NO: 141130 - DNA, 437 bp, Arabidopsis thaliana landsberg
ggagaaatatcgagaacggaaagatttgagctttgaggagaaagtcattgcccttagttatactctacaagaatcatggaagtaaggaacgtaagtacaaaactaattaaccaactcacgtacgttcacacaaattttgtaacaatggaccacaaacgtagaactaaacaaaccattatgtaatcatgtaaccaacccatgtccataactttcttgtacaataagtcatagattcattggagcctaaaagtgtaggttatataagagataaacaataagaacttatgtctcccaaaaatctatatatttactcaaacgaaagattaagaacttacttctttttcctcttccactgctttgtttattcaacagaaatttgcgcagctagatcgtttcagatatggcgaaatcaactattgtgagtaagaaaatttggg

SEQ ID NO: 141131 - DNA, 516 bp, Arabidopsis thaliana landsberg; identical to SEQ ID NO: 53732

SEQ ID NO: 141132 - DNA, 1586 bp, Arabidopsis thaliana landsberg
cacttttctttctagattaatcaaatctttgaaaccagtttctcacttcgcctctctcttcagatccgtcctctgaagctctgtacgtctcttcaaatctctcttctcttatggtttctcgagattcttgtgttctgtttactcaattaccttggaaattaagctaaattttttgttagggtttgttttagaaatcgggtaaggcacatttgtgtttgatcttgttcctctgtctccaaaagcattgattcatacccagtttcgttaggttttgatgtttgaaccttaacatttttttgtttgaattttgaatttcaaaaagtatagatgaggtctggtttctaagttcccccactcagaaagtaatgatttttttggtacttttcctttgtttgtcttggtttagtaactttttgtcttttagggtttacaaaagattgaagctttatgttctcttcttttgattttccaacacttatctcttgttctgtgaagggttgcagagaacaatggggtttatctctaggaatgtgtttccggcatgcgagagtatgtgcatttgctgtcctgctctcaggtcgagatctcgtcagcctgtcaagcgttacaagaaattgctcggcgagatcttccctaaatcccctgtaagtgtctccttttagctcattccttaaagtttccacttttagcttgtaatttgttattatctttgcttctgagtaactatttcactgtaacaacttaaaatgccaacgtgagattgatttgtgaagttgaaaacatgcttcggtatatattaaacttattttcatgaattttctgtaggatggtggaccaaatgagagaaagattgtcaaattgtgtgagtatgctgcaaagaacccaatccgtatccctaaggtatagttttggttttttaatcttactagtaggtgaggagtagtcttgtgtgtgtaagttcagcatattgtgttgtatggctgttacagattgctaagtttcttgaagagaggtgttacaaggaccttcgatctgaacagatgaagttcatcaatattgtcactgaagcttacaacaaaatgctttgccactgcaaggatcagatgtaagatttataatatcataaattagcaatgcaaaatcatagcaacattattgcagtattaatttgatgattcttaacttctcactaacatttacatgttctcttatttaagggcttatttcgctacaagtttgctgaatgtggttacggaactacttgacaattcaaagcaggacacaccgaccattcttggatgccaaacactgacgaggttcatttacagccaggtaaaatgcatacctaagttggaggctttgactgatttaacaattaataaagtgcatggcttctacacatatgctagtccatgttgaaaatgtgaaatctctcactcttcatctgttatggacaggttgatggaacttatacacacagcattgaaaaatttgcgctcaaagtttgctcattggctcgtgaagaaggtgaggaacatcaaaaacagtgtctgagagcatctggcctgcaatgcctgtcagcgatg

SEQ ID NO: 141133 - DNA, 1432 bp, Arabidopsis thaliana landsberg
ctcactctcgatctcgacgcgaaatagctttctctcttccaaaggcaattatcgaaaacctgcaaaaagtttctccgccaagtctctccaaaacccctttctcatctctacttttcttcttcttcttcttcttcttctactgagctcgctcctcgctcctccgtctccgtcttcaacgtaatctcaaagtcggttgtttcaatcctgccatggccgaagggaagttcgatctgcctgacgatctcatcttttccaaatcttctgatcagctcaaaggtacttctctcaatcctcctcttgtttctctttttgaatttctttctctctcgaccgatttgaatgcgaagaaacaaatgtaatcgtttggattctggatctgaattcgataggatgcggcagctatgaatatcaaacagatttatcaaaatttgacctagtatgtgctgattaggagctcacgaatatcaattattatcctctatggtccttgttatgcccgctttagatgcattagcaactccatgtttgaattcttttgttaccgattctagactttgggatctggaaagatgaaccaatgactttgttcgtgcctctaatttggctattagtggttttctgactttgtatctgtttgatttctctgatttccttcacctattgactaccttgtttttgcagaattggcctcagataacagcattcccttgtctccgcagtggctttacacgaaatcaagcgagtacaagatggtaatacttaatctagaaagatgatatacgtttcttgtcttcttctattcacctcattgtatcagatgatgctatgcctgttcttcacatgtagaaagtgtcaagtcctttatttatctgtaaattgtttactcctagttcttcatctgatgttcttgctatgttgtaggatgttcgatctcctactcctgttcccatgggaaatccaagtgacccaaatccgaaggatgcatggcgcttggatgcacctgaagacaaaaaggactggaagaaaattgtgcctgagaatgaaactagtcgcagatggcgtgaagaggaaagagaaactggtttactcggtgctaggaaagttgatcgacgaaaaacagagcgtcgtattgacagtgtctcaagcagagaaactggtgacattaaaaatgctgctgcttctgataggtggaatgatgttaattctcgtgctgctgtacatgaaccccggcgcgacaacaaatggtcatctcggtggggtcctgatgacaaagagaaagaagctcgttgtgagaaggtagatattaacaaggacaaggaagagcctcagagtgaaagtcaatctgtggttagcaatgtccgtgcaacctctgaacgggactctgacactcgtgacaaatggaggccacgtcataggatggaatcccagtctg

SEQ ID NO: 141134 - DNA, 3585 bp, Arabidopsis thaliana landsberg
gtggagtaggagagattggagaggtcaaagccatagagctgcagtctccagttggtagtttagtgggtgaacaggtggtgaaagtcgggagaagctctggcttgactacaggaactgtgctggcttatgcactggagtacaatgacgagagaggagtctgcttcctcactgattttcttgttgtcggggagaaccatcgcagtccgtttgatcttgagggagacagcgcaagcctcatagtgatgaaaggagaggagaaggcaagacccattgggatcatatggggaggcactggaagccgcgggaggctgaaactgaaggtaggggagtgtccagagagctggaccactggtgtagatctgggaaggcttcttacacatctccagcttgatctcatcaccaccgatgaagggttaaaaggtaataattcactcagtttttcctttaggtgttcagacacttgagcatataaaagaacaagacttatacatgttgttgttgttgttgtacttgtttagcggcagtgcaagaacaaagagcggcctcaacaacggggatgagctcaatggttgcagactcatcacctccgtatgtgaatctcaagaaagagaagagaagcccagaagaaaagttagaggcatcattaggacctcttcaggtccaacatattgatcttgaagagagaatagaaacaaaaggaggtgctccaagtgtcgaacaccagttcatgcccaccttcagcggtcaatgttccgcttctgcttggcctgagactgctagagaggatcttgttgccggctttacaaatggtagctgcgatggggatttatgtgttggactacgtttaggagacgatggagctaaacgcagacgcactcaggtgaccaacgaaagaatgagacccgccgaatagataaaaatgctaaagaacttgaaagtttgtcttgctctttgccaacacttccattgagagctttggtttggatttgtctcatggcaatcgaacttgaacatagccaaatttagcctcagttggatgcggttaccattctcgtttattctgtttgtccaatcccatatctcagcatcattgtatcattgatgtccaaaaatgtacaagttatcaaagttgagataaaaattgttatgtaagaaataaaataatgcttgactggcttcatatagtttttgaaattgaagaacagagtcgcagattcatgaaagctttgattttttttttttaaaactctcctgacaaatcaaatcccacagagagagattggttaatcttttgcttttacttttgtcattctcctgcgcttaaatctggtgaagcatacttgtccgaaaggagacacctttctttggtctattaggcgacggtcaattttgattcctctttcatttcttgctgattcgcctctagggtttctgtcttacttatcgtctcgtgctcgaaagtttctgtctttttttccgggtatcttgcagcaaagagggttctgattctggtgtctgcaagtctgatgcaaattcttcaatttctctgtttgctgtgaaaatgattgatatgagttaggcgttacaagatttccttcctgagtgaatctccttgttgatgctacatcgctccctcagagattaccaatttgtctattggacaatcagactttgcagaagagtcacatgagttcttctgcttagatacgcttccatcttcaaaaatgttcaacctttaagcttgtgttccaattgcttattgttttaggtgttttttcggattttggtgtatagtttgatgatggcaggaaatggaatgcctacattgggtcgtgtcaaggtttgtgatttagttcccagagaaggtctaccttctgattcttacaagttagcggtgactacattgtctcaatctctggcacagtactctgcagccatcattcagtttcctgctagcgatggagccctccttagatccggtcttgattctgctcggctctattttcaccagagagattcatattcagccactaataatatgatccacacaaatgattcacaagaatggtgcaagacttctggctactatgcagatcctcagtcgtggcaagagagttacgagtatagacctggtttgactccgaccgagccaagcaattctatggagttccctcctgctggtttgcctgatatctttgctttactaggaaaagctgctcgtgtagttcttgatgccattggtttctatttgaacttgagaagctgtccatttactgagattcttgataatgtccctttgagaaattgtgaggtatcgtcttctgtgttatctgtttgctgttatgctaggccatcctttcatggagcacagcaccatagcttaacagaagacgagcagcttatcctgtattcagaccatgatcaccaacttgacaagagtctgatctcatttgtgaaatcagataaggcggggttgcacatcagggacatgcatgggcaatggattttagttgatgtggatcttggtcctcaagaggctgttgtgtacccggggctagctctttaccaggctacagcggggtatgtgagtcccgcagtgcacagaaccgatttgaacagtctgcaaggaagtatagaagggaggttctccttggccttcaaactcatgccaaaatcaatgaccaatctgagttgctcggagatgagagcaacaggtcatggtgttgaagctcagtttcagctcccccgttctgttgatgacttcatgcagagatctcactcaaatgatgaactttttaacagacagactttgcaaagcttcatcgtccctcaatcccaggatggtatagaagtttacttttatcagtgttaacgcctaatttccatctttgttctttcatagcatttagaaaggattcagattgaagaatatcggagttcatagttcaagtggtgttaacttactcagaagttttgattaacagtagatccttcctttggtgcaggatcaatgaaacagctgaaaaaacggaggaagagtgattctagatgcaaaccactaccaccttcaaaacggctgaggttagaagcacagagagttctcaaggaacgagttcaggagattgcagataaaaaaggaatcaaactaagattctgcaatctcaaggagtgcgagaataaccacaatgtaatgaacagcccttgtgctaatataagaagggagatcgggtggccgcacggagttccatttgttcatcctcacgacctacccaataaagcgaaaatcggtttccttgagacatatgagcctggatggtctgaaacacatgacatggagttcagtctgtctgaaaccgctcagggaaaccaacatgtgactaactgtaaccattcttcacccaataacactccttttcctttcgctgagacttgatcccgaggttaccagttcatttctttgattgcaggagatgcgaaaatgagtcttccagttttggtctcttggttgccttgactcttagtcaggtttcagtgtcagtggttgcacatgctgtgtatgatctatggaacagggagacaagatag

SEQ ID NO: 141135 - DNA, 1901 bp, Arabidopsis thaliana landsberg
tgatgtggatcttgtggtttgtcttcctccactgagaaatttagtaagcaaacccaaaatcattcctcgtgtgcattactcgttgaactggaagatctgatatataatacccgcctcaggaacctatcaaagaggcaggaattttggagggtcgcaatggtataaaggagacttgccttcaggtatggttagtggcgcaagtcatgttgcaactgttgaatgtctttgggcttggcagatcttgttcttaaaatctatatttcgttactcttgaaatgggtagtagtatacaatcaagattctgttcttaagttttacatttactttattttgatgatgaatacgtgcttgtatatttttgtattaggcgctagtctaattattccatatatggttctatttttcttaatatgtggttgctcaggtcatgttatatatgaggtaacgagaattgctttagtattgtgtaagcattgtaatatactaatttgaataatgcttgagccgacattcaactctacttctttttctttcttagaactgtttttatcctgttaagtaaataagagtcctatatctgacagttcacgtgctgcattttataactgaatccactttgctacatgtttttgctattcagcatgcagccaggtatctcgcgaatcaagagtgggtaaaaactgactccctgaagacagttgaaaacacagctgtaatgcgtcacttattgatgtttttctttatccacgattgctagtacttatcatgcttttgttgatatgatccctttatgcttgtgtagataccaattatcatgcttgttgtggaagtcccttgtgatctgatatgcagtatacagtcaccaaaagatggtccagactgtatcaccgttgaccaggatagcaatggtaacactgaaatggttggatttgaagactctgcagcagcaaactctttgccaacaaacactggaaacttggcaattgcaaaatctgtccgtcttgacatcagtttcaaaactccatcccatacgggtcttcaaaccacgcagctggtatttattttattctgttttccaaatccagatttcttttttccttacattatactctcttcgtgtgtatgtatctctgtaacctttttccttcttttggctcttgtttcctaaagtgttcttttctgcaggtcaaagatctgactgagcaatttccagctgccacaccacttgctctggtgttaaagcagtttttggctgatcgtaccctggatcaatcatactctggcggattaagctcttactgcctggtgaggtgtattcttttacttaagtaatatgttcttttcttttggattttaggcggcctgtctctgtatgtttaatgcatatcctggtaattggtacttgtcttatttaacactgcgacgttcttggacagaaatatctatccacactttttaatctaatccactgaaacatgttccaatatttgtttgtaaatcttagagtataattattgcaggtcttactgattacacgttttcttcagcatgagcatcatttggggcgctctatcaaccaagtacgtaattttcttgtttgcttattctttgtcacaggagctatcttgtttaggtttcctttttatattcattcaattactaattgaaaagaagtattttgcagaaccttggggggcttctaatggattttctttacttttttgggtcagtcaaaatggttactgataatttacagtgactggtatctctcacaagagggtcatatgacgataattggtaatgtgggcttgcttgttttgcagtaatgtgtttgatcctcgccagatgcgtgtatcagtgcaaggaagtggtatctataggaatcgggagaggggttatag

SEQ ID NO: 141136 - DNA, 559 bp, Arabidopsis thaliana landsberg
ctctctctcatcttttatttttcttttagaaaccaaacttttcagatttctctctctccatttggcgatagaagaagtcatgtaccaatcatcatcctccacgtcatcatcatcgcagagatcatcgcttcccggcggcggaggactgatccgttacggctcagctccgggatcgtttctaaactctgtggttgacgaagtcatcggaggaggctcatcaaacgctcgtgacttcaccggctatcaaccgtcgtcggataacttcatcggtaactttttcaccggagctgctgactcatcctcgctgagatccgattcgacgacttgtggagtcaacaactcatccgacggacagaaacagctaggcaataacaataataataatagtaataaagatatcttcctcgacagatcctacggtggattcaacgagatctcgcaacaacacaagagcaacgacatcggaggaggaaacagctcaggatcttactctctcgctagacaacgtagctctcccgccgatttcttcacctacctcgcctcagataaaaacagttag

SEQ ID NO: 141137 - DNA, 1476 bp, Arabidopsis thaliana landsberg
cgcgactcgtgagattgttgtaatcacagttcgggaaagacttaacatttaagatttacgggtttgtttgatcgattagtctcatctgggtttttctccaagttaaattctttgtttctgagatggatcaagcttcgtcttcttcgactatggaggaagacaagaagtcttccactgatcctgtgaatgtcgatgataacgaggagagagaagctatagagattgctctgttccaagtgcctgaatgctatgtttatttggtaacttttcttggcttatcatgagatgtgattttataatttttgatgagttttgtgtcttttatgctcaagttacatcctttctttgcaagttcacttggtgattttaggagatgttttggatctgataattagttataacgtaaattcaatctggtgttatagatttcttgcaatggtattgaggaagttgtcttaatttgcatatgttgaaaacttgacgttgagtcttgatcactcgaaattttgtttggatttgcaatggtgatcgattgcacatgtaactatcagcgaaaaatcttttcaaggagatttcgtatgatagattcaaggcttgtgataaaagagtacattaattttaaccaatatcatgctaagtgatatcttgatggggtctctctgaaatcatactagcttttgagatactcgtgaaattgttacatggtcattgtgttataggatgtatgagattccaaattggctaccttgatgaaatcatagacattgtgaactgttgttatttaggtttaactataaaattctcattcgtaatggacaacattggagcttgatgtatcaatgttattttatcgtttatgctttcttctgtgtctgttactttacggggatgctaggcaaagtaacctcttcattgtctttttgtttgtgtatgcagatacctccaaggaaaaccgcagcttcgtacaggttctttcttacctttatgatagaaacagtcattctgatatatgtagttaggagatttttacaaaaccccttttcccgataaacccttcggcttagcaaatgatcagaaactcggaacgaatcttattgaaccaatcgtgaagtatgtatgactatgaatggtagcttaaccttaatttgcatcaagatggtcattatctagttacattcgctttgtatcaactcaacttggcttctttggtaaaagatacttgaaaaagtgcatcaagtaatccattggaagatggagatagacatcagctgatactttttttgtataaattttatccttgcagagcagatgagtgggacgtgaacaaatgggcatgggaaggagctttgaaagtggtgagcaaaggagaagaatgcattataaaactagtagataaaaccacaggggaactttacgctcaggcatttctaagagagggggaacttcatcctgtagaagcagtaatcgacagtagca

SEQ ID NO: 141138 - DNA, 1719 bp, Arabidopsis thaliana landsberg
ggactgaagtatcggaccccaagagatcctgctaatactcatgccaaaaggtttcatgttcagcatcatactaactcctttcctgactttgtgcaatgttttggtttactaattctcttatattgccttgtaggtggagaatcacattgttggagctccatgtggtgttatggatcatatgacttcttcctgtggggaagccaataaactgttggccatgatctgccaagtaggtcttagtaacgcctaagctagaagcaaaacatcaccattcctgatatctcctttcttaacaagatttgatccactcatttctcttataaatgtttttaaaaaacatgtagcctgcagaagtagttgggcttgttgagattcccaaccatgtcagattttggggaattgattccggaattcgacacaggtaaacggtttcctcattctgttttcttctcaataggtatgcatataatgcttcacacaaaatattttaacgtcactagacataaattttctccttttactcaaaagattgcatattcacgtgagcatttctatctcatccctcaacgtatcatctcagttcggttgaataattagctttgtcttgcagcgttggaggtgcagactataggtcggtcagagttggcgcttacatggggagaaagatgatcaagtcaatggcgtcttctattctctcaccatcagcgtcaagtgctaatggaggcaacccggaagaactagaggatgaagggattgacctacttgaggccgaagcttcattagattacttgtgcaatttgtcgcctcacaggtgagaacacaagtcgaagtaaaagtgtttcgtaagtcacacaccagcaaaatatcagctaatcccgcctagctttggttatgttgcagatatgaagcccgttatgcagataagcttccagatatcatgctgggtcagacattcattgaggaatactcggatcatgatgatcctgtcacagtgattgatgaaaagcgttcttacagtgttaaagctcctgccagacaccctatatacgaaaacttcagggtcaaggtctgttttttaatccttttctggttggttaatatctatgcttaacgtataatcgagatgattgtgaagtacttctttttgtagacgtttaaagccctattgacttctgcaacatcagatgagcaacttactgctcttgggggacttctttatcaggtattatttcaaactactgtgagaccaagagttgttgagtttcttgatcatggatttaacatgttgctgatgctcttttactacacttgttttgttcagtgtcactatagttacagcgcatgcggactaggatcggatggaaccaacaggctggtgcagttagtacaagggatgcagcataacaagtctaattctgaggatggaacattgtatggagccaaaatcacaggcggtggatcaggtggaacagtctgcgtcgtaggccgtaactcattgcgcagcagccaacaaattctcgaggtatgtaaacacactcgagattccaagttagtaggaacttagttatatataaaagctctaatggtgtggtggtgaatgttcagattcagcagagatacaaagctgcgacagggtatttaccgctgatattcgaaggttcgtcacctggagctggcaagtttggttacctccggatccgacgtcgtatctctctctga

SEQ ID NO: 141139 - DNA, 351 bp, Arabidopsis thaliana landsberg; identical to SEQ ID NO: 78716

SEQ ID NO: 141140 - DNA, 1148 bp, Arabidopsis thaliana landsberg
  unsure (1)..(1148): unsure at all n locations
tcttgggcttataaaggcccaaattcagggaccaaaaacgacgccgaaacttgcatcatattcgaactcgaaggctccttttgatgcttcttcttcctcaaatctcactgtagggtttttaggggttttctctctctttgcaatcatggagtctctagggaagctacagcttcatcagcaaccaaatcacctctctttcactcatttctcttcatctttccccaaaaagccttcgtctttctctctcagatccttacccagatcaacatcatccttcaaattcatttcaatcaaagcttcctcatccaagtctcaagactcgaagctctcaatcctcaaatccacatgcgtcagcttcactgcggcagcagcacctgttccttgtgaatctccagctcaaaccttcaccggcgattgcggttcctgtggcggcgacgccgttaatggaatctctcaaacaaagtaacggaaacgtttcatttgaagaagaagagagatcactcgaagagtatcttgcttctcaccctgatgatgttgaagctctacgatctttaatggaggtaaggatcgaatctcgaaagcttctagaagctatagaattgattgataggttgattgaattggaaccagaggagaaggannnnnnnnnnnnnnnnnnnnatatctttagttacagtggagatttagagtctgctaaaactggttttgaagagattctagtcaaagatccgcttcgtgtcgaggcttatcacggtttagttatggcttattctgattctggtgatgatttgaatgctgtggagaagagaattgaggaggcaatggttaggtgcaagaaggagaaggatcgtaaggacttgagagattttaagctactagtggcgcaaattcgggttattgaagggaagcataatgaagcattgaagttgtatgaggagcttgtgaaggaagagccgagagatttcaggccgtatctatgtcaagggattatatacacagtgttgaagaaggagaatgaggcggagaaacagtttgagaagtttaggagacttgtcccgaagaatcatccttatagagagtattttatggataatatggttgcttcgaagctctttgccgagaaggtacagcgagagatggctgaatga

SEQ ID NO: 141141 - DNA, 966 bp, Arabidopsis thaliana landsberg
cccgcgaccatattaggtccattgctagccaggggagcttcaatgttcgtaaagaagttgaaaacgtaagtttacacatcttcatttttgtctttaccaatttcagctcgtaccaagaaaatcttccttaatattgcagttggtagtagcgtacatgacaccaaagctgataagtaaccttaaaccagagacgcaatcaaagcttatagataatctcaacgccttcaatcttgattggtttaagtccttcttaagactctctacttggaaagctgtcaccaaagccctcaaggtgacttaaaacatttcctttttagttttttggaactttttatatttagtaataataagtagcacatgttttctcaactaattgcttgttgtattcagtcacgcgaagaagctatccaggtgatgaaagacgttctcatgatgagaaaagagacgcgagagaagcaagaagacttccttaacacgcttctagaagaactggagaaagacggtagctttttcgaccaaggatcggctataaatctcatcttccttctggcgtttgccttgagagaaggtacctctagttgtactgctttggccgtgaagttcatatccaaagacccgaaagtgcttgcagagctcaaggtaatatataaagaaacatgtatatatggctatcgtctttaagaacaagtgtggatggatttgatagagtcatatatattgtggcacagcgtgagcataaggcaattgtagacaacagaaaagataaggaagctggagttagctgggaagaatatagacacaacatgactttcaccaacatggtagattaaatacccccatctatatatatacatatttgtatgagatatttacaagtggaagatatgacattaatctataggttagcaatgaggtgcttcgcctagcaaacacgacccctttgttgtttcgcaaagccggatgcaa

SEQ ID NO: 141142 - DNA, 1941 bp, Arabidopsis thaliana landsberg
attaattcccatccaatcatatggctgaagccggtgacgagaatctttacgccgccgccagagacatcgccagagctctcggcaaggatccaagtgccgccggagatatcttacagattctctccggttatggcgcttccggaaaccgcggcggagatcctcgacccaccccatcccgcggcggctcaaacgtcaactttgaccgagccctcacctctttagagagacagatctccagctacatcgtggaagatcgaccgatctggtctgatcccgttgactcgcgcaccttcctcgactctgttgatgagctacttgcgattgccggagacttgagatccatggccggagataaatccgtcgccgtctgtcaatcccgtgccgatgagctgattcaacaggtgatgtttaggcttcaagaagagtttggatttgtaatggaccgagcccctgactcgtttgactcggacgatgagttccccggcgaagaagacaacgacacaagcgacggggtaattaattcatctgtaaatttattactaaattagttttggaattagacttagaaaattcggtttactatcggttatattgtggttaagtgattcacaattgaataggtaatcgttgctcgtccaatcactgattacaaaatcgtgatcgaggcgttacaatctagcgttattggcgatctaaacgcgatcgctgtgcgcatggtcgctggtggatttgcaaaagagtgttcaagagtgtacagcagtcgactaagagagtttatagaggagagtttgtcgaggttacatctcagaggactaagtatggaggaagtgcaagagagtccatggcaagatcttgaagacgaaatcgaccgttggattaaagccgtaacgctgatattccacgttttcttcccgagcgagcgtcttctctgcgatcgcgttttctctgatcttcctgtttcctctgtaaccgatctttctttcatggaagtttgtcgcggaaccacaacacagcttctgaatttcgcagacgcgatcgctttaggaagccgtttacctgaacgtttgtttaaggttgtggatttatacgaagcgatgcaagaccttattcctaagatggaaacgctattttctgatcgatattgttcgccgctaaggcatgaggcgctcgcgattcataaacggttaggagaagcgattagagggatatttatggagctggagaatttaatccgacgtgaccctcccaaaacagcgtttcctggcggtgggattcacccgatcacgcggtacgtgatgaattatctgcgtgcggcgtgtaaatcgcggcaatcgttggagcagatacttgaccagacaggaaatgaaaccggatcagatacgagaccgttgtctgtgcaaatcatatgggttttggagttgttggagagtaacttggaaggcatgaaaagaacttatcgtgatccgtctttgtgtttcttgttcatgatgaacaatgacaagtatattcttgataaggctaaggataacgagctaggtttagtcctaggagaagattggattgtgaagcacgcagcgaaactgaggcaataccattctaattaccgaaggagctcatggaaccaagtggtgggattgcttaggaccgatggtccgtatcccaagttagtagagaacctaagattgttcaaatcacagttcatgaggtgtgtaaggtgcaatctcaatgggttgttagtgatgggcaattgagggaggagttaagaagctctgttgccggaattgtatctccggcgtactcgaatttcatcagaagattgaaggagtcaccggagattaatggaggcgtggagagccgtttattccgtatactgttgaagatgtggagtttataattaaacggttgttcaaggaaagctcaagttgattaaattagatatga

SEQ ID NO: 141143 - DNA, 1775 bp, Arabidopsis thaliana landsberg
atggatctgaacggtaccgtccttggaaacctcagcatcccaggggtttcgcacgaactcctgaagagaatggatctctttgagatacacatccttgacttcattaccatgaagattccgagaaaaccccaaaacgcagaagcaaattttccggctgcggagaaagaacgaaagaaagaagaaaacccccaaattagaacaattcgattagtaaaaacaaacaagccaacgagtaaaggaggcgccaaaagaaagaaaaaaaaacataccatgtaattggacaagctacgtgaaaggccatagtcggttttcaagttttacgctttcgggttcgatttttagggatctgacttcttttctttttttcctgaattttttgttaggtttctgaattaaatcactcgtcctttattgtgtaaataatataaacctagaggtccttaaacggaaatattatgttttatcggcccgatccgacccaaactgtatacaccaataataatataacacgtggagattcgatcttttttcttttatgaaaaacgacgtcgtattatattttgtttgccagaaagaaactgaagaactcttgactgtctctctgcggcgaaaaagagagcgaagcttgaaatctccgattaagccatgaatgctcccgaacgatatgagcgattcgtcgtccctgaaggcaccaagaagtaattgaagtttctatcactcgaaatcatactcgatagtcctcttacatgtgctaaaccctctcgatttctatgttctagggtttcttatgatagggatacgaagatcatcaatgctgcttccttcacggttgagagagaagaccatacgattggaaacattgtccgcatgtacgtctttttgttgattttgcaactcttttctcagaaagaagaaagccctaatttttgtcagctctgttctgaaatttttgttttaggcaacttcatcgcgacgagaatgtcttgtttgctggataccaacttcctcatcctcttaagtacaaaatcatagtgagggtaagttccaagtttttcagttgcttctactgtagagcctgttgctttgaattggaaagaacaatgctatcctctgcgtttttttcagttcattgattgaccttaggatccaaaagattggtttaggaacttaaaagtagtgtatggttgtttggaaaccgtgaatatttcttggtttaagcttctagtgttaacagtttcctctgggattactggttgcttaaggacttatagaaagatcttgtatgttgttgtttaattgtgaaagtggtttctgtatgtagattcacacaacaagccagtcttccccaatgcaagcatacaaccaggccatcaatgacttggacaaggagctcgactacttgaagaaccagtttgaggtacataagtttctctcttcggatatacttatctgattatgtggttaataagctagacgaatatcaaatgctattgatgttgtttgatgtacctggtcttatggtatacccttctgtgttttcaggcagaggtggccaagttttcgaatcagttttaaggaacttggagttctccatcagcacatcggggaaaacgttttacattgtcttttgctaagcaccaatcaagactaataatgagcttgggaaattttccctagttatgctttgtataaatcaaaaacaaatcggcctgtaacttcttttaactctatgtttcaacaccatttcaggatgctatgaagtaatgcttagatta

SEQ ID NO: 141144 - DNA, 687 bp, Arabidopsis thaliana landsberg
gtcctcttcttcgacttccagataaaatcgcttcctctgtttttttccgatctaaattcacagctcatcgaaaatgggctcacggcaaggaccaccgaagcatcagaacaaattcgcctgggttcccaaagccggcgtcaagatcaacgaaacggtaagctatttgctctgctatgagattaacgaaattgagtgagtagtgtagctagacccttgattttttcggaaatttatgaattgttaggaagtcggcgggagatttagaccattatccgagattaccggagtttgctaccgatgtcgagagcagatcgcctggaaacgcaaatacggcaaatacaaaaccctaactgaagccaccaaatggtatcgtttgatttgaatttagagtcttctttgtcattctctgttggattttgaaattgatttgttttgttgtgtgggtttttttttcttaaaagagcaacctttttgtttgtgggtgcagtcagaagtgtacaaagcgaaatgttcgtctagcataccataagttatgccctggttagtgttttctttctttgcttttgttctcgtactttcttggctaattagagtgtatagatcagtatcttgttttataaattgatgtgttatggtattgaaatgggtatgaaactgataacaggttgtgccaaggagcaaaaggtg

SEQ ID NO: 141145 - DNA, 476 bp, Arabidopsis thaliana landsberg
cacaaatatttatatcttcatttacataaaccaaaaaaataaagtcttacaggaatcaaagaactgtatatgaaatcaaatttaaaaagaaatgaaaattgaaacaatggagtaataaaaagaaaatgaagaaaaaactaagaatgtgattccattattttgtttactatatttagaaagtaattttccagatcttaaatcttggatcaaccttacacttagcggcggaagtcgtagccgtcgtcgccttctttcccgtcggagccaccactttaatcccttcacaagtaaccctaattcctgatttaggagtttttagagctcccatcttcactttcaccttcgagttcaaaacaatcttaatcgccactgctttcttcgccttcagatctcctttcagcttacccgccgagatctcatcgagttcatccggaggacttccgatcgtacttctaagcgtagtcgtgttcttcttc

SEQ ID NO: 141146 - DNA, 1681 bp, Arabidopsis thaliana landsberg
ctctcaaaatgttatccccgaccggtttaatagcttctcatgtaattgcttatccgccgtatccaccagcactatcgattacgaggtgaattttcgtattcacgtctatactagtgttgctggtctatcagtctgagtgataaaatggagaattgcgtataaatggctggttccaaggtctatgtatatataccatgatcatgtagttgttgtacattagttagagaaaaattgaatcgttttcatatatgatgcagttcacggatggtggcaaagaggtggaattaagattgaggttaaagacaggtgagatactttctccaaaggatatatctgttgacgcagatggaacatcgttagccgttaaagaaaagcggaatggattgctgattacactcctagagactaaccatctctttgagaagattatgccctctgaaacaatatggttagctacgtgtaaatcttgcattatatgacttgtttttgtgatgtgtgacatttccttgagggctgaagttttggttttgatccagaacaggtacatagacgaagatcagttggttgtgaatatgaagaaggtggatggggaattgaagtggcctgatattgtcgagtcctgggagtctttgactgcaggaatgatgcaacttcttaaaggtgcatcaatctacattgttggagattcaactgaaatcaaccaaaaagtgtctcgagagctagccgttggccttgggtatgaattcagattcttctcagtgggtgaattcagttcccgcctttcgttcatgagctcagtatgaatagtatttcagagtcttatacacttgttatgatctgcaggtacagtcctttagattcaaaggaattgctggaaagcttttccaagcaaacaatcgattcttgtaagtttgcttttggatcatggtcatcatctaacaagaatcttcctcacttctcaggacccttttgtttgtcttcattttagggattcttgcagaagggccggattctgtagctgaagcagagagttcggtattggaaagcttgagcaggtctatagtcatgtctagtgttcaatctctttccagttaccgagattagccactgatctccatgtctttgcagccatgtgcgtactgttgtctccaccatggtaggtaaacatgtagctgcggggagagctgatcagtgtagacatctttactccggattaaccgtttgggtatcacagactgaagccacaggtcaatttctctctccatccacttaaaatgaacccttctgtacagaaaacgagaatcactgcttatacattcaagattggttctgaatgtagatgaagagtcagctaaagaagaagcgaggagaagtaagcaaaaaagggagattgggtattcaaacgccgacgttgtggtgaagctccaaggttgggacccgacgcatgcaaagagcgtggctcaggcttccttgagtgcacttaagctactgatcatctcagacaagggacttccaggtaataaatagaagaaacccatttgtaaattgatgctttaatctgataaatgttttggagaattaaatgcgtcttttatgatattgaaggtaagaagagtttgtacatacgcttgggatgccgtggcgattggcccaatataaaaccgccgggatgggatccatc

SEQ ID NO: 141147 - DNA, 863 bp, Arabidopsis thaliana landsberg
  unsure (1)..(863): unsure at all n locations
cggatcgtcttttactttgtgaacgatggaccaacaaccggagaggcgagaaggccggagttttccggagcgtaaaggacagaagcggaagctagaggaaggagccgccgccgtagaagatcgagagatctctgccgtcagcaccgacggaggccaagcgcttcttagcgaggttgctgctcaagtctcggtactaaactctgccttctcttggcaagagtccgatcgcgctgctgccaagcgagccactcaagttctggctgagctagccaaaaacggtgaaaatcagcttccgatcttactcctttttctccggtttcttcatattttgttgcatgactagtgacctttgatgttcagcagaggatttagtgaacgtgattgtcgacggaggtgctgttccagctcttatgacgcatctacaggcgccaccatacaacgacggggacttggctgagaagccgtacgaacacgaagttgagaagggaagcgcttttgcgcttggtcttcttgctattaaggttgtgatcctcattttctctatgtcagctccttgtatagtgtgtttagcttgttagaaagtagtttccttttttgttttgttgatccaaatcaattttttttaaggcaaaattttggtaattgaactcttatacacggaggggattatgtattgtttgtgtgatcgtgttgtggaattgatttcttaacagccagagtatcagaaactgatagtagacaaaggtgccttacctcatttagtgaatttgttgaagagaaacanagatggttctagctctcgagctgtgaatagtgttatcagaagagcggctgatgccatcaccaatcttgctcatgagaac

SEQ ID NO: 141148 - DNA, 1385 bp, Arabidopsis thaliana landsberg; identical to SEQ ID NO: 7189

SEQ ID NO: 141149 - DNA, 662 bp, Arabidopsis thaliana landsberg
ccagttcccaccattagggctctctctaaattcctcagtctcgagaatcttcatcgtcttcacgagctcactcgaagatgttaacggcagatataccaccgaatcaatcaatctacatccaaaacctcaacgaaaggatcaagaaagagggtaaacttctcttctcgtttaatctaattcgtcaagtaaatttccaaattcttagatgttgaaacctccatgaacttcctgtaccaatgattcaagcttctacagtactgaatgttagggtttttgcttgtttttagcttatatagagtgttcgtttctaaatactagggtttcagaatcgtattgaatctagtgacaaggttataaggaagatatatatgttggtgttgtctgttttcgccattgtatggataattgttatagacgtgtgaagtagtgttggctcagggcagtatcatcaatctcatgctttatctgacttggtttttgttttctcagaattgaagagatctctttactgtttgttctctcagtttgggaggatacttgatgtggttgctttgaagactccgaagctccgaggacaagcttgggttacttttagtgaagtcactgctgctggtcatgctgttcgtcagatgcaaaattttcccttctatgataaaccaatg

SEQ ID NO: 141150 - DNA, 4325 bp, Arabidopsis thaliana landsberg
ttgcatatccatttgtccagtttgttgtggctccctctctgatcttattatcgctgtactaatccaatatgcaaattttgttctcaggtgcttctgaagagaatatcagagagctcttttctaaagcatataggactgcgccttcgattgtgtttatcgatgagattgatgcgattggttcaaagagagagaatcagcaaagagagatggagaagcggatagtaacacaattgttgacttgtatggatggacctggtaacaaaggcgataaaaatgctcctgattctagtgctggttttgttcttgtcattggagctacaaataggcctgatgctcttgatcctgctttgaggagaagtggacgatttgaaactgagatcgctctaactgctccagatgaagacgcaagggctgagatactctctgttgtagcccaaaaacttagattagaaggaccctttgacaagaaaagaatagctcgtttaacaccgggttttgttggagctgatttggagagtgttgcttacttggctggcaggaaagccattaagagaatcttggattcaaggaaatctgaacagtctggggacggtgaagacgataaatcttggctgaggatgccctggccagaagaagagttggaaaagctctttgtcaaaatgtctgatttcgaggtttgttaatggcaggggttatatggatctacttttctgttcttcaaaatttcctctttagttcctaacttctcttttatataccaggaagcagtgaatctagttcaggcatctttaacaagagaaggattctctatcgtgcctgatgtcaagtgggatgatgttggtggacttgaccatctacgacttcaattcaaccgttatatagtgaggcctatcaaaaagcctgatatttataaggtactaaaaatcacatggcatcgttatatagtcaagattacttgcttgttctattgaggtctgaactgtctctttggatctttttaggcttttggggtagacttagagacagggtttttgctctatggaccaccgggttgtggcaagacattgattgcaaaggcagctgctaacgaggctggagctaatttcatgcacatcaaggtttgactttcacgtcagattttatgaatgttgctttgtatttgaatggtccaaaataatgtgattttctctcttctatcgttgggctttcagggtgccgaacttctaaataaatacgttggagaaagtgagcttgctattcgtacgttgtttcagcgagctcggacatgtgcaccatgtgtaatcttctttgatgaggttcgttattaacattttgaactatatgacgaaaataagaccgatgtctatatatgcagacaataagatatgagattgagcaaacaaagtagatccatgtttgggttgatgcagcagtaagagctgtccgattcttgtccatgagtaatgtttttgaatttcaggtggatgctttgacaacaagtcgtggcaaagaaggtgcttgggttgttgaacggcttttgaaccaggtaataaacgcttattgaatggtgtagctgcacaatttagtcaggcattgatcaaatgcatttcgatgttccagtttcttgttgagctggatggtggagagaggcgtaatgtatacgtaattggagctacaaacaggccagatgtaattgatcctgcgttcttgagacccggtaggtttgggaatcttctatatgtagccctacctaacgcggaagaacgtgcttcaattctaaaagctattgcaaggaagaagcccatagatcctagtgttgatcttgatagcattgcaaagatgaattgtgaaggtttcagcggagctgatctcgctcacttggtgcaaaaagctacattccaggcagtggaggagatcaccacaatttcatgtgaagatgattacgatattacagatacaagtcagtgtacgattaagatgactcatttcgagcaagcattgtccttagtctcaccttctgtgaacaaacagcaaagaagacactatgaggaactatcaaaaaagctccaagaaagcattggaaggaaaccatagggtcattctttttgccttgcactaaaacctctcttacttaaattatgtctgcaaattcccattcttctgagtacttgtaacaattatattattgagataattatattattgagataagataaatacgaaagaaggttttgttactcttttttgggggacattttgtaaagcagataatggtagaaagaaaaagaataatgcaaaaactacgtcgtttagtttaaattataagacacgtggtcttctctttcgtcgtctccattatttacaggagtgcgataatattctttgaagcttcaacattgttgcgaagaccagactctcagactcagactcgggaggtattggattctatctgatctgctcgatttttcctctattttcttgctctctacattatagctgatcgatttctcatcttgttgttgttgtccctgcttaattggtagatctctagggggtttaagctctgaatttgatttacgttctgagtttttgataatctgatcgaacctggaaatcatagtattagattctacagaaatcaagttcgatcgttaatgaagagattctgtagtctttcaaggtcgaattatagaaggatttttattgatttgtgagaatttctttcactggaataaacacttgctttaggattctttaatggaagcatcatatgaagatcttcacatttgtagttttttttttttagtctctgattcatagtttccatttgcagctcctttaagcgatttctttctttgttttttgaggcttgcattgttattatcacgcagtgatttcacttcaactttctgctcagatggcagtccactactggacagccctgtttctattgctgtcatgccttttctgtatttcaaatgctagtgctggcgatgctgatccagattacaggtaatttagaattaaggttttagatagaacgttggttctttgagtatctatcgtgaacttggtttagttgtagcttctatgtaagcaacatttttgattcgtggagattatgaatgtctggcaattttgtatcaggacatgtgtttcagaatgtgagataagcggttgtgttggaccactttgctttcctcagtgcaattcttcatccgatggtggtccatggtacatccaagaacctctgtatttacaatggaaaatatggggttgtcaaggtgattgccgttatcaatgtatggttaatagagagagtgaacgggaaactctcggtcaagccccagtcaagtaccatggtaaatggcccttcaagcgtgtacttgggattcaggttagtttttttcttcaatcactttttttttattctggttgtttccatataatatgagtttcgacttaccttgttctttgccaggagcctgcttctgttgctttctctgtactcaacctagcaatgcatttccatggttggctttcctttttcatcatgatctactataagttacctctgaaacaagataggacagcgtactatgaatacgtcggtttgtggcatatctacggtctcctgtccatgaactcttggttctggagtgctgttttccacagccggtaaatcatctacacattactctattatccacaatctgcatcatatattcatatgtgattttctggtaatccgtctctgtggttctcagggatgttgaccttacagagaggttggactactcatccgcagtagcgattctcggattctcactcatcttagccattttacgaacatttgttattcttttcgaggctgcaagggtcatggtatccgctccaatactagcttttgtaaccacccacatactctacataaacttttacaaactcgctatggtacccccaataacttgctgctgtctaaaaatcgagtcaatatttttggtgaattcatcagttgaatgtcgtttacaggctggaacatgattgtgtgtgtggcaatgggagtctcacagcttttcctatgggcaagatgggccgctgtctcaagccacccttctaattggaaactttgggtggttgtgatagctggaggattagccatgcttctagagatatatgattttcctccatatgaaggctacttcgatgctcactcgatctggcacgctgccacaattcccttaaccattctctggtggagcttcattagagacgatgctgagttcagaacttccagcctcctcaagaaaactaagacgaaggca

SEQ ID NO: 141151 - DNA, 1151 bp, Arabidopsis thaliana landsberg
cagacaaaaaaaagctgcggagctagcgacttcgcttctctctttctctcaaatctcttatccgtttgattttttctgtgtcgcaatctcttcttcttattaattcattcaaaacagaaaagtacgggaaaaaggaattgagacggtgggtttcgatggggtcaggtgcatcgaagaatactgaggaagatgacgatggttccaatggcggaggtggtcagctctacgtttcactcaaaatggaaaactctaaggttgaaggagagctcactcctcatgtctatggctctcttcctctcatcggttcctgggatccttccaaagctgtgagcatctgtttgatttttgttttatcttcttcgtctttccttccgattcattcatcgggaattttgattgcgtttctccgtcgtcttgttgtcaatcaattcttctttaacagcttccgatgcaacgtgaatctgcgttaatgtcggagctaagcttcgttgttcctcctgatcacggtattactcagtttggagaacttgtttagcatatttcgtcgaaatccaatgttataatcgcagagtgatttctgtgaattacaatctaagcttctgcatcgccctttttttggtgtgtagagactttggatttcaagtttttgttgaagccaaagaacagaaatacgccctgcatagtggaggagggtgaaaataggcttcttactggtggttcgttgcaaggagatgctagattagctctgtttaggctggaaggtgatgtgattgttgaattccgagtcttcatcaacgctgacagagtttctccaattgatcttgctactagttggagagcttatagggagaacctccagccttctactgtacgtggaattcctgatgtcagcattaatcctgatccaaaatctgctgaggtactttgttcttctacttttttgtttctaccgccattctatctatctgtgatgtattagttatgtgaactaaaacaacaggaatgattttctatgcctccaatttcaaagttttgactgcaacttccatatcaatatagaattcccatggggagaaataaatcttatggactttgatgtctcatagcagtgtcctttagaaagtttggagctcgatcttgcacattatgaa

SEQ ID NO: 141152 - DNA, 960 bp, Arabidopsis thaliana landsberg
gatgcacggtaaggtccatggaccgaggaagaagatgcaatcctagtcaacttcgtctctatccatggcgatgctcgttggaaccacatcgctcgttcctctggtatcatcaaaacatcaatctctaaatatacatatacacaaaggctttatatatagataaacttatatatattttactcatatatgtgcagggctaaagcgaactggtaagagttgtagattaagatggcttaattacttacgtccagatgttagaagaggcaacatcactctcgaagaacaatttatgatcctcaaactccattctctttggggcaataggtacacactatatatctcaaatgttaatattttgctattctatatgttactagttaagtatgttattaatatatgtcttttttttcaattgaatatataaggtggtcgaagattgcgcaatatctaccgggaagaacagataatgaaataaagaattattggagaactcgagtccaaaagcaagccaaacacctaagatgcgatgttaacagtaatcttttcaaggagactatgagaaatgtttggatgccgagattagtggaacgaatcaacgcccaatcattacccaccacgtgtgaacaagtggagtcaatgatcaccgacccaagtcaaccagttaacgaaccgagtccggtcgagccgggtttcgttcaattcagccagaatcatcatcagcaattcgtaccggctacggaattgtcagcaacgtcttcgaattctccggctgagacgttttcggacgttcgaggtggggtggtgaacgggtcaggttatgatccgtcgggtcaaacgggtttcggagagttcaacgattggggctgtgttggtggggacaacatgtggactgacgaggagagtttttggttcttgcaggaccagttctgccccgatacgacatcgtattcgtataattaa

SEQ ID NO: 141153 - DNA, 938 bp, Arabidopsis thaliana landsberg
aacaatgataatgagaagcgcgtcttcactggaccttaacctacgcgccgcccagaaaccgtctgttccaagggtggtaaccacggctcgaaccgtctctgctgcttctcctcgtgttgctaaaccgattacaagagcttcttcagatggaaacctctacaagattcagtcgccggagagcataacgaaaaccatcagcgtatatcacgaagaaacggcgtctttgagggttttggaaggatctcgactcccccaaggaggttccaacggtggatttggtggtagaggcggagatggtgccggaggtggcggtggaggtggaggtgggagcgtagatggttattacgaagagatgatccaacgttatcccggagacactctccttctctctaactacgctcgtttcctcaaagaggtttgttttaatctcctctgtttttcaagataagggtttttaattatacttgctaatttgggaaacttttattttactcttttgacaaaacccacgtgatactttatatagagacaaactcagacaagttaaaactaagtacgtattattgctattaaagaagtcgagctttgttcttgattttaggtttttgattggttgaatctactaattcatgtattaacattttggaaacgtaaatttatagatttcatccattaacagtttttcagaagaagttaatgtgtataaaaaaaaaaggacattgaggagatattattaaatttaacatgtcttaatttgtgaaggtgaaaggagatgggagaaaagcggaggagtactgtgagagagcgatgttgtctgagagtggaagagatggagagttactgtctatgtatggagatttgatatggaaaaatcatggagacggtgttcgtgctcagtcttactatgatcaagctgttcaatcttctcctgatgactg

SEQ ID NO: 141154 - DNA, 2117 bp, Arabidopsis thaliana landsberg
atggtgagtggtggatgttgcggtggcggagatggagatggagagttcgatgaccatcggtttgtggtggaaagagacgggagtttgaccaaagaggaagccaagactgcgtcgttaaaagaatacgaagagacgagaataagtgcgagagtggaagcagagagagtttggttagagttgtatcagattgggcatcttggctttggtagagtctccttcactggcattcatcaatgataatagatgaacttttaattattaggcgtatatgattaccaaaactaaaaatagattttgtgaaattctttagtgcagcaagtaagattccacaagtaagcatagaaaaaaaaaaaaaagattacacaagtattaatttatagaggttttagtgcaacatgtaactcataaggattaaggaaacaaaaagtatttgtgaaataagagagtacattatattatagaaatgggctaatatacatttgggcccttgttaaagggctttcacatgaaccgcattaaagggtagtttaggacatttacgatagaacttggtaggcgtagctagctgtcctgtaacagaaaaaacctgcgcattttagcatgcttatgaaattcatttgctaaaagacgcatagacacgtcgtgggcgaagggttctttgtcttcttcccccaactgagcaagattgttttccttaagagcttcatcgtcatcatccgagaattggagcagagatacgaagatttggcgaaaaatggggagcgagccaacaaaagtgatggtggcggtgaacgcttcgacgatcaaagactatcctaacccttcgattagctgcaaaagagcattcgaatggactctggagaagatcgtaaggtccaacacttccgatttcaagattctcttgctccacgtacaagtcgtcgacgaagacggttcttctctctccttaaatatttatttatctttgaatatgttcgtgcgtatgtctgtttgtgggaaatcatgatcttagttttggacgatgatgtcgtatatatagatcggtctgcatatgtctctgagttttgaccgagaaggatcgtctgtgcttttttgttactagtagtgtcggttggtcgttgagattatctcttctggacaaacttttgttcggattttgatgttacatttaaagaggatgtgttagcttgtattggacttttctcggttatatgtttagaagaggagatgactctttcgtgatatttgttttgttctgtttctcgctttgagtcagaacaatgtgttttgcttagtttctctcttgtggtgttattaaggcctgttttgtttgtgacttggaaaccaggttttgatgacgtggatagcatttatgcttcccctgaggatttccgagacatgagacaatctaacaaggcaaaaggtcttcaccttctcgagtttttcgttaataaatgtcatgagattggggtaaacacactctctctgtatctcatagcaactactgtaactttgtgatgttttatgataaatttagctgtgcaaaacttgtaggttggttgcgaggcctggattaagacaggtgatcccaaggatgtcatatgccaagaagtgaagcgagttcgaccagattttctggtcgtgggaagtcgtggacttggccggtttcaaaagtgcgtataatactcaaacacattcatgacttattagtcattactttacccctatatatcatcaactagttattagactgaatgatgaatagcaatcagactttaactgctataaaggattacagataggtaggattcttgatcttgacacaagtttgagttaaataaatttagttcaagacggggcaggaacagagccaaacaaaggaattgtcattctaagttatacaagcattgagccaggcataacttgaaactatagagtctaagttactactattgctgttgttttgaatcgtgatgggttttgttataacatgggtttgcatttgcagggtctttgtggggactgtgagtgcgttctgtgtgaaacatgcggagtgtccagttatgacgatcaaacgcaatgccgatgaaactcccagtgatccagctgatgactaa

SEQ ID NO: 141155 - DNA, 950 bp, Arabidopsis thaliana landsberg
atgaggtttgaggaatttaagagatcaactatcttatctcctgtgtcagaacttgccgatctttttctgcaacaaggtgatatccatgcaaccctctatactggctcgaaagctatgcacagccaaattctcaacatcttcagtgaagaatcaggagcatttaaacagttttctgcagcacagaaaaacatgaagattacactacagagaagatataaaaatgctatggttgatagttcacggcaaaaacagctcgagatgtttctgggaatgaggcttttcaagcatcttccatcaattcctgtccagcctttacatgtaagcacattgacacgattccagtaaaaatttcccagctctcagctctccttttttccatgtatattaactgctctaaagtatgaatcacgtttttttgcgtgtatgtagattttgtttcatattggaccgatactctttgtttattgtgtgtagatatataattcctaagagcataacagattcgttgatttgtagactctactatttgttgctttctatattctctgtctacttctcactgcaaaaatattcatgtcaggtactttctcgaccatctggtttctttctgaaacctgtacctaacatgtccgaaagttccaatgatgggtccagtctgctgagtatcaagaggaaggacataacttgggtacctcaacttagatataagattacctcttagttctcattacttgaatacttgagctaaaaaaattccatgctttttcttacttttgcagctatgtccacaagctgcagatattgttgaattatttatctatctcagtgagccttgccatgtatgtcaacttctactgaccatatcacacggtgcggatgatttgacatgtccatccactgtggacgtgagaactggacgccacatagaggaccttaaattagttgttgag

SEQ ID NO: 141156 - DNA, 4123 bp, Arabidopsis thaliana landsberg
caattatatagctttccatttctgtggctttgtaatctgatcggaaatcgaaaacaaacaattttattttcttaaaaaaacaagatcgtggaggagagatggatgatcggcacgaaggagaccatcatgatatagaggttgaaggaggagctttacatggtttcgagaggaagatatctgggattctagacgatggatctgtcggatttcgacagcctcttctcgctaggaatcgaaagaacacaacttctcagatcgctattgtcggagctaatacttgtcccatcgaaagccttgattacgagtctgtcctttttctccctcttctcttttcttctgcacataacttgatgtttcattcttttttctggataaagtttttaactttggcaattagactttaatatgcttaaatgttttcgattagtttttaaacttcatctcaaatttgattatgagtctatgaagttttggattatgtaacattttgggtcccatcccatgtataatttttaaatcataatgttttcatttttaatacttttgggtaaaaattgaagcttttagcttttgagagacatcatagccacttcacctagcaataggtatgctatacaatctattagattgagaaaagtgcaaatctttttggggtctttatgatgatgcaatcatagtttcagactgaatttgactttttgtctttgtgtgtgtctcctactggtgtcttgcctaatttggtgtgaatgattatagcttatgtaaacatatcaggatcttgacttgggatttttatttggcaggatcttcgagaatgattttttcaagcaagactggaggtctaggaagaagattgagatacttcagtatacgtttctcaaatgggcgcttgcttttcttattggtttagctactggacttgttggctttttgaataaccttggtgttgagaatatagctggatttaaactcttgctcatcggtaatctcatgctcaaggaaaagtaagtctagcttttgttgtttatctctgcttctacgccattttttagcactttctatcctgtttcagttactgtttattcactgattatatctaaatttcttaatggttaatactgttatgagaattaaggctcacagggatatatgtgtggatcagaatgataaatgacatcggatgtttctcaaatactgcagatatttccaggcattttttgcatttgctggttgtaacttaattttggcaactgctgctgcttcactctgtgcttttattgctcctgcggcggcaggatctggcatacctgaggttaaagcatatctcaatggtatagatgcttattcaatattagctccaagcaccctctttgttaaggtaagatccccaaacaactttccaagcagtctttgttcatcctgaatttagcattgatgtctttgttcatctctgtggccttttctgatacgaaatatttcgtattggtagatctttggctctatatttggagttgctgccggatttgtagttggaaaagaagggcctatggttcatactggtgcttgcattgctaatttacttggacaaggtggttccaaaaagtaccggttgacttggaagtggctcagattcttcaaaaacgatagagacagaagagacctgatcacttgcggggctgctgctggtgtagcagctgccttccgtgctccagttggaggagtgcttttcgcccttgaagaagctgcttcatggtattttctgtttctctctaactccttataactaatccaaggagtgataccttatgcaagtctagtcattgtagtagacagactctgaaaggggaagcttctccccagctagaagtcttaatgcaaaagtgcaagaaggtcaccatgtttgtctagttgaaaacataatgtatccaacatgacttctttatgcaaatggaagttagtgagcgaggaaatctaagtgatacatagtgtagagtttagacggtttgcgtatattgctatatccatttggaaaagattatgtctcacttttttaatatcgttaggtggaggaatgcccttctctggaggacgttcttcactaccgcagttgtagcagtggtcttacgaagtttgattgagttctgtcgctctgggagatgtggactgtttgggaaaggaggtctcatcatgtttgatgtaaactcgggaccagtgctatatagcactccagatttgctagcaatagtattccttggagttattggtggtgtgcttggaagcctttacaactaccttgtggacaaagtcctccgcacatatagcattataaacgagtacgtcatttcacaacaagttaactctttcataaagtcattttccaacgagttactctttcataatatcatttctttgcctcttttcgattttcttaatttgttctttccataacttgcaggaaaggtccgagatttaaaattatgcttgtaatggcagtttccattttgagctcgtgttgcgcatttggtctcccatggctttcacagtgtactccatgtcctattggcatagaggagggaaagtgcccaagtgtaggtcgatccagcatctataagagtttccagtgtcctccaaaccattacaatgacctttcctccctacttctcaacaccaatgatgatgcaatccgtaatcttttcacatccagatctgaaaatgaattccatatctctacccttgccatcttctttgtcgcagtgtactgccttggcatcataacatacggcatagccataccctctgggcttttcattcctgtcattcttgctggagcctcttatggacgactagtgggtagactgctgggtccagtatctcagcttgatgtaggtctgttttctctgctcggagctgcttccttccttggaggcacaatgagaatgacggtctctctatgtgttatactgctcgaacttacaaataatctcctaatgctgccactggtgatgcttgtactccttatatcaaaaacggttgcagattgtttcaacaggggggtctatgaccagattgtaacaatgaaaggactgccttacatggaagaccatgcagagccgtacatgcgcaatttggttgcaaaggacgtagtttctggagctttgatatccttttcgagagttgaaaaggttggggtaatatggcaggctttaaaaatgacaagacataatggtttccctgtaattgatgagccacctttcacagaagcttctgagctatgtgggattgccttgagatctcatctccttgtgcttctccaagggaagagattctcgaagcagagaacaacttttggttcacaaattctgagaagttgcaaagcccgtgactttggtaaagcagggttaggtaaggggctcaagattgaagatttggatctaagtgaggaggagatggagatgtatgttgatctccatcccatcactaacacatctccttacactgtgcttgagactctgtctctagctaaggcggctattcttttccggcaacttggtcttcgccacttgtgtgtggtgcctaaaacaccaggggtcagtctctttctcgctctctcttcctctcgctagacttgtttatgtttctaacgcgtatgttttcgtattgcagagaccgcctattgttggaatactgacaaggcatgatttcatgccggaacatgtcctgggactctaccctcacattgatcccctcaagtgaataaggttagccgtttagtcttcgttgttgcctgcatttggttgctctaattgttttctaaatccaattggcacttgttcttgcaggtaataaagaatggagaaacaagtacgtgagagttctctaaagatctacaatgtaataatatgtgaatatcaaaaaattaaaagcccagatgaccaatgtcacttaggcatttatttcaattattcgttgagattgattatggaaaagcaggggaaggatgattgtgtaatgaggtgatacaagtttttttttttttgggttttggttttcacaacatttattcaaaacaataaataaaaactaaacatgtaattatattataagtcgatatcaattttgctct

SEQ ID NO: 141157 - DNA, 1134 bp, Arabidopsis thaliana landsberg; identical to SEQ ID NO: 58738

SEQ ID NO: 141158 - DNA, 1234 bp, Arabidopsis thaliana landsberg
ctgataaagtatcaagtcgggtagtgatacggttttgcatatatattcttttacgtgattgaaaagtcgtttgaccttctttctaagccttctctcattatttgcttctgtttcttactgtatcgtcattttgcaacagcaactgaagctagtgatggattcaattatctgggcatttagacatactgagagaaatattgctgaaaccgggcttaatcttttgcttgagatgctgaaaaactttcaggtttggtgtttattttccttcttttagctcagtggttgtggcatatattacgcttgctctaacactttactctgattgtgacagcaatctgaattttgtaatcaattctaccggtcatactttatgcaaatcgagcaagaaatatttgccgttttgaccgataccttccataagcctggcttcaagctacatgtgttggtgctgcagcaactgttttgcctggtaaaaccatctcttctcttgttgtttcttatttgatagcttaagtaatcatttacttgggaatgggtagttctatgcacttagccgtttgataattatatatttcagcctgagagcggtgctttgacagaacccttgtgggatgctacaaccgttccttacccgtatccggacaacgttgcatttgttcgcgaatacaccattaagctactgagctcttcattccccaacatgactgcagcagaggtaataaaaactaaaaccagaagtttcactttcacagttttcatgttggttttttacttcgtatcctgatatattgatatcaacaaataatacaggtcacacaatttgtgaatggactatacgagtctagaaatgacccgtctggatttaagaataacattcgtgacttccttgtacagtctaaggagttttccgctcaggtacttaacctgtctttcgcaaaagccattcaaattggttttaagaactcaaaaccaaatagccgaagccaatttgttgaatacttatttttcaggataacaaagatctctatgctgaggaagcagctgcacagagagagagagaacgtcaaagaatgctttcaattcctgggcttattgctcctaatgagattcaagacgagatggtggactcataaaattaagaagggtgcaacaagaagacgctttctgtgttcaatgggctggattctttgtaatcatagggtttttgaaacaggaaagagttcaggagagatta

SEQ ID NO: 141159 - DNA, 2045 bp, Arabidopsis thaliana landsberg
ccgatcgagttgatgaagtcttctctagaaagcttgatttgtctgtctcttcttcgtcttcttcgagcctcctccagcagttcaataagactcatgaaggttctgatttgtcacgagcttaaatttttgttttttttcgatgtctcttctttgtgtaatcgcatcttcacagctgatccttgtggaagttagtttccatctgttttactaagaacactaggttgtgcgatctaattttccttttctaggtataattgttatgttacaattcaaagatcattagatttggtgaaatcaaacttgctactaactgctacttgacttttgggaattctacttttgggcgagcaaagtttttagctttgttatttggtttgttcgttttaggataaaaaaagctaacttcttttgggagaatgtgactggtaatgattgtgctgatgtttactgtaagcgtttcgtgcaggtgatgatgacgcacgcctagctcttgctcatcagctatacaaaggaggcgatttcaaacaagccctggagcacagcaacatggtttaccagagaaacccattacgcactgataatcttcttctaattggtgctatttattaccaggtactatttttctccttatctcattagtcattactctatcctcttgttttcggttaattagttgtttacttgtatggtatataccgtgcagcttcaagagtatgatatgtgcatagctcgaaatgaagaagctcttcgtattcaacctcagtttgctgagtgttatggaaacatggcaaacgcgtggaaggtgaatggcttggtctttgtctgatcaggtggttttattgccaatacatatattcttatatctgtaatctgctatttccaggaaaaaggggacactgatcgtgcaatccgctactatttaattgcaattgaggttgtgctatatccaatttatgcttctcgatatctgctattcacttctcatcctatactgatgcttttacctttcttcatttccccttgcttacactttcttttcaatataattcttcagctgaggcccaattttgctgatgcttggtcgaacttggcaagtgcatacatgcgaaagggaagactcagtgaggcaacacaatgctgtcagcaggccctctcattgaatccacttctggtaattgactttatgatccttctttttaagttttctgtctcactactgctgggagattcactgtctatcttcttttgttagtcttctcacctggtaatgtaaactgttcttaggttgacgcacatagtaatctggggaatctgatgaaggctcaaggattgattcatgaagtaagtctttcgaattagtctatttaagttattctgttcctgttccaacccgattatctgcaattttcttgtgtcctagttatggatgcggcccctaattctacaattgattgatcaaagttttgtcattgcagaagaacttttaattgaaccaaaatatattataattaaatggacggtgacgtgatgcactaggaatatagcatcacatctgtagtcattttactggtttatcaactgcaattactaatagatgcattcatttttctgtgttgtactgtgtcataatccacaatcaatacagacatcaagttgttactgaaaggcaagcagggatgatcgtcagtcttatagtcagtgtctactgccagagtccaaatagttagaatgtaatattttgtgcaggcatacagttgttaccttgaagctgttcgtatacaaccaacatttgctattgcatggtcgaatcttgctggtcttttcatggagtcaggtgatctcaacagagcccttcaatactacaaggtatgcttcattctctcctagaaagatcctgttgacattgtgttatgtgtgcgtttgtcccccagattaaattctttatgttttaactatgttggctgattttcttaatttaccaggaagctgtgaagttgaaacctgcattccctgatgcatatttaaatttaggaaacgtgtataag

SEQ ID NO: 141160 - DNA, 1068 bp, Arabidopsis thaliana landsberg
atatgtggaagattgggcagagaggagttccctatttccagagactcattgctgcgccgttcacgaccttgcggtccttgccaacttctttggtcgagacagggcagaaccgtgtcattgatgcttcgttaactctcatccgtgaaagggcaaaactcaaagtatatacattgttttattaaggcttatcatctaattaaagttttcttttctttctgtaatatgaaataaatagattattgtatttgtatgtattgttttagggagagttagtgcgactcataggaggagcaaaagctacaacagctcttcttggagtaccacttggtcacaactcttcttttcttgaaggcccagccttggctcctcctcatgtaagggaagctatttggtgtggtagtacaaactccaccactgaagaaggtataacaaaacttgtatttagaatgttggacagtttcatgttttgtatagcaacaatctagctgataatatttgtttttttacttattattactcaataagattctgtttatagagtcttgaatcatccattactacaagtttatgtgtggtacattttttattttaatttgttggataaattttagggaaggagctaaaagatccacgtgttctaagtgatgttggtgatattccggtacaagagattagagaaatgggggttgatgatgatagacttatgaaagtagtaagtgaatctgtgaagctggtgatggaagaggtaagctctttgaccattagacctagtcctactccaccttatctaaaaagtttccgataagtgaggtcttgtttaaggccaatgaagtaagtgaggtcttatttgctgtgtcaggaaccattgcgcccgctggtcataggtggagaccattccatatcttatcctgttgtgagagctgtttcggagaaacttggaggacccgtggatattcttcatcttgatgcacatcccgatatatatgaccgttttgaaggcaattattactctcatgcatcttcttttgctcgtatcatggaaggtggctatgcgcggcggctttacag

SEQ ID NO: 141161 - DNA, 542 bp, Arabidopsis thaliana landsberg
gtttgctactaggcttgttggtatcaaggagaatgcaaaatttcagaagagtgatcagaaggatacgcaagtgtcaggactaaagagtgtagttgacaatgcgaagcagcgccataatgtgaagtatgtcctttcttcttaatttacaacactctggtcttcaagctgattgtttaatcacaacatcaagcatttgacaaaaaacattgcatacttatggcttgacttctttatccacaggcaagtttatgcatggcatgctttagctggatactggggtggagtaaaacccgctgcttctggaatggaacactatgatagtgcattagcatacccagctcagtctccaggtgtcttagggaaccaaccagatatagtaatggacagccttgctgttcatggtctcggacttgtcaatccgaagaaagttttcaacttctacaacgaactgcattcatacttggcttcatgtggtatagatggagtcaaagttgacgtccagaacatcattgaaaccctatgtgctggtcttggcgggagag

SEQ ID NO: 141162 - DNA, 698 bp, Arabidopsis thaliana landsberg
aattgccgagtgctttgcttttcttgtttgcacaaaatggtccaatccagtaatccatagaagctcacgtgcccgagaaaccgggtcatcttctaccagtatcagatatcttgactggaacagcggccttgtggttgctccagaagaggatagacaccaagatagatggtgcggtttgcaagatattggtggtcatatgttaaaaattcccgttattttatttcaagttgtcctttgcatgtatttagaggtatacaccacatgactctctaacttaccatattgtctttggacaatactgaaaaagctaatggtttggactttcaagggactcctgaaagagctaaggatatatcgatcccagtactgttttctccactattcctattgcaaggcctcggtgttctctttgctgcttctaaactcctagagaagatcgtcctcttactccgcggggaagctggtccgggattgtattttagattttcatcaagtgcccatgattgcttgggattcttgcaccatggttccaggtgacaaacacgtctgtctattttcccaaaagttttaatttacaaaatgtagtactaacaaaaaatcaatcaatcaattcacttgttcaggctattaggttggtggtcaattgacgaaggaagccgggaggaacaagctcgactgtactttgatcaagaatctgg

SEQ ID NO: 141163 - DNA, 1668 bp, Arabidopsis thaliana landsberg
gaaaaaactcccttcttttctcaaaggagagaggattgaagttttaagagtggagctttacgaggtcacattcttctccagtttttgttactgctctctttgctttgtactaggacacaaattactataatgtttccacttttagtttattttttctgtttgtatttgaatgttgtaaaatctacaggggaacactgcgcctccggactaccttactgagagtgagctgatatctctcatggagaagcatggcataggcacagatgcatcaatagctgtacatataaacaacattggtgaacgtaattatgttcaggtgggttaacctacccaaaggcggtgtgcttttcttcactgttacaatgttattctctcaggaagatccttttttgttttctgaaaaatctcattactcttgtttggtgcttacacacttttgcaggtccaatctgggaggaaaatggttccaacggcattaggaatcacgctaataagaggctatcagtgtattgatccagacctttgcttaccagacatccggagttttatcgagcaacaaatcactcttgttgccaagggccaagctgatcattcacacgttgtgcagcatgtgattcagcaattccggcgtaaattcagttattttgttcaacaggttgggaaaacctggctgattttatgttttcttcggaggcatctacagatattgtcttcgatttaatctgttcctccttaacatctttcgtatattgtcctttcagatcgaacacatggatgccctctttgaagcacagttctctcctctggctgattctggtcgtgctttaagcaaatgtggaaaatgcttgcgttacatgaaacatatcacagcagtcccaccacgtattttctgcggcacatgcgaagaagtttattatcttactcaaaagggcacagtcaaggtaaaaccctttcgtcaccttaacccttgagctgaaacctcagtgaatctcaagttttcttatcctttgctaacggattttctcacagctatacaaggaactcacatgtcctttagacaactttgagctcgtgatctattcagttccaggacctgaggggaagtcatttccactatgcccatactgctataactctcctccatttgaaggcatagacacactttttggagcctctaagacgcccaatgctcctgccaaaaccaaaaccggtgcaggcatgccatgttctctctgtcctcatcccacatgccaacactctgtcagaaaccaaggagtctgcgcttgtccagagtgtgaaggcacgctcgtcttggacccggttagcttccccaagtggaaactcaactgcaacttgtgtagttgtatcgttttgcttccggaaggtgctcatcgcatcaccaccactagtaaccgctgtcccgagtgtgattcagccatcatagagatcgatttcaacaagaaaactactcctctggagaacggagccactctgcatcaaggatgtgttctatgtgacgagttgcttctctcacttgtagaagtgaaacatgggaggtcctttgtgaggcgtggaggaaggggaaggggacgagggagaggccgaggcagaggagggagaagaggctcaaaatctgtcgacccaaaaatgagtttcagagacttttga

SEQ ID NO: 141164 - DNA, 4550 bp, Arabidopsis thaliana landsberg
  unsure (1)..(4550): unsure at all n locations
caagaaaattaaacgcaatttattgagaaaatacaaacagcgtgcactatgaagaagacgtcgaagatacaatttcttttcaatctctgcatcatatttggggttgtagtaataagaagatgtaacgcaacgacatactttgtaggagacagctccggttgggacataagctccgatctcgagtcttggacttcaggcaagcgattctctcctggtgatgttataagtaagtatctttgatcatgttggcttcatccaactatatatatactacataattaaaaactcaaattaatttacagtttcccttaatgaactaattagtctaattaattatgtgtataatgtttttgcaagtgttccaatactcatcgacgcatagtgtatacgaagtggctaaagacaactaccaaaattgcaacacaacagatgcgatccggacgttcacaaacgggaacacgaccgttgctctttccaaaccgggaaaccggttctttgtatgcggtaataggctccattgcttcgccggtatgaggttactagtcaatgttgaaggcaatggcccatctcaggctcccgtgggatctccccaagccgccacttcagggattcttcaaccatcttctaaaaagaataaccctgcgaccggagtcgctagctcagccgcccgttttgttggcgacagcggttggaggggtaccatgggaatttttgtatattttatggtttttgcttttccattcatatggttttgctgattaaaaactatctataataagtgttttcatgtatatgtgtattcatatttgccctataatgagtgagagtatttatttgttgaatttctttatttttgtttgagttcatgaccaaattaaaacctaaatttttggttcgttatacaaatttcgttttgtttgctcagcaaatttcttacaaaaatgacatgtaaacaacgttatgcttaaagttattaatcaatcaatgtataataaaaaaaaaggaattagattctttgactacattgaatttgtatttgttcgattcgatagcggaaaattcaaaaaataaccgatatcggtttatattttaggtaattttatctggttcggtgtagtaaattcaccgtttgaccgtatctatatcacagatgattcactgcgattaaaagttgtggttatcactatctaatcgtgatcgctaccaaaacgcaaacgctagttaccggaagacacgtcttgagtttcgcagcatctctctcctctcctctgttcatatctctctttagaaatttctcaatgaacatactcaacagattgggtttgggatcaagtgggcaaaccaatatggatccttctccgatcgctcagggaaatgacgatgacacaccggcgccggggaatcagtttgcnnnnnnnnnnnnnnnnnnnnnctgaggtgtcgagctggcgtttcagagagtcccaggggtgactcagaccgaggctggatacacccaagggaccgtagacaatccttcatacggagatgtttgttctggtaccacaggccattcggaggttgttagggttcaatatgatcttaacgattgcacctatgagtctctgcttgatttgttctggtctaggcatgatcccaccactttgaatcgccaggtatttttggatccaagagttgaaagttttaacctttcaagttcggggattgagaaagattctgtctttaggattattgaatctattgggatgtgcctgagtctgttgtgctttggggatttcttgatttttctcaaatctgatagctttctgattttcatcaccagtctttactttgaaactttttaaatttggaaccttgatcatctaagtagaatatgaggaaggaaatgatattgaatcttgatttttgttgaattatgaggcttgagttggtaactttggtcgttgatcttagtatgatccagattatgtagtagctctgtaatctctcccctgttgctccctttttatgaggtagagatacggatttcagagaggttcttcttgttctgttcatgatcattgattagcattggatttcatgtttgtttatattgatgttagtttggcttatcatttgtcttgcatctgtgcgcagagaactataatcatatgcaagtttctgctagttttgtttgagaaattcactagcttatagtcaaattatctcgttggggttcatagcgaagtattctcaaattctacgcatgtacgaaaccaaatcgtaagcggtctgtttaggttatatggttttagcaatttctgttgttgcaaactcgggacaactatctcgatgatgttaaccttgtgtattatgatgaaaaaaaatcctatttatgcttttttccgacaatttacatttgcatcttctctgactttcaatagcatatactgaccagtcttatgactgtttatctcatgagtttgatttctctgtgtttactatcataattttagtttaagtactcagttttctcggcagcctacttccatgctaaattgatactttgatttatgactttgctgtgatcagggaaatgacgtgggaacccaatacagatctggaatatacttctacacacccgagcaggagaaactagcccgtgagtcacttgaacgtcaccagcaacaaatggagagaaagatcatgactgaaatcttgccagctaagaaattctacagagctgaagagcatcatcaacagtatctgtcaaaaggtgggcggtttggccaagggcaatccactgccaaaggctgcaacgacccaatccgctgttacggctaataagctgctttcctctgtccctctccgaaaacagaggacttagcatcaaaggacttgtgtgtcaaatagatagtgtaaaacttgactaagttgttcacacgctatgtaactacttctttggaatttcattcgcaatgttgtaatattgatgttatactctataaacataaaccaaataatcattgcgatccttactagatctaaaaagccatcaacatggtaaatgtagccaacgaaaaaaaaaaaaaaaagagtgtaggagggccattcctttattagagtaatgattctctagttttgattgcataaacaaacgtgcccaccaacctacaagttgcatacttgcatgattgtttattattaagtcatccttcatagttcatataatagagcttagaactagctagttgagtaattgaccaaaaaaaaatgtgaacggtatcaaaagtcatttcataaacacatgttttccaagttttgatcaatattatatctgaccaatctatagattgtctttctcaaatacgaattgatctaaataatttcagaccaaccaatttttttgaattatgtttccaaattataatgatggttgttggattttttttttaaatatagttgatacagtatttctatatacaataaaagaaatgacgcgtaatatatccattattcattaacaatttgaccaaattataaatgctacacatagtattgattgaatgtatttttcttgtgtgtcaaatactacttacattgaaatatgaatattcctatttagcgatgatttttaggtgttaatctctgactagcttctttatatatataaacgagcttcccgaggtctcatcatcaaacaatacacttaacaatggattcttctctgaaaactcaggaacctcaagtagtggaaacttctccttctccggtagctcaggagcctcctcaagtagctgacaaacctgcgattgttccttctccgatagctcaagagccagacaatgatgtcccggcgccgggaaacgagtttgctgagttcgccgccggttgtttctggggagtggagcttgctttccagagaatccctggcgtgaccgtgactgaggtcggttacactcatgggatctctcacaatccgtcttatgaagatgtctgtacgaacaccacgaaccatgcagaagttgtcagggttcaatatgatcctaaagaatgcacttatgagacacttcttgatttgttttggtctagacataatcctaccaccttgaatcgtcaggtatcgattcttgtttcgatttgttggtttcttttctaaattttctgtttgattaccagaggatctagtgttttagtgtctaattttgttaatttctggtcaaatttatgagtcttgagacttgctctgctttcagtggcttctcaagaatgttgacttctagttgacttttttttgggtggaatcttcttgttatttccatcttccgattgttttggtttctgtagtagtgtagagacatgtatatggtaatggttaaactgaatttgtgttcttatcttgaaatgaaatttgatggtgcttgtcattgtcctcaattatagctttcatagtgaatgtgatcttgacaaagttcaattcctaaccgatctttaaactgttgcagggagaacttttgggagcacaataccgatcaggtatatacttctacacaccggagcaagagagacta

SEQ ID NO: 141165 - DNA, 398 bp, Arabidopsis thaliana landsberg
agaaaaatgggaaaggcacgtacggtgggagtgggaatggactattctccgacgagcaaattagctctccggtgggcggcggagaatctccttgaagacggcgacaccgtcatcttgattcacgtccaaccacaaaacgccgatcatacccgcaaaatcctcttcgaggaaaccggttcacgtatttaacttactacatctctttaatatatattagtagagttaactccatattatgatcaaaatttgtattttgatcatttaaaagttacaaactaattattgcagcgctaattcctttggaggaatttagagaggttaatttgtctaaacagtatggacttgcttacgatcctgaggttcttgatgttcttgatactctctctagggctaaaaag

SEQ ID NO: 141166 - DNA, 1553 bp, Arabidopsis thaliana landsberg
  unsure (1)..(1553): unsure at all n locations
atgattcccggggtcaaggttaaggttatgaaagtaactgcgcctggaagggtggataaggatttcatctcaaaagttattgagcagatagctgatgaagaagatgaagagaacgatcttgatatagaagatatagatgtggaagatgacactaaggctgaaatcgatgaaaaaaatgctgacattgaattggaatctgtgacggatgaaatccttgacaccaccggaggaagggaaatcgcagtgaaatttgtgataggcgatattgttgatcgactttctggaaaccaacctcttaaagagtcacttcgatcccctgccaatctggaatctgtggagaattcttcgttttatcttcggttagagaaagatttaaacgttaaagagtctaagggtgtagaaggtactacactagttgatggaaaggtagccgccagagtagacgtaggattgaaaacattatgggtgatttggccaaatcaattgagaaagagaagaagatttctgtcaaggtttgttttgctgtgtttattttcttcttgttttactgcagaaaaggagtcgcagcttaatctagaaattcacgttcangatgcttaaggatgttggggagctattaagcctcactctcagccaggctcaaaaccgtcaacagctgtcgggtttgacaaaatttcgtcgcattgatgtgacaccatcactagatcccctagacggtgagtgagtaattgattgaatgtggaggttgttttgtttctctcgaaagaacatagaaattgacattgatggctcctaagctattgtaaatttatcagtattgatttctcagctgttagaagttaatttgttgggtatgacaagtgagtcgtctcgatagaatactttaaattttgtaacccttacctgaaatacaaattttctcacagtatgaattggattttaattatctttgtacttatctatccaggactttatattggcgcacatgggctatatacatcagaagtaatccatttaaaacgcaaatttggccagtggaaaggtggaaaggagtctaagaagccaacagatatcgaattttatgaatatgttgaagctgtgaaattaactggagatccgtatgtgcctgctgggaaggttagctttatgtttgttctagtatgaggtattaagacaaatatgaaaacttgttgttttcatggtcagtgtcaaaaatttgcgtactcaaacgactgtgttaccaatctagttaaaaaaaacgctgttacttttctgcctacacaggaaaggagtattatcatgcaatagtcacttggatctataaatgcacactcgcttattttcgatatctttcttcttccctaatactcttttgttgcaatatcatgatgagtgccttaccacagtcttatccatgacaggttgcatttcgggcaaagattggtagacgttatgagctcccacataaaggactcatccccgaagaatttggagtggtgtgcttaccttacaacactaattcaagtttatcattaagctcggttttcgtttag

SEQ ID NO: 141167 - DNA, 4825 bp, Arabidopsis thaliana landsberg
gaagaacaaaaaaaaatggctccttcgtcttcatcttctccttccaaatctcctgttccatctcttcaccaatcccttcacttcactcctgtaagtcaaaactctaatccctcttctttgttccccgtggaagaagacagcacatacctcaatttagtttttgttttgtctttgctctgtcacaaaatcaaaaacttttctttctgtctttcaaaaatagtggaattgataggttatagctcgaaatcttcttgtttttgcttaaaaatgaaggaacagtggcaaaaggagcatgttctgttaccttttcctctaaagttttctcctttgatctcaatgattccattagaatctcatattcatgtcacttgaagattcttccaaatccaaaggtattgtttttctctcaatttagcataattttcatttctctctctgtgttctcagattctggaatgtgaagaagacgacctccaagaagaaagatacagaaacagagcaacaccaagcagcgacggtggttcttccgccacaccaaaccaccagcaccaccgctgtaccaacagcaacaacaaccaccagcacactctaacacctctccaccacaacggcaaaccccaaaccagaaaacgacatgacgacaacgacgaagacgatggtggtgccgtatcctgcaacaagtgtcgacctcaccactctcaccgtgacaaattctccgtcgtacctctcgaaagccacaacaacccttctttcatctctagccccaatctcataatcaaatccatcttccaatctctcacacggagaagccccaaaccttcctctgcaacggcggcgcttccaccgcgctcttcctcatcctccgccgcagatgcttctagagaagaacagtggcggttagctgtggcggagctttctcataaactgattcaagccacgaagaagaaagaagacgcggttatagaagcttctaggttgaaatcatccatggcagagctagagaagaaactcaataaactcgagatttactgtcacaatctcaaatcaggtctcgacgaatgcagcaacaaaaaacagagtgttccgattcgaaaagacggattcaacgacaggatcattcagcagtttctcgtctctgtgtcggaatctcgttcttcgatcagagctttaagtagatctctcgcctcgcagctacgaaccgtcggtggcaaagtttacgagagactctctcttcttcttcaacctttcgatgtaaagatcaactcttttgccaaaaaccctaaaagtctgatcttttacctcgaagcgattctgagcagagccttcttcgaggatttcgaagctcctgggtttcagaaaaacgggtcgacccggattttgaatccaattgatcgttgtgaatccaattacgcttcgtttaacgtcttgatggagctgacgtgggatgaggtgttgagcagaggaacgaagcatttctcggaggagtttagccgtttctgtgaccggaagatgagtgacgtcgtttcgatgcttagctggaaccgtgcctggcctgaaccgcttttacaggtaagcaaatgttaaaccaaccaaacggttaataatggtttatttcaaaactacttggattgaaccggtttttatggcaggctttctttggtgcgtcaaagagtgtttggttggttcatcttttggctaattcagtgaacccggggttgcaaatctttcgtgtggagaaagatgaccggtttgatccgatttacatggaggaaaccggtggggaacggtttaagagtctggttagagctatggttcagcccgggttttatgtctatgggagtgtggttaagtgcaaggtggtttgcaagcaatgcggcagcgatgaggaagaactagaagaccatacggtcaaagaatgtaataaaaacgacaagagtttaataagcatttgtagcccattaggaggttaattacgttcatttaaggtttaaaatattggtgggtttttgtcttgtcttgtgaggttgtaattaaaaaaatcaatggcttttgcaagtgaatattttaaaactgtttaattaatgacttttgcaaagaaatatctaagaattagttgttgttgttgttgttgtcaaagtgattcatgaaagagtcgttctaaagtaaaatattggcattttctcgttggtttcgttatctttgatttgattacatttacgcgcgtattagtagtaacaaaatgggccgtttctcaggcccaatatatagaatttgctaatcaaaatccgagccttctctgaaaaagcccatttttgttcgttcttccttgtttcttcgattttccgtgactgattctgttttgcgaaaaggattgtgttatgacccggatacttgagaactgggcctgggagttgaagatgaagatcgaagcccatgataatcctttaagcccatatttatctataggtcaacatatttacagttgtgccatcgtctcttacgctttggtatttagtctctgtctttctctgtaatggttatcaaaacaatcaacaacaatatcaatatcaatttctcttctcatctcatactctccgtcgacaatcggcgcattactttatttactctgtttttcttatgtttttacgttgtttactttaagagataagtccagagcttatcattggtgctttcattgagagagtcgatcttctcgactattgaaaatgtttttgttaactcaagaggacttcaatcttctgcttcatatacgcgaccgactggatgtgatgcaatccaacatccgtgagataaaagtgattatgaaacaggaaagagaagcagttgagcttcagcaaacccaggaaaagcctgaaagctctcttgggaatttcgtcgaacatgtggcgtgcgttcccagaagtaaagaatttcctgaacctttgggtactttcgtcgagcagttggtggattctcaaccccacgaagcttcttatggcaatttgggtaagtcacttgcaaatccaaaggagaatcgacaccaaggagttcacatatttcgattcaagcatagctaccacaaggctcgtaaaaagaaatcacaaggtgatcttttgcaagctctaaagagcgatggaatgtttaatggctcaagtggtgctgatcgtttagtgaatatgaaggcagagagagcgcacctccaagtgaaaagattgttggtgaggacaagcattcatagagggcagaaaagggtggatggattggaccaaaatgctagtgtgaaggaacacatcagcttattgtttgtgtttgatgggaattttggttctggttttcgacaacaggatccattaaatccttgtagtcatgatgatctcatgataatggaacctgcacaggatcatgggaacgaaatggaacgtgtgcacatacgtgaaagctatacgcatccaaatcacattacaaggacgattgatcgggagataatgagaacaaatatgcaaattagtatgaagctgaacatttctgaagctgagaaggattcacaaggtgcaataaagattcctggcaccaaaagaaacaaattacaagattgtgtaacggtgatagcatgttcgagactaaaagacaattttctgaattttctctcgttaaccgagtgtgggaaccaggtggaagcacagctgaacaagttcaactagactggttagtggttttctatggccgtgatagaattgttgatgatgttagtcttggagtttgtaacgtcattaaagaaccaattgatcttggaagagctagtcgtgtatgggagcgtggtcgtttggaggttagacaggttctgtgtgattatagaacacataatttgcggctcacatatcatggtctagagaataaagaggagatgttgtcacagtttaagaaacttcatgggcgtagaagagtaaacattcagactatgacaggaaaaccgctttatgagctttctatggccaatcaaatttgggagcatggtagattactggttcacagtgttcagcgggattgtgtaagaaagtattacggacgggatagagtgttgagtttactgcaaaatactcagtggaggagtttagagtgggtcataaaacaagatgtgaaagagttttgtcttgggtctaaaaagaaagttaataggctgaagctaccttttcgctcaggacttgctaatcacgtttggaagcttggtggaaataaatctgaacaagctcaattggacaggtttgttatacaaaggttgttacacaagaattactgcctagtaattccagcaagatctagcttcattccaaagaaggcaattagtgataacctacaagtattgagtaaagtatgttattattcgctgtcagcaattaaaaagtggcttagctgcgagtatagaaaggagaaaatgtggtttgtttcctatgattcagtgttgcaagcgtggtcaagtaccattgaactaagggaaaagatcccattagttacttttgagcttaaactgaggataatggtgtgttttaggaagtttttaaaactttgtgccaagggaattgatgcaacgcttgtaaagagggttaaagctctactagagataattttgggtaaacgacctcgtgatccaggctggtttgacaagcaaaatcaaagtagagttcaatgtgtacaagtttggttacaaagccatgctagagaagataaggttgagacccgagaagaagaatctcaacctcgtggattatcagctgaacattttgactaccacattgatcaagtttggaaattaaatgcgaaggcttag

SEQ ID NO: 141168 - DNA, 560 bp, Arabidopsis thaliana landsberg
gattcaacgacggtgatgattcttcagccactactacgaataatgatgggacccgtaagacgaagactgatcggtctaggactttgatctctgagagaagaaggagagggcgtatgaaggataagctttatgcattgagatctcttgttcccaatattactaaggtaagtcacaacattttcaagatttggtaatgactaatgaaactgtaaatattgatgaagtatgtgtgtgttggcatttagatggataaagcatccattgttggagatgcagtgttgtatgttcaagaacttcagtcacaagcgaagaaactcaaatccgatatcgcgggtcttgaagcttctttaaactctactggagggaaccaagaacatgctcctgatgctcaaaagactcaaccttttcgcggtatcaatcctcctgcttccaaaaaaatcattcaggtaataacctaaaaaaaccaatcaatcttcttgaaacatcaaagtgtttaaagtttgtatgttttgttgtgttagatggatgttatacaagtggagagaaagggttttatgtga

SEQ ID NO: 141169 - DNA, 309 bp, Arabidopsis thaliana landsberg
gcaaaaagccagataactttgacaactgagtctctagggtctggaaactccgacattccctctcagcaggatctacaaacttctcgtgaagtttcagttatatcaatttctgaagctcagagactgatttctctgttctttgctttgtgtaaaaaggtctgcgtagtctttggagatgctccttatgctcaaagttattttctatttaaagattcccctagatctgatgaatctcttttttcagaaacctagtctccttcgacttgtctttgaagtttatgggagagctccaaaaatggtaaaccaggt

SEQ ID NO: 141170 - DNA, 1444 bp, Arabidopsis thaliana landsberg
gccggtatctaaatgtcgaacaccgtcgaagatgacgacgacgacttccagatccctccttcctcacagctttcgattcgaaaacctcttcacccaaccaacgctaacaacatctctcaccgccctcctaacaaaaagcccagactctgccgttacccgggtaaagaaaatgtgactccgcctccttctccggatccggatctcttctgctcctcttctactcctcactgtatcttagattgtatcccatctagtgttgattgctctctaggagatttcaatggttcaatttcttctcttggtgaagaagataaagaggataaggacgactgtataaaggtgaatcgtgaaggttatttgtgtaattcgatggaggctaggttattgaaatcgagaatttgtctcgggtttgatagtggaatccatgaggatgatgaaggttttgttgagtctaactctgagcttgatgtgttgataaacctttgctctgagtctgagggtaggagtggagagtttagtttaggcaaggatgattcaattcaatgcccattgtgttccatggatatttcatctttgagtgaagagcagaggcaagttcatagcaatacttgtcttgataagtcatataatcagccttctgagcaagtaagcttctttgttatctcataactggaattgatatcaaccttcaatttaggttaatacaatgaagtatactgtgttcaattgttacatcgttacgccattgattgactgctgatttgtaaatatgattattgtaggactccttgaggaaatgcgaaaatttgtcttctcttataaaagaatcgattgatgatccagttcagcttcctcagctagttaccgacttgtctccagtgctgaaatggcttaggagtctaggtttagctaaatatgaagatgtttttattcgtgaagagatcgactgggatacccttcagtcactcactgaggaggtaatggaactaaagtttacttatttatttatttacacagagaaacagaattgagtattgacaaggttatacttccacaggatcttctaagcataggtatcacgtcacttggtcccagaaagaagattgtgaatgcacttagcggagttagagatccctttgcatcttctgctgaagtgcaggcacagtctcattgtacaagtggccatgttacagagagacagagagataagtcaaccactcgtaaggcaagtgagcccaaaaaaccaactgcaaacaagttgattacagagtttttccctggtcaggctaccgagggcactaagatccggacagcccctaaacctgtcgcagaaaagagtccatcagattctagctctagacgtgctgtgagaagaaatggcaacaacggaaaatctaaagttattccacattggaattgcattccggggacaccttttcgagtg

SEQ ID NO: 141171 - DNA, 2218 bp, Arabidopsis thaliana landsberg
ggtgatgccaaagtagacgactacttgtagtaaacaaaacctttggctttaacactctcctccaaatcccagatctctctctgtctctgtcccgcggagtccccgagagattgatcaccatcacttttgtaccttccttgtactacctatggcgtctgctagcttcgttaagcctaacaccctctcttctccatggatcggccaacgctcctttgctcacacctctgcttcttcttctcctcctcctcgagtctccttcgcgatccgcgccggtgcttactccgacgagcttgttaaaaccgccgtgagtatcctccttatcctctctctctctttgatgctttattagtttggattcgtttccgtaattctcaaagtcaaacgtagagtgagattctctgattattgcgtaatagaaaagcattgcatcccctgggagaggtatcttggcgatcgatgagtccaatgcaacctgtgggaagaggcttgcttctatcggcttggataacaccgaggacaaccgtcaggcctacaggcaacttctgcttaccactcctggcctcggcgattacatctctggttccattctcttcgaggagactctttaccagtccaccaaggatggtaagacccttgccgattgcttgcgcgatgccaacaaagtccaaggcatcaaagttgacaaggtattttttatccatttattctgtcatcatcatcataagtagttgagtttttatgtgtgttaagtgaagtgttgacaatgcaatccaccgtgtagggcttgtctcccctagccggttccaacgaagagtcttggtgccaaggcttggatggattggcctcacgctctgctgagtactacaagcaaggcgctcgttttgccaagtggtatgtcatatatttcaccatgttatcttacatatggtattaactctttggtttgatgtgaaaatgctcttcctagttttgatgttgactctttggaatatatgtatgtgtgtgtttgtctaggaggacagtggtgagtgttccctgcggtccttcagcactggctgtgaaggaagctgcgtgggggctggctcgctatgcagccatctctcaggataatggtcttgtccccattgtggagccagagatccttctggacggggaccacccaatagagaggactctggaggtggcagagaaagtgtggtcagaggtgttcttctacttggcacagaacaacgtcatgtttgagggcattctgttgaagccgagcatggtcaccccaggcgctgagcacaagaacaaggcctcttcccgagaccgttgcagatttcacgctcaccatgctgaaaaggagggttcctccggctgtcccagggatcatgtttctgtcaggaggacaatcagaggcagaggccacactgaacctgaacgccatgaaccagagcccaaacccatggcatgtgtccttctcatacgcacgtgccctgcagaactccgtgctcagaacatggcaaggcaagccggagaagattgaggcctttcagaaggcactgttggtgagggcaaaggccaactcactggcccagctcggcaaatactcagccgagggagagaacgaggatgccaagaaaggaatgtttgtcaagggttacacctactgatttgttaatttcagagatcgtaataaggattaaggaccattgttgtcttttgttttttttttcccttttttgttttgtctctgagaaagaaagacagtcacgagtcacgatcatatcatatatgtatgtgagcaacgtgaaaacatcctcttaaatctatatttcctctcataaagactgattactgtttgactgcaaaaccaaattgtgtaattcttcttttaagtttacaaaatttttggagggcgattaggtaaaattggcatagttgcaagttcagtgttagaagaagcagcggagatctctctccctctttatagtttacttttgacttacagtagagagagtttagagttttgaatttggctccgatgacgaatcgtcttcctccttcgctgtacgttccgcctcaccagcgccttggttccgattacggcttcaatcctgttcctctctctccagttcgctatgtctccgcttatgatgaccgcgtttccgaggatcgccaaccggttaacttcttcttcatctttttttcatgcatctctgagcttattgattga

SEQ ID NO: 141172 - DNA, 929 bp, Arabidopsis thaliana landsberg
gtgaatccggatgatgttgtgtttggaggatgggatataagtgacatgaacttagcagatgccatggctagagccagggttcttgatatcgacttgcagaaacagctcaggccttacatggagaacattgtgccactccctgggatcttcgatcctgatttcatagctgctaatcaagggtcacgtgctaaccacgtgatcaaaggtaccaagaaggaacaagtcgaccacatcatcaaggacatgaggttactctctgttctagtgattattcttattggttgaatcgaatctcgtctgattattgatgtgatcgagtgtgatgttgaatcttagggagtttaaggagaagaataaggtggataaggttgtggttctctggacggctaacacagagcgttatagcaatgtggtcgttgggatgaacgatacaatggagaatctcatggagtctgtggatagggatgaggctgagatctctccttcaacactttatgcgattgcttgtgttcttgagggaatcccgttcatcaatggaagccctcaaaacacctttgttccaggtttcatgtagttgagttttaatcactcattgatcaatcaatattggaaatcatgactgattttcttgggggtttgttgtaggtctaattgatatggcgatcaggaacaatgttttgatcggtggagatgatttcaagagtggtcaaaccaagatgaaatctgtcttggttgatttcctagttggcgcaagaatcaaggtttgtttaacttgcgtatcaagttactctttcttgttactgaaaatatttgtcacaagactttggtttcattgattgtgtgtttttgtttatagcctacttcaattgtgagctacaatcacttgggtaacaacgatggaatgaatctctcagctccacagactttca

SEQ ID NO: 141173 - DNA, 1251 bp, Arabidopsis thaliana landsberg
tgcagctaaaacccttgaaagatctgaatgatcagatatgtcagatctgtggtgacgatgttggactcacaaaaactggcaatgtctttgtcgcttgtaatgaatgtggttttcctttgtgtcagtcttgttatgagtatgagaggaaagatggatctcagtgttgcccgcaatgcaaggctagattcagacggcacaatggtcagtagtattatgtgctattatccttatagtctgggctcatattaatctatcgagttctttattttcattttttgacacatttgattttgtatagggagtcctcgagttgaagtagatgaaaaagaggatgatgtcaatgatatcgagaatgagtttgattatacccagggaaacaacaaggcaagactcccacatcgcgctgaagagttctcttcgtcatctcgacatgaagaatctttacctgtttctcttcttactcatggccatccggtagggactagctaacatatgaattatcgtctaacgttagtataatgacattttccaagatgaaaatctttcacaacatcaatttttcttgatgatttctatacataggtttctggagagattcctacgccggataggaatgctactctgtctccttgtattgacccacaactacctggtatctatcaacttttgcttcgtgtgtttgcttcggtgaccacaacatattgtatatcttgtgattttcacatgttgagtacaaatatgcagtccctgtaagaatcttggacccgtcaaaagacttgaactcttatgggcttggtaatgttgactggaaagaaagagttgaaggctggaagctgaagcaggagaaaaatatgttacagatgactggtaaataccatgaagggaaaggaggagaaattgaagggactggttccaatggcgaagaactccaaatgtaagtggaaatactagaccaatatctctattgtccaactcaaacagctcttggccgtgatgctaataaccactcttggtttcttattatgtattgatagacataattaagtatctgctttgttacatttgtttccttccactcaattatggttctcgtacttacagggctgatgatacacgtcttcctatgagtcgtgtggtgcctatcccatcttctcgcctaaccccttatcgggttgtgattattctccggcttatcatcttgtgtttcttcttgcaatatcgtacaactcaccctgtaaaaatgcagatcct

SEQ ID NO: 141174 - DNA, 1844 bp, Arabidopsis thaliana landsberg
tcaatctcaatcttcaaattcatcttcaccctcctcagatctttctacatctacttcctccgaccatccaaaaacctccgccgatacggttcatgggcaatcatcaccggaccaacagacggaatcggtaaagctttcgcctttcagttagcccagaaaggtcttaaccttatactcgttgctcgtaacccagacaagctcaaagatgtctctgattccatcagatctaagtatagtcaaactcagatcttgaccgttgtgatggatttctctggagatattgatgaaggtgtgaaacggattaaggagagtattgaaggattagatgttgggattttgattaataatgctggcatgtcttatccttatgctaagtattttcatgaggttgatgaagagttgatcaataacttgattaagatcaatgttgaaggaactactaaagttactcaagctgtgttgcctaatatgcttaagaggaagaaaggtgctattattaatatgggttctggtgctgctgctcttattccttcttatcctttttactctgtttatgctggtgctaaaacgtaagtgaatcttcttgtcttgtatttgtttgtttgagatgatgcttttgagtggtttaaagtagtgactttttttgtttgttttgttgttttaggtacgtggatcagttcacaaagtgtctacatgttgagtataagaagagtgggattgatgttcaatgccaggtgaactttactgaatcaattttgtcgtcttagtaacatgattttgcttgagattttgattagaagtaggattgataaatgagtaaaaccaatcttatctttgtaggatagtagttcctggcttatcaaagttaatctgttgcctgattagaagttttgtctgataatatagacaggaaaatgtgtaaaatgttgtttattgaatctctaaaagatgtgattctgtcatggtttcctgactctgtttctgtttatataatggacctggaatgttgattatttttgttagttttgggttttgcaaatgaggaactattgcatcacatgtctctttgttgaatacttcgatgatgtgagatcttgtttctgattgtttcttcaggccgattttgtgaaagaatgtcaaaactataaaactaggcaatctgtgtagtgaactttagatacttaattgtaaccactttcggatgtagaatagttatgccagagattgtatttgactgatctgtggcagtttccatgtatgttatagctgactgtggagttgtatactaccaaaacaacttattgggtcacactgctcaataagtttttgaaatcttgattgtaccgctaattaagtgagtgttgttttataggttcccttgtatgttgcaacaaagatgacaaaaataagaagagcatccttcttagttgcatcaccagagggttacgcaaaggcagcactgcgttttgtaggctatgaagcgcaatgcacaccgtactggcctcacgctctcatgggtgcagttgtctctgcattgcccgaaagcgtttttgaatcatttaacatcaagagatgcctccagatccggaagaagggtctccaaaaagactccatgaagaaagaatgaatcttccaggtttaagttactaccaagaatttccttcttctgaagttgttggtttcttgaaaagcttctgttctgaatcttttgtaagacttgtactctttagttttctaagttttttatattttaagattaaaaaccctaacgtacacgaataatttacttcctctgtttctatttattaatttaagcagtgttgtattgaatgtgtttttgctta

SEQ ID NO: 141175 - DNA, 441 bp, Arabidopsis thaliana landsberg
atgccagtagtaacccgcttgattcgtttgaagtgtgtagggctcagacttgaccggagtggactcaatcggcgaatctgtcacggaggacacggcgaatcaacgcggcggagagtgatggaagagctttcaagcctaaccgtgagtcagcgcgagcaatttctggtggagaacgatgtgttcgggatctataattacttcgacgccagcgacgtttctactcaaaaatacatgtaagctcacggatttgattttctagttttcttcatgatctgatgaattttagtagcgtcgtgaaagaattattttcgtcgatagatgaatcttactgatatggaagttgttctatcctaggatggagattcagcgagataagcaattggattatctgatgaaaggcttaaggcagcttggtccgcagttttcttccttagatgctaa

SEQ ID NO: 141176 - DNA, 2991 bp, Arabidopsis thaliana landsberg
agggaagcgtgtgttaactgtgtggacttgtgcaagagaaagaacgaggatagaatgtgggtggaccaaatcactgctatgcaagcatttcctaggcctgaattaacgttcatgggtgactctgggatcgtactcgctggtgaagagaatgatttgttgaatgctacaaacgtaaagcatggaaactctatggatgcctcgagccagggtagctttgagactggccaaggtccttattaaaattaattcttatttattcattagatgatgcttgcatttggtttcttttcggttggtaactaaagctgaattaactgtattgtgcagaagggagagctcaaatggcaatgccgtggccaaaccagtttcctcagtacatgcagaactttcaaggacatgggtatccgcctccttatatgtttccggggatgcaaggtcaatcaccatatttccatgggaatatgcaatggcctgtaaacatgggagatgtggagtcaaatgagaagtcttccaagaagaaaaagaagaagaagaagaataagaagaagtcgaagcaagatgaatctgccgaaccaagcaataattccagtactgagaccgaatcagaagacggaaatgaaggaaagaaacaatccaggaaagtggttatccgcaacataaattatataacttcaaagaggaatggagcgaaggagagtgattcagatgagtctggagaagaagaagggtttgtggatggagattctattaagcagcaagtagaagaagccattggctcagtggagagacgtcataaatcgacttcacaccgtcagaggaaacacaaaagtcacaacggtgatgatgattcaagtaacaaggaaactaaggggaatgataattgggatgccttccagaatcttcttttgaaagacaatgattcagagccagaagaattactacgtatatcatcaactgcgttaaatatggcgtctgaagttgtgagaaagagagaaccgccttctgatgattcattcttggttgcaaatggaaatgaggattggggaagagaaaccagcattgagaaattcaatgcaggtgagaatgttcggataataaggaaagggaacaactatgacgaggagatgttgaatccgggtagaagcgatgaatcaagaagctattctcaggcagagatgtcggttcatgatgggaagctcagaaccagaaatgaggcgagaagaagactggttcatacgtaaccaagctggtccagaaacagatccaagtcttgtcaaaacatttgtaggagaccatttccacttaaataagagcagtgagagagatgtcctgaccgatgactctttcatgatccattctcgtgttgagaaccaagtagaagattctcggttaaggacagaaatcatggacttagacgtttacggaaccacccaacaagaaaacagtgccccggagaacactccgcatgaaccagatgacctatacatggttcttggacgggaacaagatgttaaacctacattgttaccatggacccctgaaattgactttgagactaacactttggctcaaagaacaagcagaatcgatttgataactgccacaaaggcctctgcaggtgaacaaaccttagatggtaaagaaaagaagagtcgtggtaactccaaggggaaggatgcaaagtcaagagcatcaagtagacctgacccggcgtcaaaagccaagagacctgcttggggaagtagagctgctgtctccaagtccaaatccgagatggtaagttccgtaaccgcttttcgtctttcttgattagtttccttctctcatctggatttggttttttgataggaggaagagagaaagaagagaatggaggaacttttaattcagaggcaaaagagaattgcggagaagagttccggtggtagtgtatcaagttctttagcgtccaagaaaactcctactgtgaccaagtcagtgaagagctcgataaagaatgagaagactcctgaagccgcgcagtcaaaggctaagccagtactgagaagttccaccattgagcgccttgctgttgctcggaccgctccaaaggagccacagcaaaaaccagtaatcaaaagaacatcaaaaccttcaggatacaagacagagaaagctcaggaaaagaaatcgagtaaaataggtcaatccgatgcgaaaagtgtggaactttctcgtgacccgagtctcgaaatcaaggaaacggtggtggaagattcacattcttacttgtcagagaagcaagttgatgcacttcctgctgttgcttctgttgatgatttcaaagacattaaagaattgcatagcttgccatcagaagaaacggccagagtaaagaacagaccgaatgaaatcatagcagagaaagtacaagatcagacgatgatcgatgatcaggaaacagtgaagaatacatctgtttctgaagataagcaaatcaccacgaagcattactcagaggatgttggagaagtccaggcttcacaggaaaaaccggtgtctccaaagaagtcggtgactttttcagagacaaacatggaggagaagtattatttctcaccagcggtctcagagattgacatctcaacgccacctgctactgaagcagatcattcgaggaagaaatggaacagtgaagagacgtctcccaaggcaacggctaaagtcttcaggaagcttcttatgttcggaaggaaaaagtaaaaccgacgttggaattcttcttctccggcatcatcgaacctttgttttgagacgacgtcatgttgagttcagttaaaaagcctctcttattctttaaatttttccttgtgtgatattaaatactgtttttcattttactgctgtcatcagtctgatttgtctgtttatattacatttgttgatgtgttgtttatagcattgaaagtgggcatttgagtgtgtataaaaaattggtttggtgagttgaat

SEQ ID NO: 141177 - DNA, 844 bp, Arabidopsis thaliana landsberg; identical to SEQ ID NO: 13812

SEQ ID NO: 141178 - DNA, 3492 bp, Arabidopsis thaliana landsberg
atgtcgacatctcaacgttcagaaagtgtgaactctttcttcgataagtacatccataagaaaatcacgctgaaagagttcttgaggcaatacggtgtgattctgcagaataggtacgaagaggaatctgttgcagatttcgatacttgccacaagcaacctgcattgaagtccccctcgccctgggagaagcaaatggcaacaacttacacccacacaatatttaagaaatttcaagtcgaggtcttgggggttgtcgcttgccatcctagaaaggaaaaagaagatgaaaatatggcgacgtttagagttcaagactgtgaaaaagacgatgactttcttgtaacgtggagcaaaactaagtcagaactttgctgcttctgtcgtatgtttgaatacaaagggtttctttgtcggcatgctttgatgattctgcagatgtgtggtttcgccagcatcccgcctcagtatatattgaaaatggtggacataagatgctaagagtggagtattagctggtgaaggagcagaccagatacagacccgagttcagcgctataacgatttgtgtagtcgagccactgaattgagtgaggaaggttgtgtgtcagaagaaaactacaacatcgtattgcgcacactagtctagcccctgaaaaattgtgttgatatgaataatgctagaaacaacatcactgagtctaatagccagcttaataatggtactcgcgaacaagaaaaccaggtaatggctggggtaaaagcaacaaaatataagactgtatataggaaaagaaaggtatgcttttactgaagcttctcgccaatctaaacctacgtacattttcttagcttcaaaggttaaaaagaagatactcaaattgatcttatgcagggacatcaagaggctagccaaatgcttgaatctcaacagagcttgcaaccaatggtttgtgctttgatttgatcttctctaattagtttgatcattgtaactgcacattgctttatgagattaagagtaggatgtcttggatatatggccttatagttttaacattttgtgcaggaaactataagttcagaggcgatgcacatgaatggttactatggtcctcaacagaacgttcaaggactggtatgctatgttagttgattaatacaaacctggttaagccattggacatctattataaaccctaatactaaacctgtttaaactgtggatatagttacatttaatggagccacctcatgaaggctactatgtagatcaacgaaccatccaaggcctggtaggttacatatagtttaaatgcttgaatctcccaaatctgtgctagagtataagtcaacgacatgaattttggttcttttgactcttcagggacaactgaattcgatagcaccggcgcaggatagcttcttcacgaatcagcaagccatgtctgggatggtggtacattataaaatccttcaaactgattttaaaaactgtgttatgaatgatcgtgttgttaacatcttttgtttattgtccggtccagggtcaaatcgatttcagacctcctcccaatttcacttacactttacaggtctcagctgcctggataaagtctttactttagtatcattttgtactcgaaccacacgtgttgatatcgttaaatcttttcgttattccaggaagagcatttgagttctgcccaattacctggtagttcatcaaggcagctatagtagcaacacgttttgattactttggagagaagttttgtctcaggaaacatttgcaagaagctgttccaaacatgagaaaaacacaagatctttcatggagctgagttgcaatgacaagatgtaatcttttcttaaattggtttctgtatattatgggattgccttatgatgtattaatgtgggatgaaatattgtgttatctgattgaatgtcttgagatttaatagatgcacttgtaacaacatctttatctaaacacatagaaatctatcctctgtgtattagtcaaacaagtaattttgagatcacattaaatcaaaattgttaaaacaggtttcaacttatttagtagaaacaaaaagttatttttagattaaatgtggttaatttggttaaatacacatattccctggtcgttgtcgtatgtaggtgtgtcccttttgacaaaacaaacaaacagaaaaggtttctttattcagacaacatcaaaactggggaagaaccaaaactaatagagttggtcaaaagaaacatttgcaaaaaaaaaaaaagagaggcaaagatctcgagagatttcaattttcaatggagaaagtgaaataaaccttcttcttatctcatggatctccaactttgagcatagatgattccttggaagcgagacaattcttcaaatcatggactcaaaaagttcttcctcaaaaacccaaatcgattttagtcatctctgctcattgggacaccaaattcccatctgtcaacactgttcttcgcaataacacgatccacgatttctctggcttccctgatcctatgtacaaggtaaaaccaaaaaaaatataactttttgtctcaacagattcttagggctcttagatcgttgaaggatgcataaagttttgatttttaaatgtttaaatcatctctcttgggtttgatttgatatttttgtctgtagttgaaatatgaagcaccaggagcaattgaattagggaaaagggttaaagagttgttaatgaaagaaggaggaatgaaacgtgttgatgaagatacaaagagaggacttgatcatggagcttgggttcctcttatgttgatgtatccagaagctgatatacccatttgtcaactctctgttcaatcaaatcaaaatgggagttatcattacaacatgggtaaagcattggcttcattgaaagatgaaggtgttcttatcattggctctggaagtgctactcataacttgaggaagcttgactttaatatcactgatggctcacccgttccttgggccttggagtttgatcattggcttagagattctctacttcaaggaaggttagaaagttttaacctttttgctgcttggttatatgataagatcattgatttgtttcatgtgtttttttaggtatggagatgtgaatgagtgggaagagaaagctccgaatgcgaaaatggcgcatccgtggcccgagcatttgtatccgttacatgttgtgatgggtgcagcaggtggagatgcaaaggcagagcaaatccatacaagttggcaacttggtaccttgtcttattcttcttatagcttcacttcttctctttgaaacatttcaatcttcatctcctatacttgtctttgattaagcttttgtgtgtgtgtgttcatgtctctttaattaataatccaaatcctgtcttgtatacgaatacaaatcctctatgtactataatatatgaatgtcatgtgaattt

SEQ ID NO: 141179 - DNA, 881 bp, Arabidopsis thaliana landsberg; identical to SEQ ID NO: 4135

SEQ ID NO: 141180 - DNA, 667 bp, Arabidopsis thaliana landsberg
caagatcgtcaagagacagtaaacctaaaatggcgaactcagacaaaagattattcgagaaggtagctataataaccggaggagcaagagggataggagcggccacggcgagattgttcacagagaatggcgcgtatgtgatagtcgcggatatccttgagaatgaaggcatccttgtggcggaatcgatcggtgggtgttacgttcattgtgacgtatcgaaggaggctgatgttgaggcggcagtggagctagcaatgagacgtaaaggtagactagatgtgatgttcaacaatgccgggatgtcgcttaacgaaggtagtatcatggggatggacgtggacatggttaacaaacttgtctcggttaatgtcaatggtgttttgcatggtatcaaacatgccgctaaggccatgatcaaaggtatatatgtattattactacctcagatagtgtttaattccgaagctccaactttaattataagacaactaagtttagttatgatgtaactaaaaccgagaagggggacgaggaggctcgataatatgcacatcgagctcatcagggctaatgggaggacttgaaggacatgcgtatacgctctccaaaggagccatcaacggggtggtgaggacaacggcgtgcgagcttgggtctctcggca

SEQ ID NO: 141181 - DNA, 833 bp, Arabidopsis thaliana landsberg
cttcttctcatttctcaccaactccctccaaacccaacaaaagtgtttatatttgcaaagccgccaaagtgtaaacgaaagtttataaatttcatttctgtgatcttacgtaattggaggaagatcaaaattttcaatccccattcttcgattgcttcaattgaagtttctccgatggcgcaagttagcagaatctgcaatggtgtgcagaacccatctcttatctccaatctctcgaaatccagtcaacgcaaatctcccttatcggtttctctgaagacgcagcagcatccacgagcttatccgatttcgtcgtcgtggggattgaagaagagtgggatgacgttaattggctctgagcttcgtcctcttaaggtcatgtcttctgtttccacggcggagaaagcgtcggagattgtacttcaacccattagagaaatctccggtcttattaagcttcctggctccaagtctctatcaaatcggatcctgcttctcgctgctctatctgaggtatatatcacttcgtttcgtccttctctgtaatctgaacttagattataaagattgatactttaccattttgctgtggttttatagggaacaactgtagtggacaacttgttgaatagcgatgacatcaattacatgcttgatgcgttgaagagattgggacttaatgtggaaactgacagtgaaaataatcgtgctgtagttgaaggatgtggcgggatattcccagcttccatagattcaaagagtgatatcgaactttacctcggtaatgcaggaacagcaatgcgtccacttaccgctgcggtcactgctgcagg

SEQ ID NO: 141182 - DNA, 2026 bp, Arabidopsis thaliana landsberg
atgaatatgatgatgcaaaaactctctattctatttctacatttaatattactagtactactctgcgtccatcctctcaccaccgtagccgaccgcaattccaccgattggtgcgacaaaactccataccctgatccatgcaaatgctacttcaagaaccacaacggatttcaacagccgacacaattatccgagttccgagtaatgctggtggaagcagccatggatcgggccatatccgcccgtgccgagttgactaattccggcaagaactgcacggatagcaagaaacaagcagttttggcggattgcattgacctctatggagacacgatcatgcagttaaaccggacattgcatggcgtgtctcctaaagccggtgccgcgaaaagttgcactgacttcgacgctcaaacgtggctgagcaccgcgcttacaaacaccgagacctgccgacgtggctcatccgatttaaacgtcacagacttcatcacacccatcgtttcaaacaccaaaatctcccacctcattagcaactgcttagccgtcaacggagccctcttgcccgctggaaacaaaggcaacaccactgctaatcaaaagggctttccgacgtggctttcccgtaaagataagagactcctgcgtgccgttcgagccaacctcgtggtggccaaggacggatcaggacatttcaacacggtacaagcggctattgacgtggcgggacggagaaaggtgacgtcagggaggttcgttatatacgtaaaaagagggatatatcaagaaaacattaacgtacgtctaaataatgatgacataatgttggtcggagatggaatgagatccaccattatcaccggcggtcgaagtgtccaaggaggttacaccacgtacaattccgctactgccggtaaataatttattcatttcattttttttttcattaatttctagttagtagattggatctaacaagtttctatgtcattaatgaaaagtattcgaatattccgtacgatttgagttttccaatagataacatacatggtggagacgtccaagttaaatcatacattgggatcgtaatcaattaccactacttttaaaaaaaagatttaaacgtaaccgttgtttttttttgtttttttcccccgcaaaatgtgtaagcgttaccatatttcattttctctcattatgaaacaattggctaaattgcatgtggtccaggtatcgagggacttcacttcattgccaaaggcataacgtttaggaacacagctggtccagccaagggccaggccgtggcacttcgttcatcgtctgacctctcaatcttctacaaatgctcaattgaaggataccaagatacactgatggtccattctcaacgccagttttaccgtgagtgttacatctatggaaccgtcgatttcatattcggaaacgcggctgctgttttccaaaactgtatcatcctccctcgcctgccactcaaaggtcaagccaatgtaattaccgcacaaggtcgtactgatctatttcagaacacagggatctctattcataactcaataatcatacccgctcctgacttaaaaccggtggtccgtagtgttaagacatatatgggtcgaccctggatgatgtactcccgcaccgtggttcttaagacgtacatcgatagtgttgtgagtcctgtcgggtggtctccgtggactaaaggttcgacgtatggtctcgacacactgttctatgcggaatataagaatatcggaccggcttcatccacgaggtggcgtgtccgttggaaagggtttcatgtgttgagtaaagcttccgatgcatctgctttctctgttggaaaattcatcgctggtactgcgtggctcccaggctctggtatacccttcacttcagaactctaaggccatctttgatttttcgtgtttcaggtgcaaggatttacattctatacttttgaatatataactcattatgcctattatgaaactgaagttttagc

SEQ ID NO: 141183 - DNA, 1287 bp, Arabidopsis thaliana landsberg
gttgatagtcgtggctgcattaatctatctggcattcttaaggtcacagaaggctatgggaaatctggtaatgtgatcctttcaatttctatatttttccggtgacattcctttttgatgatttgctgattgtctagcgtctttgtttctctacagtatcactctctgtaatgtctggtaatgaagttatcttctgtaaagagtcacaaattgatgaacgacagctaagacttgtaaccgaggtaaagattattttggtgcagtttggttttgtttcttgccaccaagcttttgtcaggaacttgtctctctactgacttctgatcctgaaattgtttgtgttgatcagctgcccgactgctgtactgctggtacaaatctcatgaacctcatcttccaagtgacggagttagatggttctttggatactagcatccatcatgacgaaaaatcaggttgtttccatacaatgagcattgaatctgattcaagcagcgttgaaagtgcaatcagatatgcctttgtccacgggtcctgcaaagtttcttctctctccctacctgagaacgagggtgtcttttcttgcagggtgttccattctcgatatcccgagctgcagatgagcataaaggtagtaattttgaattgggcatgtgttgcactatgtttctactatgggtagaattttcagttcaagctcgtgttaacacactttttcactctgattctctattttttaattctcagattcaggtaacatctgctcccacatctgaaagagaggagagtggatattctacaccgcattcaataacgactccaccacctgaatcagggattccttcaatcacaaatccatggccgactccatgttcacagtttggagtattggccattaggtcatcatcatcattggctctcagtagcgaaactagcctgatggatatgccacagtacactgaggtatagccatcaccatttaagcggcatattttgatatgtctctttcatttatactttagtgcaggcaaaaaaacatctagaatgagctagcttttgtattccgagttcatctcagccgcatgcttataatgttcctttcttactgcaggatttaaaagaaaaaggattatgtatgttttgtcaattttggttttatgatcttttaaatttaagtattcgttttacgtttaagctgcatgtttattaacaaggtttaattggtttcaagagattttttcagttgaaatggaacttttgacaaaggttctcaagatgaaggattgt

SEQ ID NO: 141184 - DNA, 703 bp, Arabidopsis thaliana landsberg
tggttcatgtatgcacaaaggagaaggcgaaaaaaagagtatcattgtaccagtggttgcatcaattgtttcattggctgttattataggtgcactcattctgttccttgttttccgaaagaaaaaggcatcaaaagttgaaggtatcaataaataaactcaagattaatattagagcatacatgcacatcaaacataacaagattttgccttatataaccttagggacactaccatcttacatgcaagcatcagatggtagatcgccgagatcctctgaaccagcaatagtgacgaaaaacaaaaggtttacttactcacaagttgtgataatgacaaataacttccaaagaatccttgggaaaggagggtttggaatggtctatcatggaactgtgaatgatgctgaacaagtagccgttaaaatgttatcaccctcatcatctcaagggtataaagaattcaaagcagaggtactttatacaacaattttagattacaaatttgtagaaaaatcaatgttcaataagatgtgatttgttaaatcttgagttgaaattctttctaccctttcaggtagaactccttctcagagttcaccataaaaatttggttggcctcgttggatattgtgatgaaggagaaaatttatctctcatctacgagtacatggctaaaggagatcttaaagaacatatgttag

SEQ ID NO: 141185 - DNA, 1303 bp, Arabidopsis thaliana landsberg; identical to SEQ ID NO: 15466

SEQ ID NO: 141186 - DNA, 577 bp, Arabidopsis thaliana landsberg
agtgtggtcgttgggaagctcgaatgggtcaattcttaggcaaaaagtataatttctctcattttatattcactcgaaaacttcatttttagtttgttattttaactttgagtttttgtttcttgaatcttataaaataggtatgtttatttgggtttgttcgacaccgaggtcgaagctgctaggtaaatgtctttttgtttgattctacaacacacattgttgtataatgtgtttttctcgttactaattgattttcattattttatatataatcacagagcttacgataaagctgcaatcaaatgtaacggcaaagacgccgtgaccaactttgatccgagtatttacgatgaggaactcaatgccggtaaattgtctcatttaatcgagtaattttatatattttttggtccttagtttcatcactttggtgttcgaacttggtttaaagattttgaatttggtgtatatagagtcatcagggaatcctactactccacaagatcacaacctcgatttgagcttgggaaattcggctaattcgaagcataaaagtcaagatatgcggctcagg

SEQ ID NO: 141187 - DNA, 877 bp, Arabidopsis thaliana landsberg
ctctcttcttcttgctcctttctcttctctctcacgcgttgctgttgttgactcttatttctctctgggtttccttaaaccttccgctacaatcttctcctcttacatgcgagcttctccgattctcaggttttgatagcggcttaatactcgcaattatggatttcgcagccaagaaattcatcaacaaccccaacggttcgttcttcttcgtcttcctccttccttttttttcttgcgtttctctgttattcgcatccccggcattttactttctccggcgtagattaggtcgattagaattgtgaacgctctggcgaactgttgacctatgttaattttgtttcccgattgtgttactgtttgcgaaatgatttgcattgcgagtctcttgctcataaaattcgccttggtctatttatccacattttccccccaattttgttctggatcctcgaaaatctgcttcgtcaccgttgtgtttcgttgcatggtcaagacgatgtcatgattttaatggcatagggtataatttccgcatggaattgcaattaacatcctcttggtagagaactagcggcttgtgactcttgtattaagagaattgatggaataaagaatggtttccgttttgcagatgttgtaactgagttcatagagggtctggtagaaacttatcctggactccagtatttggatggttttcctgaggttaaggtggtgctaccagctgatgtctcggctgcaaaatatgacaaggttgccgttgtctcaggtaagagttttgtgactgattattacgtggttggtgtagagttctgaaactcttataagcaatgccgctttcgtttgcaggtggaggcagtgggcatgagcc

SEQ ID NO: 141188 - DNA, 1106 bp, Arabidopsis thaliana landsberg
gtctacacctccacactccgacttggtaaatccccagactcatctctctctctccttttcttttgatttctagatttgctagtttgtttcgattgttcttctagatagaaattaacgagtgatttttgatttaaccgattcgcatcaatgccccttcttcttattgcgtcgatctcatggatcgggatccatcgttcctctatctgatttctcttgtgggaaagaatttcaagctttatggttttgtagtaatgaacgtttatcattttcgttcgagggaagatttttaatctttcgttatgcggattctggatattaggctgttatttttttttttttttaatcgattgaaggatgtcaatttatagattgggctgtagattgctagtttatgtcattgatattgaattgtaagtttttcgatcttccagtcatacaaatcactaattgcctcaagataggaaaatccattggcagtatatagatggagttcatatcttaagcacaggtttatatggtcattacatttctagcttttgtttgttaggactgattcatgttgggtttttggggttattctttataacgggtcatgcttgtatatatgtagtatcaatacatttctgatttgtggttatgctttgatgcaaaaaagatccaatctttcgagttggtagtgagttacatttgttacttttggtaggttgagaagaagaaagaagagatggcaggacacaaggttgcacatgcgacattgaaagggcctagcgttgtcaaggagttatttatcggtttggcactcggtttagctgctggtggtctttggaagatgcaccattggaacgaacagaggaaaaccagaactttctatgacttgcttgagagaggtgagatcagtgttgtagctgctgaagagtaattaagccgctcaataactggttcctgaagattgtttgatttccatttctgtcttttttttcttttttttgttgggttcttaagaaataaacaaatctgagaatgggatttgtaacaaattcagatgtgatgttcattcagacataatctcttttgttttgtttcgagaaattacaaaaggtgaatat

SEQ ID NO: 141189 - DNA, 2133 bp, Arabidopsis thaliana landsberg
cagagagagaacgattagcccagttccgatatcgttcggtggcttcttcatctgaagctacgatgatgtcggtgagagcaatcaatggttgctccatcattcgcactgccacttccgccggcggtcctcccgtctctctattccgccaccgtattcagcgcctcagagcttctcatctccgtgaattctcgaaattacgtttaaattttccactaatccgcgcggataggcggtttctcggaaatagtgatgctccgagctgttcgacttgcatacatagtctggtcgaaagtgtttccgaagagctcgaatccatcagcagacgcaagggaagccgaatgagagttcgcgccagtgtaaagtacgtcgcagtatccttctcttactgattattagcaaaattaagtgaatcattgtgtaattaggtgaatttgtagggtgaaattaacaagctacggagaggttctagaggataagctagtaaaccaggagctagaggctggtttgcttctggagtttaagaaggacgcagacagagtgttgttggcagttgttcatagacgtgatggcaagaagaattggatggtgtttgatcaggtttcaatcaaaacttactactcatttacttgctctagcgtcggtggagtgtttgcagattgttagacttatagaaagtttaatgttgcagaatggtgttagttgttccatcaaaccacagcaaattacatacatcgtcccgaatgtttataattttgatcatacaggacttactgattttctccaaagggctcaagataacttggtacgtaatgacattttaaaaggtttacaagtcttttttttctgtgagttgtagtctaagatgaggttgtcatgttgttacccatgaatgagcttattgttattgtttcgatgcaggatccccaactgcttgagtttgcttggatggagttacttgagaagaacaaacctgtgaccccagaagagttagcagaggtactatatatttgagttaatgtaccggttgaacccgtgggttgttaatgcttttaatttgcagatgatatatggtcgcgcagatcctcttgaaagctattgtgctcattttttgctatcacaagacgagatatacttttctatcttggagtcaaaaggttctcgatcaatatatagccctcggcctactgaacaggtatttcttgtgcattttttcctgagttatcttttggattaggtcatctatgtcactagaatggtttttttctgtagcttttttcctttcttggtagtgtaaatcctataatattaggattttttccatctatctagtacagctgagctgcatttgctccataagtttgtgaaatcaagaaagaattctatgttgataaaatttctaacgatacttgctgtgatgtaacttggcttgttaggtgatgatacgtgattaatgctaagagatctagattgtgaaagtttggactcttctattgctttacatgatttgtcctgaagaccttctttctctgatgatctcacttccgttttttttgtaggtggaagagcttttacgaaggcaacgcgtgaaggaggcagaagataaagagtttcaggagtttattcaattgctgaagtctgccaagaaggcacctagtcacgccaagccccctaaatcttcatggctagctgatgataaagtccaagataggattggctcacttgaagcttatgccattgatgcatgggcaagcactgaccagcagaaattggctggaacggtaagtcaaccttatatttcttctgtggtaatatctcttcagttttttctatgtgattgcgaagcgacatctctgaaagaatattctcttcgaatgtcttgtgatcgttttttcactgtttggttattgaagcaaactgtcaattgtaatcatgtgtatttttgtggttgcttccttacagatattaaaatccatggggttacagaaaacgtctgtatcagcactaaaccttctcatagatattggatattttcctgtacatgtcaatcttgaactgcctaagctgaatcttccaacccaccactcagaagctatcactgaagctgctgaagctcttcttgtcagaatcgtctga

SEQ ID NO: 141190 - DNA, 2798 bp, Arabidopsis thaliana landsberg
  unsure (1)..(2798): unsure at all n locations
ccatcctncatatttgcagagctcgagattctccttccctatacaactctcatctgtaatcgatacaggtttgtcttctacctcttctctttggttagattcttttataatctccgtcgctgcataactctgactgggttttcttcggcaaattctgatttcgtcgctttgtgttagttttagttccttgatttctaattcactgaattaagaactcgaagtatgtttactgttcctttgatctgagggttaggttcttgtacttgtaagaaacttgcttgttctgtctcatcgttcatgggatttgatatatcatctaattaatttttcttctttgatgaattttcagatggcagcttcatcagcttgtcttgtgggaaatggtttgtcagtgaacacaacaaccaaacagaggttaagtaaacatttttccggcagacagacaagcttttcttcagtgattaggacatctaaggttaatgtagtgaaggcttctttggatgggaagaagaagcaagaaggaagaagagattttctcaaaatcttgttaggaaatgctggggtcggtttggttgcaagtgggaaagcaaatgctgatgaacaaggtgtttcttcgtcgaggatgtcgtattctaggtttctagagtacttggataaggatagggtgaataaagttgatttgtatgagaatgggactatagctattgtggaagctgtttctcctgaattgggtaaccgggttgagagagtacgtgttcagctaccgggtttaagtcaagagcttctacagaagcttagggctaagaatattgattttgcagcacataatgctcaggaagatcaaggttctgtgttattcaacttgattggtaatcttgctttcccggcgcttttgattggtggtttgttccttctttcgagacggtctggtggtggaatgggtggacctggtggtcctggtaacccacttcagtcccgtcagtcgaaagcaaagtttcagatggaaaaaaacactggtgtaacatttgatgatgttgctggagttgatgaagccaagcaagatttcatggaagtggtggagtttctgaagaagcctgagaggttcactgcggttggtgcccggatcccaaaaggtgttcttcttgttggtcctcctggtaccgggaaaaccctgttggcaaaagccattgctggtgaagctggtgtgcccttcttttccatctcgggttctgagtttgttgagatgtttgtcggtgttggtgcatcaagggtccgcgatcttttcaaaaaagccaaagaaaatgctccatgcattgttttcgtggatgaaatagatgctgttggtaggcaaagaggaactggaattggtggaggtaatgatgaaagagaacagacccttaatcagctcctgactgagatggatggttttgagggtaacactggtgttatcgtagttgctgcaaccaacagagcagacattcttgactccgctttgctaagaccagggcgttttgaccggcaggtatatatttgactaaatgccgtgtgtctgtgactttccattgatcctctttattgctggttgcttattgtgtgttgttgtttgatgcaggtatctgttgacgttccagacgttaagggaagaacagatatactcaaggttcactcggggaataagaaatttgaaagcggtgtttcacttgaagtaatagccatgagaacacctggatttagcggagctgatcttgcaaacctcttgaacgaggctgccatattggccggccgccgtggaaagactgcaatatcatcaaaagagattgatgactcaattgatagaattgtagctggcatggaaggaacagtcatgacagatgggaagagcaaaagcttggttgcttaccatgaagttggccatgccatatgtgggtaagtcagaatcagattagatgcatgtgtgtgttatcaaaagcctaaatttaagttcattgttcgttcttgcagaacattgactccagggcatgatgctgttcaaaaggtcacgttgataccacgaggccaggctagaggtctgacttggttcattccctcagatgacccaactctaatctccaaacagcaactctttgcaagaattgttggtggactcggtggtagagctgccgaagaagtcatctttggtgagtctgaggtgactactggtgcagttagtgacttgcaacagatcaccggtttggctaagcaggtatctcttctacactcccagcttcagtatttttttctgttatcctaaactagtgaatgaacttgacagtatatcatcatttacttgcagatggtgacaacatttgggatgtctgaaatcggaccatggtcgctaatggattcatcggagcaaagcgatgtcattatgaggatgatggcaagaaactcaatgtctgagaagcttgcaaatgatattgatacagcggtgaagacattatcagacaaagcgtacgagatagctttgagccagattagaaacaatcgtgaagccatggacaagattgttgaaatacttcttgagaaagagactatgtcaggcgatgaattccgagcaatcctatctgaattcacagaaatcccacctgaaaaccgtgttgcttcttcaacatccacatcaacaccaacaccagcgtctgtctgagtaagagacctttgaatctctgtgtatattatcttgagatacttccccatactgtgtaacagcacatcttaatttccctagttggagtatatatgtatacgaattcgatatacaa

SEQ ID NO: 141191 - DNA, 637 bp, Arabidopsis thaliana landsberg
ctaaggcaaagccgcagccaaaggaggaaccagtttctgcacctaaaccagatgctactgttgctcagaatactgagaaagctaaagatgcagtaaaagtaaagaatgttgctgatgatgatgatgatgaagtatatggtcttggaaagccgcagaaggaagaaaagccggttgatgcagctacggcgaaggaaatgagaaagcaagaggagattgctaaagccaagcaagccatggaaaggaagaagaagctggcagagaaagctgctgctaaagctgctataagagctcaaaaggaagctgagaagaaagaaaagaaggaaattaccttttcttttttgttgtacctcaatgctctttgcattcttctctctccattctaacagttctcgccatctttttttgtgtgttgcaggagcaagagaagaaggccaagaagaaaaccggaggcaacacagaaaccgagactgaggaagttccagaagcttctgaggaggagattgaagctccggtgcaggaggagaaaccgcagaaggaaaaagtcttcaaggagaaaccaataaggaacaggacccgcggtaggggaccagaaacgatcccaagagcgatccttaagcgtaagaagtcgactaattac

SEQ ID NO: 141192 - DNA, 1753 bp, Arabidopsis thaliana landsberg
gaagccagaagcatatgcagtttctatggatcccacatttgcaagttatatgcaaactgagttgctttccgtctcatcaggaaagaaagaggagggacatgacattgtattacaaaggtatatatcttatataatcatctgtctctttaaggttttcgcataaacctctaggttcatgaaaatggtagattctatctcttttgaaacgcttgcaggttatatataggtttattatttctttttctcttctactggaactggtccaggatactgcaacgatattgaataattaaataaattcccttttggcaggaacctcaccgggttgtatgatctctgtaaagctatggaaggtgtcgaagtagtaaatggcttggaatgcaagatgtcttgctcttcttacaaggtaaaccgatcttccgtcccaaagatcttgaaccaagcaactcaattatacccatttcaacctgttcatctttctttatgcaaaagcttctctgtactcaatttcttgttcatgaatcagtcaacatatatactcatctcttgtagatcgcgtacgtattggacacagaggattacttccacaggaagaagaagaaaaagaagactgaacagttatggcaacgtaacaaggtgagagtagaaaggttccataggtttctctcagcttaaagatgaccacaacaaagtttcctcttgggttttcttctttccttcaaaccaacaacacacaagaaaaaggtaaaactgacaaagtcgcacaagtaaagttctctgcaacaattcccaactttggtcttcaagtttcttactatgctgattataagatgagatatagagagatgcacaaaggaacaaaaccataagaagaacaatggtggtttagagttactgtgtgtatctttaggtttcaagtgccaagtctgttagtgttacatgtagtgtgtgtctgtgctctttaggagaatgttgttgtaaatatgggaaagcacttgaagatgccttggttaatagatagataggcccaaaagaaaaattattattatatgcttcaaatttcaagattatgaaatcaactaaattttttattggtgactaagcggtaacaacaacatttttgttttggtgaattaagaacaagaaaacaatgagacatacagagacagagaaatcatatttcgtgttaattaagtttacgaaaatgactaaacctaaccctaattaggtttcatctttcctaaagagtaaaagaccaaagaatatgtgttgaaaacccctgcatccagtatatggatgtttcatacgttcaacaatgatgatttttttatcatctcataatcgatggaataatactacttagttgttttcaacgcattgaaacactccttagtgaggccgtcgtgatttgtctttaagacaagacttcaaacaaacgggatgcctatgaaacattcaacgagacataaatgattgtttgcgatttgtgaaatgttaagattcatttttgcttacggactaactaaccagtggatgcttaggcgcggttagttttcaacgtatttaaaatttaccagttttccataaatgagtatatgtaacttccaaatcttgtatacgtggcctttctttactcactctcttcttatagaaggaaatccttagaatacattccacgcagaagcaatctcacgtcaattctgtacaactacacaaactctataaaccatacatcttccgtcttctgttgtaa

SEQ ID NO: 141193 - DNA, 602 bp, Arabidopsis thaliana landsberg
gactgctcaagatcatttgcggctaaatgcggcaagcttgaggtagacatctaaagacataatgctatgtgtcaaacccactaaagtcttcacctttgtgcttgatttttagtagagggatctaagttttgaagctgaatccatatgactttctagacttcatagaagtttaactacgaataatggttgtctaggtgcttaccgatcgtgatttgcgggaaagacatttaggagatatgcaagggcttgtgtatcaagaagcttcgaaaattcgcccggaagcttacaaggctttttcatctaaccgcacagacgttgatattccagtaagataagaagcttagttatatgaatgatgcttggtttctgtattcaactaacttttgcttcgtttatgtgaatgaagggtggaggagaaagtcttgacaaactttacgatagatgtacaactgcattacagagaatcggcgacaaacataaaggtttcttcctcttctctgtgtgtttctttctcacagtttactacactgcacatatgttctaagtattggtttctgtctacttggtggttgatgaaggtgaaaggatagtagtagtgactc

SEQ ID NO: 141194 - DNA, 527 bp, Arabidopsis thaliana landsberg
agattttgcagcaaaagtgggaatcaagcattggaaacgaggtatttagtttaggatcactattcttcgaacctccatggtatgatgtgagtcttaactatgtaacaacactctttggttgcagaaagctggaagattgatggggccaatctctcgactaaaacaagcatttgtcgggggacagcggcgggattcattcatccgagccagcgcccaaaacgaccgttaaatcaaaacaaaaaggtgaattactttgatgatgacgataagaacaagagtagcttctttggggtcgaaaaacatggatgtaatgtaatggtttaagtctggtgtgtgaatgtgtttggtacttctcttcaggtcatggtttttgtacatatttctttggtgtgaaacaatcatttacccatttcattatctcaatgccctattactctctttctctgtttatatcataatcagatactcagtgtctcctgttatgtttttgttggtcaaattgaaaactctttattttggttagagaa

SEQ ID NO: 141195 - DNA, 712 bp, Arabidopsis thaliana landsberg
gggaagattggtaatcggtaatcacggctatttacgggataaagccacggcctatgagctttcatgtccaacgaaagggttgtttaatcataactaatcctttgcctcacggaggacgtggagctctgccgtctgaaggcggcagtccctccgatctcctcttcctcgccggaggcggttccacaaatagccactaaccctaaccctttttctaattaggtttttagttcttagagtcctgtattaatctgttatttcgagattataatatttgtgagcaatgttgttgaagatcaaaagagttccaacagttgtatcgaattatcaaaaagatgagacagttgaagaaggtggatgtggtcggaattgtctgagcaagtgttgcatcaatggtacattttatagagctggcaaagttcttctttttgtttgaatttgaattttgctgacattttgtttgtgttttcaggggcaagacttcctttatatacctgcaagaatcttgataaatccgtcggagagaacacagaatctccggtgacgttcctcgaatccttagttattggagaggtagtggttttggatacatgttaaaaagttctcacttcgttaaccaattcgttaattgtttgagtaatgtatcaaataccttatgttttctagtgggaagatcgtttccaaagaggtctttttcgctatgatgtcaccgcct

SEQ ID NO: 141196 - DNA, 1195 bp, Arabidopsis thaliana landsberg
tatttagagaagatcaatcgaatttctccgaacattgagtttttcaattccttcaatcgagaacacaaggattgcaacaacaacaacaacaacaacaacaatgggttcatttcaaaatctcatttggctgatggattggatcagaagaaaccaatcattttacactggagttctgattctactaatagattgagctgggagaactgtgatcttctccttctacgtgatgggcttgatcacatccagaacagagaaaataccgtggcgttatcggagacagagctcgacgagaagaatcatcatggcgaagaagaggaaagcgaggacgaagaataatcacagtctcagaatgatgaagaccaattgttagacgttattactctgagaacaatggtgaagagagagagaaaacgtggagattacatgaagaaagagctggagaaggagagaagagcagctgaatcagctgctgaagaagccatggctatgcttctgaagctacggatggagaaaagcgttgtggagatggagacaaaacaatacaagagagtcgccgaacagaagcaagtgtacgatcaagaagtgattcaatcattacagtggatgttgatgaagcttgatgatgacgaagacaagattcaaatgtaaactgtttgatcctctgtttttttgtatttatgcgtataaaactataaataagcaaaatataacatgtatgtatccaatttcgattaaaccgaattaataatcaacaaaccaaaccgaaattggatctaatgtttattaagacaagtctagttacgtggccggttactattggatatgtgacaacgattcaacgtggcaatttatggactattgaaagacgttattgcccctttcatcttcattctttctttggtcatccatctgaaaattcgatctgatcactgagaaactacggcgacgacgaagaatacggtggaggaggaagtacaatgagaatattaagctacggaatcgttattctctctttactcgttttctctttcattgaatttagcgttcacgctcgtcccgtcgttctcgtcctctcaaatgacgatctcaatagcggcggcgatgataacggagtcggagagtcctctgacttcgatgagtttggagaatccgaacctaagtccgaagaggagcttgatcccggttcatggcgatc

SEQ ID NO: 141197 - DNA, 1806 bp, Arabidopsis thaliana landsberg
ggtcaaaattggctgatgtttcgataagctcatcggttggtacgttacagtcaagcagaaagttttctcaaaagtctattgctaacaaagaggaggtggattattttgtttctcaggtttcaatttttaaaaagagacatttatgctatactacgcatatttttttgaccttgatacttgtatagggtatgagttcaaggagtaagtctatgtgctccacaaagaagtataaaactgagagttctgttaagcaatttgatggtgaagttcagaaattgaaggcgcaaaaggtgaagtatattgttgtaaataatgtttatgatcaatggaaaatgcagcagtttgttttgggtttttagttttgtgagttgtgtatattcttcaggttaagttgcattgcaagatcaagctagactctatgcagttcagactattgaaagcttcactagaaaaggaagttcttcaggtaacgagagtagcaggtctagtatctatacattttttctttggtttatgagtgaatgtcaaatcatcaagttgtagattcccacttcgggttacatcataatgcagtcaagttctgatggacatagatgatagttgataatctggttacatgccatacttgatttatacttatgtatgattgataaacgttctcaaaatccccatgttttttgttcaaattgtttgttgcacatatggttttccatatatatacagtacacaacaggggttctagttatggtagtttgattttgagaattgtattccaagatcagtttggatacattctttcttgatgagattgttagccaattgtgcttgccttgttcagtgctctcttagtttgatcatgttttccctcttatatgatacctcaggcttttaattatatagtgcttctattgtaacagctcaaaaaagagctaaggaaaagtgagtttgagaaacatgtcctgtcagctctgaacaatcgccagaagctggtatattttctgctgattgtactatgctatatgtatatttcagcaaccgtggtttactactgactccatgtgacttgttaatgtctatattcttttactcagattttgcagctgaagaatacacaagctttgacagccctgaagcgtctaaaaatgctgcttcaatctaaaaagatttcttccaacaaaaagaaaggtaacataacagatagctggtatccgttcctttcttttccttgtttcttttgctaaattgtgtaagtgtcttctttgtattttccaggcccatcaaaaggaacaagctccgagattcaggtatggatacctgagcctaagcatcaatgtaacatcttattttcaacgagagtttaagcaattggttaagtgttacataagctctcaacagcactaattttttggaacctctatttaggatctttagtatatgttacactcgtgacaaagattcagatttttgttattggatgatatacgtggtgttgtattgatttctacattttggaactccaaatggtttcttattctggttgtgcaggagtctagcaatgaatcaggcctactaatgaaactgaataaaattcattctgattacgaacgccaaatgaaagagtaagctttcaaaagaaaagctgtgggattttatatccctttctttttgctattgctactctattacttcagtagcatgaaattatgtattctttactatttttatcagaatggctgaagagatcaaaaggttcagcttagaggcaggtttgttgaaggcagaatttgagggagagcaaagctcatg

SEQ ID NO: 141198 - DNA, 1575 bp, Arabidopsis thaliana landsberg
  unsure (1)..(1575): unsure at all n locations
gttgtagtatatactggagactagtgtgtacccacgcgagccagaggttctcagggagcttaggaacattactcataaccaccctcaagctggtatggctactgcaccagacgctggccagttgatggggatgctgctgaatctggtaaatgcaagaaagactatcgaggttggggttttcactggatactctcttctcctcactgctcttacgctaccagaagatggcaaggtatttgcatagatatgaccaaaccaaaagaaaaagtgtcatgatgtttttcgttgttttgcttctgtatcatttctgcaactgatttggtacacgagctctgcaggttatcgccattgacatgaatagagactcgtatgaaataggattgccggttataaagaaagctggtgttgaacacaaaattgatttcaaagagtctgaagctcttccagccctcgacgagcttttaaacaatgtacaacttcatacttctttgtctttcaaaaaaagaattagtatgtatcctgagatggtctttttgttttgatgtttgtgatgcagaaagtgaatgagggtggattcgacttcgcatttgtggatgcagacaagctgaattattggaactatcatgagaggcttattagattgatcaaggttggtgggatcatagtgtatgataacactctctgggnnnnnnnnnnnnnnnnnnnnnactcgtccacgcccgagtggaggatagaagtcaagaaagcaaccctcgagctgaacaagaaactctcggctgatcagcgtgtgcagatctcgcaagctgcgcttggcgatggtatcactatttgcaggaggttatattgagcgagtattgttgttctttgtgatctttagggtcatatgattgtgagccctttatattgagctattgtgatgcaagagtgttattgttctatgtgatattttggttcctgtgtgaatgtgaaccttttctatcaagtttgtggatttcttcaaatttcaagattataacagacagttacgaagaaacacaactcattttatgttttgtgtcttttggcaaaactccaaattctgaacattgctctaaaatataatataaaaagtaaaaaaatgaatggggcgttccgagaatcgaactcgggacctctcgcacccaaagcgagaatcataccactagaccaaacgcccacattgatatatagtttgctagcttttaatacaatgtatattaaataatttagttttgtgatataaacagtaaacagaacaagatattttcacccaaagttaaaaaatccaacgtttgttcaaaaataagaaaaaaactatccaaagttaaattatcaaatgttaaaaatcgttagacgttaatcacaatataaaggaactcttttttttttttttgagttaagaaacacttagttgggccataaaaatataggtctagtagatgaaaggcccataaaatcaactagggttagttcttcttcttatagagcgccgcatataagcttcatccttctccgtcaccaccggctctgtatttcggcatttgtggagagaagaag

SEQ ID NO: 141199 - DNA, 2885 bp, Arabidopsis thaliana landsberg
aatcagatcggatatttcgatgaagaatcgttctttagggttttgggcgatcggggttttgctcatcggaagcttgatcggagctacggaaggctcgattcatgagtacaacaacgaaaagttcactgcaaaattcaatgctcgcttcttccatggtggtagcgaaggtctttacgcttccaaatctcaagatctaaactcttcttcttcttctgataattcttttaaaggcaagtcctttataaggtcagtttcactctttctgaatcatcttcataattcaaagtttgtgcatttggaatcgtactgattcaaagtttgttccttttaggtttgatgatgtaacatttgtgaggacaaaggaatctgctagtaaacagaatgcaatgcagtcaacttcaggattagtggaagcaattatacttgaggtaaaagaccgtgatagaatcggtggtacttttctcaaatccgaagtgatttgttgcacgccggagctagctgatactggatcttgtagtcttggggaagttatcattaagagagagtctaatgatgttgagtggccaagacagatcaagacattctttaaagggaataagactgaagttaacatgtcccctgaaactgtggttatcaataagactgggatgtattatctttatttcatgatatgtgacccggaattggatggtactaggatcaaggggagaacagtttggaagaaccctgatggttatttacctggaaaggttgctcctttaatgaacgtttttggctttatgtcgttagcgtatattttgcttggtctagtttggtttgtgaggtttgttcagttttgcaaggatataattcagttgcattatcatatcactttggttattgctcttggtatgtgtgaaatggctgttcgatactttgagtatgttaattttaactccactgggatgaggccaatggatgttaccctatgggcggtgaccttttcttctataaagaagacgctttctaggcttcttcttctggtagtctctatgggttatggtgttgtaaagcctacccttggtggtataacctcgaggatacttctacttggagtcatatattttgttgcaacagaggctcttgagttggttgagcatttgggaaacatcaatgacttttcgggaaagacgatgatagttttggttattcccgtggcattactggatgcttgctttattctgtggattttctcatcattggcaagaacacttgagaaacttcaggtaagataccacacttatatcgaatattggatactcatgatccgtcacattattatatcagaaggatgtatatataccataggctttcatgggttttaaccatgttatcgtacttagattccaatttatgcagcctattcgagggaaaatcatatacaattgctgcttaagccatctatgacgatccagttcttcgtactctttttttcagctgcttatctgtctaaatttcactacagattaagagaaacatggccaagcttgagctttataggaacttcaccaatgcactcgctatctctgttctgctctctatcgcttggattggttttgaggtaacaaatcgctactctagtgactgtgtctcgtgtataacatgaaacccctagtcagaggagtgtaactgaaatcaaattcttctatgtgtctgtatcagctatacttcaacggaactgaccctctaatcgaactctggcgaatggcgtgcatcattccagctttttggaatttactctcttatggtctgttagcagtcatatgcatcctttgggctccatcaaataatcctacaaggttctaatacttccattagcgtttactcaaatgttttggactccgatggtcccaatgggtcaactgccaaagatgtcaagattcaagacacttatttgctcttcaccgagagattatcattttgcactcagcttacctctaattggtttaaacctttcaggtactcatacttagcggaaacaggggatgagtttgaagaggaaggtatctcattgacaggtagtggaattaagagtacagaagatgttgaaaggaatgaacttctatttgggcttccagacgacgttgaagagggcaaacgtgagtaagctccagatagcaagcgttagatagtccatacctcgccgagtagtttttagtgtatgtaaccttatgtcttttatccgttgtacctgagtaagttgtttactgacctttaaggacttgtttaccagatcgaagttcttttagtcttatagaaagatttacagactgcttatttccagagcgtcaaagggaacttttttacattagagacttgagatattcgtcgggaagtcgttgatcatcatcatagctgtacattaaaggaactgttcttgcaatgttgagacaagcttttgagaatgatcttgagaatggacatggattcagacactccctgttcaagcgtttccatgctctagatatcttctgggcaacatgtgttcttgcttcatcaacagttgatcccttgtactcgttcaggtaacactctacatatgatccatcagttccatcttggttctcatcctgttaaacaacaaaaaccatatctaagattcgatatcaagtttcagattctctctagtcacattagttatcagtagttcaatataaccttggcacttccgagatcatcccagagcctgagaattgtagctgcagatgatacaatccccgggttactctctattagttcgactttctcttttgttagttcttcgcctaacaagatataggcatgaagcatcactaaatgaacacctgaactcacaaccccattcttcatatactcttcagtggtgg

SEQ ID NO: 141200 - DNA, 754 bp, Arabidopsis thaliana landsberg
ggagaagaatgtctcgatttcaaattttcttaaggaaaagtttcaaaatttaaggcggcagtttcgcgaaatcaatgggcttttctttttctattttcattatggaaaatttcgcgctaactcacttctagggtttgtaaaattcatcttccttatttctacgttttagccaattgatgcttcgctttcatattcttacttacatttctctttctatggtatgtctgatagcgattttgtatcagtgatgttgaatctaagtgtatgacattgctagtttttgattgattgttgaaatctctaggcttgtctttagtaattgatcgatttgagggttttaaggagaaaatggtttagggtttattgattctgtatttttgtgtaacgcagctcttatggatgaccatggtggttctgatttgagcctcgaggatctcatggatgagtattcttctcgacccgcacaaatagctgaatggttatggtgtattgaatatgtagccaaatttgtcaaggatctaagctgcttactcggtaactcccgaaactcctcttacggtttttgtgtattttgagagcaagtgttaatatgaagttccttgtttcagatttgatgaacattggttatcagtactctgatgactatgggaagaggattaatgaagtcctgtctcttagagtcttggagttcatgtttgatccaagcatgagcgatgctaacggtgttggtgttgcttctgctttagaggaaaaa

SEQ ID NO: 141201 - DNA, 712 bp, Arabidopsis thaliana landsberg; identical to SEQ ID NO: 4242

SEQ ID NO: 141202 - DNA, 3885 bp, Arabidopsis thaliana landsberg
cgtatcataatacgacgccgaatctttacttgctcgaacaaacccaaaaagatacatatcacgagattaaaccttatccaactaagagaagccatttttattttttttgggtctctgagttgtgtattgagcttcatctccttcaaatggcttccttatcaaccacttccctaagcttcaaagctccgtccaccacaatttcacaggtaatttaacaaattcttctcataaatctcagtgtacagtttgttctcattctttttttttggaaggagtcttaatctcaacatatatagtttctttgtcgtaaacatttctcttaactataattaagggtggatcctgttatttatcaggttttaaggaaagcctcaagttctcagtctgtgacctttggtcgtttcacgtcttcaacaaagagccttcgtcttcaaatcagttgtgccgtaagtaatcattttgactgaagctaaaatttaaattatatgagaaatgcgataagttaattgtagtatcgtgtgagtgtacctacaggcgaaagcagagacggtgcagaaagtgagtgacattgtaaaagaacaattggctttagctgctgatgttccgctcactgctgaatccaagttctctgctcttggtgccgattctctcgacaccgtatgttacactctctctgtttcatatcattgtcatgttatatttcctctgtttcataatgatctgatgtttgagaattaagcaaaaatatcattacctcaatgcaaaaatatgaattttctgttctgattggttacttttgtgttataagttagtagttactctttaagattgttgggtgaatatggatgcaggtggagatagtgatggcgttggaggaaaagtttaacataagtgtggaggaatctgatgctcaaaacattacgaccatccaagaggcggctgatttgatagaggaccttgttcaaaagaaacccgcggcggaaacttcctgaaccggctgtcttttctttcctgacctattcttgccttcagagcgttttattacggtatattagaccgtttgttatttttatttatttcggaagctaagattgggtgttgacaatgagacaactttggtacgttgagattgattctttgtggtgattggtcttatgacgaattcataaatgtgtattgtttcactaccacctggtcttttctgtatttgagttatgacatcgttttgttagtcgtggttaggttaagttaactaccctcaaagaatgaaaacgagagttgatcttaggtgagttgggtagtatcaagtagggtaaagcagatgtatactgtctactcaaatagaatgggtgtgaaaaaaacattacctgaaaatatgtatgaatgtaatttgactaggatattgttggttttttggacattcttattgggtaatctcaaatatatatgaggtaatttcaaaagtactaataatatggatatccttaaacttttgagtaattgatttttattttattttgtaatgaacgtatttatgtacttattaaacctaattaatttaaactttatatcaatgaaatcatgcaaaagattctaggtctttaattttcttgcagaacaagtcaccccttctcttcttaaactgtaaattttttatcagcactacaattgcaattgcatagatgatggtagtgtaagcaatcttctagccgcttccgggttgcaaagttaccaaatcttggtagattttatagacgatgtagacaatcaatacatatctccgagatgataccacctccaatattttttatacttactgatttttgtccaatcttactttgaaaacaaatatgttcaaaccccctaaaacaacccaatcatgatatgagtagtatttctcatccttgtatgttttgccatatagattaatgtttctaatcctccaatttcgtaatggtacagttgcttgagaatctcaagcaatcatcataaaactatcacttaaatcgatacagaatatcacctaaatcatgttagacatgaagaatcaaagacaagagttcattacaatattaatcacaagctttacattcataaatctaccaaaagccaacactacttcacacataaatatttttctcttgattcatatgtaattcaaaattgaatcgataactaattattagtaatctgtattaatgtacccagttgttatttgtggttccataattaatttaaaaggttttaaaaataaaacaattactaatgattttaaaattgcacaaatgggtttagttgaggaaaaaatatattaaagaaatgggtcccacgttctctcaacttcctctcccgccgcgaggcggtccacgcgtacctcgtttacatcttctcccttcttcttcctcagcagctcaatcgaaaagtctttcccaccttgttgactccgtcgatggcgcggagaccaggaacctccgcttcttcttcacccacgatgtctccgtctcatcggatgagcggcggcggaggaggaatctccggcaaaagcacgctccggaaacaaaacgccgccgagctactcgcgaaggtcatggagaagcgcgaatatgattatgattacgacgatgaagatggaggtgaagatctgtaccaggtacatcttcctcctcttactcagtctcgaagacgagatgataagcgtattggtaagggctcagtcaacgagaaaaaggctccggcgaagaaaccgatcatacttccggcgcctaaatttgatgatgaatccgaagatgatgaaactagagctaattttcgcccaaatccagtgataattcctaaaaagaatgctagggaaccgagaaaagctccggcgacgaaaccggtcgttcttccgccactctaaattttccaatgtgcgccggattccagtggagatttctggaaggaatgctaggggttcgaaagaagcttcgacggtgaaacaagtcgttagtacgcctaaatttgacgatgaatacgacagtgatgaaattacagaggatgttccccggaatccagtggagattaggggtccggtcagaggaaaagtagctccggcggtcaaacccgtagtcgttcttccgactaaatttgacgatgaatacgacagtgatgaaattacagaggatgttccccggaatccagtggagattaggggtaccgtcagaggaaaagtagctccggcggtcaaacccgtagtcgttcttccgactaaatttgacgatgaatacgatagtgatgaaattacagccgatgtgtcccggaatccagtggaggttagggatccagtcagagggaagttagctccggtggtgaaacccgtcgttcttccgactaaatttgacgatgaatacgatagtgacgaaattgcagctgatgtctcccggaaggcagtggagattcctcaaaagaatgaaaagagtacactcagggttagagtcccggcatattcacgtcggaatccgttggaggaatttgagcagaacggagaagacaagcaaaatgttcaatgtgatgtgcctgctaaacaatcggaagctcaattaaagtataagaaaaggtaaagcaaatttttctcaagtcaaagcttcttttgtatatgttgtgtttgacgaaatgactgggaacgaacgattagtttcaggtaccatcctgcaaatattttagcacctaataactctaaccagcaggaagatgatcgagaagcttcagccctgcgtgatgaagtaggtgtttcccaaaatacaagaaaactattttggttacatcactgatctctcatttgaatccaactcattatcattgcagttagacatgcttcaagaagaaaacgataatataatggataag

SEQ ID NO: 141203 - DNA, 1338 bp, Arabidopsis thaliana landsberg
ttgcaattcaattcccgatctgatccgttcctgcttagatcggagcaaaacaatggcggagatggcggataaggcgaaagtggaggagatggattgggaaggtattgatggagttcgtatgacttggaacctttggcctcgcactaaggttgaagcaagcaagtgtgtgattcctctcgccgcttcaatttcaccgatccgtcgtcacccccttatccttgatctcccttatgctcctctcgattgcaagacttgtaaagctcttctcaacgccttcgctcgtgttgatttcgccgctatgaactgggtctgtcctttttgctatcataggaatcatttcccttctcattaccattcgatctctgagattaatctccctggtgagctttatccccagtacactactgttgagtacacgttgcctcctgatccgtctcgtgtgcctccaccacctgtgtttgtgtttgttctcgatacgtgcatgattgaggaagaattgggatatgccaaatcggctcttaagcaggcgatcgggttgcttccggagaatgctttggttgggtttgtgtcgtttggtactcaggctcatgtgcatgaattggggttctctgagatgtctaaagtttttgtctttaaaggcaataaagaagttaccaaggatcaaattttggatcagttggggcttgggtcttcttcgaggagagctcctacttctgggttttctaaaggagcgcaaaacggattccagagttccggtgttgacagattcctgctgcccgcttcggagtgtgaatacacactggacttggtgggtaatggttttggtttggatagatttacgtctatgtttgttttaatttaactcgtgtttgttgtcaattttcaatcggattcttctgcttctaaatgattcgttatttgtaacatggatttgaacactggtgtggctgatttttggtatgcagcttttggatgagctccaatcagaccagtggcctgttcagccaggtcatcgtccccaacgatgcacaggggttgcattgagtgtagctgcaggattgcttggagcttgcttacctggaactggtgctagaattgtagctttggttggaggtccatgtacagagggccctggaacggttagtgcttattgattcctcggttgatggcactctcaagttttatcgctccatattttgaaccatatttgttatattctgaatcaaattttctttcttttgtcttttcagattatctcaaaggatttgtcagatcctgtgcgctcccacaaagatctagataaagacgctgctccttattataaaaaagctgtaaagt

SEQ ID NO: 141204 - DNA, 602 bp, Arabidopsis thaliana landsberg
tcggtgtatctaatcgcgttagggtatggtggttatcagtcgaacatagctacttttggagctgatcagtttgatgcggaggattccgttgaaggacactcgaaaatcgcgtttttcagttacttttacttggctctgaatcttggatcgctcttctcaaatactgtcttgggttactttgaggatcaaggggaatggccgcttggattttgggcgtctgctggctctgcttttgcggggttagtgcttttcttgattggcacgccaaagtaccgacactttacgcctagagagagtccttggtctagattctgccaagtgttggttgctgcaacaagaaaggctaagattgatgtgcaccatgaagagttgaatctctatgattctgagactcaatacactggagataagaagattcttcataccaaaggcttcaggtaagataaccaattaaaagttctgttataatctcagaaaccatcgtcaagatcagtgttaactctctctctattattttctacagattcttggataaagctgctattgttacacctgatgatgaggctgagaaagtagagagcggatcgaaatacgatccatga

SEQ ID NO: 141205 - DNA, 1137 bp, Arabidopsis thaliana landsberg
tatgcggatgatgccttgggatccacgattcctcaagctgatttggtatggcggataatcctgatggctggtgctatccctgcggctatgacgtattactcaaggtcgaagatgcctgagaccgcaaggtacacggctttggttgctaaggacgcaaagcaggcagcttcggacatgtctaaggttctgcaagtggagatagagccagaacaacagaaattggaagagatctcaaaggagaagtccaaggcctttggattgttctcaaaggaattcatgagtcgccatgggcttcatttgctaggcactacatcgacatggttccttctcgacattgctttctacagtcaaaaccttttccaaaaggatattttcagcgcgatcggatggattcctcccgcgcaaagcatgaacgcaattcaagaggttttcaagatgtgcccgtgcgcaaacgctaatcgccttgtgtagcacggtacctggttactggttcacagttgcgttcatcgacgtcattggaagatttgcgattcagatgatgggtttctttttcatgacggtctttatgtttgctctggctattccttacaaccactggactcacaaggagaaccgaatcggatttgttatcatgtactcgttaacattctttttcgccaactttggacccaatgctacaaccttcgttgtgccggccgaaatcttcccagcgaggttcagatcaacctgccacggtatctctgcagcatcaggaaaattaggagcaatggttggtgcgttcgggttcttgtacttggctcagaacccagacaaggacaagaccgacgcaggataccctccagggattggggtcaggaactcgcttattgtgttgggtgtagttaacttcttaggtatcctcttcactttcttggtacctgaatctaaaggtaagtcactcgaggaaatgtccggtgaaaatgaagacaatgagaatagcaacaatgatagtagaacggtcccaatagtttaggtgatataatacgccttttgtaataattttcgttttttctttctccttgtctctagcaactcaagttgttctttgtgtaatccattgatacctaattaatgctagagaaatcaaaattttcatga

SEQ ID NO: 141206 - DNA, 376 bp, Arabidopsis thaliana landsberg
caaacatcttcgtctcttgaagattccaaaaaaaacaaatcaaaagctatgcaagatccatcacgacccgctacaggttacccatacccatacccatacccgaatccacaacaacaacaaccacccaccaacgggtacccaaaccccgccgccggaaccgcttacccctaccaaaaccacaacccatactacgcgccacaaccaaacccacgcgccgtcataatccgccgtctcttcatcgtcttcacaacattcctcctactcctaggtctaatcctcttcatcttcttcctaatcgttcgtcctcaactacgagacgttaacctaaactcactctccgtctccaatttcaatgtctccaacaatcaagtctctg

SEQ ID NO: 141207 - DNA, 2970 bp, Arabidopsis thaliana landsberg
ccaaagaagcgtttgtgtttagatacgtggtggtgggcaaagaaaagaaccaaacacgccactaggagctaccatctctgttttattgctgcttctgcttcctcttccattactcgtcttaaaacaaaggagaaagagtcaagagacatgcatgcgaagacagactcggaggcaacaagcatcgacgcagcggctttgtctccgccgcgttcagcgattagacctctttactatgtacagagtccatcaaaccatgacgtggagaagatgtcatttgggtctggttgcagcctaatgggttcacctacacatccacattactaccattgctcaccaatccatcactcccgtgagtcatccacctctcgcttctctgaccgtgctctcctctcttacaagtccatccgtgaacgtcgccgatacatcaacgacggagacgacaaaactgacggcggagatgacgacgacccgtttcggaatgtgcgactctacgtttggttgctcctctccgtaatcttcttgttcacagtcttctctcttatactctggggtgctagcaaatcctaccctcccaaagttactgtaaaggtaataactactttcacttggtggtgactctgctctgagctgagttaactcgtgtagtggacgagtgttctgttttttttttccttaaaagaaacaactttggaaaaaagccaactatgaatataataatataatttgttttctagtgaagaagacaaaaatatatatttgagacaaatgtgtttggaatgtgattaggtgtcagactgaaaatgtgttgttgttgttgcactgtgcaggggatgctggtgagggacttgaacttgcaggcagggaacgatcttagcggagtgcctacggacatgttgtctcttaattcgacggtcaggatatattaccgtaacccatcaactttctttgccgtccacgtcactgcttctcctcttctccttcactactccaacctcctactatcctccggtgagatgaacaagttcacggttggtagaaatggcgaaacgaacgtagtgacggtggtgcaaggccatcaaattcccctaaacggtggtgtttctttccatcttgatacactatccctgccgctaaatctcactatcgtcatccattcaaaagacttacaatttgggaaagactagtcgcctccaagttaaaaacaaggaatcatatgctcattccctcaaacgccaaccatttcccaaagtccatctctcttctccgctcctgtattccttaacactgattacacgtgtgtggatgtgtgttcttgtatcttttgccatcaaatattttaatccatcaagtacaacatcaacatttctacatgccacagtcaaataagtgatcacatatatagatgacaccgctttattagccttcaagagccaaaatattactagaaaaacaaagtcccttaaaccaaatataatctattcagacgctatgcatagagtttcagaaaggccaatccatcaagaaagtctcaggccttactgtaatagtaatttagaactctgtaccagtctattagttacagaaagacataatggcttgtcctaccagtctatagttggagcctttgcagatggaaaaccatactacccaacttagaataggaggtgagttctctgttacacagcaagcaatttgtagtccccattgcattatatacaatttttgaaaccatgaatgactttcttctgttttcattttatgcaattgttgaacgtttcttttaaagtccggtaaagtgaaaagacgatgaaatttctttgatgaacacattcattgttcccttttggtgttaagctggtaaagcgttggaggtgttccctaaaacatgccagattgtacagaccatctcgatgttgttactcattcagtattcaaagatttatctccttgtgttcactggctatcagttttaggagactcagttagtggattgtattagtccaagaccttcaggattttcagattcttgatgagtcataagacgagagcagagcatacgaaacatatgttttcttgtacctggacctaataaacagatttatttttcagatctgactagctagtacctattatacaaagtatggtataaccatagttaaggatgtctaagcagcgcaagtggcacaggtgcagccctcaccacaagtgcaacccttagcagaggtttgagtttgagtcttggggcagttgcaagggttacagccacagtgctccccacatggacacgtgttgtgctcttgatccccaccagatgcttcgctcatcatcttgcaccttcatggaatggaacaacgtttttaagatcacataatatcaattttatggatcatatatataaaaaactaacctgcaagattcgccaccgggacatggagaagggcagccacaacgatcgttgcagctagcgcttgcacttcctttgcctgtgtctgccattttttgttttctcttccttttttttatctcactagctcatcctttttacatttcatatagataagaatactgagcgatgcaagagaattgaatacgtggcctctatgtaggtaacatgtgtcatgtgacaacttctcctctatcccgagtcgtgacgaagcatgttcggttgggacaaagaaatagaatactgaaaattttacaattttattttggtcaaagaaatggtttccaaaaaagaaaaaaaaaaagaattagataaagctgaattgtttttggtatgctctaaaatctcctcttttataagcccttctcaagaccctagttttgttactttacttttggactatgtctatagctgtcaaatggtccgtccagggaccattgggcgtgtccgtatggacagttttttttatgggccaagttggacggtccataatggacaatggtccgaaaaatgtccatgaccaataa

SEQ ID NO: 141208 - DNA, 2169 bp, Arabidopsis thaliana landsberg
  unsure (1)..(2169): unsure at all n locations
aatgaacgagactcattgcttctctctttcccttcgtttcttacacattaactactccaaaaaccgaacaaagaccttcagaatttgcgattcatccaatttcaacattgatttgtgaggtacggtttcagattctttctccttttttttttggttaattgtgattctcgtgcatatgcgtgtggtgtcatctttagttatgtaattcgcgattagctctaagatggnnnnnnnnnnnnnnnnnnnattcgtgatcgcttctgctcatttctgtaaaagtcagagttttgttcataaagtttgggtctttaagaagaataacaattttgtgcatgttttcttctttaaaaggggaatttctaaaaatggatattggagaaatcattggtgaagtagctccttctgtgagtatcccaacgaagagtgctatatacgtttggggttacaatcaaagcggacaaactggtaggaatgaacaagagaagcttttgcgtatcccaaaacagcttcctcctgagctttttggttgccccgctggtgccaattcgcgttggctcgatatttcttgtggtcgggaacatacagctgcggttgcatcagatggttctctctttgcttggggtcagtctctcagttttcttttcctttgtgttgttactagattgtctttcttcttgtgttataaagttcttttctttatgtaattcttggctttgattatgtatcaagtgtgatagaaagcaatctaagtagttaccaattagttgtttggttataattgttggatcttgtgattgaatcttaggcaatccgtaacttcctgaagacgggatgattcttacatttttatgtcctcgtttcaggtgctaatgaatatggtcagcttggggatggaaccgaggttgggaggaaacatccaaagaaggtgaaacagctgcaatcagaatttgtgaaatttgtgtcttgtggagctttttgcactgcagctatcgcagaaccccgtgaaaatgacggtactctttccactagtagactctgggtttggggccaaaatcaggtataacaggttccattatcgtgactggaattgtcacgtcatgtgtttttctaatactctctcaattttttcatgatagggatcaaatctaccacgcttgttttcgggggcatttcctgctacaacggtatgtacttaaatcctatccatgatagaaacatactagtgtagacattgatttggtatttgcacatattataggcaatccgccaagtatcatgtgggacagctcatgttgtggccttatcagaggaaggccttcttcaagcttggggtaagaatgctttgagatcttgttatgcattagaatctgtttgtttggtatttatttataatgattttgaggtttctgtgttccatggatattataaggctataatgaacaaggccaacttggtagaggagtcacttgtgaaggactacaagcacctcgtgtgataaatgcttatgcgaagttccttgatgaagcacccgagcttgtgaagattatgcaactttcatgtggagaataccatactgctgctctttctgatgcaggcgaggtgtaagttatctaaatgccttctcttgaaaagtttgtggttattcacatgaatgggtagctaattctctgtgcaatgttccgaggaaggaaatccttttgatggagatattggtctcatcacatcctagcagatgggaatgcttgaggaagcaaatgaattcctgacttgcaagtcttcttcccttttgcttatattttttcggtttatcttattcagtgtccactgcttatctctttcgtggcagttacacttggggattaggaagcatgggtcaacttgggcatgtttctcttcaatccggggataaggagttaataccaaggagagtcgttggtctcgatggtgtgtccatgaaagaagttgcttgtggtggtgtacacacttgtgctttatctttggaaggagcactttatgcttggggtggtggccaagcaggacagctaggacttggtcctcaatctggtttcttttttagtgtctctaatggaagccaaatgcttctacgaaatgtcccggttttagtcatcccaactgatgtcaggctgtggcgtgtggacattctcacac

SEQ ID NO: 141209 - DNA, 2513 bp, Arabidopsis thaliana landsberg
atgaagagctatgcagccaccacaactaggcgagaagaaatcaacaacgacaagtttatctccagcgttacgtaaagagacgacaagatcttgcggtgatgtaacagacttcatgttcggtttcaattccttctcccaccatttttggttccttccgatcccaagacttgtctggattaaacaattcaagaaaattaactatgttcgataaaaaagattaaattttctaatgattttgaactaacctgacatcggacaaacgcggggatctttttcttggaaaacaatatgttaccattctcgccggatatcaatgttctcgggctgaaatggttgcaagatatcaatcttgggctaatgcaacacagagaagagatgcttttaggacttatgccagcaaaatctcggaggtcgaagcgggcacggttaaaggaaattggatttaacttgatgaacgaatccgtcgccatgaattttacttaaaaacagaactgccttgttccacaagaaacatgcacatccaaggaaaaaaacttgaacgaagagaggagaggcttttgaagggaaatttgatatttctcttctactctctccccaccctcgaaagcgagattttggagaaggacatacgcttacaaatcataatttttcccatagtatttatctatttttagcttgatatttctcttttgccttttgttagtaaacttaaggtttttctcttcctttttcttaggaaactcctgcgatcttaaagaaactattgctgcatgtgacatgtactctattatccatctggtttgatcaatttcggttcagtcactcggtataactattttattttgtaattccgtttggtttagatcagtttagcaaacacattgtattgtatgtctttctctgtttgcgagaatatcaatcaaccaaatatcaaccatcttcctctttctctctacaattcagacccgaaccaatccaatccggatatatattgagaggaagaaagcaattgctggtggtctccggatccaagaattgaaggaacgggtcaagaatatggagctaactttgttggacttcaaagttgaacggaataaggagaaggccaaatctgctgctgctgcttctaaagtcttgtcgtttaccgacattctttgatgtcgaaactaagttctagcaatctagcttatatatttggcatagaaagactactctatgtccatccttacattctctgttttgtgcaactcactattgatttggcataagacattttatttacatgaagattagttattagttgagttttaggctgtgtctagtgttagcggtaatcaatccaatgattagaccactccaatgaaaggcaaataatcaaagatagatattgtacctttaatttgtttctaaaccaatccaatccttttggttagaccaattcctcatgtctggtttattagacaaagccctaaaaagacactaaagagtaaataggtatcttcacaagacagccttaagattccaaaagttgataccaacaaaatcaaatcaggtccacttgacagagaatcttgcacatcgcatcaatggctcttccttttcgccaacattctctagctcccattgcagcaacgcccacattttcaaaattcaatctttttccccaaaatgtccttcgtacactctcttctcgcctgagttttcccaagtttcccgactgtcgtcattttcagagttcgcctccaacccaatttaccaaagattaccggaaacccatttcgcagaatggctctctctactcacctttagttgtcaaatgcagcgaccacgatgagcctcactcaactatcgtttcttctgagttcgtcaaagatgaaaagtcggagactttagaaaaaatggatgatttggagattacccacgaaacgaagaagggaaagagtttttgggctgccgttagtttgatcatcggaacagccgttggtccaggaatgctcggcctcccagctgcaactatcagatctggttctatcccatcgaccattgctttactttgttcttgggtttacgtcatttcctctattcttctcgtggctgagctcagctttgcagcaatggaagaagacaatgcagcagaggttagtttcacaggacttgcaactaaatcctttgggaacaaatttggagttttcgtggcttttgtgtatgcttcactaagtttctctttgatggttgcttgtgtctcgggtattggctccattgtgtctcaatggtttccttcaatgaatccatttttggccaatgctatattccctctagtttccggaatcttgatcgggtttttccctttcaatgccattgatttcaccaacaggggtctctgcttcctcatgctcttctctataacttcacttgtggccattggtttatctgtggctaggtccaatgtgttagcctcatttggtcaatcatgttggaaagtctccatggttttacccgcggttcctgttatg

SEQ ID NO: 141210 - DNA, 387 bp, Arabidopsis thaliana landsberg
atgagagctattaaagaggagcttggtgacaacgatgatgatgaagatgatgtagctgcacttgaaagaaagatgcaagctgcgggaatgccgtcaaacatatggaagcatgctcaaagggaattgaggtatactttgctagagcacaatagctgatggtgtgtgactgtggaccaacttgaagagttaatttctttattagtgattttctttttcatttcctgatgcaggcgtctaaaaaagatgcaacctcagcaacctggctataacagttcacgagtttacctggagctgttggctgatcttccttgggataaggcaagcgaagaacatgagtttggatctaaaagcagcaaaagaacgtcttgacagtgatcactatggttt

SEQ ID NO: 141211 - DNA, 1201 bp, Arabidopsis thaliana landsberg
atggcggaattggtagacgctacggacttaattggattgagccttggtatggaaacctactaagtgataactttcaaattcagagaaaccctggaattaacaatgggcaatcctgagccaaatcctggtttacgcgaacaaaccggagtttacaaagcgcgaaaaaagggataggtgcagagactcaatggaagctgttctaacaaatggagttcactaccttgtgttcataaaggaatccttcgatcgaaacttcaaatcaaaaaggatgaaggataaaaacctatattgtataaatttaggtaacacaaaacgatctcaaaaatgacgacctgaatctcgatttctatttttttataaacaaaatcaaaatgttgtgaatcaattcgaagtttaagaaataatatttcttgattaaaataaaattattcacttcatagtctgatagatccttgatggaacttaattaatcggacgagaataaagatagagtcccattttacatgtcaatactgacaacaatgaaatttatagtaagatgaaaatccgttgacttttaaaatcgtgagggttcaagtccctctatccccagctctactccccgaaaaggttgacaccttacctttttttcgttattatttatttgaattatttataatctatatcatttttcattttcaaacttagaaagtcttcttttatttataaaatccaagaaattcccggtccacaactttttgaatttactacttttgagtttcttttcattgacatagacctaagtcatatattaaaatgatactgatacttcagtagattatacttcggtaatggtacacatagcttaattgcgggggactgaaaatccttgtgtcaccattagtaaaagcaagatgatccttcggtaatggtcgacatagcttagttgcagaggactgaaaatccttatgtcaccattagtagaggactgaaaatccttatgtcaccattagtaaaagcaagatgatacttcagtagatgatacctcagtaatggtcggcatagcttaattgcgggggacttaaaatccctgtgtcacatgataatgatccttcagtaaaggtagacatagcttttttgcagaggactcgaaatcctcgtgtcaccattaggaaaacgagcatgatacttcagtagatgatacttgatacttcagtagact

SEQ ID NO: 141212 - DNA, 324 bp, Arabidopsis thaliana landsberg
actgtcataaaacctattaaacaactcatttacatttgtatcttagcaccaaactaaaatgaaattattctctgcctaatcattaataatcattaatgaaggggcccgcctcaccactccacttcccctttttatggaagcaaccaaactcaccatgacaagggccagcgctcttacagcgaaaggctccttttctctagccaaaaacattatgccatcaagccaagccagctcccgaatgtctttaatcgagagaggtacagaatagtcgaagaaagtaagcaactgcgacaagaaaggacttataagataacatggaaaatg

SEQ ID NO: 141213 - DNA, 3472 bp, Arabidopsis thaliana landsberg
atggctacatttgcacttcccttctgcgaaattcccgaggatctccagctccgaatcttatccttcctcacaccagcggagatctccagcttcgcctgcacatcgaaacgcttcgcctcgctatgtcaagaagacggcaaaatctggcacgttatgtgcgatcagagatgggggaagaaaactaagatccagaaatgggcaaacggtcaaatcccttatagacacctttacaagactctaaagggattggagaatctaattggcttctggcgtctctgcggcagagcaaatcccgccgcttcatcgccgccgcttgttttcttcgattggggttcttcttttatattgggatctagagttttatccaccggagatgatacttatgaggtaaagaagacaccttttctcttaatggggatttcgccggagggacgatctgagaatttcttggatctcgtcggtggtaatctcagatctgtggatgatgatttgaaagaattagaagcttctaacaatctcgtctcggtggatgtgaatttcatggggaatggtcatatcatggtggaggagaatcgatgttttaccaacaacaatcgtagagaagaccagaggagctcaggggatgagagtgatgatttgatctcatcgcccaatttttcggaaatgtacactcaattggcgaataagacgagtccaggcggtgacaggaggagacagaagaggaaggagaaggagaggcaagcgtcgaggactaagtgggaaccagaacactttctcaaagttgctgattgctcccccacgcctactagacccttacaaggcttatggaaggtctcaattataactccttatcatattgttttcattgataatgtttgagattgagaaaagcctttgtctttaaggtaaagggaatgcaaaatttggtttttttctaagtctagttgattgaatagaccaatctttcattagttatcttcgttgtaatgatgatggttgtgttgttaagtagtttatctccatgattcttgaactcggcagggtttctgtgagggaagcatggagttgtatttggtcaaatatgatgaagttggaggcattatatgcagaaaagtagaggacttgtccctctcacggtacactcctcctgtgttctggacacccaaacatacgttcatcagatctcctttttcagctgaagaagagctgctactgaatagtcgaatccatattagccctttcgctgaagttcatgaaaatgttgtatctggaatgttgtacatgaagtctagctgcgatctggtgttgccaggagaacctggcaatggcattggttttcttagaggtgaagggcgggtctggttgtatgacaatgggactttcggtttcgggtttcttcgagatcaatttatcattgatctgaaacgtgttgctctggaagatgggtgtctagctgacgaggtagaagcttgtatgtgatttgctctttggttgtgatttttaaattctgatggtgatagatgatcacctctttctgtacataaaagagtttggtgactttagaagtttgaactttcaagtttagtctcattttagtggacgtaaactaggatgatggaatatcaccttgtatttttacttgtttatgtagatatggttctaaataagagatttgtagaggttcatgtatcaattgttgaaaaagaataataaacttgcatacacttgccactttgccagtataatgttaatgatgcggtttgtacagcaaagcttttccagcagcatttcccgtgtagctatgaagctgctcccggagatgaatttcaagcagtgaggctaatgcattgtgctgtttggtggtggccagtttgagaatatagtacatggccaagctttgcgctgtttttgttcatagtatagactatatctagaatatgagcatcatggttgaacttcatgagattgtccactgtctttgttggctttcactgcctctgttttacgatccctctttccgtttgcaaactgcaacgagagtgacactcatggtgcattcatcgacacctttttgtataaacatttcgttgttctcagattccagaggtaaacctactacctgctaagcatcatcactggattcagaacttgactaaactgttgacagatcttttgatgttgaggacacaagtaaacataacccgttgttgcccacaaaagctatggtgttagagtctctaccttccaaagggccaagttttgtctccaaagtaaagagagtcgattcagtaatatagataaagttggaggttggttttgtaaataaaagaaaacaaaaaagtaagaaaaggagtacaaatattttagtcatgccattgaccacacgaagagaagagtctcctttttctctatatctaaccttcttcttctcactttcccatttctctttcccaaattacatctcaaatacacaatccagcaacacctttctctctctaacagcttcgagcttctacactcatggctgcatcatcctttgtagacggtaacccaatcattctaattaaactttacttgtacttgtacacatctctcaacttttttagtcttgttccatacgatctataaacttttgatccgattttggttagttttcgttaggcaaaaatatataaaatattctcttagctgattaattgttttgcatgattgtcggagagaatcttcagacatgtgatcttcatggtccctcgtcttgtctgtgaaataccgaaccacccatatgtttcacatgaattttgtattatcataattatatccaaattgatataaacttgattgaaggaataattgaattcatgtttggagtctcccaaaattcagatagagatgtgtgtttgtttatattctagatctgtgtggtagttgaatcctgaggtttttgttctctgctgaaatttttcaggagaaagagatatggagaaaggaggaatgatattactacagtcaagtgagaatcaaaatcctatgatagatccttcaccaacaccttcaccatctgcaactgctactgccccagctttggttttgtctaattcaggcaagagaatggatcaagctggcaagaaaaagtatgttaagcaagtcacgggtcgccacaacgacaccgagcttcacttagcggcccaacgaggtgatttggctgctgtgcagcagattctcaaggatattaactctcagatggaagggattctgagtggggaagagtttgatgctgaagttgcggagattcgagcatcgattgtgaatgaggtgaatgagttaggggagacggcgctcttcactgctgcggataaaggacatcttgatgttgtcaaagagctgttgaagtattcgagtagagagagtattgctaagaagaatcgttctggatatgatccacttcatattgctgccatacagggtcatcatg

SEQ ID NO: 141214 - DNA, 1072 bp, Arabidopsis thaliana landsberg
atgaaggtaatgaaagactttgtaagaaatcctgcaagaccagagggttgcagaagaatgtgtgcagttctgtaatgattttttgaagaagacaaccaatgtacaagaaaaaacagacagaaatgtagagtatgagaacagctcaatattagaaggtcgtccgatacctgctggaacttccatttgtctcagtgaaacagagaagaatatagcccatatggcagtgattcaaaacatggctgccttggatattgtccagattgatttttggaaaatacttcgggtgtatggcgtagtgaatcataagtatttggaatcttgcgtgcaatttatgatgatagtttataaagctttttgtcaatgtggggttttcaccggttttattacttcgacgtcatcttattaacctgttatctttctgtgttagtcatgtacgctcaatattctatgttgcttctggttgagcgtaggcacgacaagcataccttgttgggaataaggccttagctaaagagctaagtgttaagggacagttgcataatatgcaaatgaaggctgctcatgggaaagctcaagaagccatttaccgccagaggtttgacttctttacctgcactgcatctccttgtaacatgatcttttatccgaaacacacactgatatctccataaatgaaaaacaaaactcctgttctcagtatctctgttctaacctgcctatgagtaaaaaatgaaacaggaacccagtgggtcaaggaaacagtagagggaatgagagaatgatagacttgcatgggttacatgtgagtgaagcacttcaggtgttgaagcacgaactgagtgtgttgaggagcacagctcgagcaacgcaagagaggcttcagatttatatatgtgtagggacaggccaccacacaaggggttcccgcactccggctagactcccagttgctgtacagcgctacctactcgaagaagaaggtcttgactattccgaaccacaggccggtctccttagagtcatcatatactgacagacaaaagccaggtacttatataggatacaagacctg

SEQ ID NO: 141215 - DNA, 747 bp, Arabidopsis thaliana landsberg
gaataattacgtcgtccgtatctgtgtcggaacatagatccaaattaaaagcaacttacttaattacatatcgttcgtgtttttttcttcaaaaaatggcgtcaaagcaactgagcagagaagagcttgatgagaaggcgaagcaaggagagaccgtcgtcccaggtggcaccggtggccacagcctcgaagctcaagagcatcttgctgaaggtattgccgtaaattacaacttttccacactctttttattttctttagttcgtaagtaatggttttataaggctagaaacattagatcttaatatcttaagataagattaatctacttattacgaacctaaagtttactctatgatctccatgtttcatggaatgcatgtatgtacacttgttaggaaggagcaagggagggcagacgaggaaggagcagctaggacatgaaggttatcaggagatcggtcacaaaggtggagaggcgaggaaggagcagttagggcacgagggttatcaggagatgggtcacaaaggtggagaggcgaggaaggagcagctagggcacgagggttatcaggagatgggacacaaaggaggagaggcgaggaaggagcagctagggcacgagggttataaggagatgggacgtaaaggaggactcagtacgatggaaaaatctggtggagagcgtgcggaggaagaagggattgagatcgatgagtcaaagttcaccaacaagtgatagtagtt

SEQ ID NO: 141216 - DNA, 3086 bp, Arabidopsis thaliana landsberg
ggaaactacaaagccatgaaaggcattacattcttcacaccctttttatcatttctatatctcttatgcatcttgtttatgacagaaactgaagctgggtcgagaaatggtgatggggtctacattgtctacatgggatcagcttcctctgctgcaaacgctaatagagctcaaatactcataaacaccatgtttaaaaggttatacactgtttacatgaagtgcaaaatatacatttgttagtgttttgtggatttttgagacctttttatggtttggttttgtaggagagcaaacgatcttctccacacatataagcatggcttctcaggttttgcagctcgtttgacagcagaagaggccaaggtcatagccaagaaaccgggagtggtttcagtttttcctgacccacacttccagcttcatacaactcattcatgggactttctcaagtaccaaacatcagtaaaggtcgattccggtccaccttcatcagcctcagatggatcatatgatagcattgtcggaattcttgacacaggtaaggcctttcactcattggtctcatcatatcctttactttttcctaacttaaaaaaccaaagaaatatgagtttgatattgtgaaaacaaacaaacaaacagggatatggccagagtcagagagtttcaatgacaaagacatgggtccaattccgtctcgatggaaaggtacatgcatggaagcaaaggacttcaactcttctaactgtaacaggttacaattttcacaaccttcaaaaaccaaactggatattactaacttcctttgaagactaaacggttctgtttttatgcagaaagatcattggagcaagatactataaaaatcttgatgatgattcagaatactatacaacaagggatgtgatcggtcacggttctcatgtgtcctccaccatagctggatctgccgtggagaatgcttcctactacggtgtagcttccgggactgcaaagggaggttcacaaaacgctagaatcgctatgtacaaagtatgcaatccagggggatgcactggctcctctatcttagctgctttcgatgatgcaatcgcagatggagttgatgttctatctctgtctcttggagctccagcatacgctcgcatcgacttgaacactgatcctatcgccattggagcgtttcacgcggtggagcaaggaatcttggtgatctgctctgcgggtaatgatggacctgatggcggtacagttactaatactgcaccttggataatgaccgttgctgccaacactattgatagagactttgagtctgatgttgtgctaggcggcaataaagtcgtcaaggtaatgatattattatacacataatagtgatacaccgaaacactaaaattttcaagtttgctaataagaaccttaactgttttcagggtgaaggtatacactttgcaaacgttagtaaatctcctgtgtatcctctgattcatggcaagtctgctaagaacgctgatgcatcagaaggatcagctaggtaagaaaacatcgttggcttcaaatataatcccttgaacatattttagatagtatcaaagggtaaggaaacttatctttctctgttttcattaaacaccggcttttccagggcctgtgactctgattctctagatcaagagaaggtaaaagggaagattgtgttatgcgagaacgtcggaggatcatattatgcatcatctgctaaggacgaggtgaagagcaaaggaggtattggttgcgtctttgtagatgacagaactagagcagttgctagtgcttatggcagctttcctactaccgtaattgactcaaaggaagcagctgagatcttctcctacctcaactcaaccaagtacttaataagctatctcaaaatttctattaactattgtagtcagtaaagacctaatgatcttttgccttgggttgcagagatcctgttgcaacaattcttcctactgcaacagttgcaaagtttacacctgcccctgctgttgcatatttttcttccagaggaccttcaagcctcacaagaagcattctcaaagtaatccataaccttgtgaccttctttagttattacctgattggaagcatctacttacctctatttttaacagcctgacattaccgcaccaggagtctcgatactcgctgcatggactggaaacgactcaagcatttcactggaaggcaagccggcttctcagtataacgtcatatcaggaacttccatggcagctcctcatgtttcagctgttgcatctctgatcaaatcacagcatcccacatggggtccatccgcgatcagatcagcaattatgacaacaggttaggactccttcattgcatattttgtgattatggcaagcaaaattgtatgttctttaacttcaatgtcacattctcagcgactcaaacaaacaacgacaaaggtcttataacaacagaaactggtgcaacagccacaccttatgactctggagcaggagaactaagctcaacagcatcaacgcaaccaggactagtttacgagactactgaaactgactacctgaactttctctgttactatggatataacgtaaccacaataaaggctatgtcaaaagcttttccagagaattttacttgccctgcagattccaacttagacttgatctccaccatcaattacccgtcaattggaatctctggattcaaaggaaatggtagcaagacagttacaagaacagtgaccaatgttggtgaggacggtgaggcggtttacacagtcagcgtggaaacaccaccagggtttaacattcaagtgacgccagaaaaactccaatttacaaaagatggtgagaagttgacataccaggtgatagtgtctgctactgcttcacttaagcaagatgtatttggggctcttacttggtctaatgccaagtacaaggtcagaagcccaattgtaattagtagcgagagtagccgcacaaactgagataaaatggtataaagttcagcatgaatatggaataataaaaattaatgaaccgatg

SEQ ID NO: 141217 - DNA, 4022 bp, Arabidopsis thaliana landsberg
  unsure (1)..(4022): unsure at all n locations
cttcactctttctctttctttctctctctctctctcgctcttctaattttgccctcaaaaccctccaattattacgaaaacgccactgctctctcgtcgggactccggtgaggccgttttggccggaatctgacaagggatatggatgtaggagttactacggcgaagtctatacttgagaagcctctgaagcttctcactgaagaagacatttctcagcttactcgcgaagattgccgcaaattcctcaaagagaaaggtttcttcttcttcctttctccatttttttccggtcttattgtcttcgacggtaggatcttcctcacggattttgctgagaagaatcgtacatagtcaattttttgaaattctctattcttcttctctccgagctttttttttcgctctctggagaatggcggctgacacgtgtcgaaacaggaatgcgcaggccttcgtggaataaatctcaggcgatccagcaagttttatctcttaaagctctctatgaacctggagatgattccggcgccggaatcctccgcaagatccttgtttctcagccgccaaatccgcctcgcgtgagtgttgttcttcgattttgtttcgatttacagagaaaaatctaagttctgaagtagtagagaatcgtttacttggttggtgctgatttagggaaaattgttgttctgtgtgtactgctgttttgttcacaggttacaacaacgttgattgagccaaggaacgagctcgaagcttgtggaaggattcctttacaggaagatgatggtgcgtgccatagaagggattctccaagatcagctgagttttctggtagttctggtcagtttgttgcggataaagatagccacaagactgtttctgtttcccccaggtttacattttcttctatagcgttttgactttgtgtggtatctttcttctgctttcatgcctcaagaagagaactgatgcattgtgacattctgtttgtgatcttagaataagtacttggtttgatatcagtgtcttagacattgaaaagtttctatatgaatcatggttttgatggtggattggtcacacagaatttaggttaaaagagtcagatagatcttcttggttctgtgttactctttactcttctgttttgaggattggtatgatgtgatgtgattattgctagtgaacgataaatcagttacttagtccattagtctatatgatttgtgaattctgcaattactaacaagagttttaggggtagttcatgtacaaagtcttattgatattaggtgcatgttgttttataaacaaattactactccaatgttatttaattaagttgtttaaacacgcttttttnnnnnnnnnnnnnnnnnnnncagctgaaacaaatgcggtggttgggcaaatgacgatattttatagtggcaaagtgaatgtatatgatggagtaccacctgaaaaggtaaatgaatcacataattctgtccagcctgaaaatataaattttgatggtatggttttgatcattcatcttgtgtattgatttgcaggcccggtctatcatgcattttgcagccaatccaattgatttgcctgaaaatggtatttttgcttctagtagaatgatttcgaaacccatgagtaaaggtaagcatttgctaaagtgtctgatctgcttttcagttgaaagattgatgattcagacttgaaatgagtttttttttaatgtataatctaacttgaaaaaatgactagagctgctgcatctcaagatgagtctttctttctttcttatgtcaaacacggcctttcattttgtccaattttgaaaggaggcattgttaaattaccaaagaagcatgtctaaatgctgtaattgctgctacctctactagcttatgtgtctacagatgcctcgtgcccctttttttgaaattgtgatttgattttttcagagaagatggtggagcttccccaatatggacttgaaaaggcacctgcttctcgtgattctggtacaaacagtactcattttaccttaaagatatgaaatcctattattcaatgatgctttaaaacacctgagagcgaaatttggtccacctcttcacctctacatgctacgctaaactacttgcttgttctgcatgatatacgaccatgaaattctgttaatttaactattgttctttttgttggtcttttctgaagatgttgagggtcaggcgaacagaaaagtatcgttgcaaagatatcttgaaaagcggaaagacaggtagttgttgctattatgctgtgtgcttgcttattccaaatcgatgaatactgatacctttctttctgagcagaagattttctaagaccaagaaggctccaggagttgcgtcctctagcttggagatgtttctgaatcgtcagccacggatgaacgctgcatattcacaaaaccttagtggcacagggcattgcgagtcacctgaaaatcaaacaaaaagtcccaatatctcagttgatctaaacagtgatctaaacagcgaaggtatgaacaagcatttatcaaatggttccaatgatctcccttaaaactctcattcgcttttttatagataattaacaaggtgccaaaagaactggagatggtactacgggtcaaaaggcgggaagaacaatttcatgttcttataacatgttagccatgtacaaaaagaaagaaagcaaacaatgaatgttctcgttcattgtggaagaaacatgggttaaagatttgagctggatcagtgcgggtcttgtatggttctgttttttttacgggttgcgtccatcttttttagtctgtagttttgagtaggttagagagacgcgagagagagagaggatgtggcggtttgtattatgtaaatgcttgtcttataatgagagagaccttattgatgataccaatctttgaggtccaagtaacacaacttctttgtgattgatatgtatgagataattaatttgtctattttcatggcatgatgtatgtgatatgtctgagatttgcaacattcttctataaagttgagaaataagggtagtttagtctttttaaccaaagatttttatttatttgatcttttccctgttttaaaaagaagaatcgagtaatcgcgtggttttgaagacgaagaaggaataagacatcacgaggaacacgatgggtgaagcggtcaaggtatgtttttatctttgtctcctctgcttctgatctgttaatgccaatcgataattcctagttttgcgatgcaagcatgaatcgccgattgttatctgagtgatttgattcattttcgacgattttcgaatcatcataactacttcttttgctcaaatctcgcagtcagtttaatgcctattcgtattcaatttagttatgcaattgacgatttctcgaattgtctgaagttttgaagctaaaatcagattaaatataaaatatctgaacattgcctcccaaggaatctaatcccatcttgatgtgcttttgcttaggatgggagagaagaagtgattcaagcttggtatatggatgatagtgaagaggatcagagacttcttcaccacaaggatcctaaagagtttgtatcgttggacaaacttgcaggtctctttgtgtgtttcaattcaatgttgttctctctgcttctctattttgtttcacatgtaatgtttgtgtgcagagctgggagtacttagctggagacttgatgctgataactatgaaaccgatgaggatttgaaaaagatccgtgaatctcgtggttactcttacatggtttgtggtctttatttatttactatcccactagacttgaatgctagatgtttatttttgtccaagtcttaatttaactctctaggggttttctcaatcttggtttgatgattaaaaagtgttcaaaatgcaggacttttgtgaggtatgcccggaaaagcttccaaactatgaagtgaaagtgaagagctgtttcgaa

SEQ ID NO: 141218 - DNA, 792 bp, Arabidopsis thaliana landsberg
cttaacggtttctttattattcttcccattctacccctcttcttccttctaattccccctcaaatgccactgtcttctcactaaactccaaaacccaccggaaaaaatgattacgtggcacgacttgtacaccgtcctcaccgccgtggtaccactttacgtagctatgattctcgcctacggatccgtacagtggtggaagatattctcaccagaccagtgctccggcatcaaccgcttcgtcgctatcttcgccgtccctctcctctccttccacttcatctccaccaacgatccttacgccatgaatttccgcttcgtcgccgccgacacgcttcaaaaaatcatcatgctcgtcttacttgctctatgggctaacctaaccaagaacggtagcttggagtggatgatcacaatcttctctctcagcactctcccaaacactcttgtcatggggatccctctgttgatcgccatgtacggaacctacgcaggttctctaatggtccaagtcgttgttcttcagtgtatcatttggtacactctccttctcttcctcttcgagtaccgtggcgctaagcttcttattatggagcagttcccggagactggtgcgtctattgtttcgtttaaagttgaatccgacgtcgtttctctcgacggtcatgattttcttgagacggatgctgagataggaaacgacgggaagcttcatgttaccgtgaggaaatcaaacgcatcgagacggtcactgatgatgactccacggccttcgaatcttaccggagctga

SEQ ID NO: 141219 - DNA, 1127 bp, Arabidopsis thaliana landsberg
aatgcctatccaccaaagaatcaatgatgaagcaaatcgaagagaagcatcatgacactgcagcatcagtgttctgttgtctgtacagaaaggctccacctccacggtctctgtttctgtcacagaaaggaatgtttggcgttgtagcgcttctaggttcagttgcctccacgtcgctaagcaggtgacattgattttatagccagagtctttctgatcaaattcatagtgtctacacttggggcaaatcttcaatttcctaagttatttggtatgacagggttttgtctgaatatttggggaaagacacaatgctttctttggtgtgcaaatcatcacagtttggacccaaaagcgatgagtatcgcaagcttcaatctgaagcagctagcctcggacgatctatcaccaatcggtttcttgttatttgtcttgatgcaactaggtattttggtactcttcctttgatatttggatttcgtgttaatcttttgcttaaccagatatgttctggttcaaaacatgcagaccttggaggaacggacttgtgaggaatgatcctcagaagagattagccatggataacccttacctgccgaatggagatcctatacccggtttcaaaggctacgctgtgaacatgatagatttagcttcagaggagctggatatacaatcaagctcgggttacgggcttagagagacactattctatggagttttcagagagttgcaggtatatgagaccgcagagcatcttgaagcagctcttcctcacatcaatggtggagacgctgtgtctctagatggtgtgatcgccagagaaaacggtttcatatactctggttgctggtacatgcactttctcttgatccttaaatgcctttcagttttctaaagcttggaggcctagaaaccttccagatttttgctttctttttaatctgtcttggttaatgtgagtgttgatatctttgtttattgtgtgttgtcagtacaccggaagttcattttccaataaccgtaacggagaggcaagagaaggcattggtgcaactggaaataacaaaagacaagaagagaaagactgaggagatgatgactgaggagaatcgttcgatgcgtag

SEQ ID NO: 141220 - DNA, 679 bp, Arabidopsis thaliana landsberg
agtttgtaacacgtcactcgcgcaaatcgctgcgggtccttggaagtgttggtgagcccatcaatcctagtgcctggaggtttgaactctaatatctctagatttattcctgcggtcagttgaatgggaactatatttaatggttaaccgaatctttgatgtagatggttcttcaatgtagtcggtgattcaaggtgtcccatttcagatacgtggtggcaaactgaaactggtggcttcatggtaaccctctactccctctttatctctcttgaaacctcttgcatgctctctttctctcatgtgcatcaaattgcatcgcagataaccccattgccaggtgcttggccccagaaacctggttcagccactttccctttctttggtgttcaggtatgtgatttgtagtgcaaattaataattagcatattgcttctttctagagatattcttctttggagagggcttcactctcatctctatctctctgtgtatgctgcagcctgtcatagttgatgaaaagggcaatgaaatcgaaggcgagtgtagtggttatctttgtgtcaaaggttcatggcccggggcgtttcgaactctgtttggggatcatgaaagatacgaaaccacatactttaaaccttttgccggatattatttcagtggtaatgagatgcagcag

SEQ ID NO: 141221 - DNA, 380 bp, Arabidopsis thaliana landsberg
cccaaaagtcaactgagaaaagcgttgagaatatgaaagtaagtcaatttagttacacattacgttcttaagtcttcttcacactaatctttagtcgtgaactttgttagggtgtcagatgtaaaagggtgtcaagatctattggctctgtaggtctttatgtgcctggtggaacagctgttttgccatcaacggctttgatgcttgctattgtaagttctcatgttttatacttttgcttgttcatttctcttgtaattttgtaataatcttgtcttctttttccttaccctatacttctctctcagcctgctcaaattgctggatgtaaaacagttgttcttgcaactccaccaagtaaggatggaagcatttgtaag

SEQ ID NO: 141222 - DNA, 2105 bp, Arabidopsis thaliana landsberg
  unsure (1)..(2105): unsure at all n locations
tacttttatcccaaacgacactgatttcattgataatggtgagctgaatgttgataaggttgttttgactatttaggcgtgcattacaacttaaacttgtgaactagtttttgtccatcacctgattgcaagcttgtctgtcgcaggacgaattcatataattaccgggcctaattactcaggaaagagcatatatgtaaagcaggtcggctttacttttctaagtcttatttctcttcgttcaacnnnnnnnnnnnnnnnnnnnnnnaattgaccactcaagttctgacttgctatttgtaggtggcgttaattgttttcctatcccatattggaagctttgtaccagcagatgcagcaactgttggtttaactgacaggtctaacgtcatacattcctgttttgatctttttacaatcgctttttatgtatattttcgttactaagattagtcgtactacaacaggatcttttgtgcaatgggaagcaagttcatgaccgcggagcaatctacattcatgatagatctgcatcaagtaggaatgatgctcaggtattccaaactgcttctatttttaacttgatttcaattagctccactactgataggccttgtgagccggtctcagtctcttcagtcagttagtgacttctagttcacgaggtccattatttaagttcatggggacccaagaatgaagatatcaatcaaaattcaactgtgcattgctcatgacttatgatcgtgttcctaatcattgtgaccgatccaaattctccaggcaggcaacttcaagatctctgtgtctcttagacgagtttggtaaaggcactcttacagaaggtatggatttctccgccctctgcattggcataaaaggcatgtgtttgtgaaaacttctgccttacccacactcttttttaagtacagatggtattggcttgcttggtgggacaattagtcactttgctacacgtgctgagccaccaagggtaccgtatagcgttctcttgtctgtctctaagcttgtagattcttttagaaccctaacatgacattgcctattgctgcatgctttcaggttgtagtatgtacgcacttgactgagctacttaacgagagctgcttgcctgttgtatgtactccgactcaatttcagatagataactcagcagattttgaagtggttccttgcttatagtgagagtctatctttttttactttttcatttcagtctgagaagattaagttctacacaatgagcgttcttaggccagacacagaatctgcaaacatggaagaaattgtttttctttataggtatggagtctcattgactagcattctacctaaactgcctacattcttaagacttccatgttttgaccaatgattttgccggcaggttaattccgggacaaactttgctgagctatggtgagcatttttgtcctttgcgttattgtctacatgatcttcttgtgtatacaccgagcttcatcaaacctatttatgtaatgcaggccttcactgtgcgctactcgctggtacatttaggaagattactaatatctttaatgaattgaatacaattttgatggatctatgttcgactgtggattatagagtaacaaaagaaacttttcactattgttcatgcaaggtgtcccggaggaagtcgtgaagagagcagccatcgtgttgtacgcctttgagagtatcaacaacgtcgataaactaagccttgacaaaatatcgtctcaagatcaagcattcaaggtctttttgctctctctcacttacacaagctttgaccccctttatcttcttctgtcctctcaggccttaccaaacttttactgatttcgaatgaaatttgcaggatgctgttgacaagtttgcggagcttgacatcagtaaaggtgacatccatgccttctttcaagatatcttcacttcctaaacccttacttaaaagtcaagatcaccgtatacaaaatgtaaccaacgacagtagatttttaaaacggaagccagttttgtattaaaatagaattacataaaactattgtattggttggtttagatttcttcttctcttt

SEQ ID NO: 141223 - DNA, 3966 bp, Arabidopsis thaliana landsberg
  unsure (1)..(3966): unsure at all n locations
tctgccatttttctttctcgtcctgtttccattctctctccgatcaaaaccagcccaattcgatcggagacatcacagaatggaaccagatcttcatgaccagcaacaacaacaacgagtccacagcgtagtcataatcactctcccaccatctgatgatccttcacaaggcaaaacaatctctgctttcactctcactgaccacgattacccactcgaaatcccacccgaggataacccaaacccgagttttcaacccgacccacttcaccgaaaccaacaatctcgcctcttgttctcggatctctcaatgaattcgccgagattagttctgggtcttctcggaatctcgcttctcgcggttgctttctacgcctctgtttttcccaactctgttcaaatgtttagggtttctcctgatgagaggagccgtgacgacgacgataatctccgtgaaacgacgtcgtttgttttccctgtatatcacaaattgagagctcgagagttccacgagcggatcttagaggaagatttaggtttagagaatgaaaactttgtggaatcaatggatttagagctggtcaaccctgtaaaagtcaacgatgttttatctacaagtgccggttctattgactcctccactacgatttttcccgtcggtggtaatgtgtatccagatgggtatgtatgcattgtatctaatactctgtaatctgtatgtgtggtttgtttcttaaagcacaagtaaacaaagattgtctttttttgcttttgttgcaggctgtattatacacgcattcttgttggaaagcctgaagatggacaatactatcatcttgatattgatacgggaagtgaattgacttggatccaatgtgatgctccttgtactagttgtgctaaggtaaagaataaagatcaagtttttttagattttaggagaatctctctgtgaatttagtgatgaactttctggattttggttttagggagcaaatcaactatataagcctagaaaagataacttagtgagatcttcagaggccttttgtgtagaagtccaaaggaatcaactgacagaacattgtgaaaattgtcatcaatgtgactacgagattgaatatgctgatcatagctactccatgggagttctcaccaaagataagtttcatctcaaactccataacggatcactagccgagtcagatatagttttcgggtaaatatcattctccgntaacaatttgtgattctgttacggaatatctgagtgtttcatgttgtgactttggctttcgtgatttgaactttaaggtgcgggtatgatcagcaaggactactgttgaatactctgctaaagacagacgggattctcggtctaagcagagctaaaattagcttaccttctcaacttgcaagcagaggtattatcagcaatgtggttggccattgccttgcctctgatttaaacggtgaaggatatatcttcatgggaagtgatttggttccatcacacggaatgacatgggttcctatgcttcacgattcccgcttgtaagtgcttaacgaaaaccagcctaatctgcgaaacctagcagcttagaatcgcttgattggattcttatctgaatatattcccaaaagcttcaatctttgtcacttgcatatatgctaaggtaatgtacatttttgggttctttcagggatgcttatcagatgcaagttacaaagatgagctacgggcagggtatgcttagcttagatggggaaaacggaagagtagggaaagtcttatttgacacaggaagttcctatacatacttccctaaccaggcttactcccaattggtcacatcagtaagtattcaaattcagaaactaaaatcagccttttttagatgaagttcttctggtcaatggtgttttactatttttgttggtgaaagcttcaagaagtttctggtttagaactaacacgcgatgattcagactaaacactgcctatctgctggcgagccaaaactaacttcccgtttaggtaatttgagaaaatttgatcttttgtaaaaccatattgagttctgtggtgaaagaaagatcatatctctgaagatttttttgtttcgataatatgcagttccttgtcggatgttaagaagttcttcagaccaataactctgcaaatagggagcaaatggttgatcatatcaagaaaacttttgattcaacccgaggattacttgatcatcagcgtaagcactttttataagctctaacaattgcaattcttcgatttcgatttggctttatatatattcgagttttgatgcagaacaaaggaaatgtctgtcttgggatattagatggaagcagtgttcatgatggttccactattattcttggaggtaaaaataacattctagctgtaaaacccataattttcttatctgaataatcacaattaagttgaaacttatgagatacatgttttgttttcttattgcagatatctcgatgcgtggacacttgatcgtgtacgacaatgtgaaacggagaatcggatggatgaaatcagattgcgtccggcctcgtgagattgatcacaatgtacctttctttcaaggctgaaggagccataattcttacatatgtgatatgtgtataattaacctgacacatacacgcttgtataatagtagtcgtgattacatattgtgtaacataaattgtaaaagactaatcaagttttgatctgtaacatatcaatgcaatcatattaataataagactataattagatactataattcatatatattcttaatgattacaactccagtttctagcccaagttgtccgatttgatgtttgtggaggtcatggtagaaactaagaaaaaggtgcaaccgcccaaagagagactcaagggtgccagaaatgaaatcgcacgtctacataaaatatgatcaggacttagaaatggttttggtttgtaatcgtagatcgaactatattatagagtagcgtgtttttgtttggcattatgaaactttattttacacatactattatgttcttctaatttaactagaactttaataacatatcaaacaaattaatggtaagaatatttatatgcttttctggattacaaaatagcaaaaatttgatatctctaatttttgcaaacactttgaagcctatgaaagaactttctacatttttaggtttaaggctcaaaacttcatatcacagcctccacaaagtctggatgcatgcatggtatcaaaattccatatgttgatgagtgttacaaatagttatatatgcggtgaaattaaatatttcaattgttacaaaaacgaaaactgacgatattttctttgcctttctgaatgtccattgacaaaattcgtgtgttagcctatatctctcatatttcactcgagaatctgcgtgtgccctttgatttatcaacggccaagattccatcccaagtgatctcattaacgagatattcttgagattgccggcaaagtcaatcgctaggttttgttgcgtgtcgaagctatggggttacatgcttttccatccatatttcacggagctgttcttgaccaggtcgtcggcttggccgcgtctcttattaatcgtcgcacaatatcctgagtggctcttcttctcatcgcctcagcctaagaaattcagaatccgtataatgagaagtcgtctcatatactagctgccgattttcatatcaaaatctctggagacatatgtcgatacagtcgtagatttagctatgcatctggtttgctctttttccaaggtatacaattctcaaaagatgatgataaggatacagtgcctatgatatgtaatccggtcacaggacagtatgcaattttacctaaactgcgtagtgcgtatgttcgtagattgggtaagcttttagggtttatccga

SEQ ID NO: 141224 - DNA, 1646 bp, Arabidopsis thaliana landsberg
gaattttccggtggctgcaacctccggatggagcggcggtggtcctttttcctttgttaattctggaggttatgatgattttgagtgggtttctgaggaagaagatgattctctgtttggctctgttccttctgttgatgaagtccaagatgctgtttctgctctccagcagtaatctaatttcttctcttttctcatttcacttgaaaatgtgtgattctttggatgtgactatttgagtttgagtcttgtggaaattattgtcataaaatctcataaattgatcacttttgagtggtaggtattagttcccacgagttgtctaagtaatagagagagacacgagaattgttatggactgctatagtgtctcaaagtttaattgttttctttcctgatatggatggaattgtcttgatttgatgatcttgaagaagtttgaaactctttcagctgtgtctccgtgaccccacacagttgttttgtacttaaaatactttcaaaagttgtttgctggtttattcataatagtaattggtctttgttatcttatggatttcgaaatatttgtgttctgtttacgtgttggagtaacggttttgttttattttcttgaagggttttcgatgctagttcatattcccagctggttagagacaaatacgagtgctatccggaaaatggtggtggaaaccagagccctatagccacagggatggttcatcaagttccttcattcgggtcggattcggactggatggagccatcaatgcatttatgccattcaagaacgttaaagcctcatgcttatgatcaggtttacaatgcttttgacctactacgaaccgaaccatctgtccaggtgatactttcttttgttttcttgattacactaagctcatgtttactttttggtacatgaagaaagggctttttcacattttaatgcagaaaatggtagtatcattgtcgtctgacaaagcagtttgggaggcggtgatgaacaacgatgtggtgcgagagattagggacttgtacaacaatggcataagtcaaggtataaagagataatgaattgatcaatctaaacatttcatttgacagacttctcagggactcagtttttgtataacagatgaggaaaattcagaagacacccctagggagaataacgcagcaacggatttcataaagtgggtatttgacaacacaatggttaaggccacggaagtgtttgtgaaaataacaaaggtcgtgaccgagctcttcaattgttacaatggtgatggtgttaacaacaaggggaaagatgccaaattcaacaattggctcgaggaaaagctgaccacttcggtcctgctatccatcatcgttatgctggtcgtgatggtatcccgagcctgcaactagtcttgatcgtttcaaattagccgacaatacatttggtcttcatcatgctgcttgtttagcttttgtttcaggtcatattgtggtttgtttgatactactttggttctgtactccattgttgacattttagtagatttcgataataagaacactctgaatgtgtcaaaatgttaagcattttcttttatcccaacaactactgaatctcttattacaaaagaagacaccaaggaggc

SEQ ID NO: 141225 - DNA, 2023 bp, Arabidopsis thaliana landsberg
gtcaagctgagtctcggagtgaaaagggtccggtttagtgaagccaagtaagcaaagccccttgtttttgacggacattatatctcctcctcttctcttctataaattgggcacctttttccaattttacgcacagtcacggagatagatagtaagagagagctatggcggaggagcacttcgacgttctgactaaatccggtgagaagaccggtgtgtccaaacccaggcatgtttattgttcatgtgttttcccttttcttgtttgatgaaaagcactcggaaatcgaatttcgacgctgagatgtttgcacattgaaattttacgtctttgttgaaaaaagtcatccttttcttaggtttggggtttgatttgatgcttcgttgaccctatcaactacacaacaaactcgaccaaagagttttaggtcaatcggagaaatttcaattcgattttggttttaaaaaaagtttaagctgaaaaatttgggatttttttcttcatgatcagctcttctttggagttgtttttccagtgaattaacctcaattcgtctctgtttggaaccatgtcattgtaggggagaggttcacagagatggagattaccatcgtgctgttcatgtctggatttttgtggagactactcaacagctacttctccaacttcgatctgatgataaagattcttggcctggtcaatgggacatctctagtgctggccatatatcagctggtgatacatcgcttctatctgcacagtaagtcaatcccattctgctttcgttacttcttctttccgtttactaaagatttcaggatactttctgtaggcgggagcttgaggaagagcttggcgtaaaactcccaaaggatgcatttgaaaagatcttcgtttttctgcaggaatggtttgtctcttggcctatatgatacatgttctctgattctttcaagagacattatttgtagcttagtttgattggtatatcttgaagctaacttgctttcgcttatttaaataagcattgtaatttattactctcaacttgagaggtattcttaaagacagtgtgctgcttttcttttgtgtactttgacagtgtcacaaacgatggcaaattcataaataatgagttcaatgatgtgtatcttgttactattctgcatccaatcccattagaagcctttactcttcaagtgagtttttttccttcacgaagctgtaagtttaagtagtataaatcacttggattcttaagtaacatttttttatgtatgtattagaaagaggaagtctctgctgtaaagtacgtaccttacgaagaatacagaaactttctgtctaaggaagatcctgcttatgtgccatatgatgttaatggagagtatggaaaactatttgacataatcagacagaggtacagtatctctatttcggtttttctcctagctattcctttttttttcttgttcatatctaatatcttccatggtaccaaatgaaaacttttatgagtcaactattgctgaggtacatattttatatagatatgttttcttacatagagtgtttcttctgaatttgttgaaggtgccaagtgaacactgaggcccgtagtttatctctgcagaagcaactccagagatattctccagtcaccctcgaagccaaggtattaatttgttacatcttttcttgtgatttctttgtttcatatgcaccaaataaatcttattttgcaccgttccataaaagacattttgagacacctttcatttatatgcagttgacagaactttctgaagcagatcagaaagcgttgggtctaattgtgaaggctgcaaaaattatggacgatatattctatgagcaggttctgtggagtccgaaatttcttctttttttgaccgtgaacatgaaatctcagatcttaaactaaattagaaagttatcctttatcaggtttggaacagcaatccagccctaagagattggctgaaggatcatgccagtgcatca

SEQ ID NO: 141226 - DNA, 2605 bp, Arabidopsis thaliana landsberg
gagatgaagaatcagtaaagaaagcgagtacgaaccgttggacacttgtagaacttccttccgggattttctcgagtattcgcgaccttgatttcacagaaacctccgccgcatgggcattggatcgccggtggaggatcatcggtgtaggatttgagaggacaatcgttgatccagtggccagcctgacggcatcggaagcaatttccggtctgcattgtgccgttaagcattcgtcgaacattctccttctcgggatgttaatatgggccaggtcatcttttttaagcccacataatttatttttagctatgactaaacaaaacatgctgaatatgggacgggcttaatgggcctgaagactttaagcagattaacgaaacaagtgtgttgtgtataatatgagaaccatgtcgttctgatcggttaaaaactacagctgaccaaataacacctataggcttctgcggatatgactctacggcgtctacgcctcgcatgcctatcatatttaaccgtcaataatggatttggcggttttggtaggccgggtcaaccggattaaaagaaaacggtttggagtccttccttgcaattgaattttcacgcatcgggttttgtgatttctctgtcataatgggcccggcacatatggttcataacccatgtgggcctatggtataatttttccaattaaaactattgttaggtcgataaaacaaaaaacaataaaaacgagtggaatacacataccaaaaagaatgtgatgaacattagtaattttattttgatggttaatgaaaaacaaaataaatgcatcttgacatcttccgttggaaagcgcaaatagggcagattttcagacagatatcactatgatggggggtgggagaaagaaaacgaggcgtacctaatgtaacactacttaattagtcgttagttataggactttttttttgtttgggcctagttataggatcataaggtaaaaatgaagaatgaatattagattagtaggagctaatgatggagttaagtatgcacgtgtaagaactgggaagtgaaacctcctgtatggtgaagaaactatacaacaaagccctttgttggtgtatacgtattaatttttattcttttatcacaagcgatacgtatcttaagacataataaatatatatcttactcataataaatatcttaagatatatatacagtatacacctgtatatatataataaataggcatatagtagaaattaatatgagttgttgttgttgcaaatatataaatcaatcaaaagaattaaaacccaccattcaatcttggtaagtaacgaaaaaacagggaagcaagaagaaccacagaaaagggggctaacaactagacacgtagatcttcatctgcccgtccatctaacctaccacactctcatcttctttttcccgtgtcagtttgttatataagctctcactctccggtatatttccaaatacacctaacttgtttagtacacaacagcaacatcaaactctaatatacccaagttggtgtatactataatggtgatggctggtgcttcttctttggatgagatcagacaggctcagagagctgatggacctgcaggcatcttggctattggcactgctaaccctgagaaccatgtgcttcaggcggagtatcctgactactacttccgcatcaccaacagtgaacacatgaccgacctcaaggagaagttcaagcgcatgtgtacgtcttattaacttctactttcatttcctttggcatatatcttcattcacatagtttagctaacaagtatttactattcacaggcgacaagtcgacaattcggaaacgtcacatgcatctgacggaggaattcctcaaggaaaacccacacatgtgtgcttacatggctccttctctggacaccagacaggacatcgtggtggtcgaagtccctaagctaggcaaagaagcggcagtgaaggccatcaaggagtggggccagcccaagtcaaagatcactcatgtcgtcttctgcactacctccggcgtcgacatgcctggtgctgactaccagctcaccaagcttcttggtctccgtccttccgtcaagcgtctcatgatgtaccagcaaggttgcttcgccggcggtactgtcctccgtatcgctaaggatctcgccgagaacaaccgtggagcacgtgtcctcgttgtctgctctgagatcacagccgttaccttccgtggtccctctgacacccaccttgactccctcgtcggtcaggctcttttcagtgatggcgcccgccgcactcattgtggggtcggaccctgacacatctgtcggagagaaacccatctttgagatggtgtctgccgctcagaccatccttccagactctgatggtgccatagacggacatttgagggaagttggtctcaccttccatctcctcaaggatgttcccggcctcatctccaagaacattgtgaagagtctagacgaagcgtttaaacctttggggataagtgactggaactccctcttctggatagcccacctggaggtcagcgatctagacaggtggagat

SEQ ID NO: 141227 - DNA, 4921 bp, Arabidopsis thaliana landsberg
cttagtcaccacttttgtttttctcaacggcgaagaaatcgtccgatgtcgcatccacttcaaagaaagtcgcatctccggtgatttcttcgccgtcgatggagtaaacaaaggctgagatttcttcttcactatcggatttgttgaaacgagagagaaatttgagaaagtagattgagaaaaagaaaagtggtgactttactaaagatcatgataagaagtgttaccaattgggtaagactatttgggggaagtgtgatgctactactcttgtgaagccaaagagtttgaagccgaaagttgcgacaaactgagatgggagctaagtggaagagcgaagctcaattaacgtggagtgttggtccgcaattgagttttcagctaacggttgtaagtttgtgttgtttcactcaaagggcacaagtaaaaagagacacaactaattgggttgttgtgtctatttgtttttttttttatataaacttaatattgtattgtcatgtaaatattaacaagtttcagttcaataaaacattttctgttttgttctgttgttgtctctaaggagaagagatattatctcgtacctcttaccttatttcttctttctctcaatattccaaccaggcaacaaagcatagaagaaacaagtgaaggagtttcatgcgatcatgattttgaaatatagggtttatctgatgagcgtcaatctagatggaattcacaaagacgacaacgttgaatctataaagcagaaatgtaaaccatgtcattaattcagtgcaaatctagcaacctacaccatgcacgaagcaaaggaagaaaccatgtcattaattagtccatttacaaaatctatagattgtttcaggcgtagttcttgctttgtttattttgccatgttctttgatgaagattagtaaaaaaaatcttgcattaacagaaccaatcactcaacttattaatttgtttgatcatctttcaggtacaatagtagtactatatatacattggcctcgactagtctacgtacatttgggtcacataacctcggtgctccaatttgttacaaactaaacaaaactgggccaaaaaaacataatctttgtcgagaaatagctcgaaatctattaattatctttgcaaaatttaatctttctcaaagcttgggaattgagagtagtttctttcgtttttcatcaagttttggtaaatgatgtttttagtgtatacaaattttagcatctgaaacataaatttaaaattctaaaaacttgaaatattaaaacagaactacaacatagttgtaatagaaagttggtcgaagttccaaactctatgatctggaccgttcgttttttcctcacgcgctcgatctaccggactgttcaaagggaatcaataaaataaacgaaaaagtctcggcagtgtagtccacgcggcgcgcaacattgcgatcaacttcataactttttagcttctcctcctccgcactgggctcgattgggtgagacgcggaccactgcacaggcatgcaccgtcttcctctctctcgctctctttgtcgcaatctctggaatttgtgtgatttttcggaattgctttttaagtgtcactcgtggttggtttcatctcttagttcgaggagtgttctatttttggggctttattgattccatcttctcccttgccgtttatgggataaaatcaacatcaatgagggtaattcttttccatttaaagttcatcttttgtgttatttggggacactgacataatctctctggtatctatctgcagggctttcatgtgagattttgtgtgtgaattttaattcaaatggtatggaatttggctactttgggaatgttatcttttgttttttgtgttgcatgtttttcataagtttttctggaatcttgcaggctgatatgcgtagacgaaatggaagtggaggttcctctaatcatgaaaggaatgagcagatactgtttccaaaaccagagaccttggactttgatttgccctgcgacacctctttccctcagcagattggtgtatgttttgttaccctttctataccataaaggacataagtggctaagattcttaaacatccactgtgtctacattttactgtttagaacaagtagtggtttagaaaggttcttattgtttcatacttgatgtgcaggacaatgctgctagttcttctggaagtaatgttaagtcattgctgattgagatgggattttgcccaactcttgttcagaaagcaattgacgaaaatggtattcttcagtttcctgtaaaaaactaccatgcatgctaactttcatttggggtatatatgattactgagtttgcctcttcgcatccaggtcaagatgattttgagttgctattagagattctcactaagagtactgaaacagaacctcctggacctagctttcatgggctaatggaacccaaaccggtaaagcgcataatgtgtgatcccacatgtcttgtctttcattctgtgtaatttcttaatgtttcttgcttttctttgacaggaacctgatattgaatacgaaactgaccgtataaggattgcgttactaactatgaagtttccagaaaatcttgttgactttgcactggataggcttggtaatgtattcacaatgtctttggctttgcattcaaaattcaaacatgttacaaagttacacctttttgtccgtgtctattcatggtttaacatattagaatttcttcttttcaggttattttttgagtgattagacctcgtgtacattgcaagaccaatttctcactattgcacgatattttttctttgtcttcttatagattaaccatctcttcatactggaacttctgattgtatgacatttaatataggcaaactaaggaggcttatagtatattataactctctgaaaagagaaataacatttatgaagctgttgtttattaatgttaaagtggaaaatccattccctgtgaccgtattagaaacttgtaaatagtttctaaaaaattgatacttatactattcaaagctatatagaaacttagcatgcagatagcagctatcatttggcctatccccaaatcctttcttcatgattgtttgttctgtgtgataggtaaagacacaccaattgatgagatggtggacttcattgttgctgctcaattagctgaaaagtatgcggaggaatccgaagattcacttgatggtgctgagatcaatgaagaagatgaagatgtcactccagttactgctcgaggacctgaggtctttggtgcttttttgacattagctgttgattctattgtcaatgcttttgtagattccactacctttcttttgtgttcattctgtgttgttcatgttgttattacctttattaccttttacttttgttttgtgttttaaattcaggttgccagtgaacaattgtttgaaacaatggacaagactttgcgtttactggaaatgggattctctaatgatgaaatttcaatggcaattgagaagataggtgagcaactgaggcacttatctgttcatcccatgactgttatatgtctgaaagaaaaaaatgtagacatgaaacgtatcttgtttatgttgtcgggggtgattatgatacttttagggtgaaagaaatcctatcatttgttttgcagcccgtcctgttgtactggtatataatctattttgcacctcttcaggtacaaaaggtcagatttctgtccttgctgagtcaattgttactggtgaatttcctgcggaatgccatgatgaccttgaagatatagaaaaggtatgtacactaatgtttttaattaatttttactcgacctccaatgatgcacttgtaaagtgaagtgctgaaactagagcttttgctgctgctactgcacctaaaccatctcacactcttctcttaattaaactaagatattgttggagtttaactcaatgatatttggtgtcactgtagaaagtttcagcggctgctcctgcagtgaatcgtacatgtctttcaaagagttggagatttgttggggttggtgctcagaaagaggatggtggtgggggttcgtcgagtggcactgctaatataaaaccagatcctggtattgagtcttttcctttccctgccactgacaatgtgggagagacctcgagaggtaagcgaccaaaagatgaggatgagaatgcctatccagaagaatacactggctacgatgacagaggaaaacggttaaggcccgaagatatgggtgactcaagttcgtttatggaaaccccatggatgcaagatgagtggaaagataacacatatgaatttcccagtgtaatgcagccacgtttgtcccagagtcttggtccaaaagtagccagacgaccttatttcttctatggacagttaggtgaactttctcctagctggtggtcgaagatctcgggtttcttgttcggaattcaccccgaacatgtagatactcggttgtgttcagcgctccgtaggacagaagggtacctgcacaatcttcccactgttaacaggtttaataccctcccgaaccctcgattaactatacaagacgcaatgccacacatgaggagttggtggccacaatgggatatcagaaagcatttcaatagcggcacgtgttctaatatgaaagatacaactcttctctgtgaacgaattggtcgccgtatagctgaatgcaagggaaagcctactcaacaagaccagactttaatacttcgacattgtcacacctccaatctcatttggatagcaccaaacatcctctcacccttggagcctgaacaattagagtacattatgggatatccaatgaaccacacaaacatcggtggtggaag

SEQ ID NO: 141228 - DNA, 4683 bp, Arabidopsis thaliana landsberg
ttttaggtgatccagcaagagaggtttttaaagaactaggcatggatagaagatgaattacaagccaaagtgtcaggcccataaaaatgggtattatgattccttcaaagtttcaaatgaagagaatgacttcaaagcaaacgtcaagagagctgagttagccggtgtttttgacgaggtgctcggtttattaaagaaatgtcaacttccagatgagttcgaaggggacatagattggatcgagttagcaactcgataccgcagattagttgagcctcttgatattgcaaactaccatcgacatttaaagaacgaagactcagggccgtacatgaaaagaggaagaccaacccgctacatatatgctcagagaggctccgaacatcatatactgaagccaaacggaatgattgcagaagatgtattttggaacaaggtaaatggtcttaacttagggttacagctagaggaaattcaagagactctaaagaattcgggatccgagtgcggatcatgcttttgggctgaggttgaagaactcaaaggaaagccatacgaggaagttgaggtaagagttaagacattagaagggatgcttagagaatggatcacagccggggaagtagatgagaaggagatatttctggagggttcaacgtttagaaagtggtggatcacgcttcccaaaaatcacaaatcgcattctcctctgcgagactatatgatggatgaaataacagatacctgaaccttaggtggtggagtatttaagctattagaacacttgcttctcttaatttgtgcaataagaaatgtttatcaatctggtttccacttcatgatgatcttagaataagaaacatgttgtatgatcattgtgaagtaatgtaatagctctctattctaatgtcaaatttggtttccactttacagtgatcttagaatatatacgttactctactaaagcctaaagccatctcaaatagcatgaaccagtaacaaacaaccttccttagattgaaatggtctcatgatggggtattttgggtaattactcctgtctacatcttcctactatattaacagagtaggaggactaagaatcaagacgactcaaaagaaaaaagagaagaaagtccactcaagaaaagagaaatggcgtttgaagctcttacgggagtcaacggtgatctagtcaccatatcatggatggcgtcgaagggagctaaccaaacggagcactatctcaaagaagaagtaggaggaaccgtttttttcgccttccgagcatctttctcgtcggaagatttgttcgctacggagaatacatctccctttggagaaataaagatgaagcgtaatcaatttccttgtatgagaagcatcggcaacgacgttgacgctactgttaacgaagctttcctcaagtcacttgaagttctcattggtccaagaacctcatttcatgcttctgtaagtaaacaaaagcttcttaaatgcgttttaaatcgaaaacatcagaataatttgtgtctgaaacttactttcttcaggtgcaaagcgcggttgatagaaaacaacaggttgtgttcacaggacattctttcggaggcgcaactgcaattctagcaacagtttggtatttggagacatacttcatacgcaatccaaatgtttaccttgagcctcgttgtgtgacatttggagctcctttggttggtgactctatcttcagtcacgcacttgggagagaaaaatggagccggttctttgtgaactttgtcacaagattcgatattgtccctcggattacgcttgctcgaaaggcgtctgtagaggaaactttgcctcatgttcttgcccaattggatcccagaaattcttcggtccaagagagtgaacagagaataacagagttttacacatcggtgatgcgagacacatcaactgttgcaaaccaagctgtttgtcagttgactggaagcgcagaggcgtttttagaaactctttctagtttttatgagctaagtccttatagaccagtaggcacttttgtcttctctacacagaaaagattggttgtagtgaacaactcagacgccattcttcaaatgctgttttacacttgtcagtccaacgatgaacaagaattgtctgtgattccatttctaagcattagagatcatcatggctatgaggaactggtacagtcgatgggaatgaagttgtttaatcatttggatggagaaaactcaatagagtcttcgctcaatgaccttggagtggtaagtctctctctctctctctctctctctctctctctctctctcttttcatactgtgcagctccatagctccattcttgcaatcatttaaacccttcagagtgtttcctttttctgcagagcacaagaggcagacagtacgttcaagctgcattagaggaagagaagaaacgagtagagaatcagaagaagattattcaggtttgtggttgaaaagcttgttcatgaataatgcaggtacgtgcttcgtctgtttgtgtctaacaacataaaacttgttggctctgtggtttttaggtgatccagcaagagaggtttttaaagaaactagcatggatagaagatgaatacaagccaaagtgtcaagcccataaaaatgggtattatgattccttcaaagtttcaaatgaagagaatgacttcaaagcaaacgtcaagagagctgagttagccggtgtttttgacgaggtgctcggtttattgaagaaaggtcagcttccagatggattcgaggggagcagagactggatcaatttagcaactcaataccgcagattaattgaacctcttgatatttcaaactaccatgggcagttaaagaacgaagacacagggccgtacatgttacatggaagaccaagccgctacaaatacgctcagagagggtacgaacatgatatattaaagccaactggaatgatcgcaaaagatgtgttttggagcaaggtaaatggtcttaacttaggattacagcaagacattcaagagatcttaaagaattcgggatccgagtgcggttcatgcttttgggctgaggtcgaagaactcaagggaaagccatatgaggaagttcaggtaagattcaagacactagaagggttgcttgaaggatggatcaaagacggggaagtagatgagaaggaaatatttctggagggttcaacatttagaaagtggtggaatacacttcctgacagtcacaaaatacatgctccgctgtatcgacgtgagcgtatgatggatgaaacaagagctacctgaaccttaaatggttcgattattgaaacacttgcttcttaatttgtgcaataagaaatgtttatcaatctggtttccacttcacgatgatcttagaataagaatcatgttgtatgatcattgtgaagtaatgtaatagctctctattctaatgtcaaatttggtttccactttacaatgatcttagaataaatacattattctaaagcctaaagccatctcgaatagcatgaaccagtaacaaacaatcttccttagtgttgacagaaggaaagaggaccagaatgtcatcagaatagagcctgaggttacttcaattgtttataacattactaacctctatacctcaaaacaagtggctgtgcaaacgctccaagttctagctactacataaccaaagaagaaaacgattaaaacacaaaaagtaatttgaaacttgccctatgcccctctgtatgctagttagctcgatatgaaagtttgactcaagtatgtctcctaaacacaagtaaataaaagagtaatcacattaccaagacgttcctgttagatttgcgttccaccagaatcctgcatcagtataatcaactcaaggatgcataccatatagctaaggaggaagtagatcattcacaaaagaatcagacaatagaagtaatcttcaactctttcgcgcgaatgtcaattttatatataaccaaacttgactgtctatatgctgtatttagtcgctcaacatagaatcaagtagaatgatataacatctatggccaccttaaaataacagacgacataaaatgatacctttagagtattacagataagcaaggttctcgcaggctatgagaaagagacttattgcaacttttatgtatttgaaattcgtgtaccaccttatgtactcacacaccactctacataaccaccaccaccaccaccacatgtttcagatgaagaagagtcattgacatagaagaacatagaacatagttctcagttgccaaaagacaaattcctatacccatatctaaagagttttaaagacaggtgaaaaacgtagaacatgcgaggaaaacaatgaagaagagagaaaacaaacagacacaggccgagaaaagccacacatcctttcttcatgacctgcaaaacatgctagacgaacgagcaagccgaatagtcagaccaccaccttgaacactagcttcaaacttgattgtgttcctttcataaggctttctgcaaccaggacaacgcccatctccatcgcatatcgtcttgtggcagaaaaggcaaagccggaatccacaaggacatggcaagaaatttgagtctgttaagtcaagatcttcgtagcaaatag

SEQ ID NO: 141229 - DNA, 423 bp, Arabidopsis thaliana landsberg
cttcttctctcatctccgtctctcagagagtgtacacttctccttcttcttccgtcatgctcgagtaccgttgcagctccgttgactggaaaccatcaccggtggtagccctagctaacagctccgacgactctcaagtcgctgccgctcgcgaggacggttctcttgaaatctggctcgtctcccccggcgccgtcggatggcactgtcaactcgtacgtactctacgctagtagcttcttctctattccgatttcaatcgaatcggaatctcgtgaagtatgttcgagttgatttgtggttttttgattggttttaatttaaccgttgccttctttcggatttttccggggttagactatccatggcgatccaaattcgagaatctcgtctcttgcgtggtgctgttctccttctataggg

SEQ ID NO: 141230 - DNA, 479 bp, Arabidopsis thaliana landsberg
acattgtatctacttcacttgctgtagagatatggtatcaagatcttattcaaacctcttggatcttgcttctggtaacttccattcgttttctcgagaaaagaagaggtttccaagagtagcaactgtcactggtgtcttatctgagctagatgatgataacaacagcaacagtgtctgctctgatgctccttcttccgtcacacaagatcgaatcatcatcgttggaaaccagcttcctattaaatcacatcggaactctgctggtaaattgagtcttagttgggacaatgactcgcttctcttgcagcttaaagatggtatgcgtgaagatatggaagttgtctacattggttgccttaaggaacagattgatacagttgagcaagatgatgtttctcaaaggttgcttgagaatttcaaatgtgttcctgcttatatcccacctgagctattcactaagtactatcatggattct

SEQ ID NO: 141231 - DNA, 1249 bp, Arabidopsis thaliana landsberg
gatcttaccttcttacctcccatggacgccgccgcagaggaatctaccatctggctcctgcgaaggttacttcgggaatggatttacaaagagagttgacttccttaagccgaggattggaggaggaggagaaggaagctggttccgttgtttttacagtgagacattacagagttcgatttgtgaaggaaggaatctgagaatggttccggatcggattgttatgtcgagaggaggtgagaagttagaggaagttatggggaggaaagaggaggaggagcttcctgcgtttcgacaaggtgcgtttgaggtagcggaagaggtttcttcacggttaggttttaagagacaccgtcgttttggtggaggagaaggaggtagtgcggtttctcggcggctggtgaatgatgagatgttgaatgaatatatgcaagaaggtggaattgatagacatacaatgagagatttggttgcttcgattcgtgctgttgataccaatgatttcgtttgtgaagaggtttgtgcattttactcattgatctggtggatttgaagattgtgttttggtgaaaagattgcataattggagacttttcattcaacatatgcagcaatgaatcactgattttgagctttacattgttcatattaattaggttgtggttgtgtgagattcttggaagactatgtagttatgtgtggtggttatatcttgttggtttgatgtttggtttgctttttgtttggctgcagtgggtggaggaaccgaccttgcttgtcactagattcgagtacgcaaatctcttccatactgtgacagattggtatagtgcctatgtttcgtctagagtcaccggtttgcctaatcgaccgcacgttgttttcgttgacggacactgcacggtatgctcctcttcttgttcatggtcatgatccttatatgagcagggaaagtccagtttagacttgtagttagttactcttcgttataggatttggatttcttgcgtgtttatggttttagtttccctcctttgatgaataaaattgaatcttgtatgagtttcatatccatgttgtgaatctttttgcagacgcagctagaagaaacatggacagctttgttttccggaatcagatacgcaaagaacttcaccaaaccggtttgtttccgccacgcgattctttcaccattgggatacgaaaccgctctttttaaaggcttgtccggagaaatagactgcaaggg

SEQ ID NO: 141232 - DNA, 533 bp, Arabidopsis thaliana landsberg
atagtgaagctggaagtttggaaggtaagaaagtttttccaagaatctgtatttgggaatctgatggtgaagctggagatatcacttgtgatattattgataatgttgaagcttccatgatttatagagataggatctctgttgatcgtgatgggtttaggcagtttaagaagaatccttgttggtttaatggtgaggctaagaaacctggacagactatttctaaagggcataagaaatatgatttgatgctgaatttgcaattaggaatcaggtaaatatctcaaatttggtggattggtgtttttgtttggtgtgtgatggctttctctgttgtttctaatgaaggttgtgtgtgattgaattaggtattctgttggcaaacatgcttcgattgttcgtgatcttaaacagactgatttcgatccaaaggagaaattttggacaaggtttccaccagaagggactaagacaacaccgccgcatcagtcagtggatttcaggtggaaggattattgccctttagtgttcag

SEQ ID NO: 141233 - DNA, 1470 bp, Arabidopsis thaliana landsberg
tcagagaaaaagtttcagtgagaaggagattgattaatcgatctgagaaagatgggagattcggagtcatttgttgggaaaaattggaatggattgaaggatttctggagtgataggttatcatttttcgaaaattacaccagattcaccaaacgcgacgcgcctcttccttcttggtcttcctccgacgtcgaggaattcattgcctccgatcccgttcatggacccaccgtaatttccttctatctttctctcgctctgtgttttggaatctatagatattgttggtccattatctatgactcggctggtactcgattttactctgctgtcatcggtttatttttttcttcttcatttgattttccattggaaagtttctgttactttttgatataataaagttccactaggctaggtttttctggctttagtccttggaagcacagatacaagaggactaagcccactgcatcgtcgtcggatgccataaaaaacctagcaaaaactgaactgttggtttggtatttggtattcttactgaagatcttacgtttggtactcattgtgtatttgtggtcatcctatccagctgaaaacggctagggaagctgtgacgtttggtgttaccggagctgcacttggagctgtctctactgctgcttttgcctggaaatactccaggagtccacatggtaatgacatttctctctctgtgaataactatttgctctttataaacctcacttgtttcttcaaacgaagacacaaagcttgcaattcagggataatgggattatttgggagtcaattagacctttatgtcctatattgataatacttggaaactggtttgaaagtttatgcagttctcatggcgcttacattgtttctcaatactaaattgctgtttatttttcttccaacttttgacacctctaaactactgctggtgcgacaggtgctgcattgtccttcttaggaggaggtgtttttggttggacctttgggcaagaggtcgccaaccacacactgcaactctacaagttggacacaatggcagcccaagttaagttcatggaatggtgggaacgtaagtctcaataaaggtcctgaatctaaaacgaagacgtgtgctgctttctcgtccagagtatcttcttgggaacaacatgaaatgctgattatccatccatttccagactttcgcctttgaaactttttctattctcactcttggaacatgtttgccttgtcttaataatacaacatgcctcatgaatgttttgaagatttgagaaaatgaattcaaagaaaccaaatggtctcaaaagaatcagggaatgacgactaccccaactgagcacatatcgaaacctttcctttgatgattcatattagtaacttttcttcatgttgagtttgttttttatgaaacttacaaattaacaacgaagcatttgctttcgt

SEQ ID NO: 141234 - DNA, 738 bp, Arabidopsis thaliana landsberg
cgaaactatggtcctgagatcgatgtgtggagcgctgaagttatcctctatatcctactttgtggtgtcccgccattttgggcaggtttgtttatgctttaccgcattctctttgtttcctctggcttattcactttaagacctctttcagacgtttttatctttcttttgggtacagagactgagcaaggggtggctcaagcgatcattagatcagttattgactttaagagagatccatggccaagagtttctgacagcgccaaagaccttgtgagaaagatgcttgaacctgatcccaaaaaacggcttactgctgcacaagttctcggtaggcttctgttttcagcaaggctgagctttctgaaatcgtaaactcataaataaatattccatttgcagaacatacttggatactgaatgcaaagaaggctccaaatgtctctcttggggagactgtgaaagcaagactaaagcagttttctgttatgaacaagctcaagaaacgagctctacgagtattgattctgttaaaccatgtcactgattatcgatttgcttccagtctgattcagaatcaaaaatgaaaatgtaaatttgtttcgtccttctaggtgatagctgaacatttgtcagtggaggaagcagcagggataaaggaagcatttgaaatgatggacgtaaacaagaaaggcaagataaatctcgaggagcttaaatatggacttcaaaaagctg

SEQ ID NO: 141235 - DNA, 1475 bp, Arabidopsis thaliana landsberg
gaacttccaagatggtgttgggccatgggtttctgacaaaggtacatgaccaaaaaactcttgatgctgcatattccctgttcagtgttgagatcttgttcttgccaacttcctttagtcatgttaacatgtgagaggaaaattggatttttcttttctgatatcccatagttatcaaattataggatggaatgaagatgggaaaatcgttggggaatactctagaaccgtttgagttggttcagaaatttgggccagatgccgtgaggtatttcttcctacgggaggttgaatttggaaacgatggggactattcagaagaccgatttataaaaatcgtcaatgcacatctcgccaacactataggtttcttactctacgaaaactaaatcttaagtagttgttcagccttttggttatttggtacagaacttgtttctgaaaaatgtttatcaatgcatttctcttcaggaaatcttcttaaccgtactcttggtcttcttaaaaagaactgtgaatccactttagtggtagactcgacagttgcagccgaaggagttcctttgaaagacacagtggagaagctggtaaggttctaatgacatctctacaccactttcgtctcaaaatggctttattaggtcaatctttcatctcaaactgcaccattctctgttaaaaggttgagaaggctaggacaaactatgaaaatctgtcactatcatcagcgtgtgaagctgttttagagattggaaatgcgggaaatacctacatggatcaacgagcaccatggtttctgttcaaacaaggtggtgtctcagcagaagaggcagccaaggtcttatttcgtttccctaattgccattcttcttacaaaacaaaggatctattaccaatttgatggttggaggatatcaaagctagtgactggttttctgcttataattgcaggatctggtgattatactggaagtaatgagagtcatagcggttgcgttatcccccgttgcaccttgcctaagtctgaggatctattcacagcttggctatacagaggatcaattcaatagcataacctgggtaacatacgatttcattcaccagattttagttaccgtttaacaaaactcgcctgagttttggctttgatctaactcttattctgtctttagagcgacaccaaatggggagggctaaagggaggacaagtaatggagcaagcgagtcccgtatttgcaaggatcgagctgaatccagagaaagaagaagatgagaagaagccaaaggttggtaagaaaactggcaaagccaaggtcaaagtagtagagtaaactcctacagtagctgaagcttaaaaccaactccacaaaatcctgaaaaactgattacagcattcctctgatctcttcaattttatgaaatactgtaaatttatggttgttatgtaaacttgagaagctcttcataagtttgag

SEQ ID NO: 141236 - DNA, 1668 bp, Arabidopsis thaliana landsberg
  unsure (1)..(1668): unsure at all n locations
ttgggtatcacagagatgtgaaaccaaaaatagctgaagatttgagatccatgggccattcggcgcagacatttgttcaagttaaagaggaagctgaatgctgtagagaagttattgaccttgagtgcggtgtccaacctgatcttgggtaaataaatcagacgtgttttcttaatagatatctaatgcttgataattgtcctaaagtagtccgtttgttagtgttagcttcaactagcatgttatatggacctcttattgaaataccgcagaatggaagtttatattatgcagatccttgataaaacctaacaacttttatgtgcagttactgtgaggtatcatcggtgaccaactgtgatgaagctccagaaacatcttttgtccaggaaacatctggtatgatcaatggtatttcagtagccagtccatgttcttgctcgatgaatcaaagctctagtccagcaacagtaggtctgagatctccggggtcttctgatcaattattaaagcagcatatatctactccaaatttcagaaaatctcctcttggaaccgagtcgtctgtagtagcaacttctgagagatattcatttggtggcacccgtagtttgactctagaagcagagtcatctttcaacatgagcgttaattctcaagctttgaagcgaagaaagtttaccagctctcctgtcattgaccttgaagtcgaaaacagtgatgctcctaggcctagtactagaccctcggatcatacgagtttaacaagaagaattgagtttgggtttaccgaaccaagatcccaaaactacaacatatattcttttccagaagtgaatcagaaagtgcagctatcttgttcgctctgcagaagtccattaggtctacctgagaatcactcatatgtcaattgcttgttgacttcgtcatcgaaaaagtatttgctgtctcttctgaaaaaaacgtcnnnnnnnnnnnnnnnnnnnnnnncaacaagtgtttcaattatcatgacagattgctcaatggttaatcagagactctgcagaaaatttgaaggcttaaaaggtcagggtatttggtgcgagcaagatggatgtgttttcaatactatctattgccctttctgcagcatcccaaacacatgtctcggagtgcaagtcatggctactgattcatcaaatgtccagtttttgagcaaagtaagctgacttagtggtgattccttagagtgctcaagtctctcatttgtgattcggtttattgtcttgagcgctcgctaatatcaagatctaattttactttgcagattttgttctttgctgatcatctagaagtcaccaatgaagctgcaagcaaggattcaacgttaaagcacaaggtattcttgcatacccttaagtctttagaagcaatttgaggtttcagtttggaacaaatggagctgcaaattattttgaaatagaagcgaatttgttttgactctttcaggacaaagcttgtggtatctgtgcaaaaataataataacctaatgggtattgtaggaacctcttgctgagactaatgcagctgtggataagagtgatgtgttaaagtcaatagacagatttgcatactccccaaatcagcagcaagaatcaggaggctggaggactacaaaatcaaag

SEQ ID NO: 141237 - DNA, 2250 bp, Arabidopsis thaliana landsberg
atggcaccgacaccatcttcttcaagatcaaatcaaactcaatacaccttaatcagaactccacaaacaaaacaacgtctcaatttccactcaaaaaccccaaacccagacggatctaaagatccatctccaccggagcatccagttgaagtaatcggccggatccgagattaccctgaccggaaagagaaatcaccttcgatcttacaagtcaacacagataatcaaacggtacgagtcagagctgatgttgggtacagagacttcacactcgacggtgtttctttctcggagcaagaaggtcttgaagagttctacaagaagtttatagaagagaggattaaaggagtgaaagttgggaataaatgcacgattatgatgtatggacctactggtgctggaaagagtcatactatgtttggttgtgggaaagagcctgggattgtgtatcgttctttgagagatatattgggagattctgatcaagatggtgttacttttgttcaagttactgttcttgaggtttataatgaggagatttatgatcttctttcgactaatagtagtaacaatttaggtattggttggcctaaaggagcaagcactaaggtaaagtttcttgattgataactttagtatacattgaattggctttaaaggtgtgtactttgttgttttgttacaggtgaggcttgaagtaatggggaaaaaggcgaaaaacgcaagttttatttctgggacagaggctgggaagatttctaaagaaattgtcaaagtggagaaacggagaattgtgaagagtacactttgtaacgaaagaagttctcggagtcactgcattgtaagaacgatcttcttgattgatgtgtatgcatagctttatgcagcttatctctgttttaacttactagtgtggttgtttctttttgtagatcatacttgatgtgccaactgttgggggaagattgatgcttgttgacatggctggttctgaaaatatagaccaagctgggcagactggatttgaagctaagatgcaagtaatgtttcctctctcaatttgtttgattctactaaagttattgtagttatggatatcaactgacttatatctctcattattcaacagactgctaagatcaaccagggaaatattgcactgaagcgagttgtggaatctatagcaaatggagattctcatgtaccctttagagacagcaagctgaccatgcttctccaggtgaaattcttgttccattgttttatcttctggaaaatgttttacgtgttgctttttcttgaagatatttagtgttgtttctattctctgaatgcaggactcttttgaagatgacaagtcaaagattctaatgatcctgtgtgcgagcccggatccaaaggaaatgcacaagactctctgtactctagagtatggggcaaaagcaaagtgcatagttcgtgggtctcatactccaaacaaagataagtatgggggtgatgagtctgcttctgctgtgattttgggatcaagaatagctgccatggatgagttcattatcaaactccagtctgagaagaagcaaaaagaaaaagaaaggaatgaggcacaaaagcagctgaagaagaaggaagaggaagttgctgctttaagatctcttttaacacagagggaagcttgtgctaccaatgaagaggagataaaagagaaagtaaacgagagaacccagcttttgaagtcggaactagataagaaacttgaagaatgccgaagaatggctgaggaatttgttgagatggagagaaggagaatggaggaaaggatagttcagcagcaagaggaactggagatgatgaggagacggttagaggaaatcgaggttgagttccgccgctcaaatggaggaagtgttgatgaaactagtgggtttgccaaaagactcaggagtctttactctgatgatgatcctggtatggtgaagtcaatggaccttgacatgggtgatccagaacctgtcaagcaagtgtggggagctgtttcacaccaatcaagcaacactattagtagcaacttcactaaccttttgcaaccgaagccttcagagaatatgcttacacagatgtatcctgaccgggtatgcttgagcactgtctttgaagaagaagaagttgaagaagaggaagaaaaagtgatagtcgaggataaaagcatctgcttgataacaacaccaatgcctagtttgaaaaaagaag

SEQ ID NO: 141238 - DNA, 1014 bp, Arabidopsis thaliana landsberg
catttctagcaaagagttgcttattgtcagtaacacgctggtgttaataaatgatactttttcaggtggtctcgttgtgagtggagggcttcttggttttgcgttttcacgaaatcttacaagtttaagtactggtgtcctctatggtggtggccttctagcccttagtacactgagcttaaagatttggcgagagggaaaatctagtttcccttatatactaggacaagcaggtaatcttcatttattgtctgcaggaacagtaggggatattttgttaccacgactttttttcatctctaattcattacatcaagtgattactggtatcttactcatgataagtggatattaaaatcgagataagtatactgtgtcatgctatgaagtggtcatctctgaacattatgtgcctatgattctctataagaaatgttcattttatctatgaaagcatttgtgcttactcatttttctaaacctgaaattgcagtgctttcagctgtcgtcttctggaagaacttcacagcttattcgatggtattcattatctttgtgatcatgctgattgtttctttttgcttgcttgacttcgactgcttaatgttgtacttatgcagactaagaagctgtttccggccggggtttttgctgtcatcaggtaagaaatacgtcttgtgatctacaacagattctgatgatctttcgtggattcatgtaaccgtgtgaatacgtctttttcattgcagtgcttgcatgttgtgtttctattcatatgtggtgctctctggaggaaacccacctccaaagaaattgaaaccatctgcgactagtccttcatactgaagggactttacataggtttagatttaaaaaagtggagatcttctctcttttgataactctggtctgttggattactggtgtaattttatactctttacgaattgatacacttggttttgtttgtgacctgttctttccagtgtcataatctaaagttttgattttctt

SEQ ID NO: 141239 - DNA, 675 bp, Arabidopsis thaliana landsberg
atggaaaaactctgtgctttcaatgttactgctgagatcattggaaatgtcactgattcgcctctgatagaggtaaaagtggatgggattactcatttgagtgagaaaacttcattcctcagagacatgtgggaagacaccagtttccagttggaaaagctgcaacgattggcatcttgtgtagagatggagaaagaaggtttgaagtttaggcatgagcctaattggaaactctcatttattccatcctcgaccaacaataattatatgtctcagggtatgatcgctctctatgaggttttttttatctttaattatttatatagcgtatattttctaatgaaaatgtttgtttattgtatatgctctcagatgttaagccaaaagtagcagtgatccgagaggaaggcagcaatggagacagagaaatgtcagctgcattttacgctgccggttttgaaccttgggacgtgacagtgtctgatcttctagctggagacatcacccttgatcagttccgcggtattgtgtttgtgggagggttcagttatgcggatgttctcgactcagccaaaggatgggctgcttcaataaggttcaacgagcctgtgttgagtcaatttcaggagttctacaaaagaccagacacgttcagtcttggaatcggcaatggat

SEQ ID NO: 141240 - DNA, 889 bp, Arabidopsis thaliana landsberg
  unsure (1)..(889): unsure at all n locations
aaaagttccccttttaagtcctactcctctttttgtaatatagaaagaaaaactatatatatacaaaataaagttatacgaagaaaattgtattatatttataagatctagataaaatggtccatcccacccaattaaatacccctaagataaaatcacaatagacaaaaaaaatttaaaaagaaaagaaaaaggaaattcaaccacaaccttcgtcttctcttgaaactctcctcatctctctcaagaaagattcaagttcgagtcttagctatgtctggaaactcagaaggactgttagagagctcaggcggcggcgtgggaggttccgtcgaggaggaaaaagatatgaagatggaggaaaccggtgaaggagccggcagcggaggaaaccggtggccaagaccagagactttagctctattgagaatacgttcagagatggataaagcttttcgtgactctactctcaaagctcccttatgggaagaaatttccaggtttgttatattttgttacatgcatatatatttataaagtagaaaatttaagcagaaattttatgatcatatattttcgtctcacatatttatgggatgtatatataatatgtgtagtcatatatttcggtaattcatttgaaatatatgactacaagcctatttatttgcttataggtatatgtattacatacaactagctaagaaaaagtttggataatatttgtttcttaattatgagtttattgattgatacatgaattaggaaaatgatggagcttggttacaagagaagttcaaagaaatgcaaggagaagttcgagaacgtgtacaagtaccacanacgtaccaaagaaggtcgtaccgggaaatccgaaggcaaaacttac

SEQ ID NO: 141241 - DNA, 1255 bp, Arabidopsis thaliana landsberg
tgatattggactcgcaatgggcatttccggaactgaggtgtgtactcaatcttcattgtccctatttcattatctggtttgtgagaaaatctaacaattgagtttgggttctcatggaaggacaacacttacatattctatttttcaattttcgtaggtggcaaaagaaagtgcggatgtgattatcctagatgataacttctctacgattgtcacagtagccaaatggggccgttctgtgtacataaatattcagaaatttgtccagttccagctgacagtaaatgttgtggctcttattgtcaacttcttatcagcctgcctcactggttagttcccaacccacatttatttttctcttgttcaaaagactaatctcctcagggattgcaactaacttctctgttacattgacactaactactgtgggtctcaggaaacgcgcctctgactgctgtccaactactgtgggttaacatgataatggacacacttggagcactcgcgctagcgactgaaccaccacaggacgacctgatgaagagatctccagtgggaaggaaaggaaacttcataagtaatgtaatgtggaggaacatccttggtcagtcactctaccagcttgtcatcatatggtgtcttcaaacaaagggaaagacaatgtttggtctcgatggccccgactctgatctaacactcaatacccttattttcaacatttttgtcttctgccaggtaacttgccgcgtctggatcttaaaaaggaaaacaaccaacattgaccataaccacgttctcatcataatgtatgatatttgtttcaggtattcaatgagataagctcgagggaaatggaaaaaattgatgtgttcaaggggatactaaagaactacgtattcgtagcggttctaacatgtacagtggtgttccaagtaatcataatcgagctgctgggtacatttgcggatacaacaccattaaatttgggacaatggttggttagcatcatactcgggttccttggcatgcctgttgctgctgccttgaagatgatccctgttggttcacactaagcaacacattgtataatgtgattccttgtgccacaactttggcattgaaaggtaccaattttttctccggcctttggaagtttgatatcccaagatggccttggactagttacggtgcttttttatgttttcattttggccaaatgtataagtgatttggaggagcatttgcttcgtaaata

SEQ ID NO: 141242 - DNA, 1023 bp, Arabidopsis thaliana landsberg
gattgaagatatgtgtcggagaactagggcttctgcagttccaatcgttgctgattctgaaggtatgtaactatgcatccattctttgatgtatttcagttaacaatcttcttttctgctgtttatacggtcatcttcaatttattccatactatttgaccttcaattgatatgatgaccctgtgaacgttatgattatgaaaggttgaaggatgaattatcttttactgaatttgctcccgttttttcatgtataaatataaggttgatactcgattttctgcatatagtcggaagtttatacttcgcttaaaaacacaaagagttgttctgctttattttctcaattactgccttgcgtcatcctctgtattctttgtgatcttttgcattatattaacatttgcccctctatgaatgcacaggaaccgatacaaatccatattcacttgatgccttggctgtattcatgttccgtgtacttcaacgagttaaccatccggtatacagttgcctcttatacacagttcaacttcaactgcatcatccaactttcatcacaaccctacatctttaacaaactatcttttcttcatgtgcaataaatatttagggaaagctcgacaaggaatcttcaaatgcaggttatgtgctattgatgttttatcacctttatgagggaaaggtattatcacatactccacaacttattcttttaagtaaatctatgatttgatctaactgaactttctttaaattttagaaccgtaatgaatttgagagtgaattgattgagcgctttggctccctcatcaagatgccactattgaaatcagacaggtatacagttgacatcacatgcgagctaacaaactcgaacttagcacagctacaaattgcaacttaatatttaattggttcataagcaacttaattgtcttctctttgtgcatatacaggactcctttacctgatcctgttaaatcagttcttgaggagggcattgatttgttcaaatctcat

SEQ ID NO: 141243 - DNA, 1411 bp, Arabidopsis thaliana landsberg
aaaccgaaggaaaacaaacagaggtgcataacgattctgacggaaacttttgagatattttttttagagccaaaaggattcactttttttggttttatcttcgcatcgatctatgacgtacagcaatggcgtcgatgggacggtgcctgagctgaaattgagagtcgaagaagattccgataatggtgattatctgaaattgagaggaggatcaaatcaagaagatgaaggatcatcggcggaatcatcgagatgtccgataggatcggttacttctgtctggttctgggtgaaattgatctccttggtcgtttgtttgggttcattggcctttgttatcatcaaatgggttggtccctttttgattgaaaaggttcgttttttttttgtctctcgaagatctgatgcttattggttacatttgattggattagggtatgcataatgagtctggtttctgctgggtttttaattgttgaaaattagggttcttgaattacatgtatgagtatgtgtttataaggaaggttattcatttatcatcattaatgttggtgtaatgtgtttcaggagctgattccatttataaattgggtgagaaacacattcagcataccggttctcggtcttctactatttgcctcagtggcattgtttccaagcattcttcttccttcttccccttccatgtggatggctggtcttacatttggttatggaaaagggtttcttctgattttatcagctgcttccatcggtgttactcttcctttcttaattggacatctcttcctccacaagatgcaagtaagcatcatcatcccatactctttgtttcggatacttattattaagcttgtaccatgagatgatcaatttggactttttttctttcttgtcatttgtgcaggaatggttgaagaaataccctaaaaaagcagccatacttagagctgctggtgaaggaacctggtttcatcagtttcaagcagtcacactaatccgtgtctctccatttccttacatcatttacaactactgcgctttagcgactggagttcattatggtccttatatcttaggctctcttgttggaatggttcctgagatctttgtctcaatttacacgtacatgcctctctctctttctctatgtctcttgtctcaatgtttaaggcatgttctgcagaatcttaagactggtggttttctgttttgggatatttgcaggggtataatgctaaggacactagcagttgcatcagacacgagacacacactttcggttgtggagatagtcgtgaatgttcttggcttctgtgtaactgcgagcgcgactatagtctgcacaatctatgcgaagaagaagctaagtgcgatgcaatcagaggacgtagagacattacaaaat

SEQ ID NO: 141244 - DNA, 3116 bp, Arabidopsis thaliana landsberg
gcttcttttctcccttctcttcccgccgtgaatctggtgtctgtctctgcatctccttccgacgaaaacagatacactcgagtgaagaaagtatgaattttaactttaacgagacagaggatgcaccagattcacgacgatctccgacgcccaaagagccggttaggtgggttcctctccagagccacccggttttcgcttctcttccttcctcccaagatgaacccgccgtgtcgcagctgtttccgagaaatttcatggcttgggacggagactcgcgcgtatactactgggattcgagacgatatctccttcaccgattatctctgcgcttgggtgaacctgaaccatcctccgtcctcgccgcagtcccgtccaaggtcatttactctctctctctctctctctctctttctgttttcaccgctaagtcggccaaaatgagtattgaaaagaagatttatcgaaagctcttttttagtgctgacattttactgactttgagaaattaggtttaggaagagtttgagaaattagatttcttactgatggatgataataggaagatcttttctacttgctatgtactactgtcaaaaacctttagttttcctctgttgtctttgctacataagataaattataggtgattgattcatcatgtagtgattgactaagctttactaataaatgatattataggtgatgcaaccagaccttcaggtgacattttctgttagcaaaatctccatcaataagtctggatcagctgtacttcttgccggctcagatgggatatgtgtgatgtacctatttggacgtgcttctgtgatagaagacaatgtcatttgcaggtagtgattaacgttaccctaataagatgcatttatattcattgttatcttgattatgatgttatcttgcttaaattaatggccttctgcttatacgttatcacttcataatctatgtgttgcagggtagtttctattggttcagaaatctatactagtagtgacagtgccataaccttgctacaagcatcgtggcaccctgatagtgacacccatttgggaattctatcctcggatgcagttttcaggtaacaatcttttcggctgatagtgaaggtggatgtacatgtcaatatattgatcaatatcattatggaaagatgttagagaaattgtagaaaaaatcagttcctaaggttgtagattgttagtttctgccatgcaatgacttactatgttaccatctggtccagtctctcattataaagaatcaaatcgttttatttaatcctgatttaagagctttttagcttactaaaagatatttgtatgctaggcttttcgatttgtcttcagatgctgagctaccagagcaagaatattatctgcagcccggtgagccaggaagatctagaacagcttcatcaatttatcctgctgatttcagttttggaggagatcatctgtgggatagatttactgtaagttcagtacaaattcttgctccacttgtttgataactgacagtgattttgtttagttgtcttgtcaaatagagccttgaggattacatgtttaggtcttgacctaatctttcaattggtgcaggtctttatattattcactgatggttcaatttatatcttatgccccgttgtgccatttggaaggtaggcagatgatggttctttctccttttcatttctctctggcagttttttaattagtttcttatcgcttgaagttgtacctggtatgctaagtttccaagataacatttatcaattttttgtggttttctggtttcttgaacaagatatgaatgattctcattaagctgttttagatcccaaatctaggctcatttgaagcttttgaggggtaaaatcagctgggtcccatgattcctttgatgtatcaaatagtttatgcatgttgacgcggtgacgacttgatatgcaacagatgcattccttccacagactatcctctttatgtcgaacttctataagtcatggaagatgttttattcgttgtgatgttttgtgtttaactgcccttgaggttgactgagattgcttcggatgtatattgcaacagtgtttacaaatgggaatccgtaatggagatttacaacgatgctaatatgtatggggttaagtcatccaattcgttagcagttagcaactccagtctggctattgaatggttggaagctacatttccagatttgactgagcaaggaactagaggtgaaaatatattggtggtgaaagctcagccttatgctttgcttgacgcatcactggctttacaggtatgaattcctcatctttttgaggggctcctcgtagattttagctgtttcaccaatgttctagatatgtggtttataagccagtggtcttcatcacagatttaaaccctccttaacttgattcggaacacggacgggataaaagagatgacacatacacacatgttccctaagtgttctttgtttgtctactgttttccttgtaatgctgatctcttgttttccttgtgtacagggccctttatataaagcatctagtggcgacggagatgaagatttcgctgttcgggaggcagaatgtaaaggccgggcagtgagtctattatataatcttgttagcaaagattcgattctggtaactgcctggagtgctggacaattacaggttgatgccctggttgatgaaatccagcctgtttggatatctggtaactcatctcgtcttcgcatgaactcccacaacaaaatacaaggagttgcaatgatttgtgagtcaaacataagtgagcttccagttgcaacttcaaacctgccgctcgatcacactgtttggttagggcatccaccaccactgttaagacttgcaatggttgatttggctctccccaaaatgcgtgaaggtggctctcttgttaccttgtttgctgactcccttttgccagaacgaataaactcccttcacgacggtggcattgattcaacagtcttacactctcttccccccacccgtcaggccagtggaaaagatgaagaaatcaaaacgccatctgttcacactgtcctaa

SEQ ID NO: 141245 - DNA, 3405 bp, Arabidopsis thaliana landsberg
ctctctctcgctcgctctctccatcttcatctctcttgctgaaaaatggcgaactcgagaactgtcttaatcttgtgcggtgactacatggaagactacgaggtcatcttcttcctttgctactgaacttttttttttctttttcttaataccatttcttccttgttcttatatatatatcagctgattagtgtgtggcgtcttctctcaggtgatggttccgttccaagctttacaagctttcggaatcaccgtccacaccgtctgccccggaaagaaagctggtgactcttgccccaccgccgttcacgatttttgtggccaccaggtttctctctccctctctagatctccatgtgtagctgcttgatctattgatatacgatccattgtaactatatttagaaatggttcattccaattgagcttcgaattggatgatagaatgtattgtagacaagtttctttaagctgtgcacacttttctgatgtatttctgagagaatttgcagacatattctgagtcacgaggtcacaatttcacgctcaatgcaacgtttgatgaagttgaccttagcaagtatgatggattggttataccaggaggacgtgctccagaatacctggccttgactgcatctgttgttgagctggttaaagagttctcaagatctggcaagcccattgcctctatttgccatgggcagttgatattggcagctgcagacacagtcaatggtcgaaaatgtacagcttatgcaactgttggaccttcccttgttgctgcaggtgccaagtgggtcgaaccgataactccggatgtctgtgttgttgatggtagtttgattactgcagctacatatgagggtcatcctgaatttatccagctttttgtcaaggctcttggcggtaaaataactggagcaaataaaaggatcttgtttctttgtggggtaagcaatcttaccattctgatgaatttatgttttcagtagttttgcctatgatcttgctttagattgtacttcaaatatcatgacctcacacttttaaatttattggtagaagatatcaagatcgttgaatctcctgatatgaacatcacacttttggtaatttttgacctttgcaggattatatggaagactatgaagtcaaagtgcctttccagtcccttcaagctttgggatgtcaagttgatgcggtttgtccagagaagaaggctggtgatcgctgcccaactgcaatccatgactttgagggtgaccaaacttacagtgagaaaccaggccacacttttgctttaactactaactttgatgacctagtttcctcgagttatgatgctctggtcattcctggaggcagagcaccagaatatctggccttgaacgaacatgtccttaacatagttaaagagttcatgaattctgagaaaccagttgcgtctatttgccacggacaacagatcttagctgctgctggtgtcctcaaggtcagcactgttccttcgtagctctaattttatttaactatgtcctcctttttcttgccactacaagttgtttgaggaatttattctatgtgacctgttcactggctggtgcagggaaggaaatgcactgcttatccagccgtgaaactgaacgtggtacttggaggaggaacttggctagaaccagatccaatcgacaggtgcttcactgacgggaatctagtaactggcgcagcatggcctggacacccggagtttgtttcacaactaatggctttgttgggcattcaggtttcattctaagttccatgttatgtaaacatcgttatcaagcagaacccatccaacacacttgtctactatggtatatgttactgccatcttttctatctcgtcttttgactagcttactgtcaagtcaatcacttgtgtttcataaagaaccccactgttgatgctttatgtaaagaatgaattctataagacttgtgctagttctcacaattgtaattcataactttcaaactatatccccaattaagaatacaaacttgctagtgcacattgcaccgaatcttccaaactcagatgctaattgcttagaaatccttcagaccgaatcaactggaaacctaaagatcatcattttcttgatcatatttcttgaaacttttacacatacaagataatcttttgctgacgtttcctcatcacctatatatagggataacaccagatttcacattacatacaaacaattatggtaaagacatgagagactggttcatccggaagcagcagacctcgctgtttcaatcgctgcaaccagatcatcgtattttgcaccggtcacttccttgacaaccttgttatccttcaaaatcttgaaagttggaaccactcttattcctagctcttttgccaatggctgcaccaatgaagagtttcaatggcttagcagcaacaacaaagacaggtagtagtagcaacaacaaaaacaggtattgattatccttagctgctactagctatggttcaattgatatatggtttaggaaaaccgagttaccaaaagaagagagataaaagagcagaactcagacccggttatctggattgcagtcaagctttagaaacacaacgtcgtcgtacttctctgataaagctttgtatttaggggcaatcactttacatggaccacacctgcataaggtatccaagaatagaacatcttgaattgaaactctctttaaagactaccaacatcaaaaccaaaacattcactatggaatctaaatgaaccacatctgcagaagaatctaactgagaagatttttcaatcttagttgaaagccacggaaactttgattagtatcaaaattcaaatcaattggtaatctaagcattcgacatcgcaacgccattgatttcatcgattccgctatatacaatcagagatgtcgaatggtaaaaatttcaaagcagagagaggcatagaagagatagtaggtaccattgagtgtacatgtcaagtacgacaagcttttcaccggcggctttaacgatgggccagaacgtgtccttatcgacctccgtcacctgaccaacactgacattaacggtttctaagctacacctaacaacagaggaatctcctcttttcctagaatccaaagaacagaaaccaatcttcgtcgtcgggacgccggagtaaggaatccggcactgtttcctcgatggaccaaatcctccggtggtcggagataaagccgtcggcgaaggagaaagacggagagaaagaggcattgtttgaggaattcatcagagagccgatgacgaagacgatgaagcaaaatttcgaaaagttgaatgatcagagagagagtgtgtgtgaggtctcaacggactga

SEQ ID NO: 141246 - DNA, 6462 bp, Arabidopsis thaliana landsberg
  unsure (1)..(6462): unsure at all n locations
atggtggagatgcggatgcgcatgatgatgacggttacaacctagtgggagtgatgtttagggacaaggaaaaggaggaggaaatttgctgccccatatgcctggtggagtttgaggctgaggatgcggtgacccatcttcccagatgcgctcatctcttccatatcaattgcatagaaccttggcttctccgtggccacctcacttgccccctctgcagatcatttgtattggctccaactcctcctacacaaaatgtcaataatgcacactcctcttccaccttgtatctctctatcttcttctttttctgtatctttctccatctacttggatacttgtagcctagcttccttgttaacacacccattctttatttaacatgtattttgtcttagtttccaagcacatattgtctccatctccttttcaatcaagattttgtggattactcagttttatgatatactgtactaaacagagacaaaagcagcacgagtttagttttaccagccttgcctagtgcctactgctgctctagtgctctgtttcctaattgatttgttactctgcgtaagaccattaagtaaacgggctaaaggcaacttaataggccttatttttaaaacacattaaaagtgggcctcattttaaaccataacagattaaaagtgggcctttccattataaaatgaaagtagaaaaagttggaagagaagagtaagtaggctacagtttcagtcagaggtgaaagaaaatctgaaagcaaagcagagagcagctcccttcccctcggcgaggagaaaggaagaagaaagccagagagagagagagagatcatcgcagcttctcctccgaccatttgactgcgactgtgatctacaacacaccgttgatcctacgaaaaaggtcagtcagactctcttccttgtctgcgtgattccattttccggcgtctgtctagcctcgccgtcttttaatatctttcactcgccttcctgtctcttctgcacactagatttgattttttcgtaacttaaaaaaagtgttgttgttgtcattcaaacgcgtccatggctcagctactccgcggctagggtttagttatcattttttaataatataatttttatggatcggcgtgcgtgcagaggtaatggatactggcggcaattcgctggcgtccggacctgatggtgtgaagaggaaagtttgttatttctatgaccctgaggtcggcaattactactatggccaaggtcatcccatgaagccccatcgcatccgcatgacccatgccctcctcgctcactacggtctccttcagcatatgcaggttctcaagcccttccctgcccgcgaccgtgatctctgccgcttccacgccgacgactatgtctcttttctccgcagcattacccctgaaacccagcaagatcagattcgccaacttaagcgcttcaatgttggtgaagactgtcccgtctttgacggcctttattccttttgccagacctatgctggaggatctgttggtggctctgtcaagcttaaccacggcctctgcgatattgccatcaactgggctggtggtctccatcacgctaagaagtgcgaggcctctggcttctgttacgtcaatgatatcgtcttagctatcctagagctccttaagcagcatgaggtttgtccacctgcaccgttttgatatatgctagggatggttatgtcgtttctgaatctctaactcttcctctctcgtttgcagcgtgttctttatgtcgatattgatatccaccacggggatggagtggaggaggcattttatgctactgacagggttatgactgtctcgtttcataaatttggtgattactttcccggtacaggtcacattcaggatataggttatggtagcggaaagtactattctctcaatgtaccactggatgatggaatcgatgatgagagctatcatctgttattcaagcccatcatggggaaagttatggaaattttccgaccaggggctgtggtattgcaatgtggtgctgattcattgtctggtgataggttggggtgctttaatctttcaatcaaaggtcatgctgagtgcgtcaaatttatgagatcgttcaatgttcccctactgctcttgggtggtggtggttacactatccgcaatgttgcccgttgctggtgctacgaggtactttcttctgttcattttatgctgctctagctttgcattgaaatttccttggtctctgtaccaaggttagccctctgtgacgcctctctttctttgaatttattacaacaaactgtttatatgacagactggagttgcacttggagttgaagttgaagacaagatgccggagcatgaatattatgaatactttggtccagactatacacttcacgttgctccaagtaacatggaaaataagaattctcgtcagatgcttgaagagattcgcaatgaccttctccacaatctctctaagcttcagcatgctccaagtgtaccatttcaggaaagaccacctgatacagagactcccgaggtatgccacttgagcaaatcatttgaagtgtgttggctcctttatttctgttgcccattctttcttgcatttcctcatgggttttggtgagcttatctaagtgtaactgcagttacaataagaattttctaatttaaacagctgggctggtaaataatgttcgtccagttagatatgtataagtattccttgattgatgactctggttgttaccaatcttagttttgtaaaatatgccttctatgtaaattataggttgatgaagaccaagaagatggggataaaagatgggatccggattcagacatggatgttgatgatgaccggtatgaaatatatatgtttcctcccctttttatttttggttcgagtcagcggtgtaatgtttacttaatgtgggatcgcattgtgcagtaaacctataccaagcagagtaaaaagagaagctgttgaaccagatacaaaggacaaggtactacagcattatctcttaattgtttcgatttctcagacactttttatggtacaaacatttgaagtcattagttcatctaggtttacagcattttccagaacagcacaatgtgctctgataacattacactttttctcatcccgagacccaaaacctaaagattccagaatgagtctcattctgacattaagtcagttagtttaagctggagatacattcacatgagggtagcgaatctttagctacggttaaatcatttagcctaggctatttatttagtatgctcccagctccaacaattgacctgattagatagtgtgaccgtctagccaagctgagctgaatcatctctgcctctcaattcctaaagccgtctccttttcttccgagattaatttatttatcatggcatgttgttcgtgcaggatggactgaaaggaattatggagcgtggaaaaggttgtgaggtggaggtggatgagagtggaagcactaaggtaaaatgaagcagtggacagggctgaaaagggtgggaatggtggttttctaaagtggttagttttgattgcaggttacaggagtaaacccagtgggagtggaggaagcaagtgtgaaaatggaagaggaaggaacaaacaagggtggggcggagcaggcgtttcctcctaaaacataagactcggagcttctaatttcttgctactttttctgtctatcaaatgttgctagttaagtttctggagttgttgttgttgtaagcactcctctgtttttgaggattgagcacggatatgtatttattcgttgcatgtctgaatgatgatatgatatgacaagacgagctattccttttgctatatatttattgattgggccgaagagatctgcgtctgcccaccccaaaaaaataaagaattgatgtgctaaacgcagcaatgaacatcatcaactagtgaagtgggtggagaagatgttttcctgtaacacaattgatttctaactctaaattaaaaaaatgtaaatccctttaagactattaagcgtctctctgtctgtctctcgtcgttctcgtttttgattgcttagttttttcccgggagactgaannnnnnnnnnnnnnnnnncttcgtcaagcgtgggaaggtggcggacggcgtttctctctctcagggacgaaatctcaaccactccaccgccgccggttcctctgttgctcgaggatctactcttctctcaatcccattcccttatctctgccgtctctcacctcccactgcacgagctcacttccgattgcttgttcctgctcgatttggtttccaaagctgatggtcctgactggatccctgtctctcgtcatacttgtcaactggtgcgtcttctccttctctcctcccatcatttccttgttattaatgggatctctcctcctttttattaatccagattcacgatgtttgtgctcgtctacttttccaactaaattcttcgtcatggccgctccttcttcactcttttgcttctgtcttggagtttcttcttcgccaacccatgccttcttcaccttattccgctgcctatttctccagaatcgaacctgtgatccaatgcttcgagactttaaggttattatatatcttctcacaatcttgctgacattgtttaaaccttattcgtaatctcctcttccttttcccagacgtttggcccctatgcatccggagaacattcatctagtcaagtttcttgtgcgcgtagttcctttattacaccaggatttagttttatcctatggtttctcaaatcaagacccttctcctactttacttgtggaaaagaaactgcctcaacagaatcgcttatgggattccatggctcttgcctttgacatgtttggtagagcattttctctatctgagtctttgtttcctactgacgtctcccaatgcacgctagaggtaatcttccccttcactgatcgatcctctcatttctctcatatgctttgtttctcaacttggtgaattttcatataggttctaaggaaagtaatggacgtattagcatctaagggccagcttgtcgaagaccgattcatgtggaggtatatgcctttggttttgtggagactacaatttactcctttttttctgggttctattagacttgttgccctcttaggtaatattcatttcttaattttctacagcttttattcatgccttctaggctgtgtgcacgaggtccttacaaatatcaaatgtcctgtttctgatcacgtaagtgggttcttgataccctttgctcctcctcttagccttggataagtgattttctggtttaacctccatatcagacttttttcctttgtttaagcagattttttaaatgttgcaggtcttaagtttcatagcgtcattgagaatgtttttctgttttggacttactggcccacctcagttatcagtttctgatgttgttcacaacgataagcatttgaatgtcaagctttctccattgatttctggagtaagtaagaatgccaagaatactccttataggccaccccacttgcgcaagagggatgatttgaacactaggcagccagtgtcttcaagctggcggcgcctatctgctcatgattctggtagttctgatgttatatcatcagattccgattttagtgacagtgacggctccgtaccggattcttattttgcccaaagctccaaggttagaatagctgcaattgtttgcatacaggtgagtaacaatgtattattcttagttggttctcatcttctacttaacttttcagtgacaattacttattcattttctttttttcctgttaaggatctttgccaggctgattcaaagtcatttaccactcagtgggtgactctctttccaacaagtgatgtactcaagccaaggtggaaaattaacctacaacatcttttgtcaccataccgtagtattttcttgtctccttaactttccgagatcattaacaggaagtttgaagctactctaatgacctgcttgctttttgatcctcatttgaaggtggttattcttgtcccttttcaagtaattgaggcacatatttcgatgctgttcttcatttttcaccttcccaataacttttatggttaaacaagtatgtctagagatgtttttgtggctcaacttcatgactgctgaatcctgacaatacttttttgtttaccttgcaatgtctaggtaaggattgcatctgcgtcagctcttgccaccatgatggatgggccttcatctattttccttcaagtggcagagtacaaggaatctactaaatatggatcatttatgcccctctccaattcccttggtctaatattaatgcaactccacacaggttttcaacgacattaa

SEQ ID NO: 141247 - DNA, 764 bp, Arabidopsis thaliana landsberg
attgtgttctgtacagacgatatgatcaagcgttcgttatgggaagcagttaccacaaaacagcctgacctgaagagagtgaaagtaagtggcgtttcaattccacattcaggttcttttgtcttgtttcttacgtaaatccgctgtgcagatcgcggaatcactgcctcggatctgcttcttatctggtttgacaggagaggagatgatgatgttcattgatgcattcccagaaactggtacctacaatacaaattcaaaatgaaacaataaaagggagactttaatgcatgtcattttaaaaagtggtggatcaaatgcagggctggaaccagttgtgtttgcagctatggttccgaacagtgctgataaacctatctttgagttaactgaagaaatcatgggagatcatgagttactggttagtcaatcttaaaagtgttgcaccaaagtcacctatggtcttaaatctatgcataaataatgaaacacttgttctctacgcagaccgggagcagttccagctgaaagttttgagtgaggaagacagcaggacagctttaaaattcttcaggtttctgcaacaagactcttaagactttgtgcattacccaaagtatattgtacaacagtgcagtcttcaaataaaaaagtgagctgcacaagaatgcaatcagaaattaagaacttacacaagttatatgagtcaaaatgtaacttcacttggacatatccagtcatcaaacaaatgtaaaatgaagacg

SEQ ID NO: 141248 - DNA, 1918 bp, Arabidopsis thaliana landsberg
aatgttgtaggtgcatcatcatcagtctacaagtagtaaaaaacccattcgatttgataagaagacccaacggaaagagtcttcccgtctacaaagtaaacccaatcaatcttaataatctttaagaggttttttcttattataattatctatctctctatctatctatctgcggatctctcatgaagaaacactgaggagattctctcgctctgatctcctggtatcgtcgtctctctccgtagagatatactagtttgtcccatatccgattgattgctctattcaagttattcctcttctaggttttcgatttggccctccgatttagaggatgtgatggcccctgatggcgttgaagactccgactatgagagtgatcccgacgagttgaaccgctccttggctacacggaggagagaagccagcgatgatgatgaggatgatgaagaagcggacgaccatgataagctgcgagcagcaatccagattcattccgatgaacacagtggtgttgttgttgtcgactctgatgataatgaaggattgcacatagaagatagttatggtgatgatgacgacgaagaggaagatggtgattatggacaatttgatgaccatgtcgaatacattgcggataataatgacaagacaattgtcgccggcaatgggaccgatgactctgccgccactgatcttgtggatggagaggaacaaaagaagaaggaaccttttgcagtgcctactgctggagctttctatatgcatgatgacagatttcaggaattggatgccgcctctaataggtaaactctttttgattctatgaggaggtagtgttttgtccaaactatgcaaatgtatctatctactattgaggtagagtacattgataggtgaaattagcaaacgactttccgtcattcaatctcatgatgtacttcagagttcagatagattggaacaactgctttggttttatgttttaactttgattgtgaatctttatgtatgaatctacccgagatgccatcacactgctatttttccatttaacattctgtttagttacatggtaatgccaaccgatataggttttcgttttttatttctgtaggcgaatgcgtggtggtaggaggctctggcaatccagagatgaaagaaagtggggacatgacaaattcgaggaaatgaatacacagaaacagcaatatgatgtacttttctctgatcatctctctttctctttctctccttttcataaatatatttgtattcatcgacttgtttcctcttgctgtgtttatacatttgccacctcttttttctttttcctttttttttttccttttgaaagctgattaattaaacttgtgaacatagaggaggacttcgagaggccgaggcagaggtcgtggtcagggtaggggtcaggaccgtggacagtctcgggggaacaattctaaagaatttactggcaatggacaccaaaatcagtttccgaaggctgtcacgagagggaggggggccagaagatatgaggttgcattgagaaatgggaatcaagcaccttctgtgcaaaccaaacagtgagtccttaattttgtttcctctctagtcaacacatgaaggctctaggtctctaattgttgtgtctttttacggaatctttaggtcccaaaattcgtctgtggaagtgtcacacgttgatttagggcgtccaccaacagaaacagctaccttagagactgaagccatccaagccaaaaagaatgtatttgcttcaagtttaaattcagcttctcctccattttatccttcaagatccaacaataacttggcacaaaaggatgtacaagctggcatgggtaggctgcacattaatgaaaaccctaatccgactggaaagaagtttggg

SEQ ID NO: 141249 - DNA, 794 bp, Arabidopsis thaliana landsberg
aaatcaaattttctaagtgtctcataaaaaatgacgagattcggattagctcttttgatgattcttgtgattcaagggtttgtgatcttttcagaagcacaattgaagatgggattctacgaccaaacgtgcccttacgcagagaagatcgtacaagatgttgtcaaccaacatataaacaatgcaccctctttggctgctggcctaattaggatgcattttcatgactgcttcgttcgggtattcttcttttgttttaaataacttcatcgtatacttattatcatacgtattacctaccaatacaaacaattttaaaacattgtgtgttagtatcatcaaaacaattcagaaggtttaacaacaaaaaataaaataaaaatcagatgttttattttagccatgcattaatcatagtatatgcgaaaacgtatatttttgtatatagatagctaaattaatatgtatatatcggtgttgacagggttgtgatggttcgatcttaatcaacgcgacatcgagcaaccaacaagtggagaagcttgctcctccgaatctaactgtgagaggtttcgattttatcgataaagtaaagtctgctctagaatcaaagtgccctggaatcgtctcttgcgctgatatcatcacacttgctactagagactctattgttgctattgtgagtatgctaataccccttgttttgtctaaactctaaacctgatacaaaaactaaccggtttcgaataattttggcttagggtggaccgacatggtacgtttcaacggggcgc

SEQ ID NO: 141250 - DNA, 1204 bp, Arabidopsis thaliana landsberg
  unsure (1)..(1204): unsure at all n locations
ctgtgaggttgaggaagcagagtgaagagaaagatagagagataagaagaagccatgggttcgatttcgatgcacataactccctctactgctctccctatacgccatttcagagctagagtctcttgttgctcttctggtaatttcgtttttcctccgtttgtgagaattgcatgtgattgtataattatagtaattgtcgattgtttgatggcttttcaaatcgagaaaatgcttgagctgatatctttgttgagtattttagaacaatcttttgtaggaaaatgcagtgactatgactgtctttttgattattcttggtggagacaacaaattaacaaaagaatgtgtaataattcttccaaagagacacattgggattgacttaagattagcgttgttgtgtagggcatgtatcatttatcaaagatgttgctgccactgaacctccaatgcatcttcatcacttactcaaagtgcttcaaacaagaggtaaaataatgctcaattttgttcctcatttatgtccaaacttatgtattcgtttctttttatatggtttgggatagaacatatatgcaagttctggttataacatatgtgaaatttggtattctggatttgtaataatggagaaagggaaacttatggttcttaaagtctcagttgcttcatatatcttctgcaggtgagacaatcatatctcctggagctaagcagggactgatccctcttgctattccgctttcgaagaattcgtcaggtaagaccacactttcgatagaatccattagctttttccaggagcttgtctttagttttgtttttctggtttttttttttgtctaagtaggctctgttactgcgcttttgagatggcctactgctccaccagggtaagagatttggatctctttcttggtaactcttgcagtagtaaatatatgttgttgggttattcttggtttttaacttttttgtattcgagaacagaatggatatgccggttgtggaagtttggaggagtggagtcaggcttatagctagaaatgtaaagacttctcattctgtttatacgtagcttatccttttaagaggatttatgtcttttttgtgttaccaagaaacaatcttacattttttgatattcaggtagatgaatacattcaccggattctagttgaagaagatgcacaagagtnga

SEQ ID NO: 141251 - DNA, 1633 bp, Arabidopsis thaliana landsberg
gctgatccggctgataggcattcaccgtttgaagttaagaagtctgcttatataactaaagaaaccccaggagtagaatgttcctctggtaagaagaaaagcagcatgatgattacaagaagtaaacgtcaaaaagttgaaaagggagacgacaacttgctgaagctaacatgggaagaagctcaaggatttctcctgcctcctcccaacctcactccatctagagttgtgatagaggattacgagtttgaggagtatgaggtacatccatatgtttttgctctaatttgcataagtggtctatgccgattaagaatcttattctcttttcgtttctttaggatttggctgtagtttctcaagtttcttctggaatacaagattatttcatgatattaaaaataacctgttgttcatatacacattgggtgctagaagttgtttgtctctagcttttaaaatattgtgtggttaatcggcttagagtgctcttacctaaaacagttgataccattgatgtgccgtgttattttgttatcaaccatcgtttttttttttttttttttgtgtttttcaaatcctgttttacttgttttggaacataacaattcactgagttatttctttgtaatgcttctcgtgtcaaaataggaggctccaatcatcgggaagcctactgatgttgcagggtaaaccacacatctttgcttttattggcttttctctttgcttttaggtgtttgaaatggtgaatcttatcgtagataatggcggtagaatcaaattagggtactggtactattcattgtccgagagtgtgttgccaagtgttgaaaagctcattgattttcttctgcttcttgtttttttcttttggatcgtgttgtctctagtttcagatcaacgtgcactgaagttgaaggactgttgatatcaccaacaaccacaaagcacccacgacatagagatggctgtacttgcatcatttgcatacaatccccaagtgggataggtcctaaacacgaccgatgctgttcttgtgcagtctgcgacactaacaaacgccgtaggcgttccctgttgctacggagggaaaagaagcagatggagaaagaagacaatgcgcgcaagttgctcgagcaactgaattctgataatggacttcaccaatctgctaacaacagtgagaatcatgagcgtcatgcttcgcctttgaaagttcaattagatttgaacttcaaaccagaaaaggacgaagaatctctccctggttctaacaaaactaccaagagcgagactctgcctcatgatgacacagtaaagtctagcttcacgtcaccaagctcatcaagtgctcatagccaaaataacaaggaagatgaaggaaaactcaagacaaccacagaaattgcagacaccaccaccacaagctccatgtagattttgcagactcttatagctgcaaggtgaatagattatgatgggaaacaccagaaagtttttggtcaatcacctttttaaccccacaggcttttgcgcattttgtagataaatgggcaagttcttatccttactgatgaattgctcattacttttcttactcgcagctaatgaaaatgggcaattttaatct

SEQ ID NO: 141252 - DNA, 3395 bp, Arabidopsis thaliana landsberg
atgctggttaatgatatgattcatgggctctaccctgaagcgattaccgttggtgaagatgtaagttttctgattggctaaataaaaaagtgctctacagaaccataagggatacatattgtgtatcatattaaagatagtccaaaaccaaattagtgtgaactgacaagagaaagttagtatatattttttggtgatctatgctaataaaatcgtttcatttcaggttagtggtatgccaacattctgtattcctgtccaagatggtggcgttggatttgactaccgtttacacatggccatagctgataagtggatagaaatgctcaagtgagtgttttctgcattttcttttaagttccatctgctttaatatttggtgaaataagtgtcttactctcctccatgttatgctgggaaggaagagagatgaagactggcaaatgggcgacatcatttacacacttaccaacagaaggtggtcagagaagtgtatctcttatgctgaaagtcacgatcaagctcttgttggtgataaaacaattgccttctggttaatggacaaggtatagatagattagacaccgttttacattaaactcattattaaaagttatgtgagcggtgttgttcgggttccaggatatgtatgatttcatggcagtagacagaccatcaactcctcttatcgatagaggaatagctttgcacaaaatgattaggcttataactatgggattaggcggtgaaggttacttaaattttatgggaaacgaattcggacatccaggtactaaatcgatttaagcttgtttcatttactttctgtgcaaaaattttgagtgtacaatttcttcatctactcctgcaatattcagaatggattgattttcccagaggcgagcagcgtctttctgatggtagcgtgattcctggcaacaatttcagttatgacaaatgccgccgcagatttgatcttgtaagttcttacaatttggctgagtacaacattactcaagatatttttctgtgtattctgattcagaatagttcatatatagggggatgcagattatctcagataccgcggactacaagaatttgatcaggcaatgcaacatcttgaagagaattacgctgtaagtctccaagttaaaacctttgtagatgatctcagttacccattagctttattcttattttacatttgagcagtttatgacttcggagcaccaattcatatcacgaaaagacgaagcagatagagtaatcgtattcgaaagaggtgatctcgtctttgtctttaactttcactggaccagcagctactttgattaccgcattggttgctccaagcctggaaaatataacgtataatacacatctaactcttccttttcaaacactggagactttggtattgcttgtgaagatagaatccgatatctttctacatttcgacattccagatcgtattggactcggacgatcctctctttggtggattcaataggctcgatcgcaaggcagagtactttacttatgtaagaaaaataaaaccattctagtcaaagtttacattaattgtgactgttccaatctcttgaccaatcgtgccaatgcaggatggcttatacgacgaacgaccctgctccttcatggtctatgcaccgtgtagaaccgccgtggtttatgctttagcaaaccacgattagaactttcagactttggatccaatatcataatcaaggaagagtgtgtgaaaaaatgtttttccttcattagagtgaagtaaagaatctggtaacgaaaaaaatgtctgtgtatacaagatcaccgaaaatgtaaagaatctggtaatggaaaatatctaaaacattaaaccagaaatgtagcacttgattaaaaaccaattacaacaaccgaaataaaccgataataaacgccagctggccggtcttggaaatggataaacaaccgaaataaaccgatgtatgccaccaagcataattgcaacggtgtaatgcttcaaacaaataaatcaaactaaaaaggtatcacaacaacttttgattatgatcccactaataatagtattgttgtaaatctaaaatttcaaaggttttcaaaaagggatcatcttcataagataccggtttaatttgatttggttgcgatgaataaatccggttaagacaccagtcacgctcctttcgcttccattattaggaacaagaaatccaacggtcatcgtagagcgcatcagataaacggctaaaaagcaaattctctggaagaagaagaagacgaagatgcaaccgacagagacgtcgcagccggcgccgtcggatcaaggccgccggcttaaggatcagttatcggagagtatgagcttcagtagccaaatgaagaaggaagacgatgagttgtcgatgaaagctttgtcggcgttcaaggccaaagaagaggagatcgagaagaagaagatggagatcagagaaagagttcaagctcagcttggtcgtgttgaagatgagtccaagcgtctcgctatgattcgcgaggtttgatttcgaatacattatttcaattcgagttttggtgtgattcacttgctgctttaagttttgttgtagtgtatattaggtcaaattcctatggcttatagtgactaaaagggaaaaaaattcaacctcttttaagatttagtagttgagtgttctaaaattagaaagctggatttggtcttatttagggttttttaatatttaggttctagatttgtggaactttttagaaatttagagcatgatttgtgttctaagatgagctctgtgtcatgatctaaacccgattgggaaaagaagaagctatgaatcaagctctgaactgaatttgtggtgatgtatgtttggtgtattcaggaacttgaaggttttgctgatcccatgaggaaggaagttactatggtgaggaagaagattgattctctcgacaaagaattaaagccattggggaatacagttcagaaaaaggtttgtggtttgctattgagaattgtaatgcttcatatatgtaattaggcaccgcgttttgagataaattgctttactgtttatggatgatgaagatatatgtatagattggacccattttataccgacttgatactgaataattttcagaatgtgttcaggagtcttattattcaaagccgtttttttcaaaatgtgcaggaaacagagtacaaggatgctcttgaagcattcaatgaaaagaacaaggagaaggtggagctgatcaccaagctacaggaggtttgttcaatatgatctcacttctctctctacaatttccaagtagtatttcgtatttgaatgaacgttatggatggt

SEQ ID NO: 141253 - DNA, 2951 bp, Arabidopsis thaliana landsberg
atatgacctgaacgtcgaccttttggatgttcatgcagacaaaagtacctttcatcgttttgataagttcaacctaaagtataacccttgtggtcaaagtaggcttagggagattttccttaaacaggataatctcatccaaggtaattgaatactccagtcactcttattaccgtttttagttcatttgatgcatcagttatgcactctcagttgcctgacatttattttcgtttggtttaaggtcgatttcttggtgagataacaaagcaagtcttctctgaccttgaagctagtaaatatcaggtaaacgccacatgcatctttgttatttttattcttgatcaactgcagtggtcttatgcatttagaacgaacattataagagaggaacactgttagaatcaaatccattctaactaagcttttgatataatgatttactgggaatacatagagacttaggatttggtaatggatctcctcctattcccccttacaaatgcaaagcttgctatttcttgttgcatatgctttatagctgcattaaactttaactcatttgttatattaggaaaagatatagtagtaaaatccttggattttagtctcagtaaccatatcaaactcacactccctcacatatgcgcattgacttgagttccaaaaaacatcatggcattgctcaaattctgtgtcaagaaatcttcttgccaaagcagatccataattgctctgttttgtttttcctgatgtctacgttgaacactgcagatggctgaatacagaatatctatatatggcagaaaaatgagcgagtgggaccaactcgctagttggattgtgaacaatgatctatacagtgagaatgttgtctggttaattcaggttagccatctctttgatacttgtgtgctccatgtccttccatgagtgtatgtgttttttttgtctccgtgtgtttgtaacatgactgctaactgagctatattttccttgttttctgtttgtctgctcactagctcccacgcttgtacaacatttacaaggacatgggtattgtgacatcgttccagaatatcctggacaatatattcattcctctgtttgaagccacggtagatcctgattcccatcctcagctccatgtttttttgaagcaggttagcattcatatcttcaaataacctctaatccgcatgtctttacacaataaagagttggtttgactggttgctgtctcttgtttgctatttcaggttgttggatttgatttggttgatgatgaaagcaaacctgaaagacgtcccacaaaacacatgcccactccagctcaatggactaacgcattcaatcctgcattttcgtattatgtctactattgttatgctaacctctatgtgttaaataaggtaccattcctcttagtcgcttctgtaactaacttggtgttctcaaaactgtgtaatatggagtaactatttttcttcagcttcgagagtcaaagggcatgactactatcacgctacgaccacattctggagaggtgtgttatttcttcctttgtgctagataaacagttttcagttacagttcagtggaattttaacatgtctacaaatttcaggctggtgacattgaccacttggctgctacgtttctaacatgccatagcatcgcacatggaatcaatctgcgaaagtctcctgtgcttcagtatctgtactacctcgcccaggtttgtggagactgcctgcttgtattacatatgtattattgtttctgttctaagaagacatttcttttgacagattggtctggccatgtcaccactgagcaacaactctttgtttctagattaccaccggaacccgtttcctgtgtttttcttaagaggtctcaatgtttctctgtctactgatgacccccttcagattcacttaactaaagaacctctcgtggaagagtattagcatagctgcatcagtaagtcataattttttttttatgctttcttgccacacatcataggccttgaaaaggtgattatatttttaaaagtcttattagttattacctttaaatgatttatactgatcttctgcaattgcaaacacgaagaacaatgaaatttctctctatacatccttttcttctaggttttagttatatttatgtattaactgaagatgataactggatttttcaggtttggaagctgagtgcgtgtgacctgtgcgagatagctcgtaactcagtgtaccagtcaggtttctcacacgccctgaaggtacttgttatatcaacatggcccatagtatgaatgaacaagatgtctctgttccgatctactaataatactaacttgttgagatgttccagtcgcactggattggaaaagattactacaaaagaggacctgatggaaacgacattcacaaaacaaacgtgccacacataagggtggagttccgtgacacggtatggaatgaaatatatttattcttcacacaagttaatttctctttgtaggaaaacaaattaaaaatatgaagttgatgcagatctggaaagaggagatgcaacaggtttatctgggcaaggctgttatctctgatgaagttgttccataaaaaccacaatcagaaatggcaagacgtaagaatccaacatgtatgtaacaactcaatgatcttatcacttctgttacaacattttcttatgatgtcaatgattgaatttcagattgcaggggaacaaagagagcattttgagaagtatacgaaagcaggaacctagtagatagggtaataatatgagtggctctgtgccctgagaaagcgattaggctgtgccaaaatcttattgttttataaagctttttagatgatgagatacaaagagaccagttgagaaccggttttaatataatggatttcagtttttggatt

SEQ ID NO: 141254 - DNA, 606 bp, Arabidopsis thaliana landsberg
caagggtttgccgtacaaaggtatcggaggagagagtaaagggtaaacaaaagagagactggtttacttcttcttcgtgtgcgtgtagctttttcctgcgattctcatcgagttttggttagtgctttgttatcaaggtgaaaatcgatttgaagatggcgagcgaaagtcctgatgttgctgttgtagctccggtggtggagaatggcggcgctgagtcctctaatggtaaagaggaacaattggaatctgagctttcgaagaagcttgagattgcagaagatggtcaagaggagaacgatggagaagaaggaagcaaaggtgaattaattgattagctctttttttggtgttctgattgatcacttggttttgtctttgcgtctttaatttatgtacccattgagaaattatttgatctttttgtgttactgattagtagatgatgaaaaatttggagtttaggaatgttatagtggtgatttcaaagttctcgatttgattctttgttctgagaatggttgattaataaagacatatgtttttgatatatgaagctgagacttcaacgaagaagaagaagaagaaaaataaaagcaagtaaga

SEQ ID NO: 141255 - DNA, 755 bp, Arabidopsis thaliana landsberg
atgcagttgtggggatcaaaaaaactgaaagaaatcccagatctctcgttggccaccaatcttgaaacactttatctcaacgattgctcgagtttagtggagcttccttcctctatcaagaatctgaataaactgtgggacttgggtatgaaaggatgtgaaaagctggagcttcttccaaccgacatcaacctcaaatctctctatcgccttgatcttggtagatgctcacggttgaagagttttcctgatatctcaagtaacatttcagagctctatctgaatcgaacagcgattgaagaagttccttggtggatccagaaattctccaggcttaaacgtttacgtatgagggaatgcaaaaagctcaaatgtatatctccaaacatctccaaactgaaacatcttgagatgctcgacttttcaatctgcatagcaactacagaagaagaagctcttgttcaacaacaatcagttttgaagtatctcatatttccaggaggacaagtgcctttgtatttcacttaccaagctactggaagctctttggccatccctttgtcattacatcagagctctctctctcaacaattattgggatttagggcttgcgtcgtgcttgatgctgaatctatgtcctccgagttatacgtaattgatatcaaggtatgttgtcgcttgagtggtaaacgcagcaacctctttgattccgctgactgtcgggatgccttctttacacctcagatggatagtca

SEQ ID NO: 141256 - DNA, 2179 bp, Arabidopsis thaliana landsberg
cgaattctccgattccaaaagcagcagaagaaaaaatgtcagccatggaagcactgattctccagctgcatgaaatcggcgccgtgaaattcggcaatttcaagctcaaatctggaatcttttctccggtttacatcgaccttcgtctcatcgtctcttatccatccctcttaacacagatctctcaaactctcatctcttctcttccaccttctgcaaccttcgacgtcgtctgtggtgttccttacactgctctccctatcgccactgttgtctctgtttccaatggtatccctatgcttatgcggcgtaaggagattaaagactatggaacatctaaagctattgaaggaatcttcgaaaaggatcaaacttgtttgataattgaagatcttgtaactagtggtgcttctgttctcgagactgctgctcctcttcgtgctgtggggttaaaggttagtgacgcggtggttttgattgataggcaacaagggggtagggagaatctagcggagaatgggattaagttacattcgatgattatgttgacggatatggttagggttttgaaggaaaaggggaaaattgaagaggaggttgaagtgaatttgcttaagtttttggaagagaatcgtagggttagtgttccaagtgtggagaaacctaagcctaagcctagggttttggggttcaaggaaaggtctgagctttctaagaatccgacagggaagaagctgtttgatattatgttgaagaaggaagccaatctttgtttagctgctgatgttggaactgctgctgaattgcttgacatcgcagataaggttaggatcattcttggtatcgaagtttgaagactgttcattagaattatgttttagtgacatcttcttccaaatgttttgtgttgatgcaggtgggaccagagatttgtctcttgaagactcatgttgatatactgcctgatttcacccctgactttggctctaagctccgtgcggtaattacttttgtactaatttgctctcacacatcttcgaaattctgtttctttgataggtttagttatatagagtaagtgaagattgtaatatctgcaatagacatgagtctcatgtttgttactgattaattggtctctttgatactcattgatctatgtttattgttactttagattgcagacaagcacaaatttctcatatttgaggatcgcaagtttgcagacattggtaacactgtcactatgcagtatgaagggtaatttttctacattatgtcacttagctttcattcaagtcttttcgagttttcgtgtgccaattttttctggtttgttcgcagaggcatctttaaaatattggagtgggctgatattatcaacgctcatgtaatatcggggccaggaatcgtggatggcctgaaattgaaggtatttttcatttctctttattaccagattatagattcttttgtttttctaatgttttgttgcattcctatatgattgcagggtatgcctcgtggtagaggtttgcttttgcttgctgaaatgagctctgcaggtaacctggctacaggagactacactgcagcagctgtgaaaatcgcagacgctcattctgattttgtgatgggattcatctcggtgaatccagcatcttggaaatgcgggtatgtgtatccgtctatgattcatgcaacacctggtgttcaaatggtgaaaggtggtgatgcacttggtcagcagtataacactccacactctgtgagtctctcccaaccttaccacatttatcttacatccattgttagtattctagtctgaaatataatgttgattgctcttttattttattttaggtgattactgagaggggaagtgatattataatcgtgggacggggaatcataaaggcggaaaacccagcagagacggctcatgagtatagagttcaaggatggaatgcatacttggagaaatgctctcagtagattcgatcctgagagatggctgaggttttttgtttttgtgttctagtgctataagattgtgctagtttttgtgtgatttatgtgaggatggattttaagactcatgtctcgttgattgtttacttgattgagtgattctcagttctcaataatataaagtgaagcgtggcgagtagttgatctc

SEQ ID NO: 141257 - DNA, 1649 bp, Arabidopsis thaliana landsberg
tttcaactttcaacagtcgacgacacttgcagaaaaattcgagtttgattcctttaattgaaaatccaataaacaagcgggacctcgatttgaaatctctttatccagatccatctctccgtcacaattttccatctaccgtcaccggaaccggcgagttagtcgtcgggattccagatctgtttgtctacgtcttccttctgtctctgtgttcatcagagtaccaattcgctcgattgttgctgcatttcgcgaattgtattaggtttatagcgtctatgaactcctgttttcgctcgatttgagtaacctaggtatttctctacgttgattgtttggatttgaagaaaaggcgcaaagtatgagtagaaatttcggaagtttcatgaagatttgagggattgagttaggtattgtagttgtagagagaatgcagagtttatcgagctcggctccgacaccggaggcgatattagaatggttacagaaggaaatggggtacaggcaattaggtccgtataatggatcgagcaaatctcatgttccttctattgatgctataaggaagatttgtagagggaatatgatacctatatggaattttttgataaaccgagtgaaatcggagaagacagtggagagaattaggcggaatattacggttcatgggggaagtagtaatgctagcattgggagttcggtaaatcctgggaaggaggagagtaagagtaaaggaaggcggaaggataagacagtgactggtgagagttcgagttatgcggaggatagagaagctgcattgcaggaaagggaattagctgcaaaggaagtggagagattgaggaacatagtgaggaggcaaagaaaagatttgaaagctagaatgttggaggtctctagagaagaagcagagcggaagaggatgcttgatgaaagagcaaattacaggtttgttttgaatctttcaattttgaatactgtatttggatacattgcttctcacttgtaaaataatacaatagaaataacctgcaccactcagctcaggttcatttaatattttctcttgttgttgttatgctttattatcgttagtgttaagtcctcaacagaaccattacaagtatggttgctatgtgtagtatggttagctgcttagagttttggtggtatttcgatttcgtttctctatgatttcaggagccatagatatatagccctgaagtattcttctttggttttgttgattctccaatgattttgatataccctagaatggaatatattggatttagtcaggctattttgtttctctggtttcatggatatgccacatcgcccattcttaagattctcacttttgtatggtgatattgattgtctttttgccctcttcatgaagctcaatcaacagcatttatctctgttgaaatgcattgattctgttcatacaacaaatcaaaatatttgtttccgttatgttcagtagatctttcaaattgtttagtgagttttatttttccttttttcagacacaagcaagcattgttggaagcgtatgatcaacaatgtgatgaagcaacaagaatatttgcagagtatcacaaaaggctacaagtctatgttaatcaagcaaatgatgcacaacg

SEQ ID NO: 141258 - DNA, 804 bp, Arabidopsis thaliana landsberg; identical to SEQ ID NO: 13159

SEQ ID NO: 141259 - DNA, 928 bp, Arabidopsis thaliana landsberg
ataatccgtcttttgggttggtgttcgaatcggaatctgaagcttttgttctatgattatcttcctaacggaagtttaagctctctgcttcacggtgccggtaaaggaagtggaggagctgattgggaagcacgttacgacgtcgttttaggcgttgcacatgcactagcttatcttcatcatgattgtcttcctccgattctacacggtgacgttaaagctatgaatgtcttattgggttcccgcttcgaatcttacttagccgatttcggtttagcaaaaatcgtctccggtgagggagttaccgatggagattcgtctaaattgagtaaccggcctccgttagccggttcttatggttacatggctccaggtaaaattcaaaatttcgattttaacgttataaacttatcaatttcgaaatattaactttataacggattttatttgttttgttacagaacatgcttcgatgcaacatataacagaaaagagtgatgtgtatagctatggagtggtgctactagaagttttaaccgggaagcatccattggacccggatctacccggaggtgctcatttggttcaatgggtgagagatcatttagccggaaagaaagatcctagagaaattcttgacccgagactccgcgggcgggcagatcctataatgcatgagatgctacaaactctagcggtctcgttcctttgtgtgagcaacaaggcatccgatcggcctatgatgaaagacattgtggcaatgcttaaagagattaggcagtttgatatggatagatcggaatccgatatgataaaaggcggaaaatgcgaaaaatggcagccgcaaccgttaccaccggagaaaattgtcagtactcctcgaggttcatctaattgttcgtttgcttactcggatgaatccgtataa

SEQ ID NO: 141260 - DNA, 3113 bp, Arabidopsis thaliana landsberg
  unsure (1)..(3113): unsure at all n locations
agagtttgctccacttttacctttgaaatttagtttcctttttaatttttgcgaaatttcaggagtgtttctggttaatgtgagaaagtagattcgcaagaaaccaaaattaaaaaagtgagcgattcgtgttcgattgattttgtggatgatccattatctttctccaatatttttgatttgagcgagagttttgcttcattcggaatcttaagatgtcaggtcccgttgatcgattcgcaataccatgtaagtgtatcagatctgtttattttaatctctggatccgtcggtttctgtcaatgcgattttgctagggttttattcgagtaatgagaagcgaagttctatgcaatttcgtttttttttcctagtgggtactacttagggttgtgctatttacaagcctcaattttgagaagttgggtcgtgatttcagctgccaatagttcagtggttgatgaaaaatgttttcttttttataggttttgagggaatattgagcagtgatgagaaaaaggaaagaaagtctgattttgagaactcagaagatgagaggagaacaagaatcggttctttgaagaagaaagcaatcaatgcatctaccaagttcaagcattctctcaagaaaaagagaagaaaaagtgatgtccgggtcagttctgtctccattgaggatgttcgtgatgttgaggagcttcaagcggttgatgagtttagacaagcattggtaatggaggagttgcttccccataaacacgatgactatcatatgatgttgaggttcttgaaggctaggaaattcgacattgagaaagctaagcacatgtgggctgatatgatccagtggaggaaggaatttggtaccgacactattattcaggattttcagtttgaagagattgatgaagttctgaaatattacccgcacggttatcacagtgtagataaagaaggcaggcctgtgtatattgaaaggcttgggaaagttgatcctaacaaactgatgcaagttactacgcttgatcgatatattagatatcatgttaaggagttcgagaggagttttatgctcaagtttcctgcctgcactattgctgccaagannnnnnnnnnnnnnnnnnnnnnnattttggacgtccaaggagtgggactgaagaacttcacaaagtctgctcgtgagcttattacaaggttgcagaagattgatggagacaattatcctgagaccctccaccaaatgtttatcatcaatgcagggcccggattccgtctgctttggagcactgtcaagagttttctagaccccaaaacgacttctaagattcatgtatgttaatacatgtttttgctttttatttgtacctctagttaatggcttcccttaattaaactactcctgagattcatcattgactgttcaacttttttaatataggtactcggctgcaagtatcagagtaaattgcttgagattattgattccaggtatgtagcttgaatttctaatccttttttcccctccagaattactcaattcttctgtgttttgcttacatcagtgatgtttctttcatttgtttcagcgagttgcctgaattcttgggaggggcttgtacctgcgcagatcaggggggttgtatgctttctgataaagggccttggaagaatccagagattgtaaaggttacttatttgtcctttactgatctctttacacactctagaattgaaacaaatggtttactgttgttgcagatggtacttcatgggggagctcaccgtgcgaagcaggtggtgaaagttctgaacagcgacgggaaagtcattgcttatgctaagccgtcttatccatggataaaaggaagtgacacatcaactgcagaatcaggttctgaagctgaagatattgttgtgtctccaaaagcagtaaagagttattcccatctccgcttgacccctgttcgtgaagaggtatgatatattttcacactttgtttttatagaatacatgattcgtggttttgaatcgtccaagtgattattttgcaggcaaaggttggttctggtgaaacgagttttgccggtagttttgcaggttatgatgagtatgttccaatggttgacaaagctgttgacgccacctggaaggttaaacccaccgccatcaaccgggctccttctaaaggtaatatttttatgctttcacttgtggcatcaaacactgggaaaagaaattgaaactttggtctcttatgtatcttttcgcaggagctcatatgcctccaaatgtcccaaaggatcatgaaagcttcagtgctcgtgtcctagtaactttcatggcttttgtgatggcgattctcacattcttccgtacagtatcaaaccgtgttgtgaccaagcagcttccaccgcctcctagccaaccgcaaattgaaggaagcgctgctgcagaggaagctgatctcctcaattcagtgctgaagaaattaaccgaacttgaggagaaaattggagcgctccagtcaaagccatctgagatgccttatgagaaagaggaactgcttaatgcagctgtctgccgtgtagacgcccttgaagctgagctcatagccactaagaaggtaactgaataccatgttcaacaattgaaacccaccaaaattagaacctgagacgtttcacgttctctaaaaactgtttgttatttgaagcaggctctttatgaagctctgatgagacaagaagaattactcgcttacattgaccgtcaagaggcagctcagcaccaggtcggttttttcttttaaacctttaaacccgagaatccaaatttgtcttcttgaatcttattcatttaaattctttcaaatgcaatgatggaataaaccatcaatattgtttttgtttccagaagaagaataagaggaagcaaatgttctgtttctagaagatgaagaagaagaatcaaatgtttgtttctagaagaagaagaagaagaggcatctctgctttctctctctcccttgtaggtttccattgaaacagaacaactctcatctcattttatgttaaaagctaatcagttctttctcttttatgataatgattag

SEQ ID NO: 141261 - DNA, 964 bp, Arabidopsis thaliana landsberg
ctgcttttgaatttcaaaccttcacataaaaaaaatacttttgaatccgtgtttcattcatcgaatctttttccgatagctatggctgaggaaatcaagaatgttcctgaacaggaggtgccaaaggtagcaacagaggaatcatcggcagaggttacagatcgtggattgttcgatttcttgggaaagaagaaagacgaaacaaaaccagaggagactccgatcgcttcagagtttgagcagaaggttcatatttcagagccggagccagaggttaaacacgaaagtcttcttgaaaagcttcaccgaagcgacagttcttctagctccgtaagtttagatctgatctgttgatgataaactataacatgatcgaatgctttccttatctaactatatgggtctgaatttatacagtcaagtgaggaagaaggttcagatggtgagaagaggaagaagaagaaggagaagaagaagccaactactgaagttgaggtaaaggaggaagagaagaaagggtttatggagaagttgaaagagaagcttcctggacacaagaaacctgaagacggttcagccgtcgctgcggcaccggtggttgttcctcctcctgtggaagaagcgcatccagtggagaagaaagggattcttgagaagattaaggagaagcttccaggataccaccctaagaccaccgtagaggaggagaagaaagataaagaataagaagattatcattaaagatattaagaataatgatggttgatttgctttgtttttttttttttttattgtgatgattgatcatcttttgcttttgtgatgtgtaagtttgttggcttttttgttgattacaatttcttattttctcttgtatatggtttttaaaaacaaaagatctcaaggtattttaatggtatgaatattttcatttgattaagtgatatggatgatataattttat

SEQ ID NO: 141262 - DNA, 317 bp, Arabidopsis thaliana landsberg
agagattaaaattttgaattcttcatcatgacgacgacgacgacgattcagtctcctctctctacacgttgaatttcaatcggcttcacgaaccttcaacctcgtgcggatcgaaattcgatcagtttgtagtaaccgacaagttccgaagatttttcatctgctggatttcgtcgatcagattgaaaccgagcttttcaatcaggtgacttggatatttctctacgttttgctcgatctgaagaattgggattcaaatctagtctcatagatcgattctgattaaactcgtggagatccaatctctatcactagtt

SEQ ID NO: 141263 - DNA, 679 bp, Arabidopsis thaliana landsberg
agacgaagacggcgatgaattcgttaaccgttgaacaagtattgaaagagaagaagaccaatgacccagattccgtcaaggaacttaatctcggccataaagctctcaccgacgtgagtattgtttctgttctgaaactctgttcccaagtagaaattgatacgaaaccctaattgtttaattgtatatttaggtgtcttgtttgagcaagttcaaaaacttggaaaagcttgatcttcgtttcaacaatctaacagatcttcaggttgattgatacataaatctcattttataagcataaatagcatccaaagttttgatttttaagttgctagagcttattatatgttgatgtgttaattggtttttagggactcaagtcttgtgtgaacttgaaatggctttcagttgtggaaaacaaattgcaaagcttaaatggaattgaagcactcactaagcttacggttagttccactgatatcactgagcttgtttctttgagatttgtatcacttaccaatagtgaggttctccaggattaagctttgttttgacagaaaacgagttaatatgtgtgctttatttgactgtgtgatgttgttttctatcaggtgcttaatgctggaaagaataagctcaaatccatgaatgagatctcttctcttgtcagtttaaggcc

SEQ ID NO: 141264 - DNA, 1531 bp, Arabidopsis thaliana landsberg
atgctcgctttttacctctccctgtgctcatgtcatttgctgagcagtgtcttatactatttttgtgtgttcaaggtaaagtacaaaagtccgctagccaatcgttcgctacatgaaagctgattctgttaattttagagctgaattttagtatgagcatattcaagaaataatcctaactttcgagtttaaattagaaaaaaatggagacatagaaattagctgtagtttgagattcttaaaattctagttaatttcctatagaagttgtactttgattcttatgtttcattcactcttgccttgctgcagatgaactgtgtgctgcaagaggttcgatttaccgatcaacagcggtttaaacaattcgtttctcagagtagagcacgaatggaggtatgcagttccttcttccttttgccttcttaatagaaaacggtggtagtaatataacaccaactcgtgttcattttagaaccgattgaggggaagtggtcaaggaattgctgctgcgaggatggatgcaatgttgaacgttgctggatggatgtctgaacagatgggtggtctcaggttggaacttgatcactctttctttcattgttagttttgtaccatttgttttgacctcttgatttgattgcatctgtgggagaagaaacttaattcatattcttagtttgatcttatacttatagagcctaatagagttttgctttgatctttgttgtagttaccttgaatttctacacactcttgaacagaaggtggatcaagactgggaaggaatttcatcctcacttgaggaaatcagaagatctttcctttccaggaatggttgcatagttaatatgactgctgatgggaagtccctcacaaacacggaaaaatatgttggaaaatttcttgatttactccctgaaaatccgtctggtgaactcgtcacttgggatgctcgacttcctttgagaaatgaagctatagtaataccaacccaggtaaataaaatgaaaacccttctatatattttgtgtcctttggcgtgtatttctcttcacccgtcttctacttactccacaattctattcttgcctttttgacaggtgaactatgtgggaaaagcgggaaatatatacagcagtggctacaaacttgatgggagttcatatgttatatcaaagcatattagtaacatatggttatgggatcgtgttcgtgtaagtggtggtgcatatggaggttcctgtgattttgattcacattcgggtaaactgtttttcttttccattttgattttgatctgacagagtcttcgccaagttgcaaattctgcgtcagacctgacctttggattttctcttgcacaggagtattttcgttcttatcttaccgtgatcccaacctattaaagactctagacatatatgatggaactgggcatttcttacgtggcctcgatgtcgatgaagacacccttaccaaagcaattattgggacaattggcgatgttgattcataccaactccctgat

SEQ ID NO: 141265 - DNA, 480 bp, Arabidopsis thaliana landsberg
atgtttcagatgtgctacataatttgtcgattgatccaacaaccaaggctttagctcctgattctgaaacaaaggtatttttctgtggtttagtgttcaccttttgtttagtgattcagaaagcatgccttttggtttcaataagagtaattttcagagtgaacttataaaggctagtgtccattttagttgcagggggcttatggcggaaacggtaatgacttcttgctcaatgatgagttagtgcaggctaccaaaattggtaaacctagtcttttgtctaaagatggaggtgtgaccaaagacaagggatccaaccttaagaaactcgggtaccaaagtgcagcttataacgcaaagggttcatatgggaagggtgcctatgcttatgggtactatcccccagcatatcagtacccaagacatggttacactgggagctatgcttcagggaaaaccaatcttcagtatcagtacctg

SEQ ID NO: 141266 - DNA, 452 bp, Arabidopsis thaliana landsberg
attcaaaacaagaactttcagaagaaacctgaaaaaacctttcggagaaatctccggcgaaaaagaaccctagcgtcgagcggcgaagatgggcgtaattgatttgatcactagggttgattccatctgtaaaaagtacgaaaagtatgatatcaatagacagagagacgctaatgtctccggcgacgatgctttctcccgcctttactccgccgtcgaatatgcactcgaaactgttcttcaggttcgtttagatttctccgatttcgtttcgttctctgtatgtttttgttttgttaactgtaaacttgtgagggacgttatagaaaacagaggatttgtcgtctgagacaaacaaagcgaaagctgtggcgatgaacgcagagattcgaagaactaaagctcgattgcttgaaggaattccaaaacttcagaggctttctctcaaaaag

SEQ ID NO: 141267 - DNA, 157 bp, Arabidopsis thaliana landsberg
tttcttccaattgcttctctccttccatcgctagctcctgtgtcgtcatcgtcgtcgtcgtcgagacctgtttctgcagcatcaccgtgaacacactttatcacggcgtcggttgactaaactattaatacgatgtcgttttaatcaaactatataa

SEQ ID NO: 141268 - DNA, 446 bp, Arabidopsis thaliana landsberg
aaaaagaaggtcctgcgcataatatagaagatgactggctggagactgaaaaaaaggtcatagtcattcacagacttcatcaaattttagagccattcatgctcagacgccgtgttgaggatgtggaagggtcacttcctgctaaggtaggatctatcttatatttttgctgttattttccgtctagatatttcctctgattatgcttttgggttgcagatttctgtagtcttacgatgtagaatgtctgctattcagagtgccgtttatgattggattaaagcgactggaactcttagagttgatccagacgatgaaaaacttagggctcaaaagaatccgatataccaagccaagatatatagaactttaaataataggtgcatggagttgaggaaaagcctgcatcatcctttgctcaattatccatatttcaatgacttttt

SEQ ID NO: 141269 - DNA, 707 bp, Arabidopsis thaliana landsberg
gttcttttacaacacatgcgtctctcagaaatctctccgccccagatccatctctctctcaagcaaacactcttaaacccttttgatttctcctcataattattctcgaaagctccattgtttattagttattcctgcaaattattcaattttaccattttgcttctggtttttttagtcgtctctctctctcttcaatctcttgaaaggtacttgctttatgcacaaaagttataatcctgggtttttttgtactacactgtagttattaatgcctgaacaatcttcttgatctgggtacattttgcagattgagtaaaaatcattcctttttttttctgggttatatacactgttcttcgagttctagggttccttaatttcgtttctcctttttggaaagtctctgactttatgtgttttaatgggtctagttttttcatgtggtccatttaattagctagtggaagaagatggatgaattgtgtaaagattatttttggttctaagtatcaaaaaaatttgggggtaaattgagggagatgggttgtgtttgtggtaagccttctgctattgaagatagcaaagatagtccaagagagcgtttctcaagcaaatcctcttctgagtttagagtttcaagaccggttgcttcttctagaagggaggagccgcttaggattaaggaacggtctgatgttgttagt

SEQ ID NO: 141270 - DNA, 1181 bp, Arabidopsis thaliana landsberg; identical to SEQ ID NO: 16573

SEQ ID NO: 141271 - DNA, 1553 bp, Arabidopsis thaliana landsberg
atggatatgaaacaggaggaggatgctaaagagggtaaagcgtgcagtggcactgagaaggagaatgcattctctgtttcatatggagaaggtgaagtggatgtagaaactgaggaaggagagataggtgttagcccacagttgaagtatgagaagacggcaggtaatcaaaaggatttgctttcagctgtaacgagctctgagaataatttcgctgaccaggaaaaacttttagctgtgttcacgaatcgtctgtttttggcattgacagggcctgggacagtgaaatccgccgacatgaaccagagagtgaacgtggatgatctgaataaagaagggctgtgtgaaggtccagcgaataaaaagctgaagacagttacaggagtagaaactggatgtagcattgtcaggagggatacatctgttcataaatttgcttcaaggaaattcgtctagatgggaacacaagaagaagcagaatgtgaatacttgtttgtttttcgttagagacttccctgacaggtcctcataggaaacatatcttaaaaagtaaccaaactagtgtctcttaattttgattcatttgttatcatgaagaagacccaatcacagctttgtttgtacatattacggcgatgggcaaaagacatatgacaagatgttgattttggttgacttgactgatctgcttaagctaaagtgtgttttggctaatttcttttctctcttctgtttatgaatcttgttcattgaagagatagcatcggttcatcgaagcagttgattcgaaagtgaaatgttgtggtgtcatatttgcgaattacaaataataggaagggttttagcaaataagtaattccttgagtgtattttgggaaataagtaactcttaagggatattttttagaaaatagataactcttcgggtggacaaatggcgtatgtgttcgtcttcctcttgtatgttactcttctcagatctcttgttcgttttgatgtacaatggcgtccttggtagcagctcctatctctttctcaggtagtcaatcgcttttttctcttctccagttttcagttcattgcttcctctatcttcttcgttttgaactcaaatttctgagtaacccgagagagaaagattcgccgattcgcatttgcttactcattcaaatttatcctcgtatcttcgattagtattcaaaatttccgttaggtatttaacattttagcgagatcatagtttgttcatagtctgaaactagttcaacatatagcaaatcgacgtaaaggaaatacgaaaatccactgatataacggaccaacatatgattagagacctgtgtatttgagggtttctccatatcgttagattactttatatatggaaactcacttgcattttcagagtttactcaaactgaaccaaagcagcttcttgattcacaccttttggctcaggtgactctcatgtcaaagcacaccgaaacttcaatgcgattcgcaagagctctacattgactgttcaaacaaaatcaaaccgcagtcacaaactc

SEQ ID NO: 141272 - DNA, 1427 bp, Arabidopsis thaliana landsberg
actccatatcaatcaatcgaaaaacctttctctcttctttcggagccgtcgcttgtgaaactttccggcgatttaacagagtcatgatggaaatacgaactccgaagactggcaaagccaagcgtgttctcgaaagccgagctcctaagttggtaaagttctcttctttttctccttcgtccttcttaaaaccgagaagtgaatcatgttgagagctgtcttcaatgttgtgttgacatctatgagactcatgggttttctatttgtcgataaatttatcaaagaatcgattgaaagttgcaaactttgtatctgaattggttgtttttggaatttgtaggttgaaactgggaagaagacgttgatacttcatggaacaaagacgagtgctacacttagctctgtaatgacggaactctaccgtttgaagaagggaggtgccatcagatattcaaggaggaatgagaatattaggcctttcgagagtggaggtgaaacttcattagagttcttctctcagaaaacagattgtagcatttttgtggtaagttcataagctttggcagctgttgcatcttggttttatggtgttgcaactttgattctcctcttaacttagctatgaactgctagatagaacaaaatgttattaagatgatctatcctgtgatctagattcattctaaggcatctctgcttctgtcttgttagtctatgtgtatttatttatggtggaaattggtatgattggctgatgttatcacaggccttaagaagtcatttggaaaggtgtattggcaaattaactttgatgcgagttctaacattggtgattgtttttatattgcagtatggttctcacacgaagaaacgacctgacaatcttgtacttgggagaatgtatgatcaccaagtctatgatcttatagaagttgggattgagaactttaaatccttgcgggcgttttcgtatgacaagaaattcgcacctcatgaaggaacaaagcctttcatttgctttattggtgaaggttttgagaatgtatcagagcttaagcatctcaaagaagtcctcactgatctttttcgtggcgaggtgaagtgtttgattcttatgacctacttttgcagctaattccataaccagtttcaattttattctgattctatatggatttggcttataacagaatttgtatatgtctgcaggttgtggataatctaaatcttactggtttagaccgcgcttacgtatgttcagctatatccccaacaaaggttttccttactcattgcgcattgaagcttaaaaagtcaggatccattgttccgagaatggagcttgttgaagtcggtccatccatggacttggttatcaggcgtaatcgtcttcctaacgatagcttaatgaaagaagcaatgagaag

SEQ ID NO: 141273 - DNA, 923 bp, Arabidopsis thaliana landsberg
ctcttatgtataagtacattatgtgacccttcaattgcagctaattctgatgaaaaatggaggaaaaattatctattacggacctcttggacaacattcaagcaaagttattgaatactttatggtcagtttctatataatactgaaactgttgcaaaaaaagtgtggtctcttctctacttacaaattattacaataattttcaactttagaggattcatggagttccaaaactgaaagaaaactctaacccagccacttggatacttgacattacttctaaatcatcagaagacaaacttggagttgatttggcacaaatgtacgaggaatcgactttgtttaagtaagtctaaacacaagtatcacttaatactttggatgtttgcctgaaactgattttgttatttgtttttagggagaacaaaatggtaattgagcaaacgagatgtacatctttgggatcagaaagattaatcttgtcatcacgttatgctcaaacgagttgggaacaattcaaagcatgcctctggaaacaacatctctcttattggagaaacccttcctacaacctcactcgcatcattttcatgtcttttacttgtatgctctgtggcattcttttctggcaaaaagctaaggaaatgttcgtgtcttcccccatctttcttgaatcggctttgaaccgcgtgatttccttgatctttaaaggtttagctatttaacctttttttacctttcttctttgcagaaacaatcagcaagatctattcaacgtatttggctcaatgttcacggtggttctattctctggaataaacaattgctcaacagtgttatttagcgttgcaactgaacgaaatgtcttctaccgtgaaagattttcccgtatgtacaactcatgggcgtattcacttgctcag

SEQ ID NO: 141274 - DNA, 2174 bp, Arabidopsis thaliana landsberg
  unsure (1)..(2174): unsure at all n locations
caaaaatggagtcatcagtgaaacccaatcctttcctctctttctcttctttcattcaccaccagtgtacccgcttcagctccgacctctccgcccgaatcgaagacacgaaacgattcgccgaaaccctagctactcgacgtttctctcttcctactccgccgcctttcgcctccgtctcacaatccaagtctggaaccccgacgacgacgttgagtccatctcttgtcgctaaagctctcgctgggacgtcggtgtttacagtcagtaacaccaataacgaattcgttcttatctcggatcctaccggaggcaagtctatcggtttgctctgttttcgacaagaggatgctgaagcttttcttgctcaggtttcgctttttgttgtatttttctcctccgaactttttaaaaaaaatgtgaagtttctgagctcataattctctaatatactcctttaggcgcgacttcggagaagagaattgaaaaccaatgcgaaggttgttcccattactctggaccaggtagttccctttccttatgatcactgcattagatcaatgtagaagaagccattggttaaatcaaatgaaacaaacaaatttcaggagctcaaattctaagtagacttgttcatgtctggcctcattttagttgtttatattatacggtaataggaacacctgttggcagtttgaatgaacgggagattgtgtttttgtgcacgtagcaatgttgacaacatcgtcacaagaaagaatgcaatgatggcatgattataatccctctaatggcttggaacttataagttataactacgtttagggaactttttgatgttatttgcgtaatcgtggtagctacattcccagaagttaagatgatgttgtttacaggtgtacttgctaaaagttgaagggatttcctttcgcttcttgccagatccaatccaaataaagaatgcgttagaggttggctcatgctaaacagacttttaattatatgtgtctatagcatttatttggcatttcaatcttatccataagctatattttcttgcgtctcagctcaaatcctcaggaaataagaatgggtttgatggagttccggtttttcaggtaaattgatatactcattttctgtgtttttctattataccaatatggattccttatgttttggtggttttgctttgttttctcatgatatcaatctcatgttattggcctcaacagtttaagcttcttgttgtgagaaaaaaaaatagacgttactgccctgtatatttcagtaaggttggttagtttcttctcccacgttaaagaatactaatagatctctcataagccaaaacagaggaagataactcttactttcctgttctgcgtgaccactttcaggaagatatagagagggaactttctaaatatacgagagcatcaagaggagatcaacaaattatggtaatgattcatacctaccttctatgtatttgaatcttcgataggccacgtaagatagaaacaaacaccttgatctaaagacatggtttactaacaagtgggagtagctagtagctgtgttggcatcatatgtaatttctagcattttttgtgattacatgttctgcaaacatataacaccatgttttcaaaggaacagcgagggaaagggaaaagtcttagaaaactttagaaagagcggaattcagattgtacatgccttcatatatctgagttaaaatgaattccaaggtttatcgttatcanagttgcatatcagagatcaatatataaagtaatttcacagcattggttttgttaagagttttcttatcttcaccatggaactaatctttttgttttgcaggttgggagtctggaagatgtgttgaggaaaatggaggtactcacgcttcttctttgtttaaagaaaccttaaagtatgaaaacctggtagtctaataaaaatctgaattgaatcaatgtagatgagcgagaagaattcaggttgggaagatgtaatattcattccaccgggaagaagttatgcacaacacatgcaggatttgatcaaagagtaaaaccataatagacacaatgtgtgtatttttacttgataaaaaaaaaaacagcctcttttgagattttgcaatattatcaattgcccaaaga

SEQ ID NO: 141275 - DNA, 388 bp, Arabidopsis thaliana landsberg
atggctgttataagtgctgcatatgaaagtggcctaggtttatcagcatatattttatttgcatcatatttggagatggagaacgtgaaagcatccacagagcagaagcaaggaacgcccccttctgtagcccatggtcttggaacttaccggtggcttagtgaagacgtaatgatgaatacattagggatatttcgtagcccttacagtggatttgttgaaggatttattgctgatgctagtagaaatctaaaggatgttaagataaacaacgatgttattgttagaaccagtaaaggaattcctgttcggaagtatgaactgagggtggatgtagatggtttctctcatttcataagagtccatgacgttggggagaatgcagaag

SEQ ID NO: 141276 - DNA, 351 bp, Arabidopsis thaliana landsberg
cagcccaacttttcgcaagtcgctgtaaagtttgatttgcttctttttatatacacatacttctcctccatacactttcctcttcaatcctcagttttttttctaagccctaataccatctcaaagaagagatcaagatttgaaatcaagaagacaccattactcagatcaacatgcttgccgttcaccgtccttcttccgccgtatcagacggagattccgttcagattccgatgatgatcgcgtcgtttcaaaaacgttttccttctctctcacgcgactccacggccgctcgttttcacacacacgaggttggtcctaatcagtgttgctccgccgttattcaagaga

SEQ ID NO: 141277 - DNA, 2487 bp, Arabidopsis thaliana landsberg
atgactctgctcaaaagtcagacaattcaaatttctggaattcaacactattatttactaaagtttgcaacttgtaaactttacaatgcgagggacagcgaaacaatcaatacaaacagaattacagatacaaaagccaagtaagcttcattctttgatccaaaaagagaagagaagagaaagaacatgaaacctgcccattagagagaggaactgagacattccattgcaataagtggtctttcccgatcctggaggacctattactacttgtccaaacaccatgcttctgaagacgaagaagaagattgataccaatcggagtcaaacacgttgtataatatcagagccagtcagacaaaaaaacacagtaattgcaaagcaaaatcatctaatcatcaaactaacataacatgaatattcaatagagaacatcaaaacccttctaaacactgaactcgtagcacaatagaaatcggaaatgtcatttgttcgtcggacacagaatacaaacacaatcctccaatattattaacccaattcctaaacctcgtttataatacaacaaacaattcactggagaaagagaagcagagaaacaatttgcttcaagagcatattcattatatcagaagcaactggagacacagaagaaaataaatagagaagctcgcctgtgtagttagccggagagagaagcaatgacaggtctgtttgccggagcaagagaaactcgcagccggagactcgtcgaagactcgattcaaggcgaagtaagctcgccgaagactcgatcggtatatttaaattagggctttaattttaattcggtttattcgtgctatactcgaaccgaaccggataatcgaaattaaaaagaaggaaacgatcaagttattattggagtatccgaacccaaaccgaaaagtgaatttcgggtcggtttgttttcggataagttaccaaggcctaataaattggtaaaccgtaaaccgatgcatcagggtttaaaatgtaacaaaataatattttaggtgacaattaaaaacgtaacaataaaacaaggggttatattcgaaacgtttgcacctaaccttataacttcgcatttttatactctgttctgatcgcagcaaagccgacgttgaactttctcgccgccggagcgcgtgatctccactctctgtcatcgaatcactctaattgaagattctccgatggcgattgtctatgctgttgtagcgagaggtaccgtggtattagctgaattcagcgccgttacgggaaacacaggcgccgtggtgcgacggatcctcgagaagctttcaccggaaatctccgatgaaagactttgtttctctcaagatcgttatatcttccatattcttagatctgatggtcttacctttctctgtatggccaatgatacctttggaagtaagtatttttcactttctccgaatcgtaatctctcttaagaaaatttagtctttgtaattgattctgagttttatgttttgatgtgttggtgattggattttcagggagggttccattttcgtatttggaagagattcatatgagattcatgaaaaactatggcaaagtggctcataatgctccagcttatgcaatgaatgatgaattctcaagggttttgcatcagcagatggagttcttctctagtaatcctagtgttgatactctcaatcgtgttagaggagaagtcagtgaggtataattgtttcttcgtatgatctctagatattactcagctatatccattgaaaaggttgaatttttatgagttattacgccttcttggctcacacaggcttctttaaatctgtcttgggtgaaagatgaagtttgttatctcattgttgtgttatcgtgtttacagattcgatcggtcatggtagagaacattgagaagataatggaaagaggtgataggattgagcttcttgttgataaaacagcaacaatgcaagatagctcgtttcacttcaggaagcaatctaagcgccttcgccgagctctttggatgaaaaatgctaagctcctgtaaggatctctctcacttctagattctcttcattccttttctttgctaactaagagatacgctcttctacattctaggtgtttcaactcgcctttgcagcatagtttattgatatgtttcttaaactagagatacagtagttctaagattcaacattattttcgattttgggaaattctcctcgacaaaatatctaatttttggctgataggaactacactgccttgattccacctctgcttaaagaaatttcattattgttttgttttgatgcttgagttccagatcacttttattaatcaacaaaactgcttttcttgtttgtgttcggcagggtcttgttgacatgcttgatagttttcatgctgtacataataatcgcatctatctgcggaggaatcactttaccatcatgcaga

SEQ ID NO: 141278 - DNA, 1307 bp, Arabidopsis thaliana landsberg
ctctctctctctctctctctctctttagccactaatctcactctgttttctctccctcgtttcttgctttcaatggagaaacagtacctcactttcatttctttttgtttctccatcaccatttgtgggttcctcatagtttcttggctggcaagaagcataatccgtaatgggattagaacattaacatggagaaaggaaacgaagaggaagaaaaagaatcaagaagatgaaaacaaaatgtctctcctggatttgccggacttaaccttagactgcatattagagaagctctcaccatcagagctctgtgcaatgactagtgtttgctccgagctaagagataagtgtgtaagcgatcatctatgggagaagcatatggagacaaaatggggaagattgatgggtgatgcagcgattcaagagtggaaatctcacgttgctacgataatgagatgtctcacaagtagtagtagtagtagtagaaagagtaaaccaaactggagttcgaggtttgttgcgaatttgaaaccctttgcatggttaagttcaaaccatggttgtgaaaacagaggatcatcatcatatttggcacctatagattctgtgatgtattggtactcgaatcttgaaaatggcaagttttggttccctgctcaagtctacaatcgcgaggtaatcatgcttatgatcgaatcatgaacaaagatttcgtcttttttttgtgtgtggttttggtgttacccatttgactgaattggagaaaaattgcttcttttgatttctaaatttgcagaacggacatgttggattcatgatgtcttgttacgatgctaagatcagatacgatttcaagactgatacatttcaagctaggtaaagaaattcttcccggaaaatgtgatatttttctgaggatttttcattaaaatttgaattactctgttttttttcaagatactcggcacatggccggcgagcggcggaggaaaaggtgacgtggcagaggctgagaccgtctcaagacgacacaaagtcacgtgatctgcacgtgtcagattgtttgcacggacttcgacctggtgaccatttcgagatccaatggcgacgaaccaaagagttcccttatggtgggcatcttctttctctctctcttttccaaatattttgttctaaattcgaattaaaattcgattacttgtgcgtttgattcgtctgattttggtgaatttctttaattttccggcgtaggttggtggttcggaatcgttggtcatctacaaaactgcgacggcgtacaaaattga

SEQ ID NO: 141279 - DNA, 1511 bp, Arabidopsis thaliana landsberg
agccctttaataagtttcaatgtcataaaaccaaaaaaaaaaaaaatagtgaagacgacgaacctttgaggacactcttcggtttctccaatccttcatatggttcgtaaagatctctttttctccatttttcaattcaattttggctgatctaattttggatttcagatgtcggacggaggagcaccgtcgagatacgtgaagttgacgaaggaacaagctccggtcgatgagattcatcccggtgaactcaatcagcccattgaagtttctcatgtatgtctgtctcttttcctctactgatctaatttcacaattacgcttcccaattttcgatttcacctgttcacgattcaatcgaaaatgtcagtgatttgtgaattagatccgtgattcttcttcttcaaatgatcaattttgatttgtggttgtgtcaatttgactgatttgtgactctcagatcagagtctctagatttcccaattcgatctatgaaattttctgattctgtgtaaactcctccgcagctagctgttcacaaatgcaatgagtgtggccaacctttgcctgagaattttgaagctcctgctgatgagccctggactaccggaatattcggctgcactgaggacatgaatagttgtaagttctatctaaacgtttccacagatctgtataataaatccatcatcaagtgattgatctttcggttttgattcgcttctcatgtctttatacgctctttacagtttggctgggacttttctgcccaagtgttctatttggacgtgtctatgaaactctgagtgatgaggaaacctcgtggaagaaagcatgtatttgccattccattgtagtagaaggcggtcttactgctgcatcgatgcttgcttgtgttcccggtattgatccgcatacttcttttcttatatgggaaggtttgttgtttgtttggtggatgtgtgggatatacactggaaatgtccgtcaaactctacaaaggaaatatcatcttcaggtaagcaaagtcttcattaacatctaaaatcgataaaactgcgaaaaaagaatctgaaaatgtgttttttggttttggttttgatggaaacagaatgctccatgtgatccatgtatggtgcattgttgccttcacttttgtgcggtttgtcaagagcaccgtgagatgaagaatcgtctttcggataactttgtgatgcctatgactgttatcaacccaccaccggttcaagagatgagtgcttctggtgacagagaccaacaccacctcaactctgttccggtttcacaccatagctctgatcttgagatgaggccattgtagtcctcactggttccccatcagattcaaggttttgttttgcctgaatctaactttatatatatgtaaaccgatttggtttgtttcaaactcatatagatagattcggattctggttttccttgtgtaatcatgatttatcattatctcaaaattaagattttctatgcct

SEQ ID NO: 141280 - DNA, 1465 bp, Arabidopsis thaliana landsberg
cacttgaggaaacacagtaaaaacctaaaaagagaatgaaactcgcaggtctgaaatcgatcgagaacgctcacgaagattccgtttgggcagcgacgtgggttccggcgacggaagatcgaccggcgttgcttctgactggatctcttgacgagacggtgaagttatggcgaccggacgagctggatcttgtgcggactaatactggacactctttgggagtagcagctttggctgcgcatccttctgggattattgcagcatcttcttcgattgatagctttgtccgtgtgtttgatgttgatactaatgctacgattgctgttttggaagctcctccttctgaggtttggggaatgcaatttgaacctaaggtaattgactcaatgagattgcctccaattttagggttttgaaggattttgggttgttttgtggtgaaagaattcgattgcttcattgaatttcacttcttagttgcgagtaatgcttctcctgatctatataacaatgcttgggtactatatggaattgctgagtatcgtttgaatctgtagctctgatcagatagggtcatctactctgctcggaaaatagatctagatcatcttctgatttttcattgagtcttatatagtagattaagaacaatttattggtgctttgatgataaatcttgatttggtatgatagaattttgacctggtgactatcaagtatcagtgcaatgatctctcttttagtttgcagtggtgtttttatttgcttctgagcttataatttcaacattactctttagaatggtgctctgctaacatagtattttacatgttccaagggtacgatccttgctgttgcaggtggaagtagtgcctcagtcaagctttgggacactgcaagctggagattaatctcaactctatcaatcccacgcccagatgcaccaaaaccttccgataaaaccagcagcaagaaattcgttctctcggtggcttggtctcctaatgggaaacgacttgcttgtggttcaatggatggtacgatctgtgtttttgatgttgaccgctcaaagctacttcaccagctagaaggtcacaatatgcctgtaaggtcccttgtgttctcccctgtagacccgagagtcctcttttctggatcagatgatgggcatgtgaacatgcacgatgcagaagggaaaacgctgttggggtccatgtcagggcacacgagttgggtgctgagcgttgatgctagcccagacggtggagccatagcaaccggctcaagcgatagaactgtgaggctatgggatcttaaaatgagagctgcgattcagacaatgagcaaccacaatgaccaggtttggtctgtggcctttagaccaccaggtggaaccggtgtccgggctggtcgacttgctagtgtctctgatgacaagagtgtatcgctctatgattactcatga

SEQ ID NO: 141281 - DNA, 1730 bp, Arabidopsis thaliana landsberg
gataattctcccatggcaccctccggcaccgtcgccgatcctccgcaatgttcaaccaccgattcattcaattccagcgacacagcagagaatgatattcgggtcccttctctctctctctctctctatctccgtcaaattttgtttgattactcttcactgaagcgagaagaaaaatcaaagtttgaatttttcgttctgagctggttatgatatattcctctttttcatggcagccattttttgtacttcacaaggcttcgtctggtaatcacaatgggaaattaactgggattgtgaaaagcaagcggaggatcgaatcaccttcacctaaaattgctaaaagatctgaggtcgaaagcgtggaagaggaagatggccagtttttctcaactcttcgctttaaagttttcgagactgtctggtcgaaaatcgagacaacaattgaagtcagtctcaatctcctctctctaaatttctctcagtgtgtttgaaatcttcagagttagtgtttttatacaccatgataaagtagcattgtaacttttctgaattgcaggatgtcctgagaaattcgaactctaaagtatttagtgggattcatgattggatacgggaatcatttgaatcgatcatatcatctggagcacttaagttatcggaagcagttcgatcttatcctgttttaactcaagcttcttctaagcaattgcttactgcaatggttctcaccagtaagtcctttaaagacttagtgtcttgacttatgacttttggatgatgttttgatgggttacgaaactttcatatttacaagcaaccagttgcaattacttggcttcttcttataaggtaattttatattgttgtcagggaatctggaaatggttgatgatttattgacatttgaagaactggagttgcacttgaagtctcaaggatgtcatgtggctaagctttcatctatggacttctcagccaagagtggtgtaggaggttgccttagaggtttgttacgccagtttgtgatgccaaccgtagatgttagtaaatctgcatagccttccatatcctttagttttgtgggctacttgaacaataattgtatccactgagtcattttcttcactatgcgaattttgaacaggtggctgatgtgaccattctcgcatcatggtacagagaaaacaaaaaccatgagaatcccgtggttataattgtggatgatacagagagatgctgtggtcctgtactgtcggatttaattcttatattaaggtattagttcatctttatgcttgctacgtttgcatcatatcatgttgaactttatctacttccacttttgtcattaccatatcagagtgtggtgacctgctctttcattttttcttgtcagcgaatgggcaatcaaagttccaatttttctgataatgggtgtgtccacagcacatgatgcgcctagaaagatattatcagtgaacgcgctgcagagactttgtgctactaggttcactttgagctccccggctgaacggatggatgcagttctcaaggctgttttcttaaagccgtgttctgggttcactgttagccataaggtggcactttttatgagaagttactttttgtgtcaagatggaacactgacatcttttgttagaactctcaaggtttcaagctctattcttaatgctgtattaggttttaaccctgtttcggattgctaa

SEQ ID NO: 141282 - DNA, 895 bp, Arabidopsis thaliana landsberg
caacagtaagggaaagactgatgcatcacctcctaagaaaaccggcaacacagaaacgctaaaacgaaattgaaaacaggtagaggttcactccttatcatctggaagcgagtcagccggtgacattgaaggtgaagaggatgttcagagtacatggaaagaggacggaaatgcgccaagctcgggtacatttgatgaatgtgatgattatggaggtgctctaaaaatcactcaggaaggtgatgtgatgcaagaagaaagtgactttgtaagtgttctttacattcttacatcacattcccatattttatctgattacactttgtttttcctcctgttattgcttatggactatggttataacaatatcaaatttcttgtaggatcactgttcttcaaattgtacaaagatgaaagaatcaatgatgagagagatagagaaccttgaactgaagcttcaattgtatggaggacatggtctgaataatttaacctacgacgagcttcttcattttgagcatcaactcgaatcttctctccatattgctcgagctcataaggtatataatatacacactctaggatataattatttaagcgacatatatattagatattcatatacagcatgtactttggtataaaatagttttttataagcacacacatatcccaaatttcacagttttagtggttcatgtctcttgtttattaaatatgtagttttgagttcatgcagcaggagcagcagcaacaacaaacagacaagcttaaggagaatctcatggtgtgtcaaaggcacgaagatgatgacatcatgcaccggcaagtgaagaaggagaacccaccggcgttcttcagctcctcccgccgccacaaccagccccaagactag

SEQ ID NO: 141283 - DNA, 374 bp, Arabidopsis thaliana landsberg
acgactacgtttccactgttctgcttcttcttagcctccttatcttcttgagttatgcgtactgattctgcctctatcgtcaagtctcttcctggttttgatggccctcttccctttgaactcgaaaccgggtttgttttcctctcttcctgtgattgttttatctgttgttctgagtttggaaataatcttaagtatgtatgaatatgattctgtgtgaatgaaaaggtatattggtgttggtgaggaagaggaagtgcagttgttttactactttatcaagtctgagaggaatccacaagaagatcctcttctactctggttaagtggaggacctggttgctcttctatctctggtcttctttacgagaatg

SEQ ID NO: 141284 - DNA, 722 bp, Arabidopsis thaliana landsberg
cctttgttctgtttctctgcgatttcttcgatgttcctcttcttcgttttgattttcagatttgtttaactcggtcgttgcgttgacttcaaatttcttaaaagagagagagagagagagagaggagatagttcagaaattctgtcagacttgggatctttctcggcaatgcgacgcttgttcgccgcgaaatccctctcccgagaggatacaacctttttgtcattctcttcttcttcggtgacgcgtttcctcaaggctcttcttcctctccgttcagatccaagagatgtccgctaattctcatcctcctaattccaaaaacgtcctctgtaatgcagccgccggtgccgccgccggtaattctctgatctgcttctttcataactttttcttagattttggtttggttgattaaagtttcaaactttctgataggggttgttgcggctacgtttgtgtgtcctcttgatgttataaaaacgaggtttcaggttcatgggctgcctaagctcggtgatgcaaacatcaaaggtttgtcctttttctttccctttaaatcttctcagaaattggattccgttgctgatgtcatcgtatctggtttttgatcaggtagtctaattgttggcagtcttgagcagatcttcaagagagaagggatgcgtggcttataccgcggtctttcccctactgtcatggctcttctctccaattgggcc

SEQ ID NO: 141285 - DNA, 1062 bp, Arabidopsis thaliana landsberg
taataatcccaaaaaccagaaaaaaaaggagctttgcttttgtaggaattaatggattcagtgaactccttcaaaggatatggaaaagtagacgaagctcaagatttagcattgaagaaaaagacaagaaaacgtctacttctactatccatctccgtcgtagttctcatcgccgtaataatcgccgccgtagtcgccaccgtcgttcacaagaacaaaaacgagtcaacaccgagtccacctcccgagttaacaccatccacttcactcaaagccatttgcagtgtaactcgtttccctgaatcttgcatttcaagtatctcaaagcttccatcttccaacacaacagatccagagactctattcaagctctcattgaaagtaatcatcgatgagcttgattcgatttccgatttaccggagaagctatcgaaagagactgaagacgaaagaatcaaatctgcgttaagggtttgtggagatctgatcgaagatgctttagatagactcaacgacactgtttccgccattgatgacgaagaaaagaagaaaactttgtcatcttccaaaatcgaagatctcaaaacttggctaagcgcaacggtaacagatcacgagacgtgtttcgattcgttagatgagttgaaacagaacaaaacagagtatgcgaactcgacgattactcagaatctgaaatcggcaatgagtagatcaacggagttcacaagtaacagtcttgcaatagtatcgaagattctttctgcgttaagcgatttggggattccgatacacaggagaagaagactgatgagtcatcatcatcagcaaagtgtggattttgagaaatgggcacgacggaggttgttgcaaacggcaggtttaaagcctgatgtgacggtggcgggtgatggaaccggtgatgtgttgactgtgaatgaagcggtggctaaagtgccgaagaagagtttgaagatgtttgtgatttatgtgaagagtggaacttatgttgagaatgttgtgatggataagagtaaatggaacgttatgatttacggtgcggcc

SEQ ID NO: 141286 - DNA, 974 bp, Arabidopsis thaliana landsberg
cctccatcttcttccgacgaactctcgagctttctccgacagattctttcccgtactcctacagctcaaccttcttcaccaccgaagagtactaatgtttcctccgctgagaccttcttcccttccgtttccggcggagctgtttcttccgtcggttatggagtctctgaaactggccaagacaaatatgctttcgaacacaaggtataaacttaactattcttagctgcagagatgcttcacttggctttccttgtaaaagaaaacaaaaaccaaaattagtctcttttctttttggaatggctaaacactaaagagaagtggagctaaacagagaaattcgttgaagagaaacattgatgctcaattccacaacttgtctgaaaaggttttctcttttatcttccttttaagattcttaatttagaaagaagaagaaccttgagattgtagttgattagaatctgagtgttagcagaagaggaggagcaagatcaacgagaaaatgaaagctttgcagaaactcattcccaattccaacaaggttaatcaatctttgttcgaatcagagatagtgagaaacattgttctgattgatccgttatcttttgtttgtttatagactgataaagcctcaatgcttgatgaagctatagaatatctgaagcagcttcaacttcaagtccaggtttttttcctacttactatgattatatacgttcaaagtctgatttgtaaattacatcactcagatcattaacttgatttactgcatgatgcagactttagccgttatgaatggtttaggcttaaaccctatgcgattaccacaggttccacctccaactcatacaaggatcaatgagaccttagagcaagacctgaacctagagactcttctcgctgctcctcactcgctggaaccagctaagactagtcaaggaatgtgctattccacagccgcttggctttaa

SEQ ID NO: 141287 - DNA, 2618 bp, Arabidopsis thaliana landsberg
  unsure (1)..(2618): unsure at all n locations
tcaaagacctaaagttttcaaattaaccttaagtagaggtatctgcccagtacggacttggtagacaccaacaaccatcacgtacattcctgatttccattgacggagggcaaaatcgttggtgagaccgagctccaaaagaccggttccgtcatcaagtaccagacaattatcgccgccgccaccggagaaggggaccaaaacgccctgcaacgcaagacttgaagtcatcgaaacaggaattaacaatttagctatagacaatgagaggatgatagattgggaacctgtaaccaagcacgttgaaaaagtacaccgcctagggaggcggcgttctgagaaggcgtcggtttagcgtcccggagctgagaacaaagcatcttcaccgccgctaagctgtagtccattttacccgccgatccgactcggctgatcaatttcacaaatgcctttaccccatcgattaccggattaaaccgaaccgaacaaatggtatcggtacagtaatttgattttgatttttggcagatattgggagagggaatattgtatttgaaaagaaaaaaaaaatggaattcatggtgttttggctttttgactaattaaaatcattaacatgcaaactaaaagatgtaaaaatctttataaaatacaaacaaaaaaaataaacaaattttgagacaaaaaataaatctggaatcaatcttatccaagaaatagacccacaatatcaaagaaaataatgaggtgtcacaaagctattgattgataacacatcctcgaaatctctctctttgtccacagaataaaaatctatttcttgtgtttgtgttgtatttacttaaaaaaataaaggagatcagtttgggagaaagcagcaaagaagaaaaatggcagcaacatttgcaacaccatcgacggtgataggcctcggaggatcatccatcaccaccaaacccttctcttcatgtactctttttctctctttctcttttcgaataatttcaatcaaacatatatatgcatatgataatcttgatttgtgatttctcgtatgttttttagcctttttaaaaccaacattaagcgccaagaaccctttgagactcgccggtgcatcgggaggaagagtcacttggtaggttactctttattttcttctcatagtaataacaaagatatcacattttatgaaaatgcttaaaactccagaagtatcactagttatgttactaaagatataggaatgagtcctaactgatcttaggaacttaataaagcttgttttgattttgaggtgctttttagggtattttctaataaatttatttgtttgtgtcaaaaatgaattaaagctttgagaggaactggttgaggagagatttgaacgtggtaggatttgggctgatcggatggctagctccgtcgagcattccagcgataaatgggaagagcctgacgggtctcttcttcgatagcatcggaactgagctcgctcacttcccgactcctccagctctcacttcacagttctggttgtggttggttacgtggcacttaggcctcttcctctgcctcactttcggacaaatcggattcaagggcaggactgaagattacttctaaggataactattcttgttttcgtttgtactatatgctctctcttggttatgtgtaatattatcaatcaaaacaaagctttctttgctatttgatgtttcattctatatctcgacaagtctttcttatatgatcttgattttaagaatgtctgtcagtctaactaaagtattaaatgttaaaagcgtttctcgagggaaagctcacaaaagattgggataatacttcaaaacgaaacatcacaatacgtctttgacttgaaccatacaaacagtttttgtcttgcaatctcgaatcttttaaaaaatagaaaaattatctctctttcttcttactctttcatgttttttgtattaatcttgatgtgtatatgttccaataaactctaaacatgcatgaagatttgtgaatctaaagtctttaacatgtctttcgactacgaaacaaaaattgatgaggaaaggtaaaaacttgaaagtagataaaatgaaaaagtaattccaagagttaaacaaagggggcagtgcagtatcttataaggttccaacaacactttcagagggaacaaaactacattttaactacacattctagatcaaacagccactatcccacacgtagannnnnnnnnnnnnnnnnnnattgttgaagtgcattttgtaaagttcgggtaatcttgtcaatgaattcatcctcctgtcaaaagcaactcgttaggtttgcacagcagctcaaataaagtgatgtggtaaaggacgaacctgcaacagggataaaagggcttccttcactttgtctctgctgataaccggaccagtgggtgcaggagcgagtgatggtggtggagttgggggtgtgaaaagctggagcaccggagtaccatatgaccgctgctggtgactcgcattattaggattgagaggaggagcagtgggcatagatacaccaggaatgaggtgcggctgtgccatcattcgtggggggccaaagaagac

SEQ ID NO: 141288 - DNA, 1469 bp, Arabidopsis thaliana landsberg
atggagcccatcttgaattttcctgggataaaagaaactcggaggaagttattgtgtaacttgtgcaaggtgaaatctggtgcttgcattcgctgttgtaatggtatgtattgttgttttctgtgcatccagtctacttctgagcatgggtagtttgtcacctcaaattggggttcatttggctttactgctgtgctcacagtcgttgtccttactttgtctatgccagataacccaattgtctggattattttcactggaaaatgctttgttggcatttattatcacaatgcagtgtttttattttcttcttctttttggcagtgtttcattttcttactagtcacacttctctttgattcaatttatattgtctccatttgttggtgaatataagattagtaattgatacgttattacaatctcttgatcataggaacatgccgaacatctttccatcctatatgtgcaagggaggcagggaataggctagaggtctggggaaaacatggttgtgatactgtaagtttcatctacagaatgcaattgtagtgagtgctgaattttctataaataatttaagaaaaccttgtaggttgaactgcgagctttctgctcgaagcattcagatattcaagaaagtggaaagtcagtagagggaggagaaagtaatgcagctgaaagtcgttctcctatatgtcatcttccatcagaatctgttagagaaggtcacctaagtaatgatgagatgggagttgatgtaggaacaccgggtacaggttctgatatttcgagaaacagtgacttacaagagctagaatcaccacattcaaaatttaacttgtctgcaacagacaatgtagaatcagggatgactgggagaagcaacgaagatgaaagaactctgtccaagtctcttagttttggattgattctgaaaaaggtttgtatattcttattagctggattgtctatacctgttgaatctcttgctcactgattcacattttttagttgatcgacctgggtaaagtggatgtgaaggatgtggctgcagagattgggattaatcctgatgctttgagggctaaacttacggtaacgcataaaacttctcatctacctgcttcaaacctctatgctctcattgtgagtttctgtgtattgatttcaaaaatttctgttgtaggacggagacttgttacctgatttactaggcaaagtagttaaatggcttagccagcatgcacacatgggttcttcggataaaggcaaaaatttaaaacgtaagaccactactaaatctgagcatcgggcagctatctgtactgaaggcatagtgatgctagattctgacatcttagatcctgctgtagcaaaggcattttctatagagcgaacacatgaaatcaacatttgttataatacgacgaataatacaagatgtacgttaactgaaaattgtactg

SEQ ID NO: 141289 - DNA, 1766 bp, Arabidopsis thaliana landsberg
ccttgccaatcttcagcttcttcgtcaacctaatccccaccgtcctcaaccgcctcagctccgccggcggcaatgtcaattccgccaacgacggaaccttctcctccttcttcctctccatctccgtttccttcttccacactctcttcaactcatggtaccttgaaatggcagtacccgacccgggcttcggaaccgggtaactaggcgtgctccagcttgtgtcaatcgtgtgcccgacccggtgaatcggaagctgcttaggcaacggaacgaatatctctcctggggaattcttaccagattcttctcccgtgattctcctagtcggtgaatcatgcttctcttccacgaatccaaggctacgaagcttctcagcgattctctggatagccgattggggaagagtctttcgaccggaagcagaactacagaagatgccggagttcgctcgactgacattgcgtcgcgaaactagggtgttgggaacaaggaatggcgggaaaattcggtcgggaaaggttttggcaagtatcaatggttgctggtgaaacagtggaagcaacatttctccaagcaaactggattacgcaagcggagctatatgcagcagcagcatatccatagaggtcacatgattgtcacgtgatggttagaatatttaaacatgaactatttgaaggccccagtaggcccatattgagttattgggctactagcctatcccattttgggttattcgggtcgggtcggatctttccggtttaccagatcagaagctcgattctgttaagctttaatggcggaaaaatccaaatttcctcgaaagaagtataacctgattcgcagagattgtgaagattggagtcatgggtatattaagttacgccgtcgccggcggtggatttgcagtaatcggcgcgtgggagtcactggactcatcgaacctggatccgaattcatcttctggtactgctgattcatcttcccctatggctcagatcagagcttcgccgccaaaatctgttggatcatcttccatccccgtagctttgctttcgtctctgtttattgcgaactcgtttttctccttcttcagctcaatcggatctcgcgatcgggtcgggtcaatgatccagttacagatcgtggcagtggcagtactattcctatattacgccattctaacatatctggtcaactccaaaaacgctgtctttgttgcacttccgtcttcgattacaactttattgcttctctttggcttcattgaggagttcttaatgttctacctgcaaaagaaagatgtttctggaatcgagaatcgttattacgatctcatgctcgtgcccattgccatctgcgtcttctccacggtttttgagctcaaatccgactctagcacgcatcggtttgcgaaattaggtcgtgggatcggtctgattctgcaaggaacatggtttctgcaaatgggtgtatcgttttttaccggtttgatcactaataactgtacgtttcacgagaagagcagaggcaatttcacgatcaagtgcaaaggacacggtgattatcaccgagcaaaagctatagctactcttcaatttaactgtcatttggctctaatggtagttgtggctactggtttgttctctgtcattgctaacaagaatggttatctccgtcaagatcattctaaatatcgacctctcggagctgagttggagaatttaagtactttcacacttgactctgatgaagaagactag

SEQ ID NO: 141290 - DNA, 1245 bp, Arabidopsis thaliana landsberg
ccaaaacgtcttaaattcatcattactagtttcctttccttagtaaaaccctacatttctccgcccgcctttgatttctccccggccgttcccgccgccggtctccgatttaaccagggttgagtctaattccttctttttgtgctcattgctgtcggattctctaccggcgttacatcgaccagccagactcttccccatttgactgctttactgattcaatcgctcttttaggtctgtgtaggttttgaaattctgcggatcagattctgaatttttttctttttcgatttttgatttacgattgattgaaattgaaatttgttatagtttcggattatggtaactactttctcataattttattataattgagattaaggatcatttccatagagtacccaaggttttgattctccctctatccatctaagacaattgaattcaggattcaagtaatgtttagattcttatatgaaagcaagtggatatgtaagagaggttaccaatataatccgcaacaagtatcgttggcactagcttgatggagtgtggatacttgtaatcatctttagagtttataaaatttgcagtttttttctcatagtctcgaaaacttagttgctttcgattattcttaaactaacggcatcatatattgttgtctgttatttaagcagattctggaagttgtgactcagtatctccccttcaacgaattagcatcctgcgcaagaatgtctattgcatcatcacttacttcagccacactttgcggcgcctcagtttttcctaaagcattagcctgcagctctgagttccctatcaatcttcccagcccttttgaaagttcaaagatttgtttgacttcgtttcctgcctctagggatctcaagaaaaatgctactttgaatctgactcgaaatgttggtccagtcaggtgtcatgctatgcaagctgggacgagggagttgaagaaatttgaacttagtgatgtgattgaagggaaacagtttgatagagagatgctaagcgctatattcgatgttgcacgcgaaatggaaaagatagaaaagagctcttcacaaagtgaaatcctcaagggttatttaatggctaccctcttttatgagccttctacccgtaccaggctttcatttgaatctgctatgaaacgccttggaggtgaagtcttaactactgagaacgctagagagttttcgtctgccgcgaaaggggaaacac

SEQ ID NO: 141291 - DNA, 2456 bp, Arabidopsis thaliana landsberg
  unsure (1)..(2456): unsure at all n locations
ctactgataagactaatgtccatctctcctcggaccataagcgttgtccggtgaagaaagtggctcttgttgtgcctgagacggatgatccaagcctaccggtgatgacattcagagcttggttcttgggtctgacctcttgtgttctgctcatctttctcaacacgttcttcacataccgtacgcagccactcaccatctcagccatcctcatgcagatcgctgttttgcccatcggcaagttcatggctcggactcttcccaccacttctcacaaccttcttgggtggagttttagcctcaatcctggtccttttaacatcaaggagcatgtcattatcaccatctttgctaattgtggcgttgcttacggtggtggtgatgcttactctattggggctatcactgttatgaaagcttactataaacagagccttagcttcatctgtggtctcttcatcgtcttgaccactcaggtttactatctttctcccttttggaatttacaattttgtcaaaaaatctgttaattgaccagaatggaaatgaatttttgtagattttgggttatggttgggctgggattctgaggaggtaccttgttgatcctgttgacatgtggtggccttcaaatctcgctcaagtttctctcttcaggttcttaatccaatcttgattcgtaaattagctgcaatgcgagaaaagttgattcctttgaagttgaattgttttgtttttgtgttttgtttcagagcgttgcacgagaaggaaaacaagtctaaaggcttgacgaggatgaagttctttctagtagctcttggtgctagctttatttactatgcacttccaggctatctattcccaatcttgactttcttctcatgggtttgttgggcttggccaaacagcatcacggctcagcaggttggttcagggtaccatggccttggggttggagccttcactcttgactgggctggcatctcagcttaccatggtagtccattggtggctccatggtcctctatcctcaacgttggtgttggtttcatcatgtttatatacatcatcgtccctgtttgttactggaagttcaacactttcgatgccagaaagttccccattttctccaaccagctattcactactagtggccagaagtatgacacaaccaagatcttgacaccgcagtttgatctggatattggtgcttataacaactacgggaaactttacctcagccctcttttcgcactctctatcggatccgggtttgcgagattcactgcaacactaactcatgtggcattgttcaacggcaggttagttagttttgtcattcagttttgttgagtagcaagggcactgtgagaagagaatcatcacttggtgtgtttgtgcagggacatatggaagcagacttggtctgcagtgaacaccacgaagctggacatccatggaaaattgatgcaaagctacaaaaaagtgcctgagtggtggttttatatattgctggcaggaagtgtagccatgtctctcctaatgtcttttgtgtggaaggagtcagtgcagcttccatggtggggaatgctctttgcttttgcattggccttcattgtcacactccctatcggtgtcattcaagcaactacaaatcaggttacatactagtttatatataagacaatgcctcttccaataacacatgctcatatctttttgtgtgttgttttttaaaatgcagcaaccaggatatgatataatagggcagttcattatcggttatatcctgcctggaaaacccattgcaaacctgattttcaagatttacgggagaatcagcacagtccatgctctctcatttttggcagaccttaagcttggccattacatgaaaatcccaccgcgctgcatgtacacggctcagctggtgggcactgtggtagctggtgtggtgaatctgggagtggcctggtggatgttggagagcattcaagacatatgcgacatcgaaggagaccaccctaatagcccctggacttgccccaagtatagagtgacgttcgatgcttcagttatttgggggttgataggaccaagacggctctttggaccaggaggcatgtaccgtaaccttgtctggctcttcctcattggagctgtcctgcctgttcccgtgtgggcgctgagcaagatcttcccaaacaagaagtggatccctctcatcaacattccagttatctcctacggctttgcagggatgcctccagccactccaaccaacattgccagctggtnnnnnnnnnnnnnnnnnnnnaactactttgtgttcaattaccacaagagatggtggcagaagtacaattacgtactctctgcagcgctcgatgcagggaccgcgttcataaggaaatcttgttcttcgccctgcagaatgctggacacgacctcaaatg

SEQ ID NO: 141292 - DNA, 340 bp, Arabidopsis thaliana landsberg
cgattacaaaatgtgtgcttagattgatgaaattacaaaagaacctcgagtttctagtctacgaatgtcttagacttataaacgaacaaacaaatcgttttctagtctatacatcccttgaacttatctagcgaaagttgtaatgaacaaaatggttatggaggatttcctagaggagttggctaatgcatacaatagtacaacgtgccaaaagggtcacatccgatgtggaacaaaacggaaagaaggaacgtaggtgaaagcgctctgctttgtagctaaagttcatcagaggaacggctttgagaagaaaaaaactgtacagccatgtcctttgcta

SEQ ID NO: 141293 - DNA, 630 bp, Arabidopsis thaliana landsberg
attctggatgtggctgtttccttagccaaagttgcggatatagacaggactctacaaaatgaagttgcagcgacagatgggttcaaggaaggcatgagactgctggaatctttgaaactggactctgaagattctgctctcgagcaacgggtaagattcttgcacgactccctttttatttgtatcttatccaaagctgctgaatgtcagtaaaactttatctgacaaatgtaattttaacatgcatgcagcggctctctgtactggagttccttaagaagcaagtagaaaccgatgctgaaactgcactctaaaccgatgcaggcttaagtacgtatatagaaattatacctaagttctcgtctgtggcattttgctgaataaagaaagcaaaaatgttgtatttgcgctcaagggacaaagaaacagagttgtctgtatgttgtgaattgtgatggttttcaactttcaatgcactaatcttgcaatgttaaattgttaagcatgattgtactctatgcacttgtgaaatttaaaaattaagatatcttaagcggctacagctgtgaactgctttctatttcttttcagtgcaaaatgagaaagaacccaacagagattgagagatga

SEQ ID NO: 141294 - DNA, 2553 bp, Arabidopsis thaliana landsberg
  unsure (1)..(2553): unsure at all n locations
gtaatatatgccaatcttcgagcagcgaagatgcagagctcattggttctcctgtaaggctgtgatcttggaaaaggtaccataatgcagtctttatctcttccctaaaccaatatgagcacatcaaaaacactctataccaaatcaaatgctgaaatgctcaaatatagaaaagatatgtccctataggcaaacaagatgtattgttaaggataatatgtatctccacacaagtagttggaatagcgcgccgagtgactgtgaggctagcttgaaaggattaataattccaatatctttactatccactcaattgttatttgttaacttagctcttcttcaatccaagtaaagcatagcccaccgtttcgttagttctaaatgcatcttttatagtcaacaattacctcaatattgtagaagcttcatttggattgttgattgcattagcttcaaaagcaggcagcctattcacaaggaatgaaatatcacatatctacaaatctgtatcttttgtattcaattttttagccgacgtaaaatcttttacgccatcaatttcgttttatcccatttcattttagagctcattagacgaatccttttttactactttcatataattcgagtatcatattagcccgacattaaagatcataaaaaccttggggaagtttagttactatttcacataataactaaactttaaattttagcatcatcaataatattgaagatatcatctctttaaaaatgttgtttttgtttcatggtgaaaatttgataaaatagtgaaaatttgataaaatgaaaagaagaagttggtgcccacaaactcttaggggagatgaacggtcacgattagacatcactcaacacagcgtaagataagcctcgtggaaaccgtaacatcacatcatgcgatttttgctttatgcttttttttttaaaaagagcctagctgaagcaaaattcgggtgcttctcgcgcaccgtatatcatcacatccttctccgttactttcnnnnnnnnnnnnnnnnncctctcccttaccggcgatctagtttccggctatcaattcaggtaaccaatcttctgatttctccaattttcagccattccaacctcaaggagctttttatattcgttcgctttcagaattttaacactctttacttagcgattaggtttcaatttcaacaatctatttctgtgaaaaaacagttttttcagctaaaggtttgatttttcgaaattcgaatttctggggaaagtagaactcgcactcgcacttgctcctggacaacgtgagagatagaatcgaatcgaaaaggacgaaaaaatggtacaattctcaactttgccattagggtttatgtttcctcgctaatgggttttagaattcacttctgattttgggtcgatattatttatattgtttgcagtcatatgaaagcaaaggtttttgggttatgaagaataatgagcatacaagtgaggaagattcagtgtatgatcattcaacaagagatgattcaaagcgtcctcatccttggtttgtcgattcttctcgttcagagatgttcccaaacaagaaacaagctgtgcaagatcctgttgtaggattaggaaaatcaaatgttggtcttcctttgtgggaaagctcatcggtttttcagtctgtttctaaccagtttatggatcggcttctaggagctgaaatgcctccaagacctcttttgtttggtgatagagatagaacggaaggttgtagccaccaccaccagaataagagtatagctgagagttatatggaagatacatctgttgaattgtcgatatctaatggcgtggaggttgctgggggttgttttggtggtgatggaaatagaaaacttccggttagtcgggttaaggaaacgatgagtacacatgttgctttagaaggtcatagtcaaaggaaaatcgagtcgtcttcgatacaagcttgtagccgggaaaacgaaagtagctatataaattttgcactagcgggtcatccctatggcaatgaggactctcaggggatcacatttggtgaaataaacgatgaacatggtgttggctctacttccaatgtggttggaaactatcaatcatatgttcaagacccaattggaacattggatattgtttatgaccaagaaactgggagttcacaaaccagcagcggagttgtaagcgaacaacaagttgctaaaccgagtttaggatcacttccaaagaccaaagcagaggccaagtcatcaaagaaggaagcttccacaagctttccttcaaacgtcagaagcttaatatcaaccggtatgctcgatggtgttcctgtgaagtatgtttctgtctcacgtgaggtaaaaactaaatacctcagctcaactgttttgtttcagtacaccattttccttaagccttggaatttgttattgcattgaaacaacttaaaattaggagcttcgaggagtcatcaaaggatcgggttatctctgcggatgtcaaacttgcgatttcacaaag

SEQ ID NO: 141295 - DNA, 2077 bp, Arabidopsis thaliana landsberg
atggcggaatccggcgatttcaacggtggtcaacctcctcctcatagtcctctgagaacaacttcttccggtagtagcagcagcaacaaccgtggtcctcctcctcctcctcctcctcctttagtgatggtgagaaaaagattagcttccgagatgtcttctaaccctgactacaacaactcctctcgtcctcctcgccgtgtctctcaccttcttgactccaactacaatactgtcacaccacaacaaccaccgtctcttacggcggcggctactgtatcttctcaaccaaacccaccactctctgtttgtggcttctctggtcttcccgtttttccttcagaccgtggtggtcggaatgttatgatgtccgtacaaccaatggatcaagactcttcatcttcttctgcttcacctactgtatgggttgacgccattatcagagaccttatccattcctcaacttcagtctctattcctcaacttatccaaaacgttagagacattatcttcccttgtaacccaaatctcggtgctcttcttgaatacaggctccgatctctcatgctccttgatccttcctcttcctctgacccttcacctcaaactttcgaacctctctatcagatctccaacaatccttctcctccacaacagcaacagcagcaccaacaacaacaacaacagcataagcctcctcctcctccgattcagcagcaagaaagagaaaattcttccaccgatgcaccaccgcaaccagagacagtgacggccactgttcccgccgtccaaacaaatacggcggaggctttaagagagaggaaggaagagattaagaggcagaagcaagacgaagaaggattacaccttctcacattgctgctacagtgtgctgaagctgtctctgctgataatctcgaagaagcaaacaagcttcttcttgagatctctcagttatcaactccttacgggacctcagcgcagagagtagctgcttacttctcggaagctatgtcagcgagattactcaactcgtgtctcggaatttactgcgctttgccttcacggtggatgcctcacaacgcatagcttgaaaatggtctctgcgtttcaggtctttaatgggataagccctttagtgaaattctcacactttacagcgaatcaggcgattcaagaagcatttgagaaagaagacagtgtacacatcattgacttggacatcatgcagggacttcaatggcctggtttattccacattcttgcttctagacctggaggacctccacacgtgcgactcacgggacttggtacttccatggaagctcttcaggctacagggaaacgtctttcggatttcgcagataagcttggcctgccttttgagttctgccctttagctgagaaagttggaaacttggacactgagagactcaatgtgaggaaaagggaagctgtggctgttcactggcttcaacattctctttatgatgtcactggctctgatgcacacactctctggttactccaaaggtaaaataaacattaccttttaatcactctttatctataaattattttaagattatataggaaagatatgttctaaaaagtggcttttttggttaatgattgggaatgaacagattagctcctaaagttgtgacagtagtggaacaagatttgagccacgctggttctttcttaggaagatttgtagaggcaatacattactactctgcactctttgactcactgggagcaagctacggcgaagagagtgaagagagacatgtcgtggaacagcagctatttatcgaaagagatacggaatgtattagcggttggaggaccatcgagaagcggtgaagtgaagtttgaaagctggagggagaaaatgcaacaacgtgggtttaaaggtatatctttagctggaaatgcagctacacaagcgactctactgttgggaatgtttccttcggatggttacactttggttgatgataatggtacacttaagcttggatggaaagatctttcgttactcactgcttcagcttggacgcctcgttcttag

SEQ ID NO: 141296 - DNA, 620 bp, Arabidopsis thaliana landsberg
tgcagaatattactcacgaaaacctcatccttctgcaaaagattgataaactggaatctgtagtgttggagtctaagagttggaagaccaattatgagacatgcatttgtgagaaaaaagagcttgcagagcttatggagaaagaagcggtggaaaaagctcattatcggacaaggcttgctactgtgcaggctgagtttgatgctgtgagaggtaagtttgatgatttggctactgcaaatggaaatctacagcagaatctcagtagtctgacggacaagttgataaacacgttaggctgctacaatgaaaaactcgtttccttgccccagtgggaaggagtggatcttgattttgagtcccatgatttaacagagcagcttgataaattcttgtgtaagatatgtgaaaagtgtttcgtacttatatcagagaataatggcctgatgaaagaaaaatccatgacagagtcatatttaagggctgctgagtctgatgttatggagctcaagcagatgcatgagaatgatgtacaatgtatggtcactaaattagaagcttccactgccctcctccggagactgcagttggaaaccgaatcggtcatggataaaatgaag

SEQ ID NO: 141297 - DNA, 5903 bp, Arabidopsis thaliana landsberg
aaactacctgagtggacacctgatgtgcggttctttagaagcgaagagtatccgcggatcaaagaagcagagcaatgtgatgttcgtggatcattagcccttcctgtgtttgaaagaggtagtggaacttgtttgggtgttgttgagattgttacaacaactcagaagatgaattacaggccagagcttgataatatctgtaaagctctcgaggttttttctcttcccttgatttctctaactcaatgggaagttttgtttgtattgtagcgtaaagaaaattcttgtttttttttgtagtctgttaatctaaggagttcaagaagcttgaatcccccaagcagagaggtgtgtaaaaatggtctcctaaatcaaacccttacttcatcaatacatagaaacaatgaattttggttgctaaatgtcatatgccctttttgtttcagtttctgcaggtctataatgaattctactatgctgcattacctgaggtatcagagtttttgacattggtctgcagagtatatgacctgcctctggctttaacgtgggcaccgtgtgctcggcaaggcaaagttggatcccgccattctgatgagaacttctctgagtgtgtttcaactgttgatgatgcttgcattgtccctgaccatcagagtcgtcattttctagaggcatgttctgaacaccatctgcttcaaggggaaggcattgtaggaaaagcattcaacgcaaccaaactgtttttcgtgcccgaagtaaccacttttagcaagaccaactaccctcttgcacaccatgctaagatctctggtctacatgctgctttagcagtcccattgaaaaacaaattcaatagttcggttgagtttgtgttggagtttttctttccaaaagcttgccttgacaccgaagcacaacaagatatgctcaagtctctgtctgcgacccttcagcaggatttcaggagcttaaatcttttcattgataaagagcttgagctagaagttgtatttcccgttagagaggaagttgtttttgcagagaacccacttatcaacgcaggaaccggagaggatatgaaaccattgcctttggaagaaatttctcaggaagattcttcatggatctcacacatgataaaggcaaatgagaaaggtaaaggcgtgtcactttcttgggagtaccaaaaagaagagccaaaagaagagtttatgcttacatctggatgggataacaatcagattggatcaggccacaataactttctttcagaagctgagcagtttcaaaaggtgacaaattcaggactcagaatcgacatggatccaagttttgaatcagcttcctttggtgttgggcagacattactaggcagtagaagaccaggtgagaagagaagaacaaaaacagaaaagacaattggtttagaagttcttcgacaatactttgcaggaagcctcaaagatgcagccaagagcattggtggtaagaaagaaaacttatagttactatgtctatcttatcaatctctcagaaagtgatgattcattcacgcagtttcattttcatgttgcagtttgtccaactaccttgaaaagaatatgcagacaacacgggataacacgatggccttcccggaagatcaagaaagtggggcattcattaaagaaactccaacttgttatagactctgttcaaggtgttcaaggttctattcaacttgattcattctatacaagtttcccagaattaagctccccacatatgtctggtactggcacttccttcaagaatccaaatgctcaaacggagaacggtgtttcagcacagggaactgctgcagctccaaagtcaccaccatcatcttcttgtagccacagctctggttcaagcacctgttgttcaactggagctaatcaaagtaccaatactgggactacctcaaatactgtaaccactctgatggctgaaaatgctagcgcgatcttgaagagagctcgtagcgaagtgagacttcataccatgaatcaggatgaaacaaagtccctctctagaaccgtgagccacaaaacattcagtgagcatcctcttttcgaaaatccacctcggttaccggagaatagtagcaggaagttgaaagctggaggggcctcaaaagtgaaagccacatttggtgaagccaaagtacggtttactttgcttcctacttggggcttcagagagttgcagcatgagattgctaggcgttttaacatagataatattgcaccctttgatcttaagtacctggatgatgacaaggaatgggttcttctgacatgtgaagcggatctcgaggaatgtatcgacatttatagatcatcacagagccgcacgatcaagataagtgttcatgaagcttctcaagtcaagctgggaggttcttttggtagcatcggtcttggtccctcgttataagctatcaggtataaggttgttacctgcaagaaaagaaaagaaaagagcaggagattcgactaatttactagtgtgttagaaaaatattactcaccattttatagcaatgggcatcgtttgtaaacatattttcagtgcccccattttgcaagcagcagtagtggactggtttcctgcatcggcttagcagattttttgtataataaggcgatgcgtaccagagaaacatgcttatatgtatgtattattattgtctgtacatcatttgtcttctggattctactaagctctgcaagtatgttaaattgatatatcttctacatcgtcacttgtatttattttcttacttaactatgcatgaaattcttaagggtgctttttggggcatcaaagcttactgtgtacaaacattacagtcaataaggagttagtattcagaaagaaacaagaaaaaacattatgccagtttgaaagtaagaaaaggctagacgttttacttatataggcaatgatagtcatataaacacagaagctatttttggcagaaaaagtagagaagaaagtgtatacttggatggtgaggacacatgatatttatagagattctcttggtttttaagcaggaatatgtgttcaagagagagaaccacctagtggagtgatcttccaagttcctaaccagagtatctctgttaaatcctcaaatcagtatttgttaaagaaacaagtaagcctgcagacaaaaggttctcgttttggtttgtttttgtttctttctgattcagtgagtgacacaaaggaagatattgatcctgaacctatcattgccacctaaacttcagagacaggagaaaacaacatggaaaacaaaaaacctatgtcaagagaatcagaccaagtgtacctgattgtaccatttggtactaaaaatcaggatgacgaaggagttgattcacgtgactatgcttcgaatctcttaacattgccaatctccgtgtttctaagacttctttcaccaaagccttgatgaaattcgagggtgcaagttatgattttgcaaataatgtagtactctgcatgatcaatgattttgcggcaattttgtaaatatctgaagtgaaaaataagcaaatgtcaaactaaattaattactgagtaaatgttgatgaagttaaatgattggggggatttgtataaatatcttaattgacgattctgaaacaaagtggtctaatcggtgattatctattgttttatggaaatatcttaatgagatgaagattttggggcgaattgtgtaaataactaaattttaacaataaacgcttttcgtccgcctccagctcccaaaagccaaagggcgaatcttcttcttctctttcgatcaaatcttttcagattcaacccaaaattgaagacaaaaatgtctcgcagatcgctaactctcctcaagaatctagctagaaacgcgaatggatcaggtattcaaacccgatccgtgacttacatgcccagacccggtgacggagcaccacgcgcagtgacgctgatccccggagatggaatcggtcctctggtgacgaacgccgtggaacaggtgatggaagcgatgcacgctccgatcttcttcgagaagtacgatgttcacggagaaatgagccgtgtgccgccggaagtgatggagtcgataaggaagaataaggtttgtttgaaaggtgggcttaagactcctgttggtggtggtgttagttctcttaacgtccagcttaggaaagagcttgacctctttgcttctctggtcaactgttttaatttgcctggtttacctactcgccatgagaatgttgacatcgttgtcatcagagagaacactgaaggtgagtacgcggggcttgagcacgaggttgttcctggtgtcgttgagagtctgaaggtgagaattccgatttctgctcctcgttttggattcaatctgtatttgtggaatcatcttcgtttgcaagtggtctttgtatgttatgtgtgattgttctgatcctatttctatgcttaggtgatcacgaagttctgttcggagcgtattgcaaagtatgcttttgagtatgcctacctgaacaacaggaagaaagttacagcggtgcataaggctaacatcatgaaacttgcggatggtttgttcttggaatcttgtcgcgaggttgcgaaaaagtatcccagcatcacctacaatgaaatcattgttgataactgctgtatgcaacttgtagccaaaccagagcaattcgatgtcatggtatgtttcagagttatatacatatgaattttcatgacgttctttaagtcttcgatgttttactttgagaaaaagataccagtcatctctccctagtttggtatccctctagattgcctgttttagagtcatattatcttattggtatgagactgatgttgtgttgccatatactatagttaatcgccccatttgcatactatttaatctcgtcatttgcatatcatgctttcagggaatcttttaaattgtacttctgtgaccttgtctatgtatacttactactttgcatacactattgttcgttagagcagtaacttcactgttgctaagtattaacctttcattactgtatgtagtagcgtcttttggcttttccccccttttataacagcaatttatgaaatgttttgcaggtaacgccgaatctctatgggaatttagttgcaaacactgctgctggtattgctggaggcacaggagtcatgcctggaggtaaaaaaacatcctgtattgatattctctcgagctatacattagtggataaagaatagttctaaaatttatacatctgcgacattaaatacaaaaacaggaaatgttggggctgaccatgcggtattcgagcaaggtgcatcagcaggaaatgttgggaaagacaagatagtattggaaaacaaagcaaacccagtggcattgcttctctcatcagcgatgatgcttagacaccttcagtttccttcatttgctgaccggctcgaaacagcagtgaagaaagtcatcgctgaaggaaagtgccggacgaaagatcttggtggaacaagcacgactcaagaggtcgttgatgcggtcattgcaaaactagactgactttgacaaattacgtgttcccgctctgcataaatcatcaaattcctgatacagattttgtgttgccaaaatatggggtatgatccaagcacaacggttatctggttttgtacctcgagttttattatattctttagccgtggaatatttcgataagaaaaaaaaacatgttccaaataattcatgttgctacgtttgttggcgccttttgtcatgtcaaagtttcttaaacacttgttcgtggaatatgcaaacttttatggattcgtaatttcaagaa

SEQ ID NO: 141298 - DNA, 900 bp, Arabidopsis thaliana landsberg
atgcctccaccagcttcccttcaaggcccatctggtgagaatgaatcctagtgctatttatggttttaggcagctgtaaggtcttatcgctcaaccatgtttgatttcagaaacttcctccacagaccctggaaagagaggtcatcacatgggtgattatatcccacttgaggagctagataagttcctttcaaagtgcaatgacgcagctgcacaaaaagccacaaaggaggctgctgagaaagcgaagatccaagcagataatgttggacataaactcttgtcaaaaatgggttggaaagaaggtgcttacttgcatcactctatctgtaaattggtgcccttgtttctttctgtatcttgtgcctttatggagacaaagagcttagaaaattggaggagtggattacaggtgaaggtataggaagctccagaaagggtatggcagaccctataatggcaggcgatgtaaagacaaacaacttgggagttggtgcttccgctccaggagaagtcaagcctgaggatgatatatacgagcagtacaagaagcggatgatgctgggttacaaacacagacccaatccactggtattttatccatctttagctccattctttttgtgatagcacttcttttactcaccatctgtctcaattgtactacagggaaatcccaggaaggcgtattactaaggatcaaatcaatgtgttatgcgcaattattatctttggttcacctcagcaccgtctgagctttgcttttctattataaagaatgttcaagcttttagattactgatatattgaagtgttggtatgcattgaatttgcgtttcagtgtgcaaatagatctctttgacagacatatcagttgaaatacaatggatttgttattgc

SEQ ID NO: 141299 - DNA, 2746 bp, Arabidopsis thaliana landsberg
atgaagaaatcagagtttgataggacttttaagtatgagattgacgacgaaaactgtaatcctacttacctaagtgatgaacatcttgaagacttgaaggggattcgggagttgcgtgatgtattcgatgcggaatattcgaaacttgagactgacagattccaactcgggacagaaattgcaacaaatggtgatagcacttggccattgcctgttaacatcaagaggcatatctggaatgcgcagaagactttcaaaattgacttgcgcaaaatttcagatatgcaccctgttgaaattgttgatgctgttgataaactacaggagaggctgttggttgttcctggtgatgatgcgttgagtgtggaagcacagaaaaacgcaacattgttctttaacattttgcttcgcagcactcttgctagtaaaagagtgttggaagaatacaagctcagccgcgaggcttttgagtgggtcattggtgagattgaatcaaggtttttacaatcgctagtggccccaggggaaatgatcggttgtgttgctgctcaatcaattggagaacctgctacgcagatgactctgaataccttccattatgctggtgtcagtgcaaagaacgttacgctcggagttcccaggttgcgtgaaattattaatgtagctaagaggatcaaaacaccatccctatcagtctatctcactccggaagctagcaaatcaaaagagggggctaagactgttcagtgtgctttggagtatactactctcaggagtgttactcaagctacggaagtctggtatgacccagatccaatgagtacaataattgaagaggactttgaatttgtgaggtcctactatgaaatgccagatgaagatgtttccccagataagatatctccgtggctacttcgtatagagttgaatcgcgagatgatggttgataagaaattgagtatggcggatattgcggagaagatcaaccttgagttcgatgatgacctaacttgcatattcaatgatgataatgctcaaaaactgatccttcgaattcgcattatgaacgatgagggcccaaagggagagttgcaagatgaatcggctgaagatgatgttttcctcaaaaagattgagagcaacatgctgacagaaatggcactcagaggtattccagacatcaacaaggtttttataaaacaggttagaaagagcaggtttgatgaggagggaggcttcaagacatctgaggagtggatgttggatacagaaggtgtgaacctcttagctgtcatgtgccacgaagatgtggatccaaagaggacaacaagcaatcacttgattgaaattattgaagttctcggaattgaggcagttcgtcgtgctttgcttgatgaactccgtgttgtgatatcctttgatggttcttatgtgaattaccgtcatcttgccatcttgtgtgatactatgacctatcgcggtcatctgatggctatcactcgacacggtatcaatagaaatgacactgggcctctgatgagatgctcttttgaagaaacagtggatattctgctagatgctgcggcttatgctgagacagactgcttacggggtgttactgagaatataatgttgggtcaacttgcaccaattgggacaggagattgtgagttgtatctgaatgatgagatgctgaagaatgcaattgaacttcagctccctagctatatggatggtcttgaatttggaatgactcctgctcgttcaccagtgtcaggcactccttaccatgaaggcatgatgtctccaaactacctgttaagtccaaatatgcgtttatccccaatgtcagatgcacagttttctccatatgttggtggaatggccttttcgccttcttcttctccaggatatagtccatcatcgcctggatacagtcctacttctcccggttacagtcccacttcgcctggatatagcccgacttctcccggttacagtccaacttcgcctacctacagtcccagttctcctggctatagcccaacaagccctgcttattctcctacaagtccttcctattctcctacctcaccgagctacagcccaacgtctccaagctatagcccaacgtcgccaagctacagcccgacatctccgagctacagtcctacttccccaagttacagcccgacttcgcctgcttacagcccgacttcacctgcttacagcccaacttcaccagcatacagcccaacctctccttcttacagcccaacttcaccttcttacagcccaacatcgccttcttacagccctacttcaccatcttacagccccacatctccgtcttacagccctacttcacccgcatatagccccacatctcctggctacagccctacttcaccaagttacagtccaacatcaccaagctacggtcctacgtctccaagctacaaccctcagtctgctaaatatagcccatctatagcttactctcctagcaatgcaagactatcaccagctagcccctacagtcctacatctcccaactacaggtaagtagtaatatcttaatttttacactttctatgaagcttctcttatctgttgtggtgatattgtgtcatcttctctaatcgttaactcttattaaaaatttactctgcagcccgacatctccatcatactcacccacatctccatcttattcaccttcaagtccaacatacagtcccagcag

SEQ ID NO: 141300 - DNA, 1482 bp, Arabidopsis thaliana landsberg
gttcttcaaggaatgtcctcatccagacgataagcaaagaaaggagctgagtcgcgagctaagcttagaacctcttcaagtcaagttctggttccaaaacaaacgcactcaaaggaaggtattgttactatatagcatctatatactacggccaattttgattatgaattctatgagttacatttaccggtctcgaatcttcatgagaggtatgtatatatgtttcagaatagtcatatgcatttgaagagtatttgcaaccacatatcgaattcgatactacgaagccttatttagacacatgaacttagctatgtggatagtgtagttccaagattatgcgcatgtcgtcgaaaggtccatccgttaggtctggtatatactcttgatgagaccaaacatcagaagatatataacattgggacttgtataggcacaacatgagaggcacgagaaccagatactgaagtcagaaaatgacaagctccgagcagagaacaataggtacaaggatgctctaagcaacgcaacatgcccaaactgtggtggtccggcagctataggagaaatgtccttcgacgaacagcatttaaggatcgaaaatgctcgtttacgcgaagagattgacagaatctctgccatagctgctaaatacgtagggaagcctttaatggctaattcctcttctttccctcagctctcttcttcacaccacattccctcgcgctcgcttgatcttgaagttgggaactttgggaacaataacaatagccacactggtttcgttggggaaatgtttggaagcagcgacattttgaggtcggtttcgataccttctgaggctgataagcctatgattgttgagttagctgttgcagcaatggaagagcttgtgagaatggctcaaactggtgatcccttatgggtttcaagcgataattctgttgagattctcaatgaagaagagtattttaggacgtttcctagaggaattggaccgaaacctatcggtttgagatcagaagcttcaagagagtctactgttgttatcatgaatcatatcaatctcattgagattctaatggatgtggtataattctgttactctaactctgatttttaaaattttaacaaaggttctaacttatagttgacacttttgctgttctttctctgtatagaatcaatggtctagtgtgttctgcgggattgtatcaagagcattgactctagaagttctctcaactggcgtagcagggaactacaatggggcattgcaagtggtatgacactcaaagaccttgatttggttacttgctttacaaggtattattcttaatcatgtagtgagatttctcatgtgtttgatctttgttttcttggtatgcaaaagatgacagcagagttccaagtcccatcgccgcttgtccctactcgtgagaactactttgtaaggtactgtaaacagcacagagacggtct

SEQ ID NO: 141301 - DNA, 5299 bp, Arabidopsis thaliana landsberg
caatcttttgagagagaaaaacaaaatccaacctcacttttgttgacaacagaatccagcataaaacattgttgggaaacttgttactcaacatacttttgcacctggttgttgttgtagttgatgtatccggagaaaagaagataagattcgggtcaatacttaatctcaattctgtctgcagcagttacttaaacggtgtcctttaattgttaactggataactatattttttatgatcttatgatgggatttgtttcaaactttcaattaaggtcaactatacatcaatcaagtggcactggtcaggacctgatcattgattctttcagttatcttttaactttgagaaatatggaatctcataatcctcaagcaatttcagattttaggattcgacaaatattgctaatcaaattgagttctatgaaaacaactataacagaagattatgaagaaatacagttattacaacttacgaccatgaaacttgtacaaataatggattcaccagaaaccaatccaaatatcttatataacctcaaagcttattctatcgattctagatagcaaactcgttcatatatccatcaacaggcaaaaaacacaaagactctaatagaggatattttaaataactgtttgcattttaactgggtatatacggtttaataaccgggttatagatttaattgtctaacagttagagttgccacaaaggattctcagatacttcgagaccaaaaattaaactgagagatgttgggacccacagtaaagtgggaacccttcaaaaataggcgtatgccgcttagagcagagaaaacacggtattctttagtaaaaggcgaaagaatagttcgctttgtcttcactgcacggctccgtgagactcgaaggcaagctctcgatctttatttatactaaagtttactcactgttctcaggagatgcaaccgatgtgggataatacaatcaatcaaattaattcatgggttattaatttagcggtatatgggccatatcttgtttatttttaagcccatcccaaagcctggaggtttcatcatcttacaattctagaccggttttggtgaaccagtttgataaaattagaaattacaatgcaagagacacgtggcaggcttagaaaaataaccgaaaacaaaaataaaaaggtttaagagagagacgacactagtctggttttggttcgagtcccgcagtggtaaagggacgactacaagcgaacataatgtttaagaaggcggtggaggctaagtctcaccagcgtctctccggcgctgaccggaaaaaactccgtcgcaccgtccgaaataggcttccccttcttaccgatgaactcctcgacacaattcttcctccaaaggtttgatttctcttttccctcaatttttagcatcgttgttgtctccatagattataaggtctttcttcttattgtgtaatctgattgattctagattagattgcatcgagtattggcttacttctggcattgattgttgtgtctaggtcgagattacactttccaagtttcagaatcgagttattgtttatagtattgaaggtggatgtcccatgtttttcgatatcgatggaagaggaactgagattttccccacagtttttgctctctgggaggctcctgaaatgttaccttcctttatgttgaaaggaggtgaggtttcacgttatattataggcggtgcagatttgatgttcccaggtattttgatccctccccaaggctatccttctttctctgctggagaaatatgggctgtcaaagttcctggaaatctagcacctattgcggtaagctttttatgtcttgttaactgatgaattttcttaatgaatgtaaagtttgcgtattgagttacatgatgtttatgaaggttgggtgtaccacaatgagtagtgaagaagctcttaaagcaggtttacgtgggaaggctttaaggataactcattattaccgtgacttcctatggtacatgagatgctggcaaaagtatttttatattttacatctgtggaggaactctgtctcttacatgctgagtttgtgtttcttagggaatcagctgaggggcaccatgttccaaatgcgggttttatggaggatgtggtcatggaggatccagcgtacattgctcctggttcaggtgaagatattttagacacttctgcaagcacaggaaatgaagaagatgaatctgctctggaaacagcttcaacatcggttgcggatgctacgaatgatgctgaagaacatgtggttgggagcatgaatgagctaaacttggtagatgacgtatgtgctactgaaactaataccgacaagcagattactctctcccctgaggaggtagatgcccttcttgaccaatgtcttttgcaagcattgcatacaacacttaaggagaaagaccttcccatcccaggaagcactctatggtaagaaccgcattcagatacttgagttactttgaaagccacctatattctggtatttggttggtttcttacctcatgatgtatgcaaatccgtgttactcttaagaaggcctatattctggtatttggttgaatttttgactatgattaggttgttttattacgctctgaagctctattctgtgttactcttgactttgtcaataacaagcaagacaccttaacccattttctttatcctttccacgtttggcttacatatgtttttctgtgagtggtgcagggcaaatcatgtattaccttgtaggccttctggtctcacacttgacattaagaagtcttcccttaaaaagttgtcaaagtggctgcaatctaaagcgtctggtggaatggtcagttttcatacgaagttcccttgtcttatgatattttttttggcttgattttatattttgatataacaggagtgttagtagatgtttaactgcaaaacccaactggtttatcaatataggaaactattagtatcaagtgttgtaagctgtatctccttaaaagtatgtatgtaagacattggtacatttacagttaccctgatatactcataattgctagtagatttactttggtgtcttgactggcaactgcactctgtcacaatctttgaaatatatgcgcagatatctgtgaaggaagacaagcataagaaggagatagtattgatttcagtcaaccgcagccacccagattacaaatccttcaagccagagaaaaagaaagcggaagtctccgagtctcctggagagcgctccacgtcgcaagctcagtcagagaaagggcttgaaattatagaggtctataaaccaagcatacacaatagtgcaatatttgcatcagttggggaagacaaaggaaatctgtacacagcttctgaagccactgacgttgtgttcaaatacattgagaaggaaaatctagtaaagccaacaaacaaatcaatggtggtgttggatccgatactatgtgatgcattgttcaaaggagctatcaaaaagggatcggcatatccgtcagagatccacaaaaaggatgttgggtcgacatttgtaggtagaatgcagcctaatcacgtaatgatgagaggaggcggtgaacccgtggttcgtaaaggagctgtaaagccggttcagataatgacagaacgaagacaaggtaacaaaaaagtgaccaaggtcacagggatggagacgttcttgatagacccagactcgtttggatcagaactgcagaagaagtttgcttgcagtacttcagttggagaacttccaggtacgtttaaaatctatcttttttgttttgctcatctgtgtaagtgaattaactatttgagagatgattgattgttttatgtgtttgctttcaggtaagaaagggtacgaggttctgattcaaggaggtgtgattgataaccttgcgagatatatggtggaacactatggagttccaaagagatacatcgaagttcttgataagactagaaagtgaatggttttttctatttcattttttttttgtgtgttttaatcttctaattttatttgatacgtacactctgtgactctagagatgtggaacaaatgagaataaaattgttttgttattagtttttttttaatataacaaaaaatttaaagaaaataatttatagtttgatggtgattggtgaacttcttttttttccaagattgcagtaaacgtcgtctttagctccaaaaacaacctttgtcttgttcagctaatggcgatttttgaatggcggcacagaagacggccattcgacggcggaggaactcgtcgccgtcgtttcttcagcccattgtattcgagaaatttcaagagaacgattctcttcgctgtgattttcttagctatcttccctcctctctacttccatttcaagctccgacgaattcgtcagattgtcgcgcaaaagtgcgattggcttcaccatcctccacttgtatgtgctcacggcggcgattccaccctcgctttcccaaacactgtacgtacactctcgatctcttcttcttcttcacactcttgctactaacctttttaaaccttaatctcttggactcttctcaatcgtagatggacgcttacagtttcgctatacgttctctagttgattgcattgaagtcgatgtttctcgttcctccgatggtgttttattcgctcttcacaacaggttacagactcttatccttgttgtatcatcttcttctaatgtttctgtgtttggattctcatcggagttcttcttattcatcttctgatcacacgcacagtcagggatctgcagcgtattgctcgtaactcttctgttcaagttggagatctgagtatgaaacaggtctcatctctctctctctctctctctctctctctctctctctctctctctctctctttaccagcttttgggatatgcttttttgcatccatttttcttaaacctttgatgatctttttgcagatcaaggaactcgatgtctcggagattgttaaaggaaccttgggaagtagtaggattcctactcttgaagaggctttagcggtaatgcctgtttttttaattactatcttgtcattgctttgctttgtaatttctgctcggtaacaagtggctgaagctagttttgatcttgaatcatctagttgatatcgaattcagtccggaaagtgatccttgatgccaaagttggaccgccaatgtatgaaaaggggttagcacaagacatcctttctatt

SEQ ID NO: 141302 - DNA, 1357 bp, Arabidopsis thaliana landsberg
catttctgaagatcatcacaagcaaagaaaatggagagcgattcagagatggttccgtttcctcaactaccgatgccaatagaaaacaactacagagcttgcacaattccttacagatttccttctgatgatcccaagaaagccactccaaatgaaatctcgtggatcaacgtcttcgccaattccattccttctttcaagttcattctcttcccactgcttctctcttccgacctttactagtttctatttactttgaccagattcagattctgttcatgttcatgggtcagaccaagctttgattttgttaccaaaaaactactctttcagctaaattcgactaatgtcgttggtgtcttgtttgtgttgactttcctgggtttacttggttttgacttagttatcactaggaagccatagttgtttctggaagcttgtaggaaacagttgcaatcctgatttaaccagaaaatgccattaaatctcaatgttctaaagctgtttgatttgcaggaaacgtgcagagagcgataccactgttccagatgctcctgctagagctgaaaaatttgcagaaaggtaaaatttttgcatggttggtagtaattctcaaggttttggttggtaggaaatcttttgtcaatgtcaccttcataaactagaacggcccttgaattatatgatacacaagatcgtgattcagtcttttggatttgagtttgatatgtattaccttgaatctggaagatatgctgggattcttgaagacttgaagaaagatccagagagccatggcgggccaccagatggcattgtaagtcaaaacaccatatgatataattttctctggcgtagtaagctttgttttcatggattattttggcttattttcagcttttatgccgacttcgtgagcaagtactcagagagttgggatttagggacatattcaagaaagttaaggtgtgaatttcctttcaaggtttcttgaggtttccaaatagctagcacttattctctctgattagatgagttcacattcaatgaataggatgaggagaatgcaaaggctatatcactatttcctgaagttgtcaatctgagtgatgctattgaagatgacggaaaacggttagagaatttggtgagagggatatttgctggaaacatctttgatcttggttctgcacaggtatctttcaatctcctctctttcgtatctcccacaggaaggaagcatgtcctaatttattggcttttttcttttcacatcatgaagcttgctgaagttttctcaagggatggtatgtctttcttggctagctgtcaaaacttggttccacgaccatgggtc

SEQ ID NO: 141303 - DNA, 2147 bp, Arabidopsis thaliana landsberg
  unsure (1)..(2147): unsure at all n locations
atggtctccatcgcttctacgtttaaatgttttgtgtttgtctttcttgttcattgctgttgcaagtcgtccgactatcagnnnnnnnnnnnnnnnnnnnnnnnnnnnnngttctaaaccagacggaaaaactgataatgccaatgtatgtacacaataactttcctaatcaatgttaatagttatttatttagttttgttgattcccaatttatattggcttccaaatacattgaaataagctcaactcaatatcaaaatacatttaaataatctaaacatatatgttgaaaaaacattttgatatgatagtatatataaatcttcttgactttccacataacaatatatggattggtattatattaaccaattaaatttaactaaatcttttatcaacttctatagattctttttttaataattaacctatcttattcttaacatatacaaaattaggcattcacaagtgtatagaaacgtgcatgcacaaggataagtgaaagtagtaaaatctacataccgaaaggaacattctacctcggtggtgtagagtttgtgggtcatgcaaaaatcctattgaattcgtcatcgatgaaactttattggctcgtgcaaaccctagggacattaagcaggacacatggatcaacttctggtacatcaacaatctctctatctccggttccggtacaattgaaggccaaggaaaatacttttggccactcaatgactgccacaaaaataccaattttcctaaattagctatggtaccatttcttcttacgcttttctttttataatatatttcttctttgagaaaatatgattatatattgtttacattgaaaatgtattatacaatggtaacaagtatagtttgatcatttatttttgaaccatatatatttattatacacaaatgaattgaagtatctactctttatttctagtggtatgataaaatttgaaatgtttacagactatgggatttgcattcgtgaacaactcaagaatcaaagacataacatcactcaacagcaaaatgggacactttaacttcttctctgtccatcccttcaacattaccggcgtcactataacagctccggtgatagccaaaatactgacagtatcaaaatgggttcttgtagcaacattcacatctcaaacacatacatcggtactagagatgattgtattgtcattctctctgggaccactaaccttgatatctctaacgtcaagtgtggttctgtacatgggatcagtgttgaaagcttagggaagaacaaagacgagaaagacgttaagcacttaacggtaagagacacagtttttaacggcacaagcgatggtattcgaatcaagacttgggaatcttcggcttcaataatcgtagttactaacttcatatacgagaatattcagatgattgacgttggaaaaccgatcaacattgatcagaagtattgccctcacccaccttgtgaacatgaaaaaaggttaacattatatgcatgaacaagcttggttatttttttcttcaatcacaatgaaatataaaacaaaagacgacttgtgtttccttgttcagggtgagtctcacgttcagatccaagacattaagttaaaaaacatatatgaaacgtcgaataacatagtggcagtgaatctacaatgtagcaagagctttccgtgcaagaatgttgaactaattgttattaacctaaagcatactggactcgagaaaggtcattccacagccatgtgcgagaatgttgacggttctgtacgtggtaagatggttcctcaacattttctagattgactcaatggtcaatcgaaaaaataaccttttgagttatacatgatatttttagttacatattattgcctaatttttgtatatattttatgttttatgttcttgtttatatgatatcatgatcacacatacaaattcttaatgaatagttctttctacaacaaaacaaatctacgacagaacggttaaatttttaacttctgatacaaggtttttttgtgtcaattccctaaatgcatcttatgtcgttgtagcatttaaggtgtcaatccaattgggtggaattgctaacaatcaggatgcgatcagagaatactaa

SEQ ID NO: 141304 - DNA, 243 bp, Arabidopsis thaliana landsberg
tatcaaacgagatcgatgcgttaataacaccggaaagtcatgtatacagccctttacctgactggtacatgactctcttataatttccctacttttcttgattttatagctaaaagaagtttaaacttggcaagctcttgcacttatctgttgctcaaatttacaggacaaacacattaggggcgtatttgatcacaccggcaacgggttcccattttgtcatgtacttggcgaaaatgaaag

SEQ ID NO: 141305 - DNA, 1837 bp, Arabidopsis thaliana landsberg
  unsure (1)..(1837): unsure at all n locations
ccagcttcttctctcatgtccttctggcctctctccgtctcaggtttttctccaatcgaatctatacaatgtgacttagtatccttaatcatccgatattgttgtttcgatgctaaaaaaggtctcagtggatttctcgaaatcgcatgatcggattcctcatcaagatcctggtctagaagattctatttcacaggtgagaaccgaaaatggagtatctagaattcaataatgcttgttgannnnnnnnnnnnnnnnnnnnnnnnnnnnnnnnnnnnnnnntccatttcgaaactctaatcaatttaggtttgattacttttgaaaatttaggtttgggagcagagatcacagggaaattcatcattgttcaatggccaaaaatttagggtatgtatctattgttttaccaaacgttcatgttatgtttcgataagcttactcttagttaaaattttcagtatggaggatattgtttagatgatgatgatggtagtaccaatgaagtgccacacgtttgtcttcgtcttggcctgacagattacaggtttctcatttatctccttcacaggattatgcttctagtttattgatttctggtttacattgtatggtttgatggagagaattattaatcatggacatggtttccaaggacttttgtaggaacgaatttgagttctctgtgggagaagttccttgttacatcagaaggtatatcctctgaggaatttagttatcattgcctctagttttgtgttggggaactggagagcttccaggtggtttgatcaggtttcttatcgttatagttttgttctctcacagatgactctgttagatgtcgacacacctcaagtccattgggaaatggtgcagttatcgaaacttctgataagaagattattgtgttacgtcggagtaataatgttggggaatttccaggacactatgtattccctgggggccatccagaggtatttacatgaagcatccttatttacattaagcatcaccatattgtgtctgttactaactctttggcattgttgttgatgactttaaacattgcagccaacagcagtaggtattgattatcatcagcttgaaaacaatgttcaaaccggtgaggttttaaacaagaaggtaactcaagaaatgtttgatagcattatctgtgaagttgtcgaagaaactggaataccagcatcatcacttgtaagccggaatgagttcttttggtctctcacttaggcgtcccgagagatatctgattgatcttttatacaattacagagctcgcctctcttcatcggtatatctcgaagggagttgaatgtaagaccagctatgtttttctacctcaagtgtagtcatcattcagatgacattcaaagattatactctagcgctgaagatgggttcgagtcaacacagctccacactgtctcattggttagttctctaatccatcaaggaagaaaaaaccatcgactgcatgttttttactctctaaatgttatgatctcatcacgaatgtaactgtagatgtgctttaaataatcgatcaggatgagctgaagatgatgacatcgagaatgccaggttgccatcatggcggattcgctctctacgaactgatgcttcaacgtctcaagaacactaaggaaacgtctttaatagcaacgtaagaggaagatacttaaactttacacctagttgtgaattattgtttgctaatgatcatgtcattttcgagtaacttttattatattaaccgtactaatttgtaaaatccatgataatgagtaactatcatgtaattcagggatagaaa

SEQ ID NO: 141306 - DNA, 1330 bp, Arabidopsis thaliana landsberg
atggaagagatacaacaacaaacgcagaaggaagaacaaaagcaccgtgaagaagaagaggaggaagaggaaggtccgcctccgggatgggaatctgcagttcttcctcctccaatcgtcaccatcaccgccgccgtaaaccccaatcccaccaccgtagaaattcccggtattcttgtagtcttgtctattttagggtttatcgatttgcttccatttcttgctacagtctgatcaaattagagatttttagtggagtttgtagacttttagagataacccattttcgattccgagaattgattagtgttttttttctgcaaatcttctttgtttttggggttgttgcagaaaaggcccaaatggtatgtggatcttgcaggcgtttgctttcttatctaagaggatccaaacatgttaagtgctcctcttgtcagactgttaatctcgttcttgaaggttcgttcttccatggcttttttatctcttattcattacttgaaaagcttttgttgataatctcagtcacttgaaactcttaatggaacaatcttggaatgctctctcagtctagttttacttagcatgtgtgaatgatatatctatgttcttttgagaatctcaaaatgtaagcttcctgagaccaaatgagtttagttcttaactgacacaagaatgatctttggttaggattcttctcttaagcttttgtgagccttttggtctctactccatcataatgtctcctttgtagaccatttatgtggtctttatcctttactcttactactcttggggaaattgtgtgatcttaagaccaagattgttcttcttagcttgtgaatcacttggcctcattattgatgaaatagccttcttctcttatcggttctggacttgtcgttctttgtttgcagctaaccaggttggtcaggtgaattgcaacaattgcaaactgctactgatgtatccttatggagctccagctgttagatgttcctcctgcaattctgtcacagatatcagtgtatgtattcacagatggttttgtgctccatgtccaaatcatacttggaagagttgatacattttgagatccgagtaagtaatcatctgatgaatcatttataataaactgtgttatatttcaggaaaacaacaaacgacctccatggtctgagcagcaaggaccactcaaaagtttaagcagtctcaggagagcagagaattaaacttgaaccgatttttgtcaattttgaaccggtttgacgactaaaaaccttataataatgtcgaaggatagatgaaataaaatcaccattaataatct

SEQ ID NO: 141307 - DNA, 919 bp, Arabidopsis thaliana landsberg
tggcagtggaaagaagatgagtaaaggatggaacacatgggcattggctctccacagcattgcgatgcacccagagagacacgagaatgtcgtgcttgaatattcagacaacatcgttgtcataaacgaccagtacccaaaggtaaaaaagtcttgatgctgatttataaatatagtatctttcttcatgtgacaaatgacaaataggatttttcaactgagtttaggcgcggaaacacgcgctagtactggcaagacaggagagtctagatgggctagaagatgttcgcaaagagaatcttcaacttctgcaggaaatgcacaatgttggtctgaaatgggttgatagattccagaacgaggatgcatctcttatcttccgccttggatatcactcggtacttaagtcatcctttacattcaaagcactgctgaattttctgtttcccctgagtgtagacttcagatttgcactttctgttcggtcgttttagaggttaaacctaagagttcattagcaaaatcattgaaattgatatgtttaacatacattgagtttttctctttcaggttccctcgatgcgacaactacacttacacgttataagccaagactttaattcagatagtttgaagaacaagaaacactggaactctttcacgacctcgttcttccgtgactcagttgatgtacttgaagaggtcaacagccaaggcaaggccaatgtggcgagcgaagatctgttgaaaggtgagctgcgttgcaatcggtgtagaagcgcacacccaaatattccaaaacttcaatcacatgtcagaagctgccattctcaatttccagaccatttactccaaaacaatcgccttgtggctagagcagagacgtagtagctataacgaccggttctatttcggttag

SEQ ID NO: 141308 - DNA, 4197 bp, Arabidopsis thaliana landsberg
aaacacttttcctatagaaggctcagtccatggggtatgcatgattctatttttaaacttgacataagttatgtttgacatttaaggtttttattgactataatattttctgagacttacgcttctttccttgtctgtatttcaggataagatggttaggaaacccatcgatccagaagaggagctccgggggatgtcccaagaagcacggggttacgtcgaagctgttcttaacagccttgcagccaatgttccaaaggtgaactatccttatgcaaaagctcgaaagctctaaattttcttgtccatctcttttctcttacagagattcctcggtcatgctactaagcgatgtgaattgaccatgaacaggctgttgttctttgtcaagtagagaaagcaaaggaagacatgctgaatcaactctacagttctataaggttcaatatcttttcgttccctgtgccttgtttcgtttcagttgtggtgtgcttacttgtgctctcctgtatttgatctttagtgcaataggcaatgaaaggattgagtcattgatacaagaggatcagaatgtcaaaagacgaagagagcgttaccagaaacaatcctctcttctttctaaactcacgaggcagcttagcattcacgacaaccgagcagcagctgcttcaagttattcggacaacagtggcactggtaaattcatccgccttattatattcgaaacatgataacagttcttctgcttgcttggtttggattgatacggtttcttaaataccatctgaaagatcttcaatgaaacttaggtttataaatcttttaatcttggtatcacttgtcctacagagagtagcccaagagcaagtggaggttcttcaggggatgactggatgaatgccttcaactccgctgctaatggaccctcagactcattgtcaaagtacggttccggtggtcacagccgccgttacagtgaccctgcgcagaacggagatgcagcatcaccagggtctggtagcaaccgccgcaccacccccaatcggttgccaccagcaccaccgcctacaggttcagcttataggtattagaacctgaagaaaaaaccctggaagcgcattgtgtcccgttttctgggactacgttactcttattttttctagtttaagacagtgattggatgattgtactactgttttttggtctttgtagatagatattatcacacacatgtgttggcagctaaaaaagagtttggtctcatgagtcaaatgtctgtttgaatttttgttttatttcttattcaacttttcttggcatccattttttgagcacgctatgctgtagtagttatagaatgaattttgtatctgatattcttatgaatctgaactgtttgggtaaattactaaatttataaaatcgaagtttcatagactacttccattgtttaagccttgagagaatactttcagggctagttgatgaaatcactaaattttggggtttattggtaaagttgtcgtatgcggtagtacgtagttgcaaatgcaccgcaagtattttctttattcagaaagcctaaaattagccaaacggcatcggattatccctcgaaccaaattagtaacatacaatttcttataagtaattttaactttgttaaacaccagggtttaaatgagattttcctgaacatatggtgtttttgttaaattttaatagatgttcttgcaatagttttgaaatttgagggttatttttcattttcgcgaaacttgggaaaggaacccttctagccctaattaacgtgtctgctttaaattagggcagacaaattaacgttctctgtctctgtctgttataggctactccaccgtctcgatctcattcaccttttagtaaggtgagctatctcttgtcttcattgacgaaggtttgtgtggatctcgaagttagattgataaacctaacttgttcttgttatatagttatgcacggcagctagaatttgtcgagctataatagcattgttataagattagcaatcgaaattgatttagttaacgttttaagattaggaatccaagttttagaatctgtttggaccaaatgaccatcgtctctacttgttgtccttttggtctctctaatgtcactaagtgtatcaatttcgtgcagattaaagaagcaaaaacaatggtgaaatataatttcaagaagataacagttgtgccaaacggaaaacagtttgttgatatcgttctttcccgcactcagcggcagacaccaactgttgtccacaagggtgacaggatttgcaaactccgtagcttctacatgcggaaagtgaagttcacagaatcaaactttaacgagaagctctctgccattatcgacgagtttcctcgcctcaaggaaattcaacccttctatgaagatcttcttcatgtgctttacaataaagatcactacaagctcgctcttggtcaagtcaatactgcgaagaacaagatcagcaaaatcgccatggattatgtgaagctattgaagcatggtgattctctgtaccgatgcaagtgcttaaaagtggctgctcttgggcgtatgtgtactgttatgaaaggtattggtcctagtttggcttatcttgaacaggttaggcaacacattgcaaggcttccttcgattgatccaaacactcgaactctcttgatctgtggatgtcctaatgtgggaaagagttcttttatgaacaaagttacaagagctgacgtagctgttcagccatatgctttcacaacaaagtcactctttcttggtcatactgattacaagtgtttgaggtatcaggtgattgatacaccggggcttttggatagggaaattgaagaccgtaatatcattgaattgtgtagcatcaccgcgttggctcatatccgagctgctgttttgttctttcttgatatttcgggttcttgtggttacaccattgctcagcaggcttctctttttcacaacataaagtctgtgttcaagaacaaaccgttggtgattgtctgcaacaagactgatttgatgcctatggagaacttatctgaagaagataggaaacttattgaagagatgaaagatgaagctatgaagactgaaatgggagcaagtgaagaagcagtgattttggagatgagtactttgactgaagaaggtgtgatgtcagtgaggaatgctgcttgacagaggctgttagatcagagggtagcggcgaagatgaaatcgaaaaagatcggtgatcacttgaacaggttccatgtggcgatgccgaagagtcgtgatgaccaagaaaggctcccttgtatacctcaggtagctggtgaaaaggagaagcgaaagaccgagaaggatttggaagatgaaaatggtggagctggggtttattctgctagtctaaagaagaactacattttggctaaagaagaatggaaggatgatataatacctgagatctgtgactgtcataatgttgctgattttgttgattcagacatcttgaataggcttgaggaattgacaagtgaagaaagtcttaggaaggcagaggaagaagaagttggttttgagattgaaggcgaagaacttacagagaaggagaagaatgatttggctgctattcgtaagaagaaagctttgcttattgaagagagtagacttaagaagagcaatgcacaaaacagagcagctgttccaagaaagtttgacaaggataagaagtttacaaggaagagaatgggtagagagttatcatctcttggtcttgatccgtcttctgctttgaaccgtgcaagaagcaagtctagaggcagaaagagggaaaggtatgatgatttgagttacgatgcaatggatgtggatgtgaatgatgatgagcaacatatgaagaagaagatgtgtctgagatctaaatcaagatctttgtcaagatcaagatcagtgtcatggccaccacatgatgttgcacctggtgaaggcttcaaagattcttcacagaagattaaggcaattaagattggacacaaatctcacagaaagagggacatggctgcacgccttgtagaagcagacagagttataccatcttttaaaccaaaacacttgttttcagggaaaagaggcaatggaaaaaaccaaaggcgttga

SEQ ID NO: 141309 - DNA, 760 bp, Arabidopsis thaliana landsberg; identical to SEQ ID NO: 68793

SEQ ID NO: 141310 - DNA, 2509 bp, Arabidopsis thaliana landsberg
atggtgcttgtcctgaagaaccctatcaataacagcaggatcctagaatgcgacgaatccgaatcctctaggacgaccagtagctttctctcgcataacagtgacctgcaaaacctcgccgaaattgctgaagtactctctcagaagattctcgtcggtatcccatgaaatcccgccgataaatagctttccctgatctgattccattgtgagtttttttctctctcttcaaccctccggtgatacccaaaaaccctagatttagtaccgacaaatctccccggtgaagaagaggaaagaagctgtaaaaatttcagtgtcccgagaaaattagggtttcgggtttgtgaaattgggtgagagagaagagagagagattaaaaaaaaaaacagactttggaaaatagcggccaattgggttaaagtgagtgaaagagagatcgacttaccaaaaaaaaagaaaagaaagagaagacttttccatatcagcttcgtttatttatttatttatttttattttttagtcatgtaataataagttccatttagagatttaaaatggttgataaattttattattagtcgttaatatgttggaaaaaaaggagagagatatttgagcaagaatgtaggttataaatgttatagtgattccatgttatataaggatcaatgaccttattatttgagaaaaaatgttagatcattttaagtctttgattttttgtattaaaatttgttactttcatatatatatatatatatatataagcattaatcgacaaaaaaaccatatctcaaatcgagctcatcaaagcaatcattctacttctctcatcgaaatatatcgagcattgatggaagaaatgaaatatctgcaattttacaaaaaaaatcaaacaacgtcgaatgtgctaaaaatcgtacattttcgtattaattcaaatgtatgttaagaaggtcattgatcctaaaaataacaaacacttcatttggcaaactttgtgagggtgtggtattaaagaagaatttatataatcaaagaatacaatgtaatctacaaattcagcttacaagggaaaccaattaatcatgttattttgtatagatgctagtactgcaaatttgaactcttaaatgcaacattatgctgtgaccaaaaaaaaaaaagcaacattaatctctcttttttttctagtcatcaacgttattctcttaactcttaagaatatttttgtcgcaaaaaaaaaattaaattattagaaactctaaaattataaatttagaaaacaattcctattaaataaaaattggatcgaggaatctcaaaagaaagttcttagatagttatagcctgatattttcatattttggtgataactaacatttctaaaatcaaacttaacttaagctgttttcagttttcacatattcataatcatattgcgcaaggggatcaaaatttgtgcaccacttgtttagagtgaacgttgaacttaaaaggcataaacgtaggcctaaatctgtctttacagacctcaaaagtcaaaaagcacattaacaacaaactgtttgaaatgggccgcaaggcccaacattccttggttgtgcatagaaacaaataaatgcttttattttggcataaaatgttataaaaatagaaaaggaatccaataattaattttgtctcatcttcataaagaaaagacggcataaactccgtgagcccaccgtcactttcatccgtttgaaaccccaacgttcctatttctctcttttcaaaacacctcaacgaggcaacaaagtaaacaactaatcatctctcttcttcttcttcctctcaagtatcgaaaccgaaacagagaaacatcaccaccaatgggatgttttatgggttgtttcggtctctcttccaacaaaaaacgcagaaattccattaggaagatccttcctcgagatcaagtaagcttttttcaattttccacaataagtaaaataacactctttcttcttactctatctctttaaagtttaggtttttttccattactctgatttgaaccttaacctttattgcagagaatctgtagctatgagccgctgctttcttcagatccgacagatttcagtactgtttcagataaccctgaaaagatctcaaattcgaacctcaggtataatgtcttaggggcttggatttacataaaaactgaaactttttcttaatctgagttatgaaaagccaaaatgaaacccaattttagcagagattatcaattgaaatggctattttatgtttactgtgtcaggagtgaggtaggggaggaggaggagaagaagaaggtgactaagaagacgaggaagagagtcagatttgacttgaatgtacaaacctatgaacctattgtaccttcaagatatgagaatgcttgcagtgatgatgaagaggggaaaggaggaagaagcaagggatcttcggctatagataagaaaccagaggatctaagca

SEQ ID NO: 141311 - DNA, 482 bp, Arabidopsis thaliana landsberg
gtaaaaatcaccggccgtgatttagaggttagagtcatccctgagatcgatgtatgcaagtgggaaccatgggacttacctggttagtctcttcttcttcatgatttcatttttgagaattgaaaggtggaagctttgtgaattttggattgttattgagagtgatgatgataagattttttagggttttgtttgaatgtttagggctatcggtgataaagacagatgatcaagaatggttctttttttgtcctcgtgatcgaaagtatccgagtggtcatcgttctaatagagctactgatattggttactggaaagctactgggaaagatcgaactattaagtctaagaagatgattattggtatgaagaagactcttgttttctatcgtggaagagctcctagaggagagcgtactaattggattatgcatgagtatcgtgctacagacaaggaactagatggtactggacctggtcag

SEQ ID NO: 141312 - DNA, 571 bp, Arabidopsis thaliana landsberg
tgacggcggaggaggaggagaaggcgaaattgatgacggagatgccaacggaatcggaaattgaagatttttttgtggaagctgagaaacaactcaaagaaaaattcaagaagaagtaagtttttattttattttgtgagtttgatttttatagataataaattttttattcataatttaaaattgattttgaggtaaaattaagagtgggtttattttttttttaattaggtacaatttcgatttcgagaaggagaagccattagaaggacgttacgaatgggtaaagttagagtgaagaagaagaagaagtttatgttttttttttaactttttagattttaatatttcagggaataagttaattttattttgttgatttcgaaatataagatttgtaggaggaatgtttttagaagtacgaaattgcacagaaaaagaagaaagctttttaacagattttagagcccagaaaagtcgtgtcttttagctctacttttacctcttcttcgaatcttgtgtatcttttagcatattctttagtacatttttatgtttttggtgactgata

SEQ ID NO: 141313 - DNA, 902 bp, Arabidopsis thaliana landsberg
cctggaaactccaatctttacttaccttagattgcaggtttgcttgaattatctcaaacaatctgtatcctctccggattctttcgtttccaccaaaaccttcttttcttctgcagcttctggaaccaggaaggtacacatggttgctgaaaacactttatggtcttcttatgttacttcctcaggtaaaaggaaaagaaagaagaatcagacatatttggtttatgacataattactattttgtttttgaaaaattgatagttcctggttttttaatatatgcagcaaagtgcggcgttcaagatacttaggacaagactcaaaactgtgccaacgtactcattcagtactggaaaccaaataggcagagcaacttcaggagttcctttctctcagtataagcatcaaaacgaggacggtgacttagaagacgataacatcaacagttctcaccaaggaatcaattttgctgtgcggctacaacagttcgaaaacgtacagaatctacatcgtggccaggcagggactagagtgaactactcatatcactcttcctcttcttctacatcaaaggtacacataacgctacacatttttgtctgttaacctgcggtataatataacaggatggtgtaacattattgccatttttgcaagatttaccggttttttcccttagcaattggagtgttaagagatatggatagtctcattgtgctttaatttgatgtattaggaggtgaggagatctgaagaacaacaacagcagcagcagcaacaacaacagcaacaacaacaacaacaacgaccaccaccttcttcgacatcatcatcaggtgcagacaacaatagacctgcatcaagaacttcaagaaaaggccctggtcaattacagctttaa

SEQ ID NO: 141314 - DNA, 913 bp, Arabidopsis thaliana landsberg
ggcttatctctccgacgatcttcgtataaaacttagtccggcgggaaatcgactttcaaattcgcaggattctgtcgatattcttgtatagttgcgagtctacaagattcttcttcaccatctctgttaatttttccctaattctttcatctgagtgaaggaaatggatcctgaagctgtgaaggagtttatacgaagggaagttccagattgggacgatgaggtggtggcgatggctagattcaaggcgtttagtggtcagaggtccgattgggaacttaaatttcagttttggcgtgatttgatcatcaaggtttcgcgtcagtttgggttgttcatcattgatcctgtccaggtctggtcaattgcttttggttctagatgaaattagtaactagtaggaagaactgattatgtaacgttgatttgttcacttgtttctaaaaggtgaagaaggcgtggtttgatcgaggaggaatgacgcctttatgcattgatgatgttgtggtgagtttctgctgcatttagtggccaaagaggatttatcttctttaagatcgattatataagtggctcgtgtttccagttattgatgcatagtgaaggtgatgttgtgcggattagtgatctcgatgatcccggtcgtggtcccattgctcgtttattgaggacagataaagaacaaaatggttcaacagccagtgaagcaggaagagattctggaaaatacacttgttcttgttccactcttgaaggtgcttctgtttgttctcacttttaaccatctatatctaggagaagaattctcagtttattatataagtatgtggctgattgaaataagtctatgtgatgtctaggagaaggcggctgacgtggtgaagatattatctgagggacactggacttctac

SEQ ID NO: 141315 - DNA, 628 bp, Arabidopsis thaliana landsberg
aaacttgagtgaaaacaacattcgtggaggaatacctgcatcgcttggaagcgttacgagcttggaagtattgtaagtaatcagtttgtttattaattgagtactttatgtgttaacttttcaattctgaaccctgaaactgaatttttatgcatctttgcagggacctctcctacaattccttcaatggatctatccctgaaaccttaggagagttaacatccctgcggattctgtaagattatcaactttctgtttgtctccatgtcaatttcagtggccagtggagttcacatggtcggcaacatgaaaccttttattgtattacaggaatctcaacggaaactctttgtctggaaaagtaccagcggctgtaggtggaaggctgttgcacagagcaagcttcaagtaagatgattgaatcagagacaaagtttttaaagaaatatttggacttggcatgtgaagaatgatgtttggcaaatagcactcactaccctgtaactgttttctctatctctgcagcttcacagataatgcaggtctttgcggaatcccgtggctaccagcttgcgggcctcacctttcttctggagccaagattggcattgcattcggtgttagtcaa

SEQ ID NO: 141316 - DNA, 3630 bp, Arabidopsis thaliana landsberg
ctgaaaaccaaacaagaccatatgggcactcgaatactccattttgttatcggctacttccactagcctcctccttcgctgcgtctcctgtttctctacttcacgattactcgctaggtaaaagataagatactaaacaactactatagcccctttaattcaagtccgtttttttttgttcttcttcttttcaattatgtgttaaagatacaaacttttgtctgatttgcttccaccggtttcacctaagatactcaattttcttactttttgtgtgttttgtaattctaattcttttatagcttcaatttttagattcattgaagcagttgtgagttaagttggagaaaatggttgtgtttgggaatgtttctgcggcgaatttgccttatcaaaacgggtttttggaggcactttcatctggaggttgtgaactaatgggacatagctttagggttcccacttctcaagcgcttaagacaagaacaaggaggaggagtactgctggtcctttgcaggtatctacctttctggtttttaacttggagttctcgaaatttcatctagtgtataagtgtaattttgattaaagagaggaaattgcaggtagtttgtgtggatattccaaggccagagctagagcccactctcaatttcttggaagctgctagttaatctgcatccttccgtagtgctcctcgtcctgctaagcctttgaaagttgtaattgctggtgctggtatgtctacaacttcatttcttactgctttgtttgggatctgatggaattaatgttcatgtgatgaagctcttttggctctcaaataattgcaggattggctggattgtcaactgcaaagtacctggctgatgcaggccacaaacctctgttgcttgaagcaagagatgttcttggtggaaaggtactttgattggtctcactttccgaattacttattgttgtttgcatttctcattcttatatgatttgctgattcccaaaggctgtaccaattatgtttgtgagactacaaggtataactagtgtttagagtgttacagctcctaggtacccaatgtatctgtcctgtttgttgtattagtcttgtactgcccaatttgttttttattatgttctaatgtcttcagtcttgtgctacacaccgcacaaccctttccagtttctaggcttaatgtgaatcaaatatagagtagtttactggaagatatcttttggatatatattttgttaagttgttattgtgttctctggttcttaggttaggttcttgtttgttccgttttaacaatttacctatcttattggagagcgatatttatgatgtgatatttgtcttcctccagatagctgcatggaaggatgaagatggggactggtatgagactggtttacatattttctgtaagtccaaaactcataccctctctgttgctcccccaatatatttgttacatatatcttatcagctctaccatcaatttgaagaaagttgcaaaacactggttaaattatattgtatcttgttttccctgttattacttttcgttactgatactctcttcatgttcttgttggaagtcggtgcttatccgaatgtgcagaatttatttggagaacttgggatcaatgatcggttgcagtggaaggaacactccatgatttttgctatgccaagtaaacctggagaatttagtagatttgacttcccagatgtcctaccagcacccttaaatggtgagagaataaacttatcgcatatttcttatttgctagtcagctgttataatattactgcttcaagtaattaactttttaaactatctgatgaaaaacagtggttgaactattagttagtggcgccatgtatttggtttgataaaattggattaatgtgcacacacttgttgaatgtaaaacaaagtatgatgtaattgagtaaaaaagtgaggttagtaactatgatgcatgtatttatttgtattgatcaattcaagctaattatagattttgacatttaatagtaatcaaagaactgatgaatgtttgaggatatgaagtatctccatctaatttagacgtcaggaagaacatggtcatttgtctttccaaagtaagaaattctagattttgagcttccccatactttaggatgggtaatcaaactgtaaaatattgttactggtcaaggcaagacgatataactgaactccgttgtagcattagcgctgaaatgttctgtggttgaattaatttgtttctggcaaataattaaagttgttgctgttggatttacgttgtaggtatttgggctattttgcggaacaacgagatgctgacatggccagagaaaataaagtttgctattggacttttgccagccatggtcggcggtcaggcttatgttgaggcccaagatggtttatcagtcaaagaatggatggaaaagcaggcaagtaggctattgagttcacagtttctgtgagattctcgtaagcatgttgatgagcttaacttggtagagtagttagcatgctgaatcatgtagtgttgatttgtcagctttcttatggatagctctgacttttctagtccatgtggttgttgcggtttcattgtcgtgcatgtgctttcactcagcagataataatacattctgattaattgtatacttgtccagggagtacctgagcgcgtgaccgacgaggtgtttattgccatgtcaaaggcgctaaactttataaaccctgatgaactgtcaatgcaatgcattttgatagctttgaaccggtttcttcaggtttgacactctagccctttatttctctttgttcttccttttgcctgtctttttgtgaatctttatctcactggcaatcatagttaccattcacatggtcgacatgaaaactataatagaatttttttacccaaacaatacttgagtttgatgttgattaacttgtactacctcatcccaataatcagatgtttctcattttgaaacttattgtgtgtcataagctgcaacagatggttaggatattgtgaatttgcaaatgcaaactaatatgaactacattgacaggaaaaacatggttccaagatggcattcttggatggtaatcctccggaaaggctttgtatgccagtagtggatcatattcgatcactaggtggggaagtgcaacttaattctaggataaagaaaattgagctcaatgacgatggcacggttaagagtttcttactcactaatggaagcactgtcgaaggagacgcttatgtgtttgccgctccaggtttactaccatgctgtcttgtgggtttaacaattcatctggtatcctgcttattaatatgttgtttatgtttttcttgtagtcgatatcctgaagctccttttaccagatccctggaaagaaataccgtacttcaagaaattggataaattagttggagtaccagttattaatgttcatatatggttagtgaaaccgttatctcccttgttttcttttggccattatgtgagaaccgagatcacatgcaggtcttaactgctgtgaactaataaagcaggtttgatcgaaaactgaagaacacatatg

SEQ ID NO: 141317 - DNA, 1523 bp, Arabidopsis thaliana landsberg
accgccgtgacttagccactccgcttatttattgcagttcacgaccaccgtatcctcgtaatatccgatatttcgaaccgaatcgaaaaatccctaaattcctgtgaatttattactaaaattagctcacctttaccagagatgatgggctcagagaatgacgaagagtcccatctccactcatccaaagaagagatggagaaactctttctccgcgaagatggcgatcccttgaccaaaagcaatgtcaacggcgataaatccaactctaattatcgcagcgctatgtcaactctcttcgactcgcgtcacccgtcgattgtcgtaactccagctgattccgatccactttttgcgccaccgtcttactacagcgaatctcggagtcctcgttctaaaccaaacggcggcgacagagtcagctcttacctcgagcctccgtcttacgcggatgttatcttcagccctttcgatgatatctccgagatcaatggctcagaagatggtcatagtcagtcggtcagattcactatcgagatctccttcttcttcaagctctgattacatcaagatcactgtatctaaccctcagaaagagcaggagatttcaaattccattgttggaggaaacacttacatcacctaccaaattacgaccagaacgaatctccctgactttggcggcccatcggagtttagcgtgcgaagaagattcagagatgttgtcacattggctgatcgattggctgagacgtatagagggttctgcataccaccacggccagataagagcgtcgtagagagccaagtaatgcagaaacaagagttcgtggagcagagaagagttgcattggagaaatacttgcgcaggctaagtgcacaccctgttattaggaacagtgacgagttgaaagtgtttcttcaggtgcaagggaagttgccactaccaatgagtactgatgtggcctctcggatgttggatggggcggtgaagctcccaaaacagttgttcggtgaaggcggagcctctgcagtgccggtgactgaggtgggtcagcctgcaagaggaggtagggatctgctgagattattcaaggagctgaggcagtcagtttctaatgactggggtggatcaaaagtcaaaacctcccgttgttgaagaagataaagagtttttggaaaagaaggagaagatgcatgatcttgagcagcaaattatcaatgcctcacagcaggtaaaatttcatccttgttagttgaattatgcatcattctgtcagtatgtagtatcctacttggaacaaaccgttttagtaatgatttctaaatctcctcatgcttagtgtgtatcctcattatagactagcgaactgtcaggcttatatatggagattgtgctggactgtaagcttccctaagagctgttcttatatttgagttgttcatttcaggacacactccatgagtactttggcatgatgaaggctgtccaagacgcatttgcagaagctgcatcatcaaag

SEQ ID NO: 141318 - DNA, 1462 bp, Arabidopsis thaliana landsberg
  unsure (1)..(1462): unsure at all n locations
tgaggatgcttcttttggttttgtgttttctatggatcttcagtcagttgctgtccctgcttcacttgtttatgagatcgagcgtatacttaagaccggtgaaactggggctatgcttgtcggtacaactagtgggtctgactctaacgagttggttagatccgtttcgcctgtttcttcattgctgaagaactcaagtgttgttcatgttgcttcattgggtaaacaggttttggttgtattcaaaagagatggagaagatagtttccgcttggatcaaactcatcatgactttcctgctgattgctcgtctgttctcaacaaccggccatacattggattattggagcctcttctggatgaaaaacgttcggatttcgagagacggattcattacttgcctgagttcattgatctctcttctaggaagaggctggtttatattgatatcggggcagtggatcatgtgaaagcaagatcgaactggttcttcccatcgtacccgattgataggaaagcttttaatagctactttgtgcatcacaacacatnnnnnnnnnnnnnnnnnnnnnnnnnnnnnggtgtaaccttcatctatcatccaggactcgcagcaactaaaactacaatagccaataccggagatcacgaagaaccttttgtggaagatgatagctttgattttctagcatggttcaaggaaactgctagcttcgctgattttgtggttctgaagatgaacacaagcgatactgagctgaagtttctctcagagctgataaagacaggagctatctgctcagttgatgaactgtttcttcactgcacaggctacagcgactgcaccggtatcattaaaagcctcagaaacagtggcgtctttgtccatcaatggtgggaagactaataagcttaacaaatgaagctttataaactaaaactatgttgtttggtaagttggtgttgttttgttttccaatctttgctcatgtatagagcaaagccacagaagtttgctccagcgacccagcacttctgtggttctacctaaataagctgtcgtcgttatgaactttgttttgtgtgtttgttcaatgaagtttgctatgttgtgtgtttctactggttttcatgctctgtttcacaaacgcttatagtaccaaagtagcctgacgatttaccaaaatactggaccacaaccatgcaggcatgccaacaaaatattagatgatgttttatggtaatttatcaaatagtatcatttatgttgtcacgtcttaaaaaaaagtatgattaagagaggagtggacaaagcaatgaatttgccaaaaatctcttgaagtacctattcccattcacccacaggatctacttcacgactcgccttgtatgtattcacccttatgatctttctctaaaaagtatgagttatctgatggtttggcgttcagactgtggatga

SEQ ID NO: 141319 - DNA, 481 bp, Arabidopsis thaliana landsberg
ggtttcggccggcaatgttgaagaaaatagtactactaagaggatatgtaatgatcatattgggtcgagctcaaaggttgtttggaaacaaggattactcaatcctcgtcttggatatccagatccgaaagtatcagtatccggctcgggtaactccggtggactcgatcttgagctgaagcttgcgtccattcaatctcctgaatcgaatattagacctattagcgttacgtgaatctatataacacgttatgatcagtttcattagtataattcaaatgtttacatatataatatcttatcgatcctatctaatttgattttgatttaacgttagttactttgataatttcgtcgatattgtttttttggttttttcattgtgagattttttgtcttggaagttggatccatacatatttctgtaaaactttatatttaaggtatatatatctagcgctcataaaagtttcaatattcc

SEQ ID NO: 141320 - DNA, 1016 bp, Arabidopsis thaliana landsberg
tagaagcagagaaagaggagcttaaaagtgaagttaaatgtaacagagaaaaggctgttgttcacgtagagaactcattggctgctgaaatagaagtactgacttctcgaactaaggaacttgaagaacagttggagaagttagaagcggagaaagttgaactcgaaagtgaagtaaaatgtaacagagaagaggctgttgctcaagtagagaactcgttggctactgaaatagaagtattgacttgccgaatcaagcaacttgaggagaagttagagaagttggaagtagagaaagatgagctcaaaagtgaagttaaatgtaacagggaagtggagagcacattgagatttgagctcgaagctattgcttgtgaaaaaatggagctggaaaataagttggagaagttggaagttgagaaagctgagctgcaaatatcttttgacataatcaaagataaatatgaagaatctcaagtttgtctgcaagaaatcgagacgaagctgggggagatacaaacggagatgaaactcgttaacgaactaaaagctgaagtagagtctcaaaccatcgcaatggaagcagatgcaaagactaaatccgcaaagattgaatctttggaagaagacatgagaaaggagaggtttgcttttgatgagcttaggagaaaatgtgaggctcttgaagaagagatctctctccataaagagaactcaatcaagagtgaaaataaagaatccaagatcaaacaggtctgtctccaaagttcaggtgttagttaaacttagactgtgttccatcacaatcacttttttgtccactaaaacttgattactataattcaggaagacatagaaacagctgcagggaaacttgcgaattgtcagaaaacaatagcttcattggggaaacagttgcagtcccttgcaacacttgaagatttcttaaccgatacaccgataattccaatggctgcaaatggtgtaagcagcagcagcaactcagagagttggaag

SEQ ID NO: 141321 - DNA, 2659 bp, Arabidopsis thaliana landsberg
tatacaagaaacattatccaccggttttacatgatgaagtctggagattggataaaatagcgaaagatggagcgctacacaagaagctactaaaatctaacattgtgactgttgaagacttcctacagatactcatgaaggatccgcagaaactaagaagcgtatgtgcatctttaatattgtgagtatctacacaagaaaatgattgtttcttgcttatgttctttctttgtgtgtatttaacagttacttgggagtggaatgtcaaatagaatgtgggataacacggtagagcacgcaaagacttgtgtcttaggtgggaaactttacgcctattacacagatcaaacacaccagacagctgttgtctttaatcatatatatgaatttcaaggcctaattgccaatggccacttcttgtcttcggaatctcttaaccatgaccaaaaggtaactcatctctctgtaaagctagcttcttttttttattcttccctttagagtctgcagtctctaaggatcctactcaaaagtggtgaaaacttttgaacttttttggaattcaacagatttctgcagacactttggtgaagactgcttacgagaactggcataaagtggttgagtatggcggtaagctcttgaattgcttaccagttgctaagaagggaataaaaagcttgccagagccaaaaatggctcagaaccatcaaacgcagcagaaggctctgcaatgccaacagactgtgaatggctactcatcagatcctcagcatctgatagagtatccttttgtccaacaaccttgctatcagttacgagactacacatcgatggagagttcttcagtttcaggctcatataatggaggccttgaagatattttcacggaggaaattcgagcgaggagttctgagatgctcgagacggataacatgcagagattgctcaagacatttgggatatcaggcgggtttggtaacagggatgagtccatttacggtttcagtgatcagtacgaagctcagatagacaagggttataggagagaaggaggtagaggcgcagggaaagctgtagtgggatggcttaagctcaaagctgcattgagatggggtatctttatacgcaagaaagctgcagagaggaggcctcaaattgtggagatcgactaagaaagtactacaaaaaaattccgagagcttttcttttgtataaataaacttgaagcaattacttttttaaagaggatcaaccagtatatccttccatatctaagcattggagaaaaaggttaaacgactggttatcagtcagacaaagagtcttaataccgaaagtctcagtattcgtcctctttaagataatctccacaccaaatacatacgaatggagtgaaggttcctatatatattgacaaagaaaaattaaggatttatgaacagaatgaatttaacattgcatcaacttacttagcttaccattaaattacggagtaaaatctgaagacgtggaaaatcgaggtgagatggctggactggactagaccatcatcgagatatctccagcactcatatcaagaacataggtttcggttataaaagcctcccatgcacttttttttagagatctttctttgtgattgcttgatcggccgtatcaaaagcggttgtggattgctcaatatcaacaagagaggtaggagttgtagatggccgccggagcacagcagtttcaggagcggttgtggattgctcatcttcagagatatcaacaagagaggttggggttgtagatggccggactccagcagtttcagagaagccagctccttcgttaggcaaactcattctcgcagacgtggccctagttagtagcgcgccaaggcactatataagtgacacggcagggataagtcaaacttaaaggccgacttgactaattggccctataatgttaggcccatgttttgagagagcaagtagagagaagaaacaagcaacaagaagttccttcctcagcctctttccgatttcttcttcagtctctctccactggttcgtcgacttcgtagaagcaaaaaatgttcttgattcgtctctcccgccataacccatcatcttttacacttctcacgcgccgccttcacgaccaaacaatttcctcgtcacgactccgagacctttacaattttcaatcaccgccgcctttgtcgtcgtcagcctccgaaaatcctgactttaaccagaaaaacaacaataagaagaagccaaagccgcagtaccgtccaccttcttcgctggaaggtgtgaagacggttcactctgatcttccgttcgatttccggttcagttacacagagagttgttcaaatgtgaggccaattggcttgagagaaccaaagtattcaccttttggtcctgatcgattggaccgggaatggaccggtgtctgtgcgccggcggttaatccaaaggtagagtctgttgacggagtggaggatccgaagctggaagagaaaagaaggaaagtgagagagaagattcaaggggcatcactcactgaagctgaaaggaaatttctggtggagctgtgtcagaggaacaaaactaaaagacaagtcaatcttggtattcgtttcttcactccttattcatga

SEQ ID NO: 141322 - DNA, 2101 bp, Arabidopsis thaliana landsberg
aaagagtttatatgagcatagtagtagtgtttgtgaaattacttagacgaacacctgagaaagtacacaagtgggaacctataaacgatgatgaccttgagcttgccaatacaaactacccaatggttctcattcagatcccaatgtacaatgaaaaagaggtaattatgattttgttgtaaccaagaatttttttaatgaatatacatatattatacaatactaatgaaggaatcaaattcttgttgttgtcacaggtttgtcagttatctataggagcagcctgtaggctttcttggccattggatcgatgatagttcaagtacttgatgattccacagatccagctagtaaggtcctttgttcaattttttttccccccaaaaatctttggtttatatgtatgattggttcctcaactatatatggaacgtttttgacatatgaaatgatttggaaaagacaggaattggtgaatgcggaatgtgataaatgggcgaggaaaggtataaacataatgtcagagattagagacaacagaattggatacaaagcaggagcattaaaggcaggaatgatgcacaactatgtgaaacaatgcgaattcgtcgccattttcgatgctgattttcagcctgatcctgactttcttgaacgaaccattccttttcttattcacaaccatgaaatctcccttgttcaatgccgttggaagtttggtaaagtcatatctttttgaaaaataatagttattattttgttaagtcaaattggctaatggagagaatgtgttacatgtagtgaatgcaaacgagtgcttaatgacaagaatgcaagagatgtcactaaactaccattttgttgctgaacaagaatctggatcttcaatacatgctttctttggattcaatggaaccgcgggtgtatggagaatcgcagctttaaacgaagctggaggatggaaagatcgaacaaccgtagaagatatggatttagcagtaagagcttgtcttcatggttggaaatttgtctatgtccatgacgtcgaggtactactactataacccttttaaactctagcaaaacataacaagatttcaatctagacattattaagtaatctaacatttcaggtgaaaaatgaattgccaagtacattcaaagcatacaggtttcagcaacatagatggtcttgtggaccagctaatctatggaggaagatgacaatggaaatcttacagaacaagaaagtgtcggcctggaagaaattgtatctcatatacaatttcttcttcataaggaagattgtagtacacatcttcacatttgtcttctactgtctgatattaccaacaactgtgctattccctgagctccaagttcctaaatgggcaactgtttattttcctactacaatcactatccttaacgcaatcgctacacctcggtaacaacatctctactgttcaagtaaaactctgttttctcatttcctagtatgataaaaagtttgacatatattgtctactgcagatcactccatcttcttgtcttttggatcttattcgagaatgtaatgtcgatgcatcgcacaaaagcgacattcatcgggttactagaggcaggacgggttaacgaatgggttgttactgaaaaattaggtgacactctcaagtctaagttaataggtaaagctacaactaagctttataccagatttggacaaaggtactcttaacttaaaaacacacacacaattacaatttttaagcattttgaaatgttgtaactaattttagttaacattttgcagactcaactggagagaactcgttgttggattatatatattcttctgcggatgttacgatttcgcatatggaggatcatacttttatgtttatctgtttttacagtcttgtgcattttttgttgctggagttggttatattggcacatttgttccaactgtttagattagacttttgtatttgagagcaaatgtgtttttgctatttgattagaccaaattagagattggatcttggttacttaaaccaagttaactcttccaatattaatactcaaaatgtaattttta

SEQ ID NO: 141323 - DNA, 1243 bp, Arabidopsis thaliana landsberg
aacttatctagggtttgtaccagaagagctgggagatttcaattgggaaatgctgaaactagggtttcggttagcgattggcattcaacatcatcgcctcttccgtattccatggttagtttataattttagttcaattcgtaatacaaaatcgccgaaatcaaactaaaatcccataaatctgtttttttttcttcttcgttgaaatcttcattgtattgtcacatttgaattttacatatgcttcaaagttttatctctttgagagaatttaattatttggctgttgaggaagttctaagtggctatcttcttcacttttgttactgattgttttgtatttgttatgtgatcttctactttcatggtgattgttttaatcctaagagtttcacttctgacattgtgtagggcgaagagacactctgtacctagaatcttgtgatctgagtagcgggattactgttcatcaggtctgacaaagtatgttcctaagaagtctcgacggattactgaagatttgacatctcagcaatttgatgttactagagtggatcatagtgtgttgggatttcaagttaagggtaacagcaaagaggctagagatggctcatttttggatctgcaagaggaaaatgatactggaagttacacgaatgtgtcttgtgatgactctgatgaaggttttatgagtttggacaagggtatatatgctagtagattggatcatagtgtattggggtctaaagtgaaggctaacatcaaagagactggagaggatactgattttcatctgcgggataaaaatgatgctgatatgtactctgatgtttcttgtgatgactctaatgatgaaagcagcaacgaagttagatctacaggctataagtcgacgagacaacacaaacaagcttatgataaaatcaaactacatttggaagctgaacaggccaagagtagcaaagaagcctgcaaaaccacgcaagatgcagagcacatggctattcgctatctcggtttaaggtttgcttgcaactttgagtttttgtagcttctgttataatgttgcagaatggtttagttgtttcatcttcactcttctctgtgtgtatgatttcatatcatcttattctgctcggcattgctccagagcatattcagcagctgacctgaagaagaagctcataggaaagaaatatcctattgaagtcgttgacaaagtgatcgatgatttccagattcg

SEQ ID NO: 141324 - DNA, 776 bp, Arabidopsis thaliana landsberg
  unsure (1)..(776): unsure at all n locations
gcgttacagagaagaagaagaaggagaaatgtcagacgacgacgagagaggcgaagagtacctcttcaagattgttatcatcggtgattccgccgtcggcaaatccaatctcctcactcgctacgcccgtaacgagttcaatcccaattccaaagccactatcggcgtcgagtttcagactcagagcatgctcatcgacggcaaagaggtcaaagctcagatttgggataccgccggtcaggaacgcttccgcgccgttacatctgcttattaccgtggcgccgttggagccctcgtcgtctacgatatcactcgtagctccactttcgaaaacgtcggtcgctggctcgatgagctcaacagtatgtgtttcgatctccgatttttgagtgaatttattcaatttgaagtgagatctgtaaatctgagttttgattttgaatagagtagagattggatttggattaggattgaatcatagcgatagtgatgctgctggttagaatttttagatctgaagatttatgatgacttcttaagactttgattcaaagtcaagtcaaatttatctacttctttaggtttatgattatcannnnnnnnnnnnnnnnnnnnnnnnnatgattagttgattcatgtttgcatctttactctattgagcttgaaattgtgataggttgagtttagagttagtctgcccgtaatgatgaatctttggtgcagctcattctaatacaacagtagcaaaaatgcttattgggaacaaatgtgatctc

SEQ ID NO: 141325 - DNA, 425 bp, Arabidopsis thaliana landsberg
aattgaagtggaccagtctcctccttataaatttggcatgtggcctagacacagtttacgaatgaagagataaataggaatctctcatttgcctcctttatctttaagctcttatccttttgtctgctgcttctatgacccacatatgttggtcacttacaatcccccaatatttgctttggtgtaatgttgtgatttgaagtttgttctattcttcggagatagaccattttaaatttcatcattctctgtatagtaattatcattccttttgtctgtaggcaacaacagagtacgggaattacaaagaggaatacgaaggagacatgtattggagaagtgagtgcattgatgggggagatgtcatggtttaatgcaggtgtagagggttggtgttgggataggacttggtgtctgagttggtc

SEQ ID NO: 141326 - DNA, 2291 bp, Arabidopsis thaliana landsberg; identical to SEQ ID NO: 65656

SEQ ID NO: 141327 - DNA, 1001 bp, Arabidopsis thaliana landsberg
atgagtattattgaaattaaaaaaaaaaaatcattacgaaatttcagggcacaagttgtgggatggccaccggtacgatctttccgcaagaacgtcatgtccggccaaaaaccgaccaccggagatgccaccgaaggaaacgataagacttctggcagcagtggagccacctcatccgcctccgcatgtgccaccgtggcttatgtgaaggttagcatggacggtgcaccgtacctacggaaaattgacttgaaactctacaaaacttaccaagatctctccaacgccttaagcaaaatgtttagctcttttaccataggtaaataaaaattgacaatatatctatctactaaaacatgatcctttttatcatatattgtttgaaatttgaaattttatttttcaggcaactatggaccacaaggaatgaaagatttcatgaatgagagtaaattgatcgatcttctaaacggatcagattatgttccaacatatgaagataaagatggcgactggatgcttgtaggagacgtaccgtgggagtgagtatttttatatctttaaatttatatatgaattattattataaatacgtctatacaaaatatttatttacatgttgtttggactattttaggatgtttgttgattcatgcaaacgtatacgaataatgaagggatcagaagcaatcgggcttggttagtattgtttaatccaaaactggtggtgtaaaattatactatgaatctttgctaatactaattttctatatattgcagctccaagggcattagaaaagtgcaagaacagaagttgagttctcgacgacatttcgtgttcttacctaaaaaaggaagaaagcctgtttcgatcggttggatatctcgaaccgagaaagctaaaccggctcgaaactattgttccgagcaaggagtttgcttataatattaattaataataatattaatattgtggtgtattacattttaaaaaattaaat

SEQ ID NO: 141328 - DNA, 880 bp, Arabidopsis thaliana landsberg
ttccagttttgcatggctagaacttgtcagccacagaagcttcatgcccaaactacttacagtaaatggccagaagggttggccatatgttcagcgcctgctggtggacttgcttcagtttcttgagccatttttaagaaatgctgaactcggaggaccggtttgtgcctttttctcttctgtaattgttttgcattggacactaaaggatatagtcgatggtaacttaaagcggtctcttttttggtgtgtttattaattgcgtaggttcatttcctatacaaagggacattgagagtattactggttctgcttcatgatttcccagagttcctatgtgattatcattttactttctgtgaatgtgattccttcaagttgcatacaaatgcggaatattatcctcagttcttttccacggaacatgaggcttcctgatccttctaccccaaatttaaaggtacgagatgatagtggagattccagcatgttcaacatattttaaagaaaatatattccttgtaggctgaattatcgtgttcattgcagattgatttgttacctgagatagtagaagctccctgtatcctttctgaggttgatgctgcgctaaaggcaaagcaaatgaagaatgacgtggatgagtatcttacggtaatgggaacacctgattcttcaatttacttatattcactttggtattcttgagattatatcaagagatactcatataatttttctgcagtcgaggcagcaaaattcaactttcctaagtgagttgaagacaaagttacttctatcgtccagcgaggctagttcagctggaacccgttacagtgtaccattgatcaactcgcttgtgctatatactggaatgcag

SEQ ID NO: 141329 - DNA, 684 bp, Arabidopsis thaliana landsberg
tttaacgggacaaactttgtcgactgcttggagaaattctttgttgatcctcaaacagaaggtaaggttttcaaactggagttatctagccatatcttaattctgtttcaccgttttccaattttatttttcctctagatagattaactttaaagatcatttagtagaagaatgaccacatacttacctaatctctttaggttatgaaattcttgttttagaaggcttcgattcctctcttttcttagtttagttggtagctaaaatttaaaaactaagaaacaactggctgattcaggtatcgttctcattggagaaatcggaggcactgcagaagaagatgctgcagcattgataaaggtaataataccactgagaatctctttcatcttggtccatctctctctattctcattcttaaaagtaaaattcaaattttgggttttggtgaatataaacaggcaagtggtactgagaagcctgttgttgcttttattgctggacttactgcaccaccgggtcgtcgaatgggtcatgccggaggtattttcataagctatctgaagcctaaaccggatttaatatttttggtctgttgctctcactcactcctctggtttttgtttgttgcagccattgtttccggtggtaaaggtacggctcaggacaaaattaagagtttga

SEQ ID NO: 141330 - DNA, 1179 bp, Arabidopsis thaliana landsberg
atgcgtcatccatttatcgtggaatacaaagactcttgggtggaaaaggtaaggcataccttatgacttgaacaaaagtatatatcattccacaccttttgagctaataaggattttgtattctttctcttaggcttgctatgtgtgcattgtcataggttattgtgaaggaggagacatgttagttttctgtggttcagcttttttttttacgtagattctgtcattttggcttcactatatagatggtgacgcagcctcatattcttcttatgttacagggcacaagctatcaagaaatccaatggtgtgcattttcaggaagaggtgtgcatttcttttctcagtgcttttttcatgaactttgatttggtatagttatcatcctattttgtgcctttttctttcagaaactgtgcaagtggcttgttcagctcctgatgggccttgagtacttacattctaaccatattcttcatcgtgatgtcaaggtatcaatcatgttgctgactagacaatccaaagcttaaagatgatacttcctatatgctaatgttttgtatttttgtccagtgttctaacatattcttgaccaaagagcaagatatacgccttggtgagcttatctttctgttttcttgtcgactcttcttctgaaagaatagaatatcaacctgattatttgccgttacaggtgattttgggttagccaagattctaacatccgacgatctcacatcctctgtgagttttatagttactctatcatatgagtgcatatctaccatgcaccgtgtttcctttaagtcttttctaagattatttgtcctatgaatgtcaggttgtcgggactcccagctatatgtgccctgagcttttagctgatataccttatggttccaaatctgacatttggtctttaggtacgtttttattgcatgtagtagtggattgttaagttcccttatttgctacataaggaagcagtaatctatctcttgaattactaaagtttcaagcataagcctgaaaagattactgcaatttagttttcatgaggtttctaagaagtcttcataaaccataaggaagactgaagagagttctcaagtcttgtgttctttttgttactagatcattctaagttgtctagtgtgaattggatcgtagcgtgagggc

SEQ ID NO: 141331 - DNA, 1565 bp, Arabidopsis thaliana landsberg
tcataacttgactttccaaatcagcagcaccgagaacaagccggcaaatcttctatataagacaaccaaagacaaaacaatttatctcatcaaaaattcaaacatcatatattataaaacaatctcaatactaatggctactaccaagctcgtctacattctcctcatcctattcaccttcaccgtatctccggcgatctcaacggccccggaacattgtgatagcggctttgataacccgtgcatcaacaaagctaaggctttaccactcaaaatcgtagccattgttgccatacttacaacaagcttgataggcgtgacctctcctcttttcagccgttacatttcgttcctccgtcccgatggcaatggtttcatgatcgtcaaatgtttttcttctggaatcatccttggaaccggtttcatgcacgtcttgcctgactctttcgagatgttgtcatcgaaatgtcttagtgataatccgtggcataagttcccttttgcgggttttgtcgctatgatgtccggtctagtcactctagccattgactccattaccaccagcctttataccggtaagaactcagtcggaccagtgcctgatgaagagtatggcattgatcaagagaaagcgattcacatggtaggccacaatcatagtcacggtcatggtgtagtgctagcaactaaagatgatggacagcttttgcgctaccaagtcattgccatggttagtacatatgaaaatactacaaaacggtcttgagttcaaatcataaattaatatgtataaccatactcaagctatttttgaataccatgaataggtattggaggttggcattttatttcattctgtggtcattggactatctctaggagcaactaatgattcatgtaccattaaaggactcatcatagctctttgcttccatcacttgttcgaaggcataggtcttggtggctgcatcctccaggtacgaatatacattcatactatatagtttatgtctcttatatcaattagaaatttacgttcatatgtatataatttatgttaacaggcagattttacaaatgtgaagaagttcttgatggcattctttttcactggaacaacaccttgtggtatctttcttggaatcgcattgtcgagtatctatagagataacagtccaaccgcgttgattacgattggactgttaaatgcttgctcggccggaatgctcatctacatggccctcgtcgaccttctagctaccgagttcatggggtcaatgctccaaggtagcatcaaacttcagatcaagtgcttcacggcggctttgcttggctgcgccgtaatgtcggtcgtcgccgtgtgggcttaaacactctttcaacataatcaataaattatttgatttattattcaaggcgacaaatactttcgcctttgtatatttgagtttttgtttttaagtttgattcatttattagtttgtatagtgcatgtaagcgtttgaaagaaatttctttttatgacattgtaaatttatttttatgaatgcgatgtttactttctt

SEQ ID NO: 141332 - DNA, 2128 bp, Arabidopsis thaliana landsberg
cgactgtgagagtttgtttcgcgaacattctctgagtttctctcgacgcgacggcgattgcgaatgtcttctccttctgattctcgtctctctgtgtctccggtaatttctctcaattttctctctctgttggattcttttagcttgttttggatttgttaccgattctactccgtgacttggcctttctcagtgctattagtgaacagagataaactttagggtttgaacttttttttttggatgaatgatttgaatcctttttaacgttagagttgttctttgttaatggaagctatcattgttactttggtttactctaaagcttcttgttcgacgatttttcctctgcaactagaaatggttgtgtttatgtcaaaacttgaaaccatgtttatggttttcgctagttaggtcttgtttttgtttttccttttgccttatctgcttgattctactggatttctgaatgtgttcttctgctggattctacttgaaaccagggataagtaatcgaagatgaatatgattcagcgattcatgcaatctatggcaaagacgcgtggcctctgtcatccagattgcgtaaaagcaagtagtgagcaagaagattacggtaaatgaatcaaatcttgttctagagaacattactttattcgcatcgttaagagatactgtgattgattttagctgatagtagtttactccctttttaatatagtctaatcctttgaaagagtcatatgaattgactacaacattttcattttttttttgtcttgcagatgcgtctcaacatgcagctatggtagcagtgaatctgattagctctgcacggcttatcctcaaactcgacactgtgtatactgagtactcagctcagtatttggtggataatgctgggaaggaagacgaccagggagaaatggatgaaccaagctctcagttcactatcgagcacttgcatcagtatatggtggaaaatgtctggaataaggaggtaagatgtgcagggagaaagggagcaaccactcactgtcaaagtctgccttgaatgtgctttcaagaaagggctaccgagaagtgagcagtgggcacatgtgggatgtccgttcaaggctccaccatttgcctgtcagattcctcgcgtgcccatgaaagaaaaagtgattgagactaagagtttggatgaagcgtttaagctgttgattagacaaccggtgggagcaagactccatgtcttcagtccagagcttgataatgttggagaggtaatgtgttgttagataaatttcgaattttcagagatcaatgacaaagttttgatctaatcttgttcaacttttttgtttgtgtggtagggattttacgagggcctgtctagccagtctagtaaggaatcacgctatgttggacttagggatgtaatcatagttgcagtggataagtccgagggaaaaactgttgctactgtgaagatctgttacaagaagaagacttcatttgtcaaagtgcttgtgagccgtatgtttgtccagcttggtggtggtgaggagtctcaggtgaaagagacagcaggtctgcttgttgacttctgtatcccacgcttatctgtcaactaaacaagagctgagatcttatctgctagttgtggaacctctctatgttggtcttattttaagaatgtttaacagacttattttctgttatcttgaaaaccgtatgcttgttgtgaaaccctggttgttgtttgaagttaagattgttttatgagacttttatctgtgtgtttagaagttattggtcgcgctactttctaaattatgtagtatccatctgcgtaaatgtgacgccaattgggcattacgcattctcccaaaatccaagtcatgatgaagctttttttcgttgaaaaactttctgcgattagcattaacaccattgtgtctcacacataacgtgacagtcacatttgaatattgtaacctcttgaacaactctttcctcgagggaaaaggttgacctaactcgagctaaataatgtttgatctatcttctttccggatcatcttccctgtagcgcagaagttacagagatgaaggcatcttcaggacaagggatcgttaa

SEQ ID NO: 141333 - DNA, 1268 bp, Arabidopsis thaliana landsberg
atggctaaagtatacagtgtgggtcaatttgtgaaactcaaagccaatgttgtcatcccgagattcaaatggatgcgtaaaggtagaggtatttgggcaactggcaggatctctcaggttctaccaaacggttgccttgaagtggacttccctggaatgttaccttttggagaggaacatggaagctatcttgcagatccggctgaagtagagattgtgaatttcaatacatgtcaaggagctgtggaaaaatatcaacatctggaggattttcattgggctgtgagacctttgcttattgctatgggtctattgacagcgatgaagttagggatctgtgtcaggaagaaaataggaaggtcaaaggatgggaaacaacgcgatggctcgactggacaaggtgactgtaagattccggatggtaagggctctgacaaatctaaatggcttgtgttcttttaggtctgctatgagacacagaccttgtctggtccatatattatactgttctagtcataataacgtttcatgtacataatgacgtttttttttttttgctctttaaaattaccaaaaagctttcacgcaccaagtgttacttgcaatttgcttagacaacgacttcttacaaagttaagtatataattacgatagccatgtaattggagatcacagatgtttttatatttattgattaagagagcaaaaaaaaaagaggcagtgttgcatttggctaattccgtgtgagatcaatgaactattcaaattctacttattgaagaacacatttaatctcggagcctacttgaacgactctcttaaaacatcacatggtatatgcagcgtccattacaagtaataatgaacataaccaaaccaaaagaggcaagcttgcatgattttgatgtccatggcatttcctcaacttaaagcaagaggagaagacccattattgaacagtcaacaagagcacagagaacccaaattcgaactacaagtagggaacaagggagttagcaaagatacagataaccttcattaatcttaaaaagtatcagcttgagaacataggccacaatgagaatgaagagagggactaaagaggccccatgctctgtctggtgtcaacgctacatggtccaggacaagtatggacttccccaccccccggagacagaaaaccagcgtgtaattctgatcaggaaactgaatccagaaaggtgttcctccttcaggcatttggaccacagaacggcatgagctactag

SEQ ID NO: 141334 - DNA, 1460 bp, Arabidopsis thaliana landsberg
tcatcagtcgtttacgttggttcatcatccaaatccagaaacttttcaatctaaatccaaaggttcgattacatctttctcaatcgattcaagaggcaccaagaaatcaatgaagacgttattaatcccagaaccagaaccaacttcccctgaagttatagaaagttctgtgtcctctgtttcagctgaatccgagacaccaatttcgattatacgtaagaagaaacaatcagagccaaggttttactctagcccaaccaacacgttttacacagaagcaaaacaaagctttaccaacacagaattcagtgaatgtgcaagcataagcactattggtataggtggtattgatttggagaagaaccctgtcctgatatacagaggaagtatagggagtaatgttagtgatgagagtagctcaagtggtctgagtaatgcagcttcgaagccacataaagataataacgataagcgttgggttgcgattcagaaggttcgttctcgggttggttcgtcgcttgaggctaaagatttcaagctgattaagaagttaggaggaggtgatattggtaatgtttacttagctgagttgattggaactggagtgagttttgctgtgaaagttatggagaaagctgctattgcagcgaggaagaagcttgttagagctcagactgagaaagagatacttcaatcgttagatcatcctttcttgcctacgctttactcacatttcgaaacagagatgaattcttgtttggttatggagttttgtcctggtggtgatttacattctcttagacaaaaacagcgtggaaagtacttccctgagcaagctgctaggtaaaaattcgagactttacggttaatgttttcgttattagctgaaagttttgatctttttgctgtcttgtttgtagattttatgttgctgaagttcttcttgctatggagtatctacatatgcttgggatcatatacagagaccttaagcctgagaatgttttagttcgtgaagatggacatataatgctatctgatttcgacctctctttgagatgtgcagtctctccaacgttggttcggttcgcagcaatcacgcttgagtccaaaagctcaagctactgtatccaaccaacatgtgtagaccaatcgagctgcattgttcagcctgactgcatccagccagtgtgtttcactcctcggttcttgtctaaaggaaagcacaggaagaagtcgaacgatatgagccgccaaatcagaccgcttcctgagctgatagctgaaccgactagcgcaaggtcaatgtcgtttgttggtacacacgagtacctagcaccagagattatcaaaggagaaggtcatggaagcgcggttgactggtggacattcgggatattcctctatgagcttctatttgggataacaccgtttagaggaggcgattacagagcgacact

SEQ ID NO: 141335 - DNA, 1245 bp, Arabidopsis thaliana landsberg
tttttgcaggtgaatttgtttgatagaatcaagaacaaacctttaaaatggcgcatctactttcagcttcatgcccttcagttatctcacttagcagcagcagcaagaattcagttaagccgtttgtttcagggcagaccttcttcaatgctcagcttttttcaagatcttctctcaaaggacttctcttccaagagaagaaaccgagaaaaagctgcgttttcagagcaactgctgtacctataacccaacaagcaccacccgaaacatctaccaataactcatcctctaaaccaaagcgtgttatggtcattggtggagatggttattgcggttgggctactgctctccacttgtccaagaagaattacgaagtttgcattgttgacaaccttgtaagacgtcttttcgaccaccagcttggacttgagtcattgactcctattgcctccattcatgaccgaatcagccgatggaaggctttgacagggaaatcaattgagttgtacgttggtgatatctgtgatttcgaattcttagctgagtctttcaagtcttttgagccggattcagttgtccactttggggaacagagatccgctccttactcgatgattgaccggtccagagcagtttatacacagcacaacaatgtgattgggactctcaacgttctctttgctataaaagagtttggagaggagtgtcatcttgtaaaacttgggacgatgggtgagtatggaactccaaatattgacatcgaggaaggttatataaccataacccacaacggtagaactgacactttgccataccccaagcaagctagctccttttatcatcttagcaaagttcatgattcgcacaacattgcttttacttgcaaggcttggggtattagagccactgatctcaaccaaggagttgtttatggagtgaagactgatgagacagagatgcatgaggaactccgtaaccgactggattacgatgctgtgtttggtacagcacttaaccggttctgtgtgcaagctgctgttggtcacccacttacagtttatggtaaaggtggtcaggtaaatgactttcttgatctgttttcacgtgaaatttcaatcgaaaaatttgaggttttgattgaagtttttccctttgcagacgagaggctacctcgatataagagacacggttcaatgtgttgagatcgctatagcaaacccggcaaaagctggtgagttccgggtc

SEQ ID NO: 141336 - DNA, 723 bp, Arabidopsis thaliana landsberg
tagacatcaaacggagacgtgttcgagaaaacacacgacgagttagacatagagtttctagggaacataaaaggaaagccgtggaggtttcagacaaatctatacggaaatggaagtacacatagaggtcgtgaagagagatatcgtctctggtttgatccttctaaggagtttcatcgttatagcattctctggactcctcacaagatcatgtaagcttttttcaataccatcatttctttttactttttccggtttagctttttcaatagcgttgaccaaacccggtttgtcaatatattaaatttggtgggacgatgaaagaatgtttgtctttcaccgaacgttcttcttcactttttcggtttttcctaagatagttaataaatattcgatttttggtttctaatatacagttttctaatcactttttcattatttttttaaaaatttgatttaattttttaaaaaaatcgataaggggtcagctttttcaaaacaattaattcgtcattattgttaaacaccagcttagagttatctttttttgacgcgtaatcacgtattaataagcctcagttgtcacgcgtcttaatttaaagccaaaattaactgttgaaaattttgattttctattgaccttcgttttttaaattaaagatggagaaacgttaatcatatatctttgaaaaatagaaaaatagtatatgagttagactttaa

SEQ ID NO: 141337 - DNA, 3098 bp, Arabidopsis thaliana landsberg
agtgaatccataagagaagacaacaaaagatctatctctataccacatattacactttttctccaatggcttctctgaagctttcaccttcttctccaatctccatttctaaggttggtgtgattccttcctctaagaaaggactttcatttcttgtaaaagcagagcaccattcctcgtcttcttcttctcatcttcaaggtttgtcttttcttacgtgtttccgattcaaattactctctatattctgcttctctgaggaaaaaacgaatctttcttcaaacccttttataaagtttgtgtttttatttcgtttttttcagataaatgtcagagacgtctgattgtaacatttggtgttgttgctccttggatctcattgcttagtagagctccattatcatgtaagtaccctttttgtttgtcactaattttgcaatttttgtgtgtaattttgaaatgtttgatatggctcagttgctgcagaaagcaaaaaaggattccttgctgtctctgacaataaagatgcttatgcgtttctctatccatttggttggcaggtatcaattttgtgatcttctttgcccactttttaacaattacaatgtcttgtctcattgttttgaatgtgtgtttaggaagttgtgattgaaggtcaagataaggtatacaaagatgtgattgagcctttagaaagtgttagtgtgaatttggtcccaactagcaaacagactattaaagaatttggccctcccaagcaggtaatgttcttctcttttgtttggttgttgtttttcactctctttaatgattgaacttggtttggttacagatagctgaaacactgataaagaaagttttggcacctccaaatcagaaaacaacccttattgatgcatcagaggtttgctccttttgatagcttttttcgactaattgagtggaggctcttgaatgtaataataagagagagagagagggtggttttgattgtttggtttttgtttcgagtgctgcagcatgatgtcgatgggaagacttattatcagtttgagttcactgttcaagctagaaactacactcgccatgctctgggtaccatcacggttttcaacggtatatacatccccatgaattctcacattcatatctaatacacactgactgcagtatccaatgctcatcgagaaatggcgttttgctgtgcaggaaacttctacacactgacgacgggagcgaatgaaaggaggtgggagaagatgaaagataggcttcacactgtggtagattccttcaagatcactgtttgaaaatactgtaatcaagtttgctttggttgtctcttgttttgcccatttcttgtatttttgtccattcttcttctctctttcccttaacaatattcttttcctgtaagagagattcaataactcttgacttgcctccttacctctctctctgcttttaacctaacttcatcttgtttggtcaatttgatctctagtcatagttttgtagcttcagctactaaccagaaagggcttataaagtgtcatgttacagctacgagaaagtcagtaatcgaaatgctctgtcaagaattagctcaccagtaatatataaaaaatatgcaaactcgaagtcgctgtgtccgttagcagaaccagctcttgtgttacggtaggtgacggcacagtacactgcaacggcaacacaaattattataaaaaatctcaccaaaattattggaaaataattaaaagaaaaaaaaggcggaagaaaattatttcttcttctacgattcttcttcttcttcttcctctctacaaacttagcaacagatccagctaattttagaagaagaaaaaaacaaaatcaaaatccctaaaaatctgaaaatctagggttttcaacacagaaggtgttttgtgtggtgctcctccgaagatgatgatctctagaggtttattcggatggtctccgcctcatatgcaaccattaactccagtctctgaagtctccgagccacctgagtctccttctccttatctcgaccctggtgctgagtctggtggtggcacgggcacggcggcggcgctagcggaggctgatgaagagatggatgatcaagatgagcttgaaccacctcctgctgctgttcctttctctcagctcttcgcttgcgctgaccgctttgattgggtgcttatgattgttggctctgttgctgctgctgctcatggtactgcgcttattgtctacttgcattacttcgccaagattgttgatgttcttgctttctctaatgattctagtcagcagagatctgaacaccagtttgaccgactcgtccaggttagtgaaacttctgacaactcatgattttgctcggaattggcatttctggttttgtactccaatcatgtgttcctcttttaagttacttatgctctcatttttgtgcagctttcgttgacgatcgtgtacattgctggaggtgttttcatttctggttggattggtaagtttgtttttcgcttattgtatgcatcttttttccacaactgaaatgatgatgcttaacagttactaaatgtttctgataatagaggtgtcttgctggatactgactggagaaaggcagactgctgtgatcaggtccaagtatgtccaagtattattgaatcaagatatgagtttctttgatacatatggtaataatggagatattgtgagccaagtgctgagcgatgtcttactcattcagtcagctttaagcgagaaagtatgttcgtccaactccatttctagttttatcattcatatctttctttgtaactgtgagtattacttggttcttatttctctaatcttcttcctgatcctggactttgcaggttggaaattatattcataacatggctacgtttatcagtggacttgttattggatttgtcaactgctgggaaattgcattgattacactagccactggtcctttcatcgttgctgctggaggcatatcaaatatttttctacacagacttgctgagaacatacaggatgcatatgctgaagcagccggcattgctgaacag

SEQ ID NO: 141338 - DNA, 5076 bp, Arabidopsis thaliana landsberg
tctttagttgcagctctacgcagcacatctaaagcttttttgttcttttaccaattctaaaaatctcaaagaagagatcgattccagatacaagagctgcataagattcattcaaagttgtcaaaattacagtaccatttttttacggaggaatgacaagttatgagagtgctttttttatatcttttcgggtaaacattgtaacgtagtgaaagttgagagtgaattgcctaacaaccgatagaatcaaccaaaaagaaaaaaagaacatcttttctaaaaaccaaaaaaaaacctaggggttttctatttattaggtgtatattgtcttttctagtactaaaacaataatggctaagtctcatcctcacacgcaagagattaaggttgagaatatattgtattgttgttagcataaacaaaaatggatgaaaccaatttctaccaaattcattttttttttagccatttagagtacattggaaaacaagtatttcaactaaattactctaagacaattctttctatcttttataagctgaaatttggaccacttttcttttctgttctttgtggataataaaaccaaacttcactgaattatagcttcaattcacattgcactgaatttttagattgatctcaaaataaatttttttttctaaatattgtcgtttatcgaatacaattaattaaagggtaaattgattaagttgctttgctttgtatataaaaccaccatcgctccatcctctttcatcagttaagataatatatattcagtaattaagagagaagaaataaacacaaaaatgttggttaaagttttctcttttttcatccttatgataacaatggtggttattggtgttagcaaagaatattgtgatgacaaacagtcatgtcaaaactttttgttggagcttaaggcgggttcatcgtcactctcggagattagacgtcgtgacttattgatcatcgttttgaagaattccgtacggaggatcgacatggttatgattggtgtgatggatgatacaaaacaacatgaggagatggagaatgatttgcttggtgtgaaggaggacacaaaactatttgaggagatgatggagtcggcaaaagataggatgatccgttcggtggaggaactcttaggaggagaatttcctaatcgtggatcttacgagaacgttcacacttggctcaatagcgttcttactagttacatcacatgtatcgacgaaattggtgaaggtgcctataaacgccgtgtcgagccaaagcttgaagacctcatttctagggcaagagtagctttggctctttttatctccatttcaccgagagacaacaccgaacttatctcggtgattcccaatggcccttcttggttattccatgttgacaagaaagatctatatctcaatgctgaggtaataaaacggaacctttatattttgaagttataatttgataatcgtgaaaacccatattaaggatttacttgatactcaagtaacaaatatttaggattttatattaccttttattgtaattacttttaggtagataattccttttccttagagatcagcccttgtataaaaatagaccttaaggtcacgtaatgaagaacacaattcgatcgatatttttgaccctcttaacaaaccttttatccttttttttctttctttctactgctctaaagaagattgctgatgttgtggtcgcgaaggatgggaccggaaagtacagcacagtgaatgcggccattgcagcggcacctcaacacagccaaaagagattcatcatctatataaagacaggcatttatgatgaaatcgtcgtcattgagaatacaaaacccaatttaactcttataggtgatggtcaagatttaaccatcatcacatgcaatttaagcgctagtaatgttagaagaacgtacaacaccgcaactgttggtaagaatttgtattctcttcttgaatagtttatagttttctcttctttataccaaactataacattcttaaagacattactaattattctaaaaatatgtttgaagcttctaatggtaatggattcatcggagtagacatgtgctttcgaaacacggccggaccggcaaaaggaccagttgttgccctccgtgtgagtggtgatatgtccgtcatttgtagatgccgtgtcgagggatatcaggatgccttgtatcctcatagtgaccgccagttttatagggagtgctttattaccggcactgtagattttatatgtggaaacgcggtggcggtctttcaattctgccagattgtagcaagacagcctaagatggggcagagcaatgtcataaccgctcaatcacgcgcgactaaggacgtcaaatcgggcttctcaattcaaaactgcaacatcacagcaagttcggatctagatacagcaacagtaaaaacgtatcttggaagaccttggaggagattttcaacagtcgcggttctgcaatctttcatcggtgatttagttgatcccgcagtctggactccttggaaaggagaaactggtctatcaactctccactaccgcgaatatcaaaataggggtccgggagctgtgactagcagaagggtgaagtggtcaggatttaaagttatgaaagatcctaaagaggctacagaattcactgtagccaagctcttagatggagaaacttggttgaaagaaagtcgaattccatatgaaagtggattgtaataatgttgttccatgcttcacatgtataacgtataaaataaaagatattattcttctataattttttccatgattttctacaaagatggtaagaaagtgatatcagggaaatatcacgaagggatttactatcttgaaggcacggttgttaaggctgaaaagagtgtaccacatgctgaaaatggtggaaaaagtgttgtcaaggctgtagttggagtgaggaagaagaagtcaaggaaggtgactttcaacgtgaatttaatttaaggacctactccatatggctttggaacaaaggaatcatcagttcaaggtggagatgaatcctcaacagaagaatcagattgtttagaggaggttaaatctgcaaaaagtgaaggaccttctgatgaccagccactgttgagagatcacaacaaggagtggatgttgtgtgatagtaaaatgaaggatgaaaggattacgatgccagaaagtatcattaagaaaggggactcgttaaagttgaaatgaaagagttggaaaaagcttcaaggattcagggaatggaggttaacagagataaagctaagggagttctagctctgttacaagaaagtcaggaaaaggaagctaaaactttcaaaatgaatgaagctacagtagttggtaccaactacatctcatttcagattaatgagcttaactacagaagggaaggaatcgggaaccgaacttatggacacaagatttcagatcatcacagatttggtatccaaaggagaggctgtcctaaacaagatactaaaaacaattgatccaacagatgttatgactcaagtaatacctggaaaggactttcatgcctgctatgatctcctcaacatcgtccaggtaactccactatcgatattgtacgctggaaggaagaagaacagagaaacaagtcagctttgggaaaaattgttatgtcgatatgaagacttcataagggtaaatggagttacctgtaggcgcctggaaatacggtgaggagacttatattccaggtggagctgttgggaaaattaaagaaaagtcaggttagttcttggatttgaaagtattgagtcaagagtgggtgatgtaagaaaagagaagctgcttacatgtggagaatcagttgacctgagctgcagattctgattccatgtggagtttctgttatgaagattcaagaaatccgagttaggagctgctgtgagagtaaacatgaaattcaaagttagaaatattatgtagtctatgaaaatcgaaagagacctaatgaaggaagatgattcaggttaagaagagttaccggagttcatcttaacagatgaaaggcttcgttgttcattggagaaacagtcctagtgtttgtgacttgatcttgcaagatagatttgaaaaaagtactgggaagaagctacctcggaatattttggagccgtgttagaaagtgataggttccaggtggagtagctcatgaaagtttcagcgagaaacaaaaaaaaaaggagggattaagggttctcgggcaaaacccagaaattgagatggagcagctacagcctaaaggcaatagaaattggggaataaaagtgctcacctttggatttctagaagtgacagtggaagatggagatcgtcggaagaaacctaccgtagtatcaaaattgaagtttgtcaactttcaaaaattttgaattctcagaagatcttaatctctaagtgtgaagaagagacaagagagagattagatgtacctgagatttgcagatgatcaatggccggattcgccggaaaagcctcatcggagaagaggtggagctcaccaatggagactgaaattgaatttgaagtgtctcacaatttcagaagagatactctctaatcatcacaacaacgagaaaatgagagattggagagtaccatgagttgagcggtgatggtggcggtccgattcggcggagttaattgatggtgaagatgactgtgatgttgtgatgtgtcacggacaagaggcatgtatgagagacgaagagaagtctgttgtttcactagaacggggagcaaccaagaaaaggtgaaggtttgcagttgctttcgccggaggtggccatcaaagtagtcggaatctgagtttgattttgtcatcgaaaggcaagctccatcttctccatgtcgagaacaagagagcgcggtgcagaaaggaggagacgatggctgacgggaacaaagtcgtatgttcgccggaggaggttggaatccggcaatggtgtttatttcacgagatgagaaagagatgacgtt

SEQ ID NO: 141339 - DNA, 1698 bp, Arabidopsis thaliana landsberg
gttcataagcctcgtcccattttctttgagactttgactatcacccaaatacaaatcttcatgcagtcgtacagccgtctgatgcagttcaaggtcaaagatctgatgatcgacaagcggcggctggtcgaagttcctgataatgccactctaggggacgccttgaacactatggtaaaccacggctaaataattgttatttttttggttggagtcaaccgttttaagtatcaagaattactaacaagactattcttggtatcaaaccggtggcaaaccgagttagagctgtaccggtggctgccaaaccaggccaatggctgggagccgggggatcaatgatagtagagttggacaaacagagcggaagtgcaagaaaacagtacataggaatggtgaccatgctagacgttgtggctcacatcgccggcaatgacggcgagagtgggctagataagaaaatggctgcccctgactcttctatcattggtcattgccctgagggtcttagcctctggtctctcaatcctaataccaggttaatagtatagaagatttgtaaaattaaattgctttcagtataattaatccttcccttttataatgttagatgttgtacacttttctcacatagtaagaattcttttgcaacacctaatatatatacccatatttcagtcattaattgtttatagtttcatattttttataattcaaactaaattagaaattagaaattataatgcaaatttttcatagaaaaatgcaaaacatttttctcttgtcaaaaatcttaacattatatatgaacggatagagtactaatcaaagatggtcattgatgaaagcagcatcatggattgtatggagatgttgagtaaaggaatccacagggtattggttccattggacagtaatacagaaaatataacaggacctgagttggtagagtcagcttctgcttacgcaatgctgagtcagatggatctcatctctttcttcttcgaccaatcctctcaattgcatggtatcctctcccacaccgtcactgatctctccgctattcacaacactgttttagccctcactagccaggtaaatttcacaagtcaagaattttcatctttattcattaaatcctaagttaaacgcttgtaatgtttaataccaggctagagtgaaagatgcaatacaatgcatgagtatagcaatgctcaatgcggttcctatcgtcgaagcctctggtgagggagaggatcataaacagctcgtcgacgtaggtgtctttacttatacatgtatctatcagtatctattaagatcaaatgttgattaatttggtgtttgctggtgcaggggaaaaatcggagagtggtggggacattctcggctagtgatctgaagggatgtcatttagccacattgcgttcgtggttgccgctaaatgcactagagttcgtcgagaaaatcccaagaactctcttgttcaccgctgctacctcaacaccagggagggagctcgtgacgtgtcacgtgacatcaaccttggcccaggtgatccatatggtcaccacgaaacgtgtacacagagtttgggtcgtggaccagaacggtgggctacaaggccttgtttctcttactgacatcatcgctgtggtccgatccgctttgctttccggagctccggatctgttttaa

SEQ ID NO: 141340 - DNA, 1755 bp, Arabidopsis thaliana landsberg
ttcttcttcttcttcttcttcttcgatcatcatggccagtatcaaggttcacggagttcccatgtccaccgccacaatgcgcgtcctcgctactctttacgagaaagatctccagttcgagctcatccccgtcgatatgagagccggtgcccacaagcaagaggcccaccttgccctcaacgtaacccctttctccctctctctctttacgaacaaacaaaactgaaaacactttatgtttggtttttccaattatctgacaatgatctttgttttgtttcagcccttcggtcaaattcctgctctcgaggacggtgatttgacgcttttcggtcagtttatttttgctttgatcaatgatttgacttttttagatttacagaaacatcattacgccttagtcactttgtattggataacgatttatctgaaatgacagactgtgatgattatttttgttgctgaaagtttttgttggtaatatatttgcagagtcaagagccatcacacagtacctagcagaggaatacagtgagaaaggtgaaaagcttatctcccaagactgcaagaaagtcaaggcaaccactaacgtatggcttcaagttgaaggtcaacagtttgaccctaacgcctctaagcttgccttcgagcgtgtctttaaaggcatgttcggcatgaccactgaccctgccgctgtccaagagctcgaaggtaagctccagaaagtcttggatgtctacgaggctaggctcgccaaatctgagttcttggctggtgattccttcactcttgctgatcttcaccacctcccagccatccattacttgttgggtactgactccaaggtgctctttgactctcgccctaaggttagcgagtggattaagaagatctctgccaggcctgcttgggctaaggttattgacctccagaagcagtagtgaccctctctctttcttcacttcttttcttttccttttgcccaaataaacgagtccagtgattttcttttcttggcttatgtacttgtgttttcagtattatttatgtcatcatcatcctcctcttttgtgttattgttgggttcattcacatttgtgcaattaaaaaccagagtttaaacgccaaatttgcaaaaccgttacattttaccaatgaagaggttaaatgtcacgaaccaatattgactaaaggactccaataatccaataactgttaagctgagaataaccttaattatatggctttgttcaagagccggactttaaactcaatcggtttcaaccgaagataagttgcttgctctgcaattgcatgacgccttgggaaccaagataagtggttatgcccttaagaaaaccagagcaccaatgagctgagagtttgggagatctcttgcgatgaggatcatgactcagtacattcctaaactattctcgtatccactgagttactcgtacaaatccataaatgaccatacaaagtagcctctcgtgtgaaaatagtgataacaattaaaaatgaaaaaatgcgcatccagggaatcgaaccctggtcagtaccgtgggagggtactatgataccactacaccagatgcgctttttattatgctgacaagttttttattattaactctaacatttgttctgccgggaaagtttcctgatgatagtaagaaacagagcaactcgaaagagaagacaatggcgcgaggaggatttgaagataacgaaaccagagaaagcctgcactga

SEQ ID NO: 141341 - DNA, 1287 bp, Arabidopsis thaliana landsberg
aaaagagtctcccgcagcgatcaagaagagatcatagagcttatttccagaatggatagaccttgccttcatgctatagttctcgggtaagagaacttaaatctcattcttatattttcgatcaagaataaccaaataactgtcctttcttactctgttttccttgatagctttacacatccgtgcactggggaaatagtaaagttttcatgtccaccgccttcagatcttgctgagatagtaggcttgcttcgtagaagcggattataaaaagtaacccaacactctctgcttaataaataacctcatacattggaattctgatttcgttacaaagcttttggttatactgaaacatctaaactcttgttattgccttcttgcaggtaaattaatctctcgacttgcacatcaactgactgtgcagaccacgagacatgtcatctaaacaagggaactcatctttcatactctttcaagcaaccaaaatcatacttctctcaggatgattcttgacgaaacaaaagaggttacagaatccagttttaaaatcaaaagccttgtttatagctctgtggcagtgtatacaaactctacaatgacatgaatgataatttcagaaacgaagtgtgtaagttgtgcaagtgaattacaacactcaaacatcaaacccaaaattctgtaagcacgtttctaaatgatctcgcttcttcttctggcaaccattttacagcaagaatttcaaacaccaaccactttaaactcgatgaatcattctgttgaaacattcatgccctatgatccgtcaaatcagcgttgatcaccacggcgttgtttctcaatcatctctctttgcttctccgcaagcttatctaaagcagacgaaacggcgtcgcttccacctatcagaagccttgtgataacctccggatccgtctcaaatcgcgccgcttcaaactccttcctcgcgttctctctcaacacgtccctccataaatttcccctggaatcaatccacgtgaagaaccgagtcgctcgtaatatgtctctgtacaaactcaacgcttcccggcgcgtgctcgtcagacgccgtctattcagaaactcagcctcatcgtgatcgattattggtttctctttcttcgctagatgtctttcgagaagctcctccacggtatctggaccttcgtgcaggaacagcctcgtcgacacagcgccgctccgattcatcagatctagacgacctgccagatttcgccatttctgaagcttcgcagccatcatctc

SEQ ID NO: 141342 - DNA, 737 bp, Arabidopsis thaliana landsberg
atgagctatgatcaggacaaactgctatcaacccatgaaaatctccatgaaagcaaccagattcagtgtgctggtgtaagtcacgatgggcgcattgtggtcactggagcagaggatggtttagtgtgcgtgtggagagtaagcaaggatggtccacgtggttcacggcgtttacggttagagaaagccctatgtgctcacacagctaaagtcacatgtctacgtgtaagccaaccgtacatgatgattgcaagtgggtcagacgactgtacagtcatcatatgggatctcagttcattgagttttgtgaggcagcttcctgacttcccagttcccatttcagcaatctacataaacgaccttactggggaaattgtaaccgctgctggaactgtccttgcggtttggagcatcaatggcgattgccttgctgtggctaacacatcgcagttaccatctgattcggtattatcagtaacaggctcaacatcttccgactggcttgagacaagctggtatgtaactggtcatcagagtggagcagttaaagtatggcggatgattcattgtactgatccggtgagtgccgagagcaaaacaagtagtagcaacagaacaggagggctgaatttgggtgatcaagtgccagaatacaagttgattctacacaaggtgttgaaattccacaagcaaccagtcaccgcgctccatctcacaagcgacctgaagcagttact

SEQ ID NO: 141343 - DNA, 981 bp, Arabidopsis thaliana landsberg
ccgtcgctaatcgactacgtaattcttaggtcgaacggaaaactccgccgctacgtttactcgaattagatgacttctacttccgctgcgaagatctcaatgtttggtgccaaatctggattcgttatccctaaaaacaaactatctggatcattgatcccaatttttcaacgtggaaacaaaaccctaggaagtgccgattcagacactggacctccgtcgaagctggggaagaaaagaaagactaaatgggctcctgatttgtcacaagatattgcagtcaagaaatgtcgatttttagcttaccaggtattcaaattgtcttccttttaaattgctcaaaattgaaaaatccatgtaagtgattggtgaccaaattttgagcagaaacgcgtggatcaaattacacagcgattggaatctggaactcttgaagtggagactaatagaactgacgtaagttttttttttttcttttttctcttctttatttgtgcttcttttagccatgttaactcattgatagattattattactcaacagctggagtttgaaaaacgcgaagcaattggtaaaattttcctcttttaatctgtacaattcgctttccttcaagtgatatatagtttcttaacttctaggggagatactcgagttgaatccgaggtacaaggctccacctgattataagccattgctgaaagaagctagattgccgatcgatgtaagttctctcatgtgaagtgttaccttacgacctcatttgtttggaagaaagatgctcatgtcatatcttgggagagtattgagtgtaaacgaaaggatagttcacatcttgtttctaagttatgtgataattaagaattttgcagctgatattgtatggacctgagcttttgcaggttaaagaacattctgatttcagctttctaagtctcatatttggttctcaaggtgatactcaaaagcggctcgaaaaa

SEQ ID NO: 141344 - DNA, 1759 bp, Arabidopsis thaliana landsberg
tgtagattgcattacctctctctctctctctctcttcgaaatattcgaagtagagacaaccaatggagacggaaaggaggatcataacgagctgttctgccatgacggctctgttcttgttcatgacggctctaatggcgtcgtcctctatcgcagcaacaccgacacaatcgtttgaagataatttcaacattatgtggtctgaaaatcacttcacgacttccgatgatggagagatctggaatctttccttagataacgacaccggtacgttcaaatccagtttgcttccggtttaggatcaatgccgttctagtctttcgaaattacactgatacttactctgttcctacttaaatctacatgacattttttaacttagtctcttgattattatatcgaaagtttaaatattctgattggataaaaaataaaacaggatgtggatttcagacaaagcacatgtatagattcggatggtttagtatgaagctaaagctcgtcggaggcgactccgccggcgtcgtcaccgcttactacgtgagccgtcgttcttatttaatgtttcaattttgtaaagaagataaccaatgattttgttttgtattaattattttagattaaatttggttgagcagatgtgttcggagaatggggcaggaccggagagagacgagatagatttcgaatttctagggaaccgaaccggacagccttacattataaagaacaaagtgtataagaacggaaccgggaatcgggagatgcgacattccctctggttcgacccgaccaaggattatcacacctactcaattctttggaataaccaccagcttgtgtaagtcctctcttgatcttggctaataattagttggctacatatatagagataccacgaactgtaccgggaattttgggtagaaaccggaaccttaggtttatgatcggttcgaagttagaaccaacattccactcacaataacataattcagtttacagattaatttcacaataggttcaatcctgttttcttacgtttagctttgagaaaacttaaatggtgcagattcaaatttcgaccgacacaaaaattccaatctggtttaaagttcaaaccgaccaaagcaagcctatcttaaccaaactttaaagaactcaaactagaccaactcgaaccgaattggtcaatcaaagctaattttatcgattggtacaatgcataacccggtttaatccaatgcaaaccaggttcttcgtggatagggtaccaattcgagtatacaagaacagtgataaggtaccaaacaacgacttcttcccgaaccagaagccgatgtacttgttctccagcatttggaacgctgacgattgggctacacgtggtggtctggagaagactgactggaaaaaagctccattcgtctcttcttacaaggacttcgccgtcgaaggctgccgttggaaggatccattccctgcatgcgtctctaccacaacagagaattggtgggatcagtacgacgcgtggcatttgtccaagacacagaagatggattatgcgtgggtgcagcgtaatctcgtcgtatacgattattgcaaagacagtgagaggttccctactcttccttgggagtgttccattagcccttgggcttaaaatcaattttgttccgagtccattaaagtggaaatggtttatgtaataattttaatctcttttttttggcatttcttattttgttatggactatagtcc

SEQ ID NO: 141345 - DNA, 2049 bp, Arabidopsis thaliana landsberg
  unsure (1)..(2049): unsure at all n locations
atgaatcccgaagaatcaagaaggagagcctctgctcgagccgtggcaagaggctttgagatgattaatgagaagaatcagtcaaagaatcaggaagctgcgagtcctggttttactcggatgacaggccgagtacaatggccgagtatggccccggagtcctctgtgggtcgttctgccgctgctcaagaggaaatagcaagaggcaagagggtctgggagtccgagccagttgcagaagaagaagtgcctgagatagagaaggaagcatctgaggaagatgtgcaagttgatgaagaggtcccgatagttcctacaagtagaagaaggaacaccatgaggagaaagaaagaacctaccatagaagagcactaccaatatctcatggagctgagttttgaggggacaagatatccccatagacctaccatgcaagctttggggatatgtagagatgttgactacctcatggagatggccaagctggagaccttcttctcctaccagtatgaaggatacaaaactgagagctgccaattcctagccactttgaagctccatttctatgctgaagaaagggagagagagctgcataagggagnnnnnnnnnnnnnnnnnnnnnnnnnnnnnnnnnnatactcggttcccattaggcagttggatgctattttcaagttccccaccaagtatggaatccgccaaaatttcagcaaggacgagctccttgatctatggttgacaatcgccggtccactcccctacaagtcatctagggccaagagttcgttgataaggagcccggtgcttaggtatctccacctttgcattgcaagtgccttcttcccgaagaagacaaccggccatgttaatgagggagagctgaagttgcttgatctcaccttatgcttcattttggggcacacgaggaatgggatagagatggaaggggatagggcggatacatccctttcggtggtgttgattgatcacttgattggttttagggagtatgcagccggaatccaccaatccggctatggaggaagcttatgtgctggaggagtgatcacgcccatcctaatagccgctggagttcctcttcatacccccactcacacagcaacctacatcgatatggagtatttgaagaggaagtgctacttggataggtctgctccagcggatcaactctacttcaagttcaagcactccacgctaggtctctttaggctagcactcccttgcaagaagttcaccaccattaggattgggaacaacattgactttgatcctcctcaatcgatcttagtcaatgtccttgcgcctctacaagcagagccgagcttaggaagtgagtctcaagaagaaggagcagagtggaatgaagaagaagccgagcaggaagcttatactcggccgagtaactttcagcaggccgagtatggccagnnnnnnnnnnnnnnnnnnnnnnnnnnnnnnnnnnnnnnnnnngatgaacaagaagattcgtgcgaagctgcagcggagcagtttttctttgaggattatgctgagtccgatccagagagagatcccggtcaagttcacaagaagttgggaatgctcaaaggtctgggcaagtttcagaggaagttgttcagtgggttgaagaagaaggtgaggaagatgaagagagcaatggatggcatggcggtnnnnnnnnnnnnnnnnnaacgaacccagagatcaccaccacctcgacccgagttcaggagaagtaactcaacgagtgtggcaccgcgaagggacgctcgttttgacccgccaagagcctcaaactacgagctcgggaggagctccactttctcagatcgccgtttcaacagccgcccacccggtccagtgaaccaggttgttctgaacgctgacccaagccgagaagagtactactcgggctacatgctcgacgggtcaaccgagtacaaccccaacaaccccaacacctccacacgtgatcctgagtacacacaagaccgcctggacgagtttgtccagaaccccttcgtttaa

SEQ ID NO: 141346 - DNA, 417 bp, Arabidopsis thaliana landsberg
tctgctattcttggaatgcattcaattgtgcaacgtccaatggttgtgggaggaagcgtagttccgaggccaatgatgtatgtcgcgctgacttacgatcataggctaattgatggaagagaggctgtgtatttcttgcgccgtattaaggatgttgtggaagatcctcagaggcttcttctcgacatatgataaagatccaagacagaagagatcataagtttctgtctttttaccagtttcctttcaggtaaaaccattacggatactgcaatctgcaaatgatgctttgaaaaaagaacgaaactttttttttggagttttcttaatagttttaagagtttttgccgggcgaggaaagcatcggtgtattgagttttcttttattttataatattcatacagtttgaacaaaat

SEQ ID NO: 141347 - DNA, 1133 bp, Arabidopsis thaliana landsberg
atgctcgatgagattatcgattatgtcaagttcttacagctccaagtcaaggtgaatctctctctctctctctctcgaattattttataagatatgagaattttaaatttgtttttgttataagagtggaagcttctttacctttgagttgacattagaataagaaatcgaatatgggcctctgcaactaaaattccatatgctccctctcccttttatcttgtaaattatttatcttttgcgtttgttaaaacatagtgttagtgtatatctacctcttcttttgcttaattataatatttggcaaatttatgtatgcaggtactaagcatgagtagactgggcggtgctgcttctgcttcttctcaaatctctgaggtaataatttcaattccttctctcttaaaagggatgataggatgacgtgatcactatatagaatgagattttattttttaaactaattaaaaagagatgtaaattattgaaaaggttttagttagggaataatactaattaaaaagtagttttgttttcgactttctaaaaacaaatgaaaaagttttccaaaaaatagtaaaaaaaacaaaacaaggacagggcacgcgtgcctactttctctccaacaaataccaaaacctcccatttcaacatcatcatagctttagggttttgcttttcttgttttctttttaattttattgaacattttcaggatgccggtggatcccacgaaaacacctcctcctccggcgaggcgaagatgacggagcaccaagttgcaaagctaatggaagaggacatgggatcagccatgcaatatctacaaggcaaaggtctttgcctcatgcccatctcgttagccaccaccatctccaccgccacgtgtccttctcgtagccccttcgttaaagataccggcgttcctttgtctcctaacctatccactacaatagttgctaacggtaatggctcatcgttggtcaccgttaaagacgctccctccgtttccaagccgtgataacggccatttgtccatttcattttcccttttttgggtgggaaagagagaaaaaagtttagaagacaaagacaagtgggataggtggttttggtcaaagtttagaaagaat

SEQ ID NO: 141348 - DNA, 4444 bp, Arabidopsis thaliana landsberg
cgccactggcctgacttttccaacgccgattctatcctcggacccaccagacgaggagcatgaccatcgggaagcggacaggtggtcatgttccacaacaccaacgttttctcgaaatgtttgttcattattcttcgacctaaaagacaccttgaatcctatacgcacagagaagaccaaaaggaaagaacgatggtaactttcgatcagtttttttagggttcatataaatgttgtggagggagagagatacttgcggttggtttctatgggccgatgcgcgtggcccatataataataattacttgtgaattcctttaaacccaagtttaatttgttgcgcgattatcaccccatcacttttagtcatcagatttacgccccactatcgaaaacgcaagtctacaaaacttctttagctgttctctcactcctttcaagtcatcatcgtctatctctactcgcttttcgcgcttcccctctctacgtgacttttgatttcttcatcagatccgccgagtcttctttttctgaaatctattcacgaaccttcacattcaaattacacttgtctattgatcgatctcgcaaaccctaggttctgcgatcgtaaatcaatggcgtcttcacctggtaacactaaccctcacaatcctccgccgttcgatctcggtactatcttcaaaccctcatccaacccttatcctccccctacaggtccgtttcttaacaaccagtacaatcagcaactatacgcgccgcctggtatcgccgcccaaccatctccggtgaatcaaacgcaacaggatgtgtcttcctcttcctccgctactaacttgcaaccacagagaacgctatcttatcccacgccacctctcaatccccaatctccccgtgtcaatcacaatccgggaacgcacatcctcgctctcctcaacaacggaggtgccgtggcgaaccaagagccgtcgcatcacaacgagatcgctcgagcttttcccggcggttcgggtcctattcgtgttccaagcggtaaaatgcccaagggaaggcgattggtttttgaacatgcggtgtatgatgttgatgtgagattacagggagagattcaaccgcagctggaggtgactccgattaccaagtacggctcggatcctcagcttgtactcggtaggcatattgctgtgaataaggtctacatttgctatggattgaaaggaggaagcattcgtgttctcaatatcaacacagcattgaggtctctgttccgtggccattctcaggttcgttgtttctcagttacttattcgagtatccatcaggtatcatcgtcattctaactacatgtttgtctccagagagtaacggacatggctttctttgccgaagatgttcatctcttagctaggtaatggttctggaactataagcttcttctactttgtcgttttacattttatttcataccgtctacttgtctatttcttcaaaacagtgttagtctagatggaaaagtttttgtgtggaaaatttccgaaggatctgagggagatgaacaatcccagataactggaaagatagttgttgctcttcagatacttggagaggaagacaccaaacatccacgtgtctgttggcactgccacaaacaggtatttcaacatatttcttttgctacgggaagttgcatatttttctgttgtgaacatgagctcgctctgttgtgtctatacttctgattgtgtaaagtccattctttcaggaaattttggtagtttcaattggtaaacatgtgctgcgaatcgatactacaaaagttggcagaggtgaagtgttctctgccgaggcacctctccagtgtcatcttgataaactaattgatggtgttcagattgtgggtaagcatgatggagaagtgacagatttgtcaatgtgccaatggatgaccacgcgcctggtttcttcttcagttgatggcacggtttgtgtttgttcttataatttccttcactatactcttggaatatacgtctactccttttcataacatttctgaagttgaatttacctgacgaactaattttaactgttttcgctgctaactgggtgtaacgttgaagtttaattgattgagactcgttagctttagtttggttatgctagctcatccaaaattgaagagattttctaaattccgtctcactgtagattctcttcacaaccaggaataatttccagcagctagtatttttgtgtgtgaggcttactttttcttaataccaacaggttaagatatggcaagatcgtaagacacaaccacttgtagtattgagacctcatgatggacttccagtcaattctgccatatttgtgacatccccggaaagacctgatcacatcatacttatcacgggggttagtttgctcaaattattacttacttttctcattgctatataatgttatttggccctgctttgttgaattcacattttagaattgttgcttttgtttctgctaagttgctaacgcatacactgttggcaatgttcttctcgtagggtcctctaaatcgagaaatcaagatttgggtctccgctggggaagaagggtggcttctacccgctgatactgaatcgtggagatgtacccagacacttgatttgaaaagttcaactgagccacaagctgaaaaggcatttttcaaccaagtcatagcattgtctgaagcaggcctgcttttgcttgcaaatgcgagaaggaacgccatatattccgtgcatttggactatggctcatctccagtggaaacgctgatggattacttgtccgagtttacagtcactatgcctatattgagttttattgggacaaatgatcacccagaagaaccatttgttaaagtgtattgtgttcagactctagcaatccagcagtatacattagacttattcttgtgcatgccaccgccaagagagaatgtgggttttgagaagtcagattctactgtgtcacgggaggcaaaccttgttgaaagcacgttagaaacatctggaatgaagcctaccgaattaccttcagttagttcagtgcctaaaccatctattttagtgaatagatcgcaaaatgctaatatgttgagttttccagtggaccctgcatcagcggggatcacaccaccagcaattgttccacccaacggtgagcctaaaacttctgggatgccttctgagaccagtgatgtaggttctgcgtatgctccttcacctcaacttcctctaagccccagactatcaagtaaactttctggctatcacactcctgtagaagcgtttgagcaagtgctaccacatcataagcttggtggcaaaacaagttctgctgattatttttatgtgaggcaaactgatgatgttggaggaagaaatttggatgtgtcttctgtcgaggaaaactgtagaagcaaggacacgaatgttacacctgatgatgatgtgtctgggattcgaagcccgtcagcttttttcaaacagcccactcatctcgtaactccttcagagatattgatgggcgtttcttccactgaagcctccattactactgaagacaagagggatagagatgcaaatattgaggaagtgaataatgatgcaagaggcttagaagttgagttgaaagaagtaggcgaagcacagacttcgcagaatggtgaaattaactatcacgaaacagctgagaatcacacttcagaaagtagagaaaatatcttctgctcacaggcttcaaatctcagcactgagatggcaagagaccgtcatcctattacagagggaagtgccattcctggggattctatggcttatggacaacctttacaagctggagatgaaaggggtcttgactccagagatgtctctgcaaagcttcctgagtcgggttcatctagtgggttagtagctacaaatagcaaaggaaagaagcagaaggcgaaaaattcacagggtcctgggttgtcatctacatcctcaaatgttgctaatctggctgactccttcaatgagcaaagtcagagtttaaatcatcccatggcagatttacttcctcagttgttagcattgcaagaaacaatgactcaggtgacatatttatcttgaatctagttaaaacttatttctcttaacaatatttgtttttatactcttgcatcgttcactgagatacactattaagcttggtgttaccttgatttggcacatgagatcctttgttacattcgttttgaaacgaaaatcagatttggtatataactggcatttatcgatgatcagtttttgcttttcataccttggtaattttgttggatttttatttgttgacctgaaacgttattacccttccaggtaatggcttcgcagaagagatgcagagacaactatcaaatgct

SEQ ID NO: 141349 - DNA, 1392 bp, Arabidopsis thaliana landsberg
tgcttaatcataaactactctttcttccttgtcgtttcaaatggcgcaattgtattcttccgtgaaacccacgccaatgttgaaagatgagctcgacattgtgatacctacgattcgaaacctcgacttccttgagatgtggcgacctttctttgagcagtatcatttgatcattgttcaagatggtgatccttcgaaagtcatcaacattccagtagggtttgactacgagctctacaacaggaacgacatcaatcgaatcttgggtcccaaggcctcttgcatttccttcaaggactctgcttgtcgttgcttcggttacatggtctccaaaaagaagtacatctacaccattgatgatgattgctttgtaagtgctctcttatgtgcaaaatttcttaagacatctgttggtcaaaccaaagtcttcttcaaagttgacaatgtatgtgcaatgtaggtggcaaaggatccaactgggaaagagatcaatgcgcttgagcagcatatcaagaacctcttatctccatcaactccgcatttctttaacacactttatgatccatacagagatggggcagactttgttcgtggataccctttcagtatgcgcgaaggtgtttccactgctgtttcccatggtctttggctcaacatccctgactacgatgccccgacccaactcgtgaagcctaaggagaggaacaccaggtgacaataattatcatcataacatgtttatgtgtttttttgtcaggatattcaaatgtcagtttttgctaaacgtttgatatgtcaggtatgtggatgctgtcatgaccattcccaaagggaacacttttcccaatgtgtggtatgaacttggcttttgaccgtgatttgattggcccggctatgtactttggtctcatgggtgatggacagcctattggtcgttacgacgatatgtgggctggttggtgtgtcaaggtaaattcaattcttatcttgcttttgtgcattggttatactgtaataccgttacatttgtccaataatataggtgatatgtgaccacatgggatggggagtgaagacgggtttgccttacatatggcacagcaaagccagcaacccattcgtgaacctgaaaaaggaatacaacggaatattttggcaggaagaggcgattccgttctttcaatccgtgactcttcctaaagagtgcacttcggtgcagcaatgctacctcgagctggccaagctcgtgagagagaaacttgggaaggttgatccttacttcatcacacttgcaactggaatggtcacctggatcgaagcttgggaggagcttaactctgcggagggaactgaggctgaggcaccaaacggcaaaaatgagtaaaagagaag

SEQ ID NO: 141350 - DNA, 1126 bp, Arabidopsis thaliana landsberg
tctcaaacttctctaacaatgtctacgaccaaagcattatcgcttcttgtgtttatactcttcgtgtcccttgttcattcatcggatcaatgtcctatcaactctatctaccaattcggtgactccatctccgacactggaaacttaatccgcaacggccctgttggagccagatcttctcacgccgctaattatccatacggtcaaacatactttcaccaagccaccggtcgtctatctaacggactgctaatgatcgattacttggcacgcaggcttcatctcccactcctaaacccttacctcaacgggaacacaacgtctttgttaacttcgcagtttccggaagcacagcactcaacagctctttcttctccgagagaaatctccacgttccggcaacaaacactcctctctccatgcagcttgcttggttcaagggtcatctacgttccacgtgtcacggctcttcttcggattgcttgaagcactctcttttcatggtcggtgagataggaggcaacgactacaactacggtttcttccaaggcaaaccaatggaagaaatcagaagctacatccctcacgtggttggagccatcacagccgcagctagagaggtgatccgtgctggtgcggttaacgtggtcgtcccgggaaactttccagtgggatgttttccgatttacttgacgtcttttcccgtgaaagatacaaaagattacgacgacaacggttgcttgacgcatctcaacgaattcgcaatggatcacaataaccaactccaagaagctatagcttctttgaaaaagagtttccagacgtggctatagtatacggagattactacaatgcgtttcaatacgttctacgaagtgaaatattcgacaagagtgtagctttgaaatcgtgttgcgggaccggtggagcttacaactacgacggaaagaggccatacggagcagtgggagttccggtgtgtcagaatccacacaagttcataagttgggacggagtgcacttgactcaaaaggcttatagattcatgtctaagttcttgaacaatcagattctttcacagatcaagtgtactagggctaaattacgagcgttattttttagtccc

SEQ ID NO: 141351 - DNA, 2762 bp, Arabidopsis thaliana landsberg
aattgtttcttcctatcctcaatctggaaatttaagggggtcttatattaagggtaagtcaatttttctttgtattttccacaaggagtttgtgttcagacttcagagcataaaaagtgactggcttgattgtgataggtcatgtgaaaaaatggtaactggttcatcttatcttttgttcagtcactataaagtgtccctctgatcacagaatcttattctcctttctttttttccttacaaagttcttgttttgttatgcttgtcctgttcctctttgctgctagaaatattctcttcttctactctctcttcacttttcctggatcttttaggtttaaattttgaagcttgcagagctggaaagtttcttcattaggaatctttgcttgttagtttcgtgtcacctcagataataactaaatagctgtgaaactgcagggaccataatgaatgaactccgaggcagaaaggctcaaaagattgaaagtccagttccaggatgcttagggaagatggttaacctatttgatctaggaactgctgttaatgggaacaagttgcttacagataaaccacatcttgatggtaatcactagttccctctgtaattgctttgttcactagtcgaagctttctgttatgtttctgaactgagtaggatgtcctagtatccacctgtgttattgacacgaggtagtttcatggcaggatcctctctgtcaagcagtcgatctgatgtgactcgaatgccaggcccttcttatggaggccattcagaagctgaattggtacgtttggttaaataattagaaatagtatgcatgctagcaacagcgattttaatattcagaagctgaagtctattgcctgcactgtttgcacagattatgtctgatttgaggagaagtgcttctagcaaactaagtggtacaccgatgaagaaactcattgctcgagaaatgtcaaaagaagttgaacataaacagagcccaactaatgtggttgctaagttgatgggtttggaaacacttccccagacgcatcaggagactgctacacagcgaagcaaatccagaagcaattcacactcttctctgaatcattcgatgacttctacagataatgaggttcaaaagtatcaggatttcagtagggaatttaaagatgtgtatgaaacatggcagtcacctcagaaggtgagtcgctcaagggattgctcgcctagaaaaggaagatatgatgaaagtacgactgagaaacaaatggctcttgttcgtcaaaagttctcagaagcaaaacgccttgtaacagatgatagtcttcaccaatccaaagagttccaagatgcacttgaagtgttaagctcgaacaaggatttgtttgttcaatttctccaggaatcaaattctttctctcagcagaatctttctgactttcaccatgttcctcctcattcagaggcgaagcggatcacagtattgagaccttcaaaggctggtgaaactgaaaaatatgtggttcaagggaggaggaacaagcaggttaagaaattggcttcatcaagtcaagagactggatgggggaaccgtgatctgggttacccgtcaccttatgtcaaccggggaaccgaagaacacactgtacagccaacccgaattgtcgtcttgaagcctagtctaggaaagtctctagatattaaggctgtatcatcatcccaatcctctccaaggggtttacacagtaggggatattttgatgagcctgaagatgttgagactaaagaagttgcaaaggaaattactcgtcaagtgcgcgaaaatctgatgggtcaccacaggaacgagactcagtcttcttctgtcctatccaatggctatatcggtgatgacagttcttttaataagtctgataacgaagatttagtgggaaatcttagcgattctgagatcatgtcaccagcatctaggcattcttgggactgtccaaataggtttgacagtcttttctctccttcctctttcagcagagcttcattttctccagagtcatctgtctgcagagaggcgaagaagcgactttctgaaagatgggcgttgatgtcagtatcgggaagaactcaaccgcttaaacatgtttcaagaacctcaagcaccttaggggaaatgcttgcacttacagagaccaaagtgacaactgaatccggggaagggagctatgaaatagtaccagcaacgagggtatcaacatcatgcataactagtgatctgagtcaagtggaaatggcaagtgattctctgaatattcttgcaaggtcaaaatcagtctctgacgttagactcaacggagaaacatctgttctggggagttccaaagtacaggctccacgagagctgactaagacgggaagcctgaaatcgtcatggaaagtctcaaacttgttcttctttaagaataataaagcaagcaaggagaaaagagatgcatctcaatgcagcagtatgtctcaattggcagcgccttctcctgtgactcttaccggaaaaaccagcgaagattgtgtgtttcctattgattgtctccctcctgtttcatcagaacagcaaagtataatcctaggcgaggtatcccaccaattctctacacctttttcaatctattcgaggtggatgaatattcatgttaaatcagcggtcattttgatccatttgcaggaagaagtgactacaccaaagccccctagcgactgggaatacatgtga

SEQ ID NO: 141352 - DNA, 978 bp, Arabidopsis thaliana landsberg
gttgttttgtccaagaacacagcaaggttctcttcctcagagaatctgagccttcttgctgcaagttctgcacctagcccaacggtttctgctggaggaaatggagatgtgatctcctttggagcaatttacaatgcttcacagcatatggcagattatggtcttggtgatatagttttctcatccgaaggagtgatttcgagctatggggatgcgtttcatattcctgacattattgaaagcactgttggtcttttcgcagatgctgatgttacattacatcatcacgaaattggagattcttgtgaagatgtaagttctctttgatactttgagttatgtttcaacgtcttcttccatgttttctgattcaacttactgcagattttggataacatcttgattcgaaatggagtggctgaagaaatgaatggtgatttgatggaaactagttgccatgacgaagccgagaaagcagaggaaggagaaggaacgagtgtcccgccgttgcagcaaactgaagaaacagaagaatataaccaagaagagaaatctttggtactacaaggccgtgaagattcggttcttagatcatgcttagcctctgaaatgcttgttcctaggaacaaaaggacaagaggtggagaacgtaaggcaagttcttggtgcaagaaacatctcagcgatcctgaaagccagtgattgatgaaaaaaactcagtaagcttttgatgatcagagtctttcctctttgaatctcccttaaatcacagctactattttctacttcaatattttgtttctgaacattctcttagatttttctttatttctgcagaatctgtgtgttcacagagaacatttacttcttctttttttcatatcattttcttctttagcttcttttctgttttatgatgatgaaaagttagagtgaagacacaaactgtgtataataaagctttagattgtagttcta

SEQ ID NO: 141353 - DNA, 1330 bp, Arabidopsis thaliana landsberg
cactaatactctatagtttgtttttgttcttcttataatctttatattttcagcaaacgaaagggaagtgtgtcagaaatctcagagggtgagaatcccaatgaggatcttacccgaacctcgaggttcggttccgtgccttctccttcttgtgtcggttctcttatcagcgactctctcactcgctcgtgtcgtcgaagttgtcggttacgccgagagcaagatcaaaaccccccatgcattttcaggtatctcataacttacattaatatcttatgtactatatagtttatttttttgtgaatatatatttgatcaatgtgtgatattatttgttataggacttcgagtgacgatcgactgtaaggtgaataaaggccattttgttacaaaaggttccggaaacattgacgacaaaggaaagtttggtcttaatattcctcatgacattgtctccgacaacggagcgttaaaggaggagtgttacgctcagcttcacagcgcggcgggaacaccttgtccggctcacgacggccttgagtccaccaagatcgtgtttttatccaaatccggggataaacacattttgggcctaaaacaaaatctgaaattttcaccggagatttgcgtttccaaattcttctggcctatgcctaagttgcctccttttaagggctttgatcatcctttccctttacctccacctttggaacttccaccgtttctcaagaagccatgtccacctaaatacagtcctcctgtggaggttccacccccggtaccagtttacgagccgccgccaaagaaagagattccccctccggttccggtttacgatccaccgcctaagaaagaggttccaccacctgtcccagtttacaagccaccaccaaaggttgagcttccaccgcctattcctaagaagccttgtccacctaaaccgccgaagatagagcacccacctccggttccggtttacaagcccccgccaaagatagagcacccacctccggttccggtttacaagcccccgccaaagatagagcacccacctcccgttccggtacacaagccaccgaagaagccatgtccgcctaagaaagttgatccaccgccggtgccagtccacaaaccaccaacgaagaagccttgtccgcctaagaaagttgatccaccgccggttccagtccacaagccgccgccaaagatagtcattccaccgccgaagatagagcacccacctccagtaccggtttacaagccgccgccgaagatagagcatccaccaatctacataccaccaattgtgaagaagccgtgtcctccgccg

SEQ ID NO: 141354 - DNA, 3482 bp, Arabidopsis thaliana landsberg
  unsure (1)..(3482): unsure at all n locations
atttcacaaaccaaaccaaaaccaaaaaaatagcttatctctctcttatcaccggttcaatcactaaaccatggcgacctccgtcgataaccgccattatcccaccatgaacggcgtctctcacgccttcaaacctcctctcgttccttctcctcgctcattcgaccgccaccgtcaccaaaaccaaactctcgacgtcatcctcaccgaaactaaaatcgtcaaagaaaccgaagtcatcaccaccgtcgtagacagttacgacgactcctcaagcgacgacgaagacgagagccataaccgtaacgtcccttactacaaagagctggttaaaaaatcaaacagcgatttagaaccgtcgattttagatccgagagatgaatcaacggctgatagttggattcaacgtaactcatccatgctccgtctcaccggaaaacatccattcaacgccgaagcacctcttcctcgtcttatgcaccatggattcatcactccagttccactccattacgtccgcaaccacggtgcagttcccaaagcgaattggtcagactggtcaatcgaaattaccggactcgttaaacgtccggctaaattcaccatggaagagctaatctccgagttccccagccgcgaattcccggtgacactcgtctgcgccggtaatcgccgcaaggaacagaacatggtgaaacaaacgatcggattcaattggggatccgccggagtatctacttctctatggaaaggtattccgttaagcgaaatcctccgtcgatgcgggatctatagccggagaggaggcgcgttaaacgtttgcttcgaaggagcggaggatcttcccggcggcggcggatctaaatacggaacaagtattaagaaggagatggcgatggatccggctagagatattatcttagcttatatgcaaaacggcgagcttttaacgccggatcatgggtttccggttcgggtcattgtaccgggtttcatcggtggtcggatggttaaatggttaaagagaatcatcgtcacgcctcaagaatctgacagttactatcactataaagacaatcgagtccttccttctctcgttgatgctgagctggcaaattccgaaggtaaactattaacttacccttgtcttcttttacattttagttaccgatgctaatattatttacttgtttttgttacagcttggtggtataagcctgaatacataatcaacgagcttaatataaactcggtgattacaacacctggtcacgcagagattttaccgattaatgcattcactactcagaagccgtacacattaaaaggctacgcttattctggtaatttattttaactttgctttagttaaaagttaaaaggattctttactatgtaattaaaatcctgatcggtgtattgatgaaataaacaggaggaggtaagaaggtaacgagggttgaggtgactctagacggaggagacacgtggagtgtttgtgagcttgaccaccaggagaaaccgaacaagtacggtaaattctggtgctggtgtttctggtcacttgacgttgaggttcttgatctgctcagtgctaaagacgtcgcggttcgagcctgggacgagtctttcaatactcagcctgataaactcatctggaacctcatggtaataatcctctctcttgatatttttaaattatagaattaattagtttactttattctttactatatgatttaaatagtttaatcttgtttttgagtaaactattcgattttgatatttgtattcgtcctacaaagttggaactactgatgatattttcttttgaacgtgatacctaccaatactaatcttacggaatcttttaatagagcactaatcaacatggaactaaagaccaattctttaagtgtctctgttgtacagttcattttagtagtgcgtttaagtattataatctcccttcatgcggggcaattatgtagattaaaatcgaaattatataaaatttacataagtctaagtctagggtctccagctaattgttatttttttaacgatgttgactaaagcaataacgacgtttactttgtgtaaacaggggatgatgaacaattgctggttcaggattaggaccaacgtgtgcaagcctcatagaggagagatagggatagttttcgaacacccgaccagacccggaaaccagtcgggtgggtggatggcaaaggagcgtcagcttgagatttcctcagaatccaacaataccttgaagaaatctgtctcatctcctttcatgaacactgcctcgaagatgtattcaatctctgaagttagaaaacacaacactgctgactctgcatggatcatcgtccacggtcacatctatgactgtacacgtttcttgaaagatcatccaggaggcacagnnnnnnnnnnnnnnnnnnnnnnnnnnnnnnnnnccgaagagtttgaagccattcactctgacaaagccaagaagcttttggaagattaccgtatcggtgaactcatcaccactggctacgactcttcccctaacgtctcagttcatggtgcctcaaactttggtcctttgttagctccaatcaaagagctaactcctcaaaagaacattgctttggtcaacccacgtgagaaaatcccggttaggctcattgagaagacttcgatctcgcacgacgttcgtaagttccgattcgcattaccatcagaagatcaacagcttggtttacccgtggggaagcacgttttcgtttgcgccaacataaacgacaaactctgtctcagagcttatactcccaccagcgccatcgacgcggttggtcatatcgacctcgtcgtcaaagtttacttcaaagacgttcatccaaggtttcccaatggtggactcatgtctcaacacttagactcgttaccaatcgggtcaatgatagatatcaaaggtccactagggcacatcgagtacaaaggcaaaggcaacttcctggtcagcggcaaacctaagtttgccaagaaactagcaatgctcgccggaggaacaggcatcactcctatctaccagatcattcaatctatattgagtgatccagaggacgaaaccgagatgtatgtggtttacgcaaacagaaccgaggatgacattcttgtgagggaagagctagaaggatgggctagtaagcataaggagaggctaaagatttggtacgtcgttgaaatcgcaaaggaaggttggagttacagtaccgggtttataactgaagctgtgcttagggaacatatccctgaaggtttggaaggcgaatcgctagcactcgcatgcggaccaccgcctatgattcagtttgcgttgcagccaaatctagagaagatgggtcacaacgtgaaggaggatctcttaataatctaaatttgctcaagttctgtgctattggaaattcgaaagtgtgatatcgagt

SEQ ID NO: 141355 - DNA, 664 bp, Arabidopsis thaliana landsberg
aaaaagagctaagggaacgataccattagtcccaataccaatccttgcaaaattcaaactcaaacaaaccgtttatctcacgcgccgccgtactcgccacgatccgtctttggagaccaatttatggagccgccgaagggagataccgtagtgaagactgaggttacggtgaaggatccatcgctaagcgtcgtcgattcgaaaacgaagggagtcgaggatgcgaacactgagatagccttgtccgatgaggttgaaatcgagacgaagggaagcgattcgacaccggtgaaagctccgagtcgaacatcgtctggatcgaagaaatctgtacattggagccccgaattggtgtctggatctcaggaaccggatcagaaagctgcatcgtcttcttcggctggatctaatccgtatattgctcgttctccagctgagacttcagatgcttcgttgaaaggtaagagtgttgtgatcgtagcggtgagaattgagattgtgtattgtagccttatttacctttttgtggatctctctctgtgtgtctgtgaattggattcagatacgatggagactgtgaaaggagtgcttggtagatggggaaagagggttgcagaagcagcaaagaagacggagagccttgccgggaacacatggcaacacc

SEQ ID NO: 141356 - DNA, 476 bp, Arabidopsis thaliana landsberg
gctcttatgtgtaaaatctaaaatcagaagataaaattcccaatttgtaatgctttttagaggaaaaaataatatgttggtagaaaataaagtgtatatagtgtgactggtttagtcttctgagattcaaaaagagcaaaaaaaggaagaagacatggctactacagaaacaatcatacaaggagcaattctggtgttaaccttggttatgttctgggcgattaagtatctctctcaacgaggcctaaccaaatttcgaaccaaacaccgagccacactccaaacccagcgtcagctaatccaagcctcacgtctcctggctcgagcccgaaccacacccaagaaatctcaatctcaatctctcgccaaaacggcgctcaccgaagctgataatgtgatcgcgatttctccagatgatgccgccggtcacatcgtccgtgccctagctctagatctgctcggtcaccatacttctg

SEQ ID NO: 141357 - DNA, 374 bp, Arabidopsis thaliana landsberg
gttcctaactttatattataccacaaaaacataaatacagctcacaaaaagatcatcccattcccaatatgtcactctagacaagcttaaattattagtattgtctactgaggaaaaagctttttggtaaaatacacaagagctatataatacacatatactttctatattacatagagagaagagagaggaggctcatgaagtggcttgagcttcctcagagctactagcagagacttgtccagtaccagtagcagtgtggccctcttcttcttcttcttcttcttcatcgcagaagatgctctcctcgcttgtgtccgagaacgcatcttcctcgtcttcttcgctaacttcttcttcgtttctcttctttc

SEQ ID NO: 141358 - DNA, 1816 bp, Arabidopsis thaliana landsberg
tcatctttcttcctcacttcatcgatttctccacagacgctgtttctctatccacgcgccttagcgggcgcgtgcctctctccataccttgcgtttcgtctccgatggatactgtttcggaatctcacatggctgctgctatggcttctcttggtgggattggaatcgtccactataactgtggcatcgccgctcaagcatcgattattcgccaagctaagtcgcttaaacatccgattgcttccgacgccggtgtgaagttcccggagtatgagattacttctttagatgcttttggtacttcttccttcgtttttgtcgagcaaacaggtgagtgaatcatattcgttttttttgcaaaaagaatctgaatttaatagttacaatggtgaatttaagtttgtttgttgtattgatttaaatgcaggaacaatgacgactcctaaattgttaggctatgtaacgaaatcgcagtggaagagaatgaattacgaacaaagggagatgaagatatacgattacatgaagagctgtgatagcagtgactattgtgtaccatgggaaattgattttgaaaagttggagtttgttttagaagataagcaaaagggctttgtggttcttgagagggatggtgagactgtgaacgtggtgacgaaagatgatatacagagggttaaaggatatcccaagtctggaccagggactgtgggtccagacggtgagtggatggttggtgcagcgataggtacgagggagtctgataaggagaggcttgagcatttggttaatgttggggtcaatgctgtagtgttggatagttcgcaagggaactcgatttaccagcttgagatgatcaagtatgtgaaaaagacttaccctgaattggatgtgattggtggcaatgttgtgacaatgtaccaggcacagaatttgatccaagcaggagttgatgggttgagagttggtatgggatctggttcgatatgtaccactcaagaggtttgtgcagttggtcgtggacaggtaaattaaaaagctctgaatcctaactgtttaatcttttaaaaggtgtaaactttgtgactatatgtgactaaacagatttgtctttttgtgtgatttggacctgttaggctactgctgtgtacaaggtttgttcgatcgctgctcagagcgggattccagttatagcggatggtggtatctcaaattcaggtcacattgtaaaggctctcgtccttggagcatcaactgttatgatgggtagctttttagctggaagtactgaggctcccgggggttacgagtatacggtatagtcacatcttctttcggtttaatttacagttttcttgaaactctgtttgttttgatcgttttgtggtaataacagaacggtaagaggatcaagaagtaccgtggaatgggatcgctagaagcaatgactaaaggaagtgaccaaagatacttaggagataaaacaaaactcaagattgctcaaggagtggttggagcagtcgcggataaaggctcagtgttaaagctgataccttacacaatgcacgccgttaaacaaggtttccaagaccttggtgcttcttccttgcaatctgctcatggtctgttgagatcaaacatccttaggcttgaggtgaatgaaacttgttgtctcaattctaattcccaaaaactctctaattttgctgagattagtgctaatactgtttggtttttgtgacaggctcgaactggtgctgcacaggtcgaaggaggagttcacgggctggtttcttatgaaaagaaatcgttttaa

SEQ ID NO: 141359 - DNA, 357 bp, Arabidopsis thaliana landsberg
ggccggttatgaaatcttgggaagatgagccgccgtagttaaggtcgaggttctggagctgctccatgagctgcgaacgtctttccttgaagaaatcaagacgtgttgttaactctaccagagctgctgatgcagcagctgacggatgattaagccttgggtactctgttatctgcaaaacctcaagcatgttagtgtgcaatgtcattgcttaagatgtttccttagaatttttaagagcagtcagctttaatttgctaggcagaaagcgatcgtgcatgtctctgtagttactattgaaaccaggtaaggccaatcacagaattgcacacaatactacgcaacccaaaagtgaag

SEQ ID NO: 141360 - DNA, 725 bp, Arabidopsis thaliana landsberg
gaatttgtttcatgtcaaacgatatggtaagatcatttttatccctaaatcttactttccatcttcccccttagcatcctacttgatagcaacttatgaaaaacctttggataaatgcaaatgggtgatgcaatgtttgagcagcctaggtacgtggttaatcgagtgacagcaggagactatgactgcccaagaaaggtgatgaatttcttgacagatcttcatgcagcctttcgcatgctcaatctcaggaacgatttcctgcgcaagaaattcgacagtaagtcatacatatctctaactgctcttctttctccatttgcgatggttacataaaaaaaaatcgattttgacatgtgacaggtatgaagtacgacctaagaagagtggaagaagtttactatgatgtcaagatccgaggtttgatttccggcggagatcctcctggcgtccaagcagtccaaggccaatcctaaatgtcctcggctctttttaagtttttatgtataactttgtttagctagcatgaaaacgtcaaggagtgttcttctctaaaccaaaaacggcaaggaaaatagagagactgtagtttttaggtgtagtttgcaattactgaaaacggcaagtattccttttgtgggccttgaaagcccacattttagtcacaactttactgttatccgaagtcagcagcttaatagtttaacagtagatgttcatgaaca

SEQ ID NO: 141361 - DNA, 2424 bp, Arabidopsis thaliana landsberg
  unsure (1)..(2424): unsure at all n locations
agtacaaatctgaataatccatgtaagccaatggtacggttccggacttatacaaacaccatacaaatgttccaagataccgggattcgaatttgctataacaagattaggcacaaagctgaaacaaagagagctggcgccactagccacttccatcgagttggccttgagatagaaggtgagccatgtattgctgcattcacaataaaatgagctcaattcttggttctaaccccacatgattcgacaaacatttctatcaatggcaccacaaagtcagtaccatcaagattctagacttatggaaactgacctttacaacactaaaatatccgcaccacagagattatcataaagagattgaagaaacttacggagtggtaaacgtatggagattttccctggcgatcaaaatgcttagccattatgcagaattcaacaggaccccaatcttcagattcatagcaattcccaagcgccgctttgtacagctttactccaataaaccccaatcatcagttccacacagaagtaatcaactatataaactgtaaaccacaacccaaaattgtcatcaaggacacaccttagctgtgtcggtcaataagttcggtgccttcagggtaagatgctaaatctgatctcccctggaatatcctgctcttgttctacacaacattcgaatcagtaacattaaatcaaattaaacctgaagcagaaaccaagannnnnnnnnnnnnnnnnnnnnnnnntgcgaattccgatattgaaaagaaagaacaaccaaaagaagcaaactgagatcggacgaaagacattacgtgttgtttgtatagaagaatgtgagggcagcagtgaagcagtagaatccggcgtaagagacagcccgtcgtagcttctggatctttataacctctgagcaaacatccaagatcatcatcttcacaccttcggaaactctttcaggtattatatcgaacaccttgtgatcactttaccaaacagagatgacgagtagaagaagcatctcacgaaatttgcaattgacaaattgtaaacgccttgtattgtccaactttttatgggcctatctgacctttttctcttttcggcccaataaaacttttagattttatttcttttggcaacaataaatttaaaataatatacattatggaaaatcatctacaaacaaaaacctttaaattaaaaaactcacatgttaatgcaattaggttagtaagcaagcacgtcttgacaaaaatgttattgttacacatttaaaaattcacatgttatacaagacaaaacataaacgtaatgttttgcagtcaaataatgaaataaatgaaataatacaaagggatctttatgtaaaggcgtcaccaattagtggaaataatggagcaagccactacactcttcatattgctttccactctcctcctcgccgtctccgttgagtctcctcagccaccgctatttcccgatgaagctctccccactaaatctggctacctcccggttaaacccgcacccggctcgtccatgttctatgccttctacgaagcccaagagccaaccacacctcttcctgacactccgctcctcgtttggctccaaggtgggccaggctgctcttcaatgattggcaacttttacgagctcggtccctggcgtgtagtttcacgcgccacagacctcgagcgcaaccccggcgcatggaaccgtctattcggactactttttgtggataacccaataggagtcggattcagcatcgcagcctcacaacaagacatacccacaaatcagagacaggtcgctgagcatctttacgccgctctcgtggagttccttgaacaaaacccaagcttcgaaaaccgaccggtttacttcactggagagactacgccgggaagtacgttccagccattggatactatatccttaaagagaaacccaatgggaaagtgaatctaaaggggctagccattggaaacgggctgaccgacccggtgacccaggttcaaacccatgcggtcaacgtctactactcgggtctggtcaacgcaaaacagagagttgaactgcaaaaagcgcaggagatatctgtagctctcgtgaagtcccagaaatggcgtgaagcagcagacgcgaggaccgaactgttgacgctactaagtaacatgacaggactcgcgacgctctacaacacggcacgggcgattccatacagaacagacctcgtggtggacctcttgaaccagagagaagcaaaacgtgttttgggagtgagtgaaacggttcgttttgaggaatgtagtgatgaagtagaagatgtgttgcgggcagacgtgatgaagagcgtaaagttcatggtggagtacgcattggagaggactcaagtcttgctgtatcaag

SEQ ID NO: 141362 - DNA, 718 bp, Arabidopsis thaliana landsberg; identical to SEQ ID NO: 49759

SEQ ID NO: 141363 - DNA, 352 bp, Arabidopsis thaliana landsberg
ggtgtgattaataatggcgctttctctcagccagactcgaccaccaagccttagccatagccatacccttagcgtcatcgttcctaagagaacgttcgtttcgatccgatgcggtccacgagacaaccgcggaccacttctcaaaggccgaatcctaagcaccgaagcaatccaatcaatccaatctctcaaacgagctcatcgaagcggtgtctccctctcccttaccctccgtcctctccgccgtctcataaaatccgatgtcatctccgtcctccgtgagcttctccgtcaagactattgcacactcgctgtccatgtactctccactctccgtacagagtatcctcct

SEQ ID NO: 141364 - DNA, 1017 bp, Arabidopsis thaliana landsberg
gcgggaatgggagcacagaagttctatatgctgaagcagagacaggtgaaaatggagactgaagaatgggaaagagcagcgagagagtgtagagagattctagctgatatgtgtgagcagaagcttgcaccgaatttaccttatatgaagtctttgtttctaggctggtttgagcctgtgcgtaatgctattcaagatgatcttgatactttcaaaatcaagaaagggaagattccgtatgcgccttttatggagcagttaccggctgataagatggctgttatcactatgcataagatgatgggattgttgatgactaatgcggaaggcgttggcattgttaagttagtgaatgctgctactcagatcggggaagctgttgagcaggaggtgggttttaatttctcttgtttcttttgatgctatttcatgatagaggttgagagtgaatctaggaatgtgtcattgatacatattgccttggccccatggggtatgaagtgtatattggtttgatgatttgtgtattttgttactggatcaggtcaggatcaacagttttttgcagaaaaagaataaaaaaaatgcaactgacaagacgatcaatacagaagctgtgcatgcttcagaagaaattgtggccaaagaaacagaaaaggcgaggaaacaagttactgtactgatggaaaaaaataagttgaggcaagtaaaagcattagtgaggaaacatgactcattcaagccatggggtcaagaggctcaagtgaaggtttgtttatagttccacccttgtcaatgcacagagctttgtaatagttcttattttccttctctgttttttctcttctctgtgatttaataatattggctcttgtgcttctaggttggcgcacgtttgattcagctgctgatggaaaatgcatatatacaacctccagctgaacagtttgatgatggtccacctgacatccgacctgcttttaagcaaaatttcagaactgtcacattagaaaatac

SEQ ID NO: 141365 - DNA, 216 bp, Arabidopsis thaliana landsberg
agaaaagaaaaaagaaatcaatcataatgttttcgaattttttggaaagcttatacgatggaatcggagacgatgacgccgccgacgacgacgaagacaacaacaacgacgagaaaaccccgaaagcctcaacggaaagacacgatttctcgagaaacgccgttcgtttgtcaccggaagaggaggctcaagcgcgtggggttaaagatgatttga

SEQ ID NO: 141366 - DNA, 1026 bp, Arabidopsis thaliana landsberg
agctactcgaaggctggttgtgtcgagcaagcactgatccatgatgcttcaaccatcgatccaatcgagcagccgtgtgttgcctttgtacaaatgcttatatataccaaagaactaggtatttaatttgcataatcttgtatgtttcaaagccgttatcgtgtcacatatttggattagtctacaaaatcaagaacatatttattaggtaaaaatttggtaaaagaaacttatcatgatttaaattctatgactttgttaagcaacttgcacaagtgtgtataataaacttcaaactgttgtttcttttagaaaagaaaaatcttaagagagtaatgaaaattggtcgttgggtttacgataattaaacaaaggttgaaagagcatcaaccgttgattagtcttcttaatcctcaacgacgaattcaactgctcctccaatattctcttccttcttccttctttcggaaacaaccacagaagcaaagaaatcaatctcctatgagttccaagagacggcggagattcaatctccgaacagtgttctccatcatcttcctcacctttcttcctctgaatcttaactctcaaggtagttgactaatctctatgtttctctatgcaaccttttgtgtgtctctttaaatgatgacaattcatttcttgaagagattgtagaggtctttgattcttctcaagatcacttcttgatccaatcccgagtttatgcgaaccatcgcagccttatcgatacacctcttcctggcaaagaccctgcccttgatgcctctccgccatctcctgaatccgctatcctcaaagatccattgctgcctccgccaccaccagaaggcaacgaaaccccgagccctcctcgaagtggtgtgccaacacaaacaccagagaccccacctgctatcactcccctgcctgtaccactggctccagctccgtctccgtctcctcctgtgtctccaggaactacaaagaagtctcccaaagtttatatgatcgttggcatagtcg

SEQ ID NO: 141367 - DNA, 701 bp, Arabidopsis thaliana landsberg
tgcttgctgcggaggaaactgcggatgtggatctggctgcaagtgcggcaacggttgtggagggtacactctccttttgtcttgtttgtatttatatttcccggtgaaatcgttgcatgcaagtatgcaacaactgtgaatcgatgatgatatcttgttttgatgaatggtttcttggagatttttcttgtaaaaaagatacaactcttttgaatttacacgatctctgttttcataggatactgatgggttttttctttcgattgttgcagttgcaaaatgtaccctgacttgggattctccggcgagacaaccacaactgagacttttgtcttgggcgttgcaccggcgatgaagaatcagtacgaggcttcaggggagagtaacaacgctgagaacgatgcttgcaagtgtggatctgactgcaagtgtgatccttgcacctgcaagtgaagaagcctttttaaataagcagagataatcgagtctctttaattaattaagttattcaataagtaaaccatatataggatggtgtttttaggtttggtttatgtgtaataatggcttcagcttatcttttagccgatcattgtcttttgtgtttgttttgatcatatcttttagatgtctagcaactctgccatgtgatgagtttgtacttccagtggaatgataataatattatagttttaaatctc

SEQ ID NO: 141368 - DNA, 1645 bp, Arabidopsis thaliana landsberg
atggcggattcgagagaactcaaatcaaagccagatgaagcagtaggagaagaagaagaaggcgaaggtgaaaccgctgcttgtatcagagggtttcgtggatgtaaccggaatctaaaatgacggttaaacgaagcaatcggtgtattccccaacgaagaagcagctaatgcaatcataactcttcaaaaaaagttctcaagaaaattttgattttcaacagacccagaatcagataaatgcttcatcgtcgtcttcttcttctcccaattggaaacgtcggaggacgaagggaagacgaggaagcgcgtggcttctttcaaaccacgagatcatgcttcccgccacgtcagcacttgtagataacggcacaatcatatcggtttaaataccggtttagtttctaaaataactttctcttctcggatttgtctgacttaatcgaatcgaaccgaaccgaataattgcaaaattaattttctcttttaaattgagaaggaaataaagactgataaaaacggatcaatggcggctacaacgagctccggcgacgaaccaccggaaacaaaatcaccggcgcaattgattccgttgttatcagaagacgttgctctcaatggccttgctcgcgtccctagatgtcactatccaatcctctcactcgtctccaagactttccgatctctcccaacatcacctcttctctacgccacgagagctctcgtcggagccactgaaaacatcctctacgtagcaatccgtatacctcctgaatctggtgcgtgttggttcactctcctccatcgaaccttatcgaactcaacgaattcgaaaatgcttgttccaatcccatcttgtccttcaccgtctctagtcggatccgcttacgttgtggtagattcagagatttacgtgatcggtggatctattagagacgtgccttcttcgagcgtgtgggttctcgattgcagatttcatacttggcgacgagtctctaatatgagagtaggtcgtgaatttgcagcagctggtgtaattgatgggaagatttatgtgattggaggatgtgtagttgataattgggctcgatcgattaactgggcagagatgtttgatataaagactcaaacttgggagccagtggctagtccaggtatggaggttcgtgagaaatggatgcacgcaagtgcggttatggaaggggaggtttaatcaaagcctgctcgaaacggtgttgtttacagacccaagaaaaagaaatgggagatgcctaagaaaaagcttaatttgggatgaaaagcaaaagctttgtgtgattgagaacagattgacgtgttatgaaaacttgggaaagattagagggtatgatccaaaagagaggatttggagagagctgaaaggtgtggagtcacttccaaagtttctttgtggggctacaatggctaatcgtggtggaaagcttacggttttgtgggaaggtaaagctggtagtggtggttctaggagaatggagatttggtgtgcggagattgatgttggaaggcgtggagaaagggagatttggggaaaaattgaatggtctggtaccgtgcttacggttcctaatgaatctgccattgtgaattgcttggcagctacagtttga

SEQ ID NO: 141369 - DNA, 4693 bp, Arabidopsis thaliana landsberg
gacagtgataaactgtatacaaagcctgatgtggcgtaaaattagggagataaggatgactaccatggggctggtgataagcagtagcagcaaggttgactttgaatgcatgtcagtttcaatttacttacgaatattatatacaatcagtaatactctgctcggatcaagctttgacctttagaatgattggatattaggaagagccactaagatgctattttattcctgatgcttgaggtgtgtatgtttgaacatttgcgcatatcattgctttagttgtattcagtaatctcttgatgttaatgaccaataacttacatatgcatctattgatatgctagagatttgctgtttgtgagtacttttttttgtctcagtgatgtctggatatgtcaagttatttcttcaaaagttggatcaatcaatgatgtcttatctgtgatcactgatcttgtgcaggctttcatgttgcagaaggagacctccctaaggagacttagaaagaaaagaaagcgttcctttgcccttggtttgtgttcttgagtgtgcttaattgtgttgtttttggggtttggggtattctagatctcttttgtaagtattctcttgtttcttggttttgttttaaactctatggaatttgggatgagtggattcgatgtcttttgtttgtctttgaaaaagcagtgaaaagaatttcagtggtcttgtatatctctgcagttgaatagttggtacaaaataacatctttgacggttccaaataatatatcttgtcagtaatgaccattaaataaactttaccatgaaatggctatgcttgcatctttcagaaccattacatttgtcttgtcctgtttctgacttttctcttgactgtgtggaagttcataagatcaatggtaccgatgtgtctttgtttgtatctttgggaaaaagactgataatggttccgaagtttcactgtttgtacagtctcaaataagttctattttgtctctctgcagtttagttttccccatagaaagcatctctgatggtttcaaatgtaggcatcattaacattttcaccacattgtccctattctcaagcagcgaactctcttcctatgatcaacgtccactatctattcccaactttgaagagttaagagacatttacctaaggaatcggtaaatccttgtttgcatttgtcgatttcatgagctcctgttgcctgttgttgcgcgacctggtttcaaaacggcttccaagttcgatttcaagtttgcaaaatgtgaagttgtctctgatagtgactccttgcatgcccctatctcacacatgctcgtaaggccccatcacactttccaattatttctgagcggaaaagtcaagtgtggtgcctctgccagtggcaattaaatgtaaccaccaaacattagatgacataaagttatttcaagtcttaggatcaaatcaacccttaaagctctacgtttctctcaaagttgctgagaagatgggttgtttgctaattcttcttcttacattgatttgcttttccttgaggctttgtttggctactgatgtaatcacgttttctagcgagttcagggactctgagactgtcgtcttcaaccacagcaccttcaggtttggtttcttcagcccggttaactccacaggacgttatgcagggatatggttcaataatattcctgttcaaaccgtggtttgggtagcaaacagtaacagcccgatcaatgactcttccggaatggtttccatatccaaggaagggaatcttgttgttatggatggtcgcggacaggttcactggtccaccaatgtcttggtgccggtggctgctaacaccttctatgcccggttgctgaatacagggaacctcgtgctgctaggaactactaatactggggatgagattctttgggagagctttgagcatcctcaaaacatatatttgccaacaatgagacttgctactgacacgaaaacaggcaggagccttaagctaagatcttggaaaagcccgtttgatccatcgcctggacgatactctgcaggtttgattcctctgccatttccagaacttgttgtctggaaagatgatcttctgatgtggcgtagcggtccatggaatggtcaatacttcattgggttaccaaatatggattaccgtatcaatcttttcgagttaacccttagtagtgacaatcgaggatctgtctccatgtcctatgctggaaatactttgttgtatcgattatctctaggactccgaagaatgcgtgtttcagagagattggaacgtggctatccaagaatggaagacctggttaaaggtcccatcgacaaagtgtgatacatacgccacatgtggccaattcgctagttgcagattcaatcccgggtcgactccgccttgcatgtgcattagagggtttaagccacagagttacgcggagtggatcaacggaaactggactcagggatgcgtaagaaaggcaccattgcagtgcgaaagtcgagacaacaacgatggaagtagaaaaagtgatggatttgtgagagtgcaaaagatgaaagtgccccacaatccacaacgatctggagccaatgaacaagactgtcctgagagctgtctgaagaactgttcttgtacggcttactcattcgacagagggattggttgtcttctttggagcggaaacttgatggatatgcaggagttttctggcactggcgtggttttttacattcgtcttgcagattcagagtttagtaagtgtagtatcaacctcatttttccatccaacttagtttactagatcataacagatttgcaccaaatcttttgtagaaaagcggaccaatcggtcaattgtgatcacagtaactttgctagtaggcgcttttttgtttgcagggactgttgtcttagcactgtggaagatcgctaagcatagaggttagcgttacattccaactatataagagatatctctctatgattttatattattagataactaactttttgcattgctttgtttaacagagaagaacagaaacacaaggctacttaatgagagaatggaagctttaagtagtaatgacgttggtgcaatccttgtgaatcaatacaagcttaaagagctaccactgttcgagttccaagtgttagcagtggcgaccaacaatttttctatcacaaacaagctcggacaaggaggatttggtgctgtttacaaggttcttaaacaattctttgtttcattggtaggaggaatttcaaagtgacaatggagtgttaagttgctctactttcatttacaggggaggttacaagaagggctcgatatcgctgtgaagaggctttcgcgaacatcgggacaaggagtcgaggagtttgtgaatgaagtggtcgtgatctcaaagctgcaacaccggaatctcgtgagattgcttggtttctgcattgaaggagaagagaggatgttggtctatgagttcatgccagagaattgtttagacgcatatctatttggtagtgaacttatcgtttggtttaactctgttacagtcttagtaggcacatgaacagaacctaatgctagtcttgtttgtgcaccttgttgctgtgtaatccagacccggtgaagcaaagacttcttgactggaagacgcggtttaacataatcgatgggatttgcagaggtcttatgtaccttcacagagattcaaggctgaagatcatacacagagatctaaaagcaagcaatattttgttagatgagaatctaaacccgaagatatccgattttgggctggctaggattttccaggggaatgaggatgaagtaagcaccgtaagagtggttggaacatagtgagtagccaccctaactaactcttacacagctttttctgatcttttttcgatgattgtcaattatgtaactgacaaaagcataacaccccagcggttatatggcacccgaatatgcaatgggagggttgttctcagagaaatctgacgttttcagcttaggagtcatactcttagagattgtgagtggaagaagaaactcaagcttttacaatgatgggcagaatccaaatctttcagcttatgtaagtctcattttaaaaccacgacctttcttttggtaaagcttttgaaccattcttgaaactttatctccttattttgaccaggcatggaaactctggaacaccggggaagatattgctcttgtggatccggtcatctttgaagagtgttttgaaaatgaaatacgcagatgtgtgcacgtaggactattgtgtgtacaagatcacgcaaatgataggccgagcgttgcaacggtgatttggatgctaagtagcgagaactcaaaccttccagagccaaagcaacctgcatttatacctagaaggggcacttcagaagttgaatcctcgggacaaagcgacccaagagcatcgatcaacaatgtgagcctcacaaaaataacaggacgttagctctgtaagtgagataaacctactgctaaagaattttgatgaaaaaatgtttaagttgtatatctgtatgtaagagtaatctataggttacgaactaaaattcagaatctggtcatgttcttgtatgaagtcacataaatatagaacatgttttattgt

SEQ ID NO: 141370 - DNA, 1418 bp, Arabidopsis thaliana landsberg
  unsure (1)..(1418): unsure at all n locations
ttgggttatagcttatgacatgcctgagtggaagaaggatgcctttggtaaaactcccacttttggatangagtttaaagctttctattcaagagcaaagggagagccttgcgatatacaagttgaaaaaggagctgatacaggctgtgcacgataatcaagttttggtggttattggtgagactggatctggaaagacaacacaggtgactcagtaccttgcagaagcaggttatacaacaaaaggaaagattgggtgtacccagcctcgtagggttgctgcaatgtctgttgccaagagagtagctgaggagtttggttgtcgtttaggagaggaggtagggtatgcgattcggtttgaagattgtactggaccggatacagtgatcaagtacatgactgatggtatgcttctcagggaaattctgatagatgaaaacctctctcagtactctgtaatcatgcttgatgaagctcacgagcggacaatccacactgatgtgctgtttggtcttctaaagaagctgatgaaacgtagactcgaccttcgtctgatagtcacgtctgccacattggatgcagagaagttctctgggtacttctttaactgcaacatttttaccactcctgcaagaacatttcctgttgagatactatataccaaacagccagaaacagattacttggatgccgctctgatcacagtccttcagattcacttgactgaacctgagggtgatattctggtctttttgacgggacaggaagaaatcgattctgcctgccagtctctgtacgagaggatgaaaggtctaggtaaaaatgttcccgaactcatcatacttccagtttacagtgcgcttcctagtgaaatgcagtctagaatttttgatcctccccctcctggtaaacggaaagtggttgtagctacaaatattgcagaagcttctttaacaatagatgggatatactatgttgttgatcctgggtttgctaagcagaacgtgtacaatccaaagcaagggctggaatcgctagtcattactccaatttcacaggcatcagcgaagcaaagggctggacgtgctggtcgtactgggccagggaaatgttatcgtctctacacagagagcgcatatcgtaatgaaatgcctcctacatcaatccctgaaatccaaagaatcaaccttggaatgacaaccttgaccatgaaagcaatgggcatcaatgacctgttatcgtttgacttcatggatccaccccaacctcaagcattgatttctgcaatggaacagttgtacagcctgggagctttggatgaggaaggattgttgacaaagctaggtagaaaaatggctgagtttcctcttgaaccgccgctctctaaaatgttgctagctagtgtggatctcgggtgc

SEQ ID NO: 141371 - DNA, 2783 bp, Arabidopsis thaliana landsberg
cgttggtccaccggaaattggaccggagaagccttcgtcggcgttccggaaatgaccattccttacatctacaggttccatttcgttaacccttacactcccacggcgtcgttttggtacatcgtcccaccgttggactccgtttccgagccacggctgacgcggttcatggtcggcgccaacggccagctgaagcagtacacttgggatccacagacgcagagctggaacatgttctggttgcagccggagaatccgtgccgcgtttacaatctctgtggtcaattagggttttgcagcagcgaattgctcaagccctgtgcctgtatccgtggtttccggcctaggaacgacgccgcgtggagatctgatgattacagcgacggatgccgccgtgaaaacggtgattccggcgaaaagagtgatacttttgaagccgttggtgatctacgctacgatggtgatgtgaagatgtcacggttacaggtaagcaagagctcttgcgccaaaacttgcttaggaaactcttcttgtgttggtttttatcataaggagaagtctaatctctgcaaaattttactcgagtcgccgaataatctgaagaattcgagctcgtggactggagttagtgaagatgtattgtatatcagagaaccaaagaaagggaattcaaagggaaacatctctaagtctataattatattgtgcagcgttgttgggtcaatctcagttcttgggtttacattgttagtgccattgattctgttgaagaggagtcgaaagaggaagaagactaggaaacaagacgaagatgggtttgctgtgttgaatcttaaggtattttctttcaaggagcttcaatcagctaccaatgggttctcggataaggtcggacacggcggttttggggcggtgtttaagggaacattaccgggttcttctacattcgtggctgtgaaacgcttagaaagacctggaagcggggagagtgagttccgggcagaggtatgcaccattgggaacattcaacatgtcaatctcgttaggcttagaggtttctgttcagagaatcttcataggcttcttgtctatgattacatgccacaaggatccttgagttcctatctgtctagaacaagccccaaattgctaagctgggagacccgtttcaggatcgcgttaggtactgccaaagggatcgcgtacttgcatgaaggatgcagggactgtattatacactgtgatatcaaaccggagaacattcttttggacagtgattacaacgccaaagtgtctgattttggcttggctaagctccttggacgtgacttcagcagagttctagccacgatgagagggacatggggctacgtggctcccgaatggatatctggtttgcccatcacgacaaaagctgatgtgtatagctttggaatgacattgctcgagctgatcggtggtagaagaaatgtcattgttaatagcgatacactgggagagaaagagacagaaccagagaaatggtatttagagaatgtcttttacttggaatcaattgtaagagagaaaaaaacatatacattgaatcaatgaatcccttttcaggttctttccgccatgggcagcgcgtgagatcatacaaggcaatgtggactctgtggttgactctagactcaacggagaatataacactgaagaggtgacgaggatggcaacggtggcgatatggtgcatacaagacaatgaagagataaggccagcaatgggaacggtagtgaagatgcttgaaggagttgtggaggtgacggttcctccaccgcctaaattaatacaagctcttgtctccggcgattcataccgaggagtgagcggcacaagctgtagtgaaggccatggctgttcggatctcaatacaggtttgtctagccctggctcacggtcgtcttttggtagaccttctccttgatcaattttgtaaggtgatttggtcaaaaccagccttaaatgttataagtgttgctctctaagagggtttaattagtttaaactgtatttgttggttgtatgatatttgacttaatcgacattaacagttaaaaccatggattatgtctttcttcttagtttgaaagttcttgtcactttgataatcttctaatggctaatatgtaaattcttacagaatgtattgtatgagaatcattacgtgattgaatcaataaacccatgtcgatactttcaagttaactacacagaattagcatctttattataacaaagctcacacactctctctacacaaccacctttagcgtcttttttccacgaaaaggaactgattggcagaaattcaatatctgaaaccaatgttaccatactctcatttatgcctggttaatagccaacgtgtacaattcactggtccaaactgggttatggtattattaccttcaggctaagggacctcatagggaaggctcgaaccgacactagcaacgatggtgctgtgaaatggtggttgtgtgcttagattccaaatcaaaatcgagatggtgctgtgaatttaagatcaatggtgctgtgaagttaacagcaaactctcgccgcagcaacctttttagattccaaatcaaaatccaaaatttcaattaagggcatcacaaacatctatcatctaagcagatttagatcgaaagataacgaatttcacctgggaacagaaccttcgattcgagaagaagtgttgaagcgcggggaagtgaaattaggatttggtacagaag

SEQ ID NO: 141372 - DNA, 998 bp, Arabidopsis thaliana landsberg
atggcccgttacggcatggaccatccgacaggtagggtcattgatgcgacgtcgaattatataaacggtcgtggtgggatgacatagctcgtgttcttgattgttgtcgtggtccccatattaagtggaagttgattggacttacaatgtacatgaatgcatcatcatcatcatttattggatttagattacgtttacatgtattgcatcattcagcacttgttgttttgagtggaaatgaattaactgaaaatgtgaaaatggtgaagggttgttcatggcattgcaaccgaaattaattgcttgcggaaattcgacggcgacttctgcgatggcggtgagattctttactggaccaaaaataatggccgtggcagcaatggctattggattacgtggagacctattgcgtgtggccattgttcaagtaaattaaactattttcgtttgttgttaacaatctctttgtaagaagtagtttaaccaaatcttgtggtaacgttgtaggctgcattgcctcaagggatcgtgccgtttgtgtttgcaaaagagtataatgttcatcccgcaatcttgagtacagggtaagtatttcatattgaaccaatagtaaaacttttcttatgcataagagaagattactaatattgttgattcttatgtgtattattgcagggtaatatttggaatgcttatcgcactaccgattacacttgtttactacattttactcgggctataagctcttcaatggagaagttctgcttggctgaagaggataaagagaaacaagataattccaagattagtggaacgcaactagaaaatgtaatgtaacacgaaatgtagtaaatttaaagggaccaagatttgatttgaggatccaaaaacccttttcttgtctatatattttctagagattatttgagaaagaaggtgatggaatgagagatacaagaggaccaaaacaagggaaagcaaaaaaaacagaggactaa

SEQ ID NO: 141373 - DNA, 687 bp, Arabidopsis thaliana landsberg
catcttgtgaaccctaaccgactttctcggttagggaacccggctggttacaagcttgtacctggtggtaatgctgcaagtttgctcgatcatgatgatccaccgcaaattcgaggcgctttcacaaacaatcaggtactcggtttaagctcggtttgacaggttcaacaaacttaaatgtatataatgaatgagatctattggtttagatatgggtgactcggtataaccggtcagagcaatgggctggagggcttttgatgtaccagagccgtggtgaagacacactacaagtttggtccgacaggtacaccatacttaattgctcctattgtctttggtttaactataagctttatcttaactgctgtttgtgtgatgaaacagagatcggtccattgagaacaaggacatagtgttgtggtatacactagggttccatcacgtaccgtgccaagaagattttccagtgatgccaacaatagcatctagctttgaacttaaaccggtcaatttcttcgaatcgaacccggtacttgggatttcacctttcttcgagaaagacttaccagtctgttaaaccagatgcttcatcttattcgacactgtgcattttcaaatgtcatgtgtagacttttctgattataaatgttgtgcatattctattgatatatgtatatcggtata

SEQ ID NO: 141374 - DNA, 1162 bp, Arabidopsis thaliana landsberg; identical to SEQ ID NO: 29019

SEQ ID NO: 141375 - DNA, 1663 bp, Arabidopsis thaliana landsberg
gtattgccctatgatacactaatggtcgagttagatgtttccaatgttcgcgaactcgaggactttcttatcaatgaatgcatgtatgcggtgagtactctttagcagtcttctaatctctatttgacaactaactgtgacaacgcatggtgctcattttttttcttttacactttgcagggtatagttaggggaaaactggatcagttaaaaagatgttttgaggtgtgttttggtttgggcctccttttcctattttaaccattgtgctttgtttctaaacgtacgagcccccccttctaaacatcatatatctcttgcaaccatgcaggttccgtttgcagctggtagggatctaaggccaggtcaactagggaatatgttacacacattgtccaactggtagttttcttcttcccttagatccaggattttttgccttctatatctaattataagaacttgtacgtgatgttagaatacatggctaatgacgtcctactcttttatgtgttggcccaaattgatgtctaggttgaacacgtcagagaatctgctcatttcaattcaagacaagatcaaatgggcggacaatatgagtgagatggacaaaaaacatcgtaaggaagcagaagaaggggtggaagaagtgaagaagtctctgtccatgaaggtcagtcgcgcttggagtcctattggcttcacttttccctactaagtatattatgtaactaatattggttacattctttcttggttactgtcttgtgaccatgagttagagtccagtcagctattctgtcttatatttcttcagagaattgtagtgggtttcttcttattaatagcttaggtctatgtaagcggggatgggagagacttgataaaaaaatctttctaggtctttgagctttccaagtccagtcctatcatagattaaaaagttatgtttcttaataacaaacgaatcgatcagccaactgtggcgggcttttttaaccgttctttcgtggaacaagaaatcttacatgttggatgtaaacatttattatgaagttttctttaattaaaaacaaacaaggaacgcaatcacaacggctgttagtgaagtgttaaagtcattagaggacatgaattgtttggaatggtagtacttggttattgtctgattgttaaatgaaatgaaacaaggttcgtttggttttttgtgtctgaaatatgattgggaagggtggtggtcgatatagtcttacttacgttgtgggcagggggatgttgacatcagagggaataaggagatgtttggggaaccaagtggagtgatggactacgaagaagatgggatccgaccaaagaggtaacgaatattagatatgagtgagatgataagtacaaaggagatgatataacatacacacattcaactttggaacgcaggaggaggcatcctgtaacaaggtagaggagcaagagagagcaaatggtcagtgcggattgacattccatttaccgagagtagattatgattatttggttgcggattttcaacttgtataagatcctctgttctctctcacaataaccccttgttatgtttgatttccctcattagcaaatttggtgtctctctgcccattaaaagaaaaatggctttgaatttagt

SEQ ID NO: 141376 - DNA, 3533 bp, Arabidopsis thaliana landsberg
acattgtctgctatatcttctgggccggaatgatattcccatctatgaagctgaagttggatctgctgctaaagtacatttctttctccactttctctatttgtatgaatctgagtcattgaagtttatagtacatgttcctgcagttttgctccgttctggctccagctctttctttttgacttagtttcatggtcatagtatagctctctagatttaacccacgggagaggtgcaaagttcatttattaattgtcaccgttgtttatttggctagtgatatgaaaagggttgctatatccattgtttaaattatttttggtcgaggaacgtttcaacctgttttacataaccaagcaagcaggccttgttcttactagataattctaataatatagttctataagatcttctattgcttattgcatgactcattggtttctggtctatcacatagttatttatcctttcttactgacggaagttttcctgtttttgtcttgatcttttcatctagctggtagatatatgtttcaaccaattggtatgtggtctagtcgataagttgcacatcagtctcttacaccattctctctatttggcagagagaagatgctgcacagttgcaccaatttatattacatgcagcgttagatgttgtccaagacctagcatggactacaagtgccatgtaagtaaagtctcttgtgaaaatatattatcattttaaaggatccatctcattgtcatacaagtcttcaggttcttgaagtcagtggacaggtttaacgatctggttgtgtcagtatatgttaccgcaggccatatcctttttcgttagaccctttgagatttaagtgcaaataaaaatttgatgtaaaaagtgtcaggctggtatattggcttttgtgcttaacagattcttatgcagttgtaaatatctgtttcttccttaatttatcaacacatacccgactgatgctccttcatgattcacggaatgaggacggcatcaagagcttctttcaagaggtgcatgagcttaatataaaggtaaattttcttgatgaaatgaattcgcagttgtttgttctgtcctgattttgttgatggaaaccaaatgatttgttcatgcagattcttctgaatcccttgtatcttcctggttctcggataacgtcgtcacattttgacaccaaagtacgtgcacttgcaagaaagtacctgtagagaagacggagattctgtttgcatttggtgatcaaatttttcttgtacccatatcgcatagttcccaagtcaattgtttctgttttctttttgagtgcctggatttctgttatttctaacttgcaagcaacattttaataagaatgggattccttgtttagtatgagtaatgaatgatccattcaatccaaaataatttcatctttggttgttattataaagtctctcttttcctcagaatctattggaaaacaagcgtacatgtacgatgtatatctttctgaaacatgaccaaacgcctaacataagttaatgtgacacttttaattgctaatccgcaattaattaggtactttattgaagtttaaaaagacgattaaccaattaataaagaggccacatgtgaagtaaaagcaccaatcgcaagatagaagtttcccaaaacttatcaaatctctgagcatcgttcgccgacgaggcagcaaggacgaccaattgagacgttgacccttaatccgattagaacaatctctctctctcttggccgagattcatagaagcctcttctttagacttattcgatctcggataatcaacaaagattatcttcttctgtcttttttaaaaataaaattagagagcagatcttgcgaatggatagcagttactctgtcatttccaaaacttcttacgttgagttacagaaaccgacggttaatgggaaacccagaaacaagttgcttctttctgatgaagaaagcttcgtcaatgattttgacgatgcccgtaatggtgttgggggtgaagatgctgatgatctcgatttcgatgtcgctgattacccactcgttcatggcaaatcatccaatcaaggatctgggatttacggtgctgttttcaatctcaccacttctattatcggcgccgggatcatggcattgcccgccaccatgaaagttctcggcttggttctagggtttgttttgattatcctcatggctcttttgtctgagattagtgttgagcttctggttagattttctgttctttacaagtccaaatcctacggcgaggttgttcaattcgctttggggaaaaccgctagggttttgtctgagatttgtatcattgtcaacaatggtggcgttctcgttgtttacttgattattatgggcgatgttatgtctggttctctccatcacattggggttttggatcaatggttagggaatgggttctgggatcaccgtaaagttttgattttgattgttatggtcatcttcttggctcctctctgtgctttgaacaagattgattccttgagcgttacatcagctgcttctgttgctcttgctgttgtctttgtggttgtctgttttgttgtcgccaccatcaagcttatcgaaggaactatcgaccctccaaggttgtctcctgactttggttccaaacaagcaattttggaccttcttgtggtcattccgattatgtcaaacgcatacgtttgtcacttcaatgttcagccgatatacaacgagcttgaagaaaagatcacctcataagatgaaccgagttgggagaatcacaacagccatttgtgttgttgtctacgctttatctgttgtatcgggttatctcctcttcggcgaggacgccgaatcagatatcttgaccaactttgatcaagatctcggtatccggttcagctctgcggtgaattacattgtcagaatcggctacattcttcatctagttctcgtcttccctgtgatccatttctccttgagagaaaccgtcaataccttactgtttgaaggctcgcctcctctatccgaaagcaaaaagagatctttgggactcactgtggtcttgctggctcttatttacattggctcaacgatgataccaaacatatggactgctttcaaattcacaggcgcaacatcagctgtttcacttggttttacattccctgctctgatcgcattgcggttagggaaacagagcaattcgttaagcttcgtggaaagatcagtgtcatggctgatgctaatcttggccgtagtggttagcattgttggaaccattggcaacatttacagcctcgagagcaaatcagattgatacttatagcagttttccaggatcttgtagatttatatagtcagagattctcagtccaataccgaaccggaaatcttcagcgactgctacatgcacctttaggatgtcgatcaatggcgtttgttcaggctaagcctaaagatttccggtttgtgaattatatgtatacagacacctga

SEQ ID NO: 141377 - DNA, 2207 bp, Arabidopsis thaliana landsberg
ccgggactcgacgacttgccgtcgagactctcgtgtgagtccgtaattatttattcttcaactaaaatcaataaactattgagttataatcataatcgaatggtccagattcaagctcataccataccactaaatccatggtacatacaacgtagcagagtccttctctccttccttccctcttttgttttttcctctccctctcattttttttgttctctaaaccaactaaccgcaaaaaccaaaaaaaacccccaaaaaaataaaaatctctctctcctctccgtttctctctctgtcggagggagtgccggaatcgcgcgtcgacgggaagaatatcgccggaaaagctcaaaaatcatcgccggtcgcacgaattattcgttggaaacaacgcgtcgtgagaggaggggaaattcgaaaagagaaagaaaaaaaattgaaaacgccgattcactttttttatatatataatataaaaaatttcttttacggaattaaatattctgtgatggatgcgattggatagaaggaaacaaaaaggaaaggaggaagataaaagagagaagaaggaattattctcttctctcttctctttcatctctgtctacatcgctgttttttttttttcttcaaggatcgtgatacctgaagaagaagaaggtaaaaaataagagttaacgagatccactgtttgttgaaaatctggtttgaatttgtttaagaggaagcataattgtgtttgtttgtgattaggtaagttttcttatttttttggtagctggtggtgattagggtttttatttttatggtttaataatttggaaatggtttaattccgtgccgaatttgtgaattaggtaagagttggttcgctgtttgattataatgagctgcacaaggatccggtattaggcgaattctactcttattgcttctggatgtacctaatcgtctcttctagatatttctatgagcttaaaatgcagcgatttgatatgttttgcctctctagtggttgaagttgctaactttgttttatccttggacttcgcgtaattctagtagaaatcttctgtttctctacttttgtagttcttttgcttgatttttttggcttgtacgtgagtaattgagcacttttatgtgtcgtttttgcaagatcttcctcgcaattgagaaatgcattttgtttatgtagacactggttttgacttgaccacttttttttttttttcaggttttttcaggggaagtgatatggttcgttgaaataagtttaaagttttaaaagattttgattctggttttattagtcaaattttgtaagatgccgtctgatataatggaacagagaggtgtttcaacaccttcccactttcatgaagatattcatattacttcagaggtaaactctttgttttcatttgtttcaggatttaaactgtgtagctctagaattgctggtatcatatttctcacgtatgacattatatctgccactagtttttctcaactatacttgtgcttttttgttcggcagaggcaatttgggtttatgaaaacagacatgatgcctgaaaaccaaggtggtcgtgatagactttcaagtatgccaaagagttcctggacatctgaaagttaccagctgaagccacaatctagtttttctgggtcgcacccctctggtagccctaacgcaagaaacactacaaatggtagtcagtgggaaagcagtttattttccagctcaatgtctgatttatttagtagaaagcgtaagcttctggttcacctttatggtttttttaattattgtgttagattttttattcagcttcctaaaatctacaatcctctatggtaaaaaaacattgttacttgtgtgctctgacttactgtactttaactacttgagcgtgtctccaacttgctgttttttgcagtgcggctacagggaagtgatatgctatccactatgtctgcaaacacagttgttacccaccgtgaagaaccgtctgaatctttggaagagattgaggcacaaactattggaaatcttctcccagatgaagatgatctttttgcagaagtgacaggtgaggttgggcgtaaatctcgtgctaatacaggagatgagttggatgagtttgacctcttcagcagtgttggtggcatggaactagatggagatattttttcttctg

SEQ ID NO: 141378 - DNA, 1007 bp, Arabidopsis thaliana landsberg
  unsure (1)..(1007): unsure at all n locations
cttactctccgactcttcttttatccaagaacggcggagatgcggcaaaacagagcttctcctctgcctcgttcaaccgctaacgccgccaattccagcgtctaaatcggttgacgagacattaatggttgacgagaaaaaatcagaggatgagtcacacccgcgcgttttctgcacgccgcgttttggattgagcgtttacaacgctgcgatgtccacgtggcatcgcgttgcgtttccagaggaggagcagatcccgcttttctgcgagtgcgtcgtgcttcaggacgccgggaagattctgctcatcggcggttgggatccggagacgttacagccgacgagagacgtnnnnnnnnnnnnnnnnnnnngaaggaagtggagacgaggtgcgccaatgaaggaatcacgatcattcttcgcctgcgcctccgtaagtccaacgaaggtatacgtcgccggaggtcacgacgatcagaaaaacgctttacgctcggcggaggtgtacgacgtcgagaaagacgagtggtcgtcggttactccgatgacggaaggaagagacgaatgtcaaggattcgccgttggtatgggtctaaggttttgcgtgctgagcggttacggaacggaatctcaaggaagattccgatctgacggagaaatttacgatccagcgacagattcatggtcgagaatcgacaacgtctggcgatttccagatactagcccgagaggtcgcaccgccggagactttagaagctcctctacgttatggtgtttcacagacactgatttacagagtgaacgtcgatgggaaactaacgatgattcgagaaatttgaaactggatcttcaatctatacagcttccgatgacaggaagctcagttttcgccggaagcttaggaggtgaatcggtggtaatgattggcggtaaaagagagagtgaaggtgaaggtgaaggaggagtgatgatgaagatgacgactgagaagaaaatgggaaaatgga

SEQ ID NO: 141379 - DNA, 768 bp, Arabidopsis thaliana landsberg
gtcaccacatctaagctatggcggcaagttggagaatcgctccatcctccaaagtatggcttgtattgtcctcaatcttcaacctttttcgctttcttgtatgaaattgactttcccacatttttgtttttcagaacatgcactacagtctcctggacattccgcattttctatgaaaaggtgaatttcatttttggtctaagtactgaatatgcattgatattaatgaggttgtacttgttcagtttagttcatacatgttcgattcagacaatgttcttttgctccttttgtcagtagtgtgtctgagactagctggtttcgttatcatttatgtcgtggtttagtagccttctaacagtttatttggattgactccttcctaacatggagtctggttgatttctatcctatcaagatgtggaaatttcattatttgtatccttatttccaaccgcaggcacttttggagtatgagaagcatttaaggcaaaatggtgagcttaaccttcctggttcagcttctcttccgtcttcaggcattgaaaaggaggttagaattcctatgaaattgtgtaattcttatgcttttgggtaggtgaacactttgagaggaggtcaatttaagagtaggtaaccatgttgttaaattagataaagtgaaagctctgcagttctttataaaatcattttatacagatggaaatttcgggcatgagtaatatcagcttaacatgttgaatactactctctgcaatctgattgaat

SEQ ID NO: 141380 - DNA, 929 bp, Arabidopsis thaliana landsberg
tgaaaccctagatttctgcaactgaattcctaattcgaaaaagaatggagggttcgtcgtcgacgatagcaaggaagacatgggaactagagaacagcattctaacagtagactcacctgattcaacctccgacaacatcttctactacgacgatacttcacagactaggttccagcaagagaaaccgtgggagaatgatcctcactactttaaacgagtcaagatctcagcgctcgctcttcttaagatggtggttcacgctcgctctggtggtacaattgaaataatgggtcttatgcaaggtaagaccgatggtgatactatcattgttatggatgcttttgctttaccagtggaaggtactgagacaagggttaatgctcaggatgatgcttatgagtacatggttgagtattcacagaccaacaagctcgtaagtgagattcaagaaacttcaaagttttgatttttttctttagaaagtttgtatataagtcagaacagtttgattgattatggttataataacttgacctttataaggcggggcggctggagaatgttgttggatggtatcactctcaccctggatatggatgctggctctccggtattgatgtttctacgcagaggcttaaccaacagcatcaggagccatttttagctgttgttattgatcccacaaggactgtttcagctggtaaggttgagattggtgctttcagaacatactctaaaggatataagcctccagatgaacctgtttctgagtatcaaactattcctttaaataagattgaggactttggtgttcactgcaaacaggtacattttcttgatttttctcggagcaaggtcccaacatgattcttatgtttggcttttggttttggcagtactattcattagatgtcacttatttcaagtc

SEQ ID NO: 141381 - DNA, 2032 bp, Arabidopsis thaliana landsberg
gttgcagggtctgagaaaatggtggacgctgttgtaacagtgtttttagagaaaaccttgaacatcctcgaagaaaaaggccgaaccgtatcggactaccgaaaacagttggaagatttgcaaagcaaattgaaatatatgcagtcttttctcaaggatgcagagaggcagaagagaactaatgaaacgttgcgtactcttgttgcggatttacgagaactggtttacgaagctgaggacatacttgtggattgtcagctcgcggatggtgatgatgggaacgagcaaaggtcatcaaatgcgtggctttcgcggcttcatcctgcccgggttccattgcagtacaagaaaagcaaacgtttgcaagagatcaatgagaggataacgaaaataaagagtcagccttatttcaaattcagaacgccaagtaatgttggaagagataatggaactgatcggtggagctctccggtgtatgatcatactcaggtggttggtttggaaggagataaaagaaaaatcaaggagtggctctttcgatcaaacgacagccagcttttgataatggcctttgttgggatgggagggctaggtaaaactacaatcgctcaagaagtgttcaatgacattgagatctttcatcgtttcgaaagaaggatatgggtgtctgtgtcacatacttttactgaagaacagatcatgagaagcatattgcggaacttgggggacgcgagtgttggagatgatattggaacattgctgagaaaaatccagcagtatcttttggggaaaaggtacttgatagttatggacgatgtatgggacaagaatttgagctggtgggacaagatctaccaaggactgcctagaggacaaggaggtagcgttatcgtgaccacaaggtcggaatctgtagcgaaaagggtgcaagcgagagacgacaagactcaccgtccagagctccttagtcctgataacagttggctgctgttttgtaatgtggcatttgcagcaaatgacggtacttgtgagcgtcccgagctagaggatgtcggcaaggagattgtaacgaaatgcaaaggtttgcctttgacaatcaaagcggttggtgggttacttctgtgcaaagaccatgtctatcatgaatggagacgaattgcagagcattttcaggatgagctaagaggaaacacttctgaaactgacaatgttatgtcttctctgcagttgagctacgatgaactccctttccacttaagtcgtgcattctcacgctttcgctctatccagaagactgtgttataccaaaacatcaactagtacatggatggatcggagagggttgtgtcatgtggagaaacggaagatctgcaactgaatctggagaagactgcttttccgggctcacaaacaggtgtctaatagaagttgtagacaaaacctatagcggaaccatcatcacttgcaagattcatgacatggttcgtgatttggtgatcgatatagccaagaaggattcgttctctaacccggaaggcctcaactgtcgtcaccttgggattagtggaaactttgatgagaagcagatcaaagttaaccataagctgagaggcgtagtgtcaacaactaagacaggtgaagtgaacaagctcaactcagacttagctaagaaattcacagactgcaaatatcttcgggttctcgatatctcgaaatccatatttgatgctcctctgtctgagattttggatgagattgcaagccttcaacacttagcatgtcttagtttgagcaacacacatccgttgatccagtttcctcgttccatggaagatctccacaaccttcagattctagacgcaagctactgtcagaatctgaaacaacttcaaccttgcatcgtcttgttcaagaaactccttgtacttgacatgacgaactgtggatcccttcaatgcttccccaagggtatcggaagtctcgaaaagctcgaagttctgttgggatttaagccagccaggtccaacaatgg

SEQ ID NO: 141382 - DNA, 1055 bp, Arabidopsis thaliana landsberg
cttcttcctgcaaactctctctttctctctcgagaaccttaagaaaacgttacaaatggctgttgaagcaagacacatgaatctcttgtcttctcaatacattacaaacaggtaaatttcattctcttcacgattcggtttcggtgattttttttttgcagttgtattgattttttttgttacatttcttttcttccagagaatgtgttaaatctcaaacgaatatgaacaacggacaacaaatcgccggcggtggttttccgttaacaatcggtgatcggaatttacagtacatagatccgattaacagcttcaacaaatcagaaagcgagctcacagctatttcaaaacgtcagagagattcaacgtttgattcagacgctttaatcgcatctcagaaacgcagagcaatcgcgttttctccggcgtcattaatcgacgcagagttagtttcacagatccaacagcaaaactcagaaatcgatagattcgtagcgcaacaaacggaaacgttgagaatcgaattagaagcgagacaaagaacgcaaacgcggatgttagcgtcagcggtacaaaacgcgatattgaaaaagctgaaagcgaaagacgaagagattataagaatggggaaattaaactgggttttacaagaacgtgtgaagaatctctacgtagagaatcagatctggcgtgatttagcacaaactaatgaagctactgctaataatctcagatcaaatctcgaacaagttttagctcaagtcgatgatttagatgcgtttcgtcgtcctttggttgaagaagctgatgatgcagaatctagctgtggaagctgtgacggaggtgatgtaactgcggttgttaacggaggatgtaaacggtgcggtcaattaacggcgagtgtgttggtgttgccttgacgtcatttgtgtttgtgtacggattgtggatcgtcggctctgttacggacgtgttctgtatgtgatatggtcatgactgctagtgttcatgttaacatgtcatcatgaccattttatttctttttttcaagttga

SEQ ID NO: 141383 - DNA, 658 bp, Arabidopsis thaliana landsberg
agaatcggtgccagagattcatcatcatccacatcacataaacacaaaatccggtttttaataatggcgaaaatctccagtattcacattctcttcttcgtcttcatcacaagtaaccaacaacaaagcacactctgtttttgtttcttctctgtttcacttatgcatttaggttttttggttgtatttaactgtttttgaaattgcaggtggcattgctgattccgccaccgtattcactttacaaaacagttgtgcgtacaccgtttggccgggaactctctccggcaacagcatcaccctcggcgacggcggatttcccttaactccaggcgcttccgtgcagctcacggctcctaccggttggtcaggccggttctgggctcgtaccggctgcaactttgacgcctccggtcacggtacctgcgtcaccggagactgcggcggcgttttaaaatgtaccggcggcggagttcctccagcgactctagcggaattcaccgtgggatcaagcaatgccggcatggatttctacgacgtgagcctcgtccacggttacaatgtaaagatggggataaaaccacaaggaggattcggaaattgcaaatacgcagggtgcgtctcggacatcaacgagatttgccctagagagtcttag

SEQ ID NO: 141384 - DNA, 295 bp, Arabidopsis thaliana landsberg
tctctatctgtcattcatcatcatcacaatcatcatcatcaaatctcaggatcttcgaggtggttcttctgtttcgcaactagcttctagattgtgatttacaatcttcgaactctcggtgagtttctaggtttagggttttatctctctttacacgacaattgttatggccaatcgagaaagagatcgagagcttctgattcccgtcgctgatttcggcgacaaagacgatggttcttcttcgaagccttcttcttcttcctctgcttcttcttcgcatcaatccggccacgag

SEQ ID NO: 141385 - DNA, 2703 bp, Arabidopsis thaliana landsberg
cttttctctctctccttctctttctcttcgcgacattgacaaaagaaaaattgctcaatctttgaaaaaccagaacaattaacgccggtgattgtttgtatttcgctatgttatctgagactttcaacgatggattcatcaaggcaacaaacgatgttcacatcggcggaagtttgcttaaatcgaaaaatagcaaattggattcggagagttatcgccgacgccttccccacattaggtatgaatcaattctaatctttattacgtgattagatgttgtatttggtggtttaatcaaaaaaattagggttttggaattgaagaaaatttagggttctgttttttaaaattagggttcttcgtttatagcaagattagggtattttttgatatatcttgaagcattttctatagttttgtatggtcatagatcgttttggagacatgttgtatagatttgtatggtcatagatcgttcgatagtttgattttctttttaatgtatatgtagatgtgattgattgggtttagtaaatgtaaactttgttgtttaatatctgtttctgtgattgaatcaaattggaaagttaactgtaaatgctaattgttgtttttttctctatgcttttggtgagtgttaatggcggatgagcaagtggttgtgagttaaggagaaactgtaaaggaattcgtctatgcacttcaatgaaggtaaatatgtacttgattgattgttatatagcattgattgttatttttttggtggatagacgttacatagattttcactgtgataaatggtttttgagaaatgataaagcttttgatagtgataaatgtgagctttagacagtgataaatgtttgcttgaaggtaaatatgtacttgattaattgttatataacattgattgttattttttggtggatagacgttacataggttttcactgtgataaatggtttttgacaaatgataaagcttttgatagtgataaatgtgagctttagacagtgataaatgtttgcttgaagttgatttcaactaataaccataataatggcttgaagttgattacgactaataaccataacttttgcttttaaaaatctttttgcctttactgaaattattaatgtcgaagcagtttatatataacccaaacatccaaagctactaacttaaaccattctattccttaaactcatagcttctcagttaacttttctcttctttaaacacatagctacccttctttctactctaaacatccaaagcacttgaaaatggattcttacaatccattatttcaagcttccggttttatggacttgttacaaagtcaacaagaaagctacaacaatgaggccaatcaatatgaggttggatcctcagaaattcccgtttttggaactcaacgttgtcaagaaagtcatgaggaacgctctgcttctagggtggccattgcaagaaagaaatgggcagctaaagaggatatagtactcattagtgcctggttaaacactagcaaagaccccgtggtcggaaatgagcaaaaagctccagctttttggaagaggattgcttcttatgttgcagcaaatccagaccttgacggtgttccaaagagggcgtcggctcaatgtaagcaaagatgggcaaagatgaatgagctagtcatgaagtttgtgggctgttatgccacaaccacaaaccaaaaagcaagtgggcaaaccgagaatgatgtcatgctctttgcaaatgagctctttgaaaatgatatgaaaaagaagttcagtctagatcatgcatggaggctgctgcgacatgaccaaaagtggttaatatctaatgctcctaaagggaaaggaattgcgaaaagaaggaaggttcgagttggtactcaagctgcaagttcacaacctattgatcttgaagatgatgatgtaatgcgtcggcctccgggtgtgaaggctgcgaaagcaaaagctaagaagacaccaacagttaaaggagaagaagtgaattcagttgaacacttgacttctttgtgggatcttaaggaaagagattgggatcgtaaggataagcaaagcaaaaaccaaatgcttgaaagtcttctttcaagaaccgaacctctttcagagtgtgacttggttcttaagaagaagctaattgaggagttgttttcataagtaccgaacctctttaaaatgtttaatttctttctaagtacttctaggatttgtttcaatgtcacaacaatggcatgtttaatttgctttgtctgtttttattgcaaatcactttgcttatgtatgatattgtcttaatgttatgtatgtattgctttaatgctttttatgatattgttttgtctcttatcttatgtcacaagtcatatttggccttatatgtcacaagactttgttgttaacttttgcagtttatcatcacgggttggagacaaagatagacaagacacgtaacttgcaactcatgttccacttgatgccaaaagagacatatgattcgtttgctttgttgtcttgtttttagctttgttgtcttctttttagctttgtatgtttccaccacttgtatgtttttagctttgtaattttgaccacaactttttcttaaaaactttagctttgtattttggaccacaagttgtcttgtttttagttttgtatgtttgta

SEQ ID NO: 141386 - DNA, 995 bp, Arabidopsis thaliana landsberg
atgtttattcagtgattgtagttttcatattaatcgagctctcatggctgtttatgagctgtttcagctgctccgcatgttaaggaaacttgaaagtgtatatagatgccgagataaagcgagctatccctgtgtagtttctcggggtcgtagcgaacacaataaattctttacaatgttgatgtgcagtgaaccagtgaaaaggctaagtccaatgcgtttagttgtgtgttagttttccatgagagaagtgctagtagcttcctttattaataagctttgatcttacaggaggagctgatcagttcaaatagttgttattcttgaacagaatgaaaatctggttaggttataattatgcttgtttggtgtatttgttttttttttcagtctctacatgcacggccaaatattttgtctattgcttttccgcatcagtaagttggagataaattttgtttttggtcttatattctttccccattaatttctcggattctgcagccgcttaaagcaatgtagaggaccgtttgctaaaagaaggcatccattagttgactctatggttgtttccgagataagaaaatgtattgatgagggcattgaatttcaaggcgagttgttgaactttaggaaagatggatctccgttgatgaatagattgcggttgactcctatttatggagacgatgatactattacccatataattggaatccagttctttatcgagacagacattgaccttggacctgttcttggatcttcaacaaaagaaaagtcaattgatgggatatactcagctttagctgctggggagcggaatgtttcccgaggaatgtgtgggttattccagctgagtgacgaggttgtgtctatgaagatattgtcacgcctgacaccaagagacgttgcatctgttagctctgtgtgccgcaggctatatgtgctgacaaagaatgaggatctttggcgaagggtttgtcagaatgcat

SEQ ID NO: 141387 - DNA, 3621 bp, Arabidopsis thaliana landsberg
agacccttgtcagaagagagagtgaccaccacactcttctttacatcaatgcctggtttttccatcaagtaacgctagaaatcagaaacacatccacaataacaacaagagatagcaagaggatggatatctcagactatagtaagagcaacagattgttcgtcgtcatcaatattcaataccgatgcaagcccggagtgatactagaacaaagttattaagaaaaacaactctatatagccaaccatactgggattatctcctagaagtgcagtaaatggctgccaaagtccacgggagttctcagctcggccttgaactgctctaagcttggaagcagcaaccatcttcattgcctttgtgatcttttggatgttcttaacactcttcatgcggttacgactgcacagagaatacatgtaaagcaattcataaagattagaacatcacagatttcttagaacacaatcctaactaggtaaaccaatctccaattatcagctttgacttacccacttgagttgagatagatcgaactccaagaagtccttcctccctacaaatcaaatacaagtttagtcctcatcatcctaaatatcacaaagttttgcaggtaaaagctgattaaatctgacgagcttagacaacatatcacaaagtctcttctacgaggaaaatcaaattggtcttgcaataggaaattcaacgaaacgagcttaacaggacatttccgagtctcaaaactccaaatagacgaacaaaaacacctcactcattagcagctcccgagtcaaacaacacaatttccataaattttcgtcgattcgaatttcaaggaaatgaaaacatcaacgactcaattaaatcaaacgatttcaaattcagaaaagcatcacagaggaacagcgaaatgtgtgtttatacgcaaggataagatgaatgagaaagagatctcactggtcagaagagagaggagatcggatagcagcgattgggcgagcggcgattgaagggaggagacgcctcccttcgcgacggaaaacagccattgccattgattaaaggattgatcggtaaacaacaaaacctagctccggcgaaatttctcagatcggattatagagagagattcgagagagatgactgcaatgggcaaaatcaagggcttctttatttctcagtctacacagtagttttgtcacgacgtcgtttccactttattaccaaaatttcccctgaaattaatcgggccgaatagaggctaatactattactttttcggcccatcttataaggcccaaaggtatctcctcagattatcaatcacgtcgtcatacacgtcttgtttccttttacatttttgagttttgaccatgacttcttctttctccaatctataaccaaattaatgcgagttgtttcataacgcaacatactcataataaatgaaaattaaaaaaatatcaagagaaggtaacatttcgccaacctattaattattgaaaggcccacttaatttatttttctgtatctgtaaacaataagatactattaaacagaattgtcatcatcgttacgtcatattaatgtgcgttcatttgatccaatgagagtaaattgctgagtgttgatttcctcttgttgctaaattttgaagccaattttaacagtcaactataactcccagttatatagtcagagatgtccacgtggaatttacttcatgaacaaatgtgactcgtagatatttcacgtgacatttaaaccccacatatttagtaaaggcggcttaaaataacatatatatagcaaatctttgatatgtctttttttgggttcaataatttcctcaacttgttggttcaatcacaaacaccatgcgtttgcatttttgctcgctactcttactctactgtatcgtcttcgtttcaagcttcttgacgaccgacgctcttgcttgtcttcctgaccagatccaagctctaatccaattcaagaatgagtttgaatctgacggctgcaaccgcagtgactacttaaacggagtccagtgtgataacacgactggtgcggtcacgaagcttcagctcccaagtggttgcttcactggaactctcaaaccaaacagtagtctctttgagttgcatcagcttcgttaccttaatctctctcacaacaacttcacttcctcttcactcccttctgaattcagcaatctcaccagattagaggttttgtctcttgcctctagtagctttactggtcaagttccttcctcaattagtaaccttatcttgcttacccatttaaacctttcccataatgagctcactggtagtttcccacctgtaagaaacctaacaaagctttcctttttagacctttcttacaatcaattctcaggagccataccttttgatttactacccactttgcctttcttgtcttatcttgatctgaaaaagaatcatctcactggttctattgatgtcccaaactcttcttcttcatctaagctagttcgtttgtcccttgggtttaaccaatttgaaggaaaaatcatagagcctatctcaaagctcataaacctcaaccatcttgaacttgcttccctaaacataagtcacccaattgacttacgcgtcttcgctcctctcaaatctttgttggtctttgatattcgtcaaaataggttattaccagccagtttaagttcagattcagagtttccattgagcttaataagcttgattttgatccagtgcgacattatcgagtttccaaacatctttaagacccttcaaaacttggagcatatagacatttccaacaatctaatcaaagggaaagtacctgagtggttttggaagcttcctcgtcttagcatagcaaatcttgttaacaattctttgactggtttcgaaggttcttcagaagttttacttaactcatcagtgcagttactagattttgcctataactccatgacaggagcgtttcctactccaccactcggttcgatctacttgtctgcgtggaacaatagtttcacagggaacatacctctctcaatctgcaaccgaagctctctcatcgtccttgatctatcctacaacaaattcaccggtccaattcctcaatgtctgagtaacttaaaagtagtaaacctcaggaagaacagcttggaaggaagtatacctgacgagttccatagcggtgctaagacacagacgcttgacgttggctataatcgactaaccgggaagcttccaaaatcacttttgaattgctcctctctgaggtttctgagtgttgacaacaacagaattgaagacacgtttcctttctggctgaaggcgctacccaatttgcatgtcttgactctccgttcaaacagattcttcggccatctctctcctcctgatcgaggtcctctcgcgtttcccgagctgcggatacttgaattgtcagataacagctttactggaagcttgccaccaaatttctttgttaactggaaagcatcatcacccaaaataaatgaagatgggcgtatttatatgggagactacaagaatgcttattatatctatgaagatacaatggatttgcaatacaaag

SEQ ID NO: 141388 - DNA, 615 bp, Arabidopsis thaliana landsberg
gtcccgtaccaacctcatcttctctcatccacgtaagtgaaaataatttcaccaaatcaaaattttctcatatgaccaatgaaatcacagcttttaaattgtgaagaaaccaaaggagaaatcgaaaccggggtgggttaaacacagagccagcagctacgaaactccggtttatccaccgccacgtcatcatgtacgtaacgtacgaaagagacacaactcgtttgacgtggaagggaacaacaatttcttcacgagatctcatgatgatgacgaaaccacctctcgaagatccaacgtcacgttctaccgagttcttcaacaagttcaggagttcgagtcgtaacaaaatatcaaatctctttgagatgtttatgttggggtaatgtagtagttctatgtagtaccaaagtttcggtatacttgttatttatattgttattcggtgataaccggtccggtcagattcggttaacagcttaaaaaatgttataatttctacttttctagtttcttatgagtgcatgggcattttcagtataatcctatgttagaatgggccgtattttatgaaagtcaatatatgggcttaactgggctatactttctaagttc

SEQ ID NO: 141389 - DNA, 794 bp, Arabidopsis thaliana landsberg
gtttcatttctcctcttggtactcgggatagtatatgttcaggtactataccaaattttgttccttttaatgaatctaagaagtttggtatgcttatatagtctaacaagcaaagtttttcaggaagcagagaggaaaattccgctcaattatgcctcgcgatacaccagcaaagctggtgggcttcagaaatctgcttatcttccattcaaggtcaatagtgcgggagtaatgcctatcatattctccacatcatctcttgctcttcctgctactttagcacgatttaccggcatatctgctttgaagaatgttgcttttgctttaacccctggaggtaagttctcctaatacacagcaagtaagaagattgggtcctttgaaactgttttttgttgatgacttcacaaacaaactattgcaggttctttctatcttccaaccaatatacttctcatagctttcttcaactactactacactttcttgcaacttgacccggacgacgtgagtgaacaattaaaacgccaaggtgcatcaatccctctagtccgacctggtaaaagcactgctctcttcatcaaaaccgtaagatcttttctccctctctccttgatcaatttttacaaacttcccattttggtttatcatctaacaactatctgaaaatgtctcgctctgattgcaatatcaggtccttggccggatatcggttcttggttctgcatttctggctgttctagctgctggtcctgctgctagtcgaacagatcactcacttgacagcattcaga

SEQ ID NO: 141390 - DNA, 387 bp, Arabidopsis thaliana landsberg
atggcttcgtgtgccatctcaaactcatttcatactgtaaccttcaagaccttgaagagaataagtccttacaacagtctattcggttggaactccggtaagaaaatagacaatatccggccgccgcaacaaccggcttaccacgacgatgtcgaaattcctttctctctttcaatggtaaacaaaaccttcctaaaaggtaaataaatttattcccttcttctcaatctaagtccttgtagcaacatgtggacttatatattctaccactaggaataagtatatttcttatctaaagttcttcaactatataacaatcttttttattaggaagagagttaaaatgttgctacaaggcaagcattgatgggtttggtgcaacaaagt

SEQ ID NO: 141391 - DNA, 774 bp, Arabidopsis thaliana landsberg
cggatcctggagcattttcagccttttgttagagtccaatacaggaaccttatcctccttaaaagtcatttcatcctccagaactcgcttcaagcgagaagcacgtggacgcatccctggtgtttctggaccaggaacatcgtcatctactcctatatcttctactgatctaagttcagctctcccactgaaactaaaagcatggtttctttcttgagttttaccattattggaacgaaattgaggaataacatcattagccttcatacatagagatgaatcattcagcggaacaacatcttctcggctcctgaaaatttgtaaacaacgatccaatgcagtaatcagaatctctccaacgaatacaacaaattacacgaatcttcttcttccagctaaagataacaaaattaagagaatcgaagattagtacctctctccagaacaatctcgatcatcgacttttacaaacttatgcataatattggagaacagggacgaagcatcaccggcggattcagccggcttaaatccagacggcaggacacgacgcggaaccttctccggtggagtatccgttcctctaacctcatcgacagatttcgaaacagcaaaacgtacagaagcgtcgcctttagcatccccttccttcacattaaatcgtggtcctccgctgccgcccccgccgctagcagcatcgccggaaaccaaacccttcgtagtcgccgccgtgggtttttggaagaaagacaaaatcgatctctggcgctgcat

SEQ ID NO: 141392 - DNA, 5062 bp, Arabidopsis thaliana landsberg
ggaccaagattgtggatttcacccagccatacattgagtcaggccttgtcgttgttgctcctgtcacaagacttaacgaaaatccttgggcctttttacgcccgtttactcttcctatgtgggcagtaacagcatctttttttgttattgttggagctgcaatatggattcttgaacaccgtataaatgatgagtttcgtggtccaccaaggagacagatcattaccattctctggtaagtacacgagagccatcttatttgtctgcataaaatgaagattactataccttatgcaagctttaatcttttcttacgatgcaggttcaccttttcgacgatgtttttctcccatagtaagtctcaaaaccccctcaagctaattactgcaattcctgtgtgaaatttcgtaacatctttatgaaatcaaactctcaggagagactacagttagcacacttggtcgtatggtgcttctgatatggctttttgtggttctgatcattacatctagctacacagcgagtctcacatcaatacttacagtgcaacagcttaattcacctataaaaggagtagatacactcatcagtagcactggtcgtattggtttccaggttggttcttttgctgaaaactacatgaccgatgagcttaacattgccagctccagacttgtgcctctcgcctcccctgaagaatatgctaatgcgcttcaaaatggcactgttgcagcgattgttgatgaacgtccttatattgatctcttcctctcagattactgtaagtttgccatcagaggccaagaattcaccagatgcggttggggatttgtgagtcatccatcttctgaatatcttctctctttaccagcatgtttgaacataattctgatcacatttttgcattttctgttcaaaaaggcattcccaagagactctcctttagcagttgacatgtcaaccgcgattcttggtctatccgaaactggagagcttcagaagatccatgaccgatggctttcgaaatccaactgcagcagcccgcatgggtctcagtcaggtgactcagaacagctcaacgtgcatagcttctggggtatgttccttgtggttgggatagcctgtctcgtcgctctctttatccacttcttcaaaataatccgcgacttctgcaaagacacacctgaagtagtagtagaagaagctataccttcaccaaaatcttcacgtttaacaaaactacagacttttttagcatttgttgatgaaaaggaagaagaaaccaagcgaaggttaaagcgcaaaagaaacaacgatcattctatgaatgccaatagcattatctcgaggactgcatctagaagacccatatgattatccttatgattttgttcatctgtacatttcaacacacacctcatttgcaacaaaaatgagattttgtttatataccaccatttacaatcatctaagctaaagccaaaccaaagtggacaagcttaccggttcggttcagttcggtttgttgttaaaccgttggattttcactggtctgaatctgatctcatcactcactgcatctttaaagtaatcagctttactggagaaaacattaggttaggtggtcacgtttgttcatctctctcttatatatttgtttaaaggcttcgtctttgttcatttgcttttgttgatctcattacttgttcatcaatggcaagtctttgtttccaatctccttccaaacccatttcctatttccaacccaaatccaatccatcgccgccgttattcgccaaagtctccgtctttcgatgcagagcttccgtacaaaccctcgtcgccgttgagccggagccagttttcatctccgtcaagacttttgcgccagccaccgtcgctaatttaggaccagggtttgatttcttaggatgcgccgtcgatggtctcggagaccatgtgactctccgtgtagatccctctgtacgagccggtgaggtctcaatctcggagatcaccggaacgacaacaaaactcagcacaaatcctctccggaactgcgccggaatcgctgctattgctacaatgaagatgttagggatcagatcggttggtttatcattagatttgcataaaggtcttcctttaggtagcggtttaggttctagtgcagctagcgccgccgcagctgctgtggcggttaatgagatctttggtcggaaattagggagtgatcaattggtattagccggtttagaatcggaagcgaaagtctccggttatcacgctgataatatcgcaccagcgatcatgggtggattcgttttgattcgaaactacgaaccacttgatttgaaaccattgaagttcccatctgataaagatctcttctttgttctagtaagccctgagtttgaagctccaactaagaaaatgagagctgcattgcctacagagattccaatggttcatcatgtttggaacagtagccaagcagctgctttagtcgctgctgtgttagaaggtgacgcagtgatgcttgggaaggcattgtcgtcggataagattgtggagccaactagagcgcctttgattccggggatggaagctgtgaagaaggcagctttggaagctggagcgtttggatgtacaattagcggagctggaccaacagcagttgcggtgattgattcggaggagaagggtcaagtgattggagagaagatggtggaagcgttttggaaagttggtcatttgaaatctgttgcttctgtgaagaagcttgataaggttggtgctaggcttgtcaacagcgtctccagatgatcttttaatgatgtttgattatgctaagattggaacaaatcttcctttgtactgtaatttctagatgataataaagttgtttgttttctacactaataaaggacaacgttttatgtgtttgtttagctctttttggcttctgggactatgaattgtgtcagacttgagagtatcaaactctccaaatcagtagcaaaattgagtttcagctttcaaccttctgtagctaacaagtaacaactttagtcactgactagtggagcaaactttatagttgagagcccaaactataaggcccatgaaagcccaattcgaaaaagaggaggactcgtatataattccggtaacggtaaagcaacgaatctatccgccggcatgaggaaacctaaattgaaattaccatttttactcttaaagattcgatttttccgccaacccgttcccgaaagcttggaactttatttgttgaaaaagtaaaagagagagagccttgtgtttatttctgagccttgtctttgtccgtgagacgtggacgagcgatctccatcagaaaatgagaacccttcccacgtacacactctttgcctttccttttatagctttcctgtgacgtgtttcttcgtttctgggttttgggtttactagcgaaaacgtcaaagatcaacttttgttctgagagattacgattagggtttatcggggattttgaaacgatttttggtaagaagatgacaagagtcaagagtaaactagacgaggaactgtcgtctccttggttttatactgtttgtaccatgggaggaatgcttagtgccggaacaacccatttggctataactcctcttgatgtcctcaaagtcaatatgcaggtttgtgtttcctttctctgcttcttgacttcttcaaatctctaatcttgtttgtttcttctagttattgtctttttagggatgtataatgatcgatataactgctaaatttaggatcttttgcttttctctgagcttaaatttggaaccatcatgattgttcagtcaatgaggatcgatcattctctcttgtaggtgaatccagtgaagtacaatagcattccttccggtttctctactctcttaagagagcatggtcattcttatctttggagaggttggtcagggaagctattaggctatggtgttcaaggtggatgcagatttggactctatgagtacttcaagacactctacagcgatgtgttacctaatcataacagaacttccatatattttctcagcagtgcttctgctcaaatattcgccgatatggctttatgtccttttgaagccataaaagttagagttcagacgcagcctatgtttgcaaaagggttgcttgatggatttccaagagtgtatagaagtgaaggtcttgctgggtaagcccttttttcagaatcattctacttggctggctcactttgcgttcgtttttgagtcttttatctcttcaaatgcagcttccacaggggactttttccgctctggtgtcgcaatcttccatgtaattttactgcttcgtgcaatgcctgttttcacttaatctatttgatcatcaacgtctctcgttatcagtttgatcttaatcttattacaactctcaaactgtcagttatgtaatcaaatcattcagttttagtcattagcatatgagacagatacttgagctatagatgcacattagcatgtctgtagacttggttgtgttttctaccaaaaccatatcttgttgattatatcttctatgtggtttcagtttctatggtgatgttctcaacgtttgattagtttgttgagtttatatatcaaaagattagccaggaaaggaagcaagattgctctaaagctcaacaactcggtgtcacatgtcttgctggctatactgctggagccgtaggtacaatcatctctaaccccgcggatgtggttctttcgtctctctacaacaacaaagccaagaatgtgttgcaggtcgactcttaaccatcattatttatcttttaaaatccatttcgaaatttcacaatcatgaagcaaagtattcttattgatgttggttatttgcttgagctttaggctgtgaggaatattgggtttgttggtctattcaccagaagccttcctgttcggatcactattgttggacctgtcattactttgcaatggttcttttatgatgccatcaaagtcttaagcggatt

SEQ ID NO: 141393 - DNA, 1196 bp, Arabidopsis thaliana landsberg
atgtgtttgcttgagctagtaactttcgagtatccgtattccgaatgcaccaatgctgctcagatttataggaaagttacatcggtaagtgatcattttcccatctcatatccaatcaagaatgactctttcatattgtcgatccatttttctcaatgcttcttagggaatcaaaccagccgctcttttaaatgtgactgatccgcaagtgagagcattcatagagaagtgtatcgcaaaggtctcgcaacgcttgtcagccaaggaactacttgatgatccttttctgaaatgctacaaggaaaatactgaaaacgtcagctctcacaaaggtaaaatcagattatggtatttcatttcatctcagtataaagtttcatggacttctttctttaaaccaataaattcaatacataagatcatttctatcttttttctatgtgaaaatttctaacaccaagttcaataacattgtcacagaaaatggctacaacggaaacggaatcgtggataaactctcggattctgaggtaggcttactaaccgtacatggccaacgtaaagacctcaacacaatcttcctaaaactacgtatcaccgactccaaaggttcaaaatcttttttgctttttatcttaaaccttcagatcatcacttaatcttcttttgacacaataataacattttttatacaggtcaaatccgcaatatccacttcccatttaatatagagacagacacatctttctcagtcgccatcgaaatggtcgaagaactagacttaaccgatgatcaagatatctcaacaatagctaaaatgatcgacacagagatacattcacacatccccgattggaccccttctcgacttatcggtgatgattcagcggtacaaaaatgtttgtcttctccagagacgctccatttagatagatttccttcagggagaaaattctggtcctctcctaaagctggagctggagactcacgttcgccgtttgcgccacggtctaattataagttgtcgtcagcacaaggaccgatcaatcaagaagttggggttatagtagagaaacttgagtctttgttgaggaaacagagagaggagattgaagagatgcagagagatcaagaacgtattgttactgagttcttaaaagagtttcctcctgagatttgtgaagaggctttggtga

SEQ ID NO: 141394 - DNA, 953 bp, Arabidopsis thaliana landsberg
cgcgtgatgctgaagatatctttgctgagtttttcggcgaatccggtgatgcttttggcggagggagtagcggaaggacacgtggagatggcggtgatggtggcggtcggagatttaaaagtgcagaagcagggagccaggctaatagaaagacgccgccgacgaacaaaaaaacgacgccgccggcgaataggaaggctccggctattgagagtaaattggcttgcacattggaggagctctacaaaggtgcaaagaagaagatgcgaatttctcgcgttgttcctgatgattttgggttagtttctcatgatcctgatctcgtgaatgccattggtcaatttattcctttgattatagtgaatgattaggttatgccatttgcccatatgatcttcacaataagattttgtagctattaggttctctagaactgttgttttctctgtgattgagcttctggtgaaacaaaatgagctttgattatgaccttctgataaaatctgtgttacagaaagccaaagacagtccaagagatattgaagatagacataaaaccaggttggaagaaaggcacaaagatcacttttccagagaaaggcaaccaagaacctggtgtcactcctgcggatcttatattcgtggttgacgagaaaccgcattcggtattcaagagagacggtaacgatctgattctcgagaagaaagtctctcttatagatgctttaaccggtctcaccattagcgtaacgactctagacgggaggagcctaactatcccggtgctggatatcgtaaaaccgggtcaggagattgtgatcccgaatgagggaatgcctactaaagaccctttgaagagaggagaccttagagttacctttgaaatcttgttcccgtcaaggctaacgtcagaacagaagaatgacctcaagagagttcttggtggaagctga

SEQ ID NO: 141395 - DNA, 987 bp, Arabidopsis thaliana landsberg
atgcacaaagaaagatggagtggactcgttccctggccacggaggctgacagctcctccaccacgtcttgaagaaattggtgtcactcctgagcaattccgtgaagatacggtatttcctctctcctacagcgaaagctctttttgagtccagagcttgagaacttatatttcaaaactgacatgcatctcaacatccaaatacttctttattggagtgtaggaaacatggcggcttagagtgatagaatactggaaactgctgaaaccaatggtgcaaaagaactccataagaaacgtgatggacatgagctcaaaccttggcggtttcgcagctgctctaaacgataaagatgtatgggtaatgaatgtcatgcccgttcaatcctctccaagaatgaagatcatttacgaccgtggccttatcggagccactcatgattggtatgtaaatgacttgatctcgaaacattgtgcataatccatatgatgttaaacgaaattcccttgcaggtgtgaagcctttgacacatacccacgaacgtttgatcttatccacgcatggaacaccttcacagaaacccaagcacgtggatgcagctttgaagatctgcttatcgagatggatcggatactacgcccagaaggatttgtcataattcgtgacacaactgacaatattagctatatcaagaagtatctgacattattgaaatgggataaatggtccacagagacaactccaaaaggtgatcctctgtcgaccaaagacgagatagttttgatcgccagaaagaaactttggagcttgcccgccatttcagtgtcctgaaatctaacagtcaacaggcgaatgaatgagatttacagcatcagagaggcgtagctgaggaaaatactcagcaatggagaagtgtaaattacacgacattcatacatagttgttaacttgttatgcatttgttgtaggaaactgcaaaatcttctt

SEQ ID NO: 141396 - DNA, 721 bp, Arabidopsis thaliana landsberg
ataagatctagtctatctcaacttgttttaatggtttttcttttcccatgcacgttgatattatcgtgtaaagggtaaacttttgctaggaaaccactttctctagtaccaaactagtagaaagcatttttctcctccaataaatcacttttaattaacacttcaaacaccgtctttacattgtttattttatagaattccacctcgctaagcaagtgctgctttatataattaattccatctccaatgttatctccatgccaactaaaacaatagaagaagcagctttcatctcccaatgtcgtctaacgaaatcgcccctgtggatcctaccaatgtttttcttgatatggatcccatcctcccggaagattcgccgccaaccagcttgttcacgagacccctcgctttgaaagaacaatatgtgtgggagccctatgacagcgagaagcttccggagacattagcctcagggattcaaaggtttcttcgtgtagcaaacttggttgagtctgatgatcctcgtgttgcttatctatgtgagtttactttactctcgtctaattccctaaattttagtactactttaggattttctctgtttttgagtcgaaattcacgctttcttgttaaagaatcataatttatatgttaatctttttatttttttctggtcgtaggccgttgttatactttaaaagaagacaacaaccgcaattga

SEQ ID NO: 141397 - DNA, 1520 bp, Arabidopsis thaliana landsberg
ccgttgggttcatccatggatcctcatcgtcatcgcctccatctccgtctttcttcttcttcttctgctcgattctaattccgtaagagagaaataataaaggattcatgttcacatcttctacctgatgagcataccatgattctctcgctatgcgttggcttccgcaaatctcgttctcgtctccttcttcttctccatcttcttctctaaaacccgtggcttcttactctgaatctccggatccagatcgtaatcaggatcgggatcggtttcatcgccgcttgtttcgttttaaccgtggcaggctcacccgtcagcggaagcttcgtcacttgacggatgacgatgttttgttgggagaacgtcgtgcttctacctcttcctccaccttcgattccggtttaactcgctctcccagcgctttcaccgccgttcctcgctctccttctgccgttcccttacccttacctctccccttaccggaggtcgccgggattcgaaatgccgcaaacgctagaggattggatgacagagatcgagatcccgagagacttatttctgatcgcacctcttctggtcctcctctcaccaggtatatttcaatttcgttatatcaattagggtttggagatttttttataatctcaattcaaatgtgtttgttatgtgctaatcagcgtcaatggcggctttgcccgtgactcgaggaaagctacggagaattcgtcatatcaagattttagtccgagaaacagaaatggttattgggtgaatattccaaccatgagtgcaccaacgagtccatacatgagtcctgtgcctagtccacaaaggaagagtactggccacgatttgccttttttttatttgcctcctaaaagcaatcaagcttggtctgctccagatatgccacttgatacctctggtcttcctcctcctgcattttatgatattactgcctttagtaccgataattctcccatccatagtccacaacctcggagtccacggaaacagatcagaagcccacaacctagcagaccatcttcaccgttgcattcggttgatagctcagctccaccgcgagatagtgtttcctcacctttgcatccgaggttgtctactgatgttacgaatgggcgacgtgattgctgcaatgttcatcctttgcctctccctcctggagctacttgtccctcttcatcagctgcttctgttccgtccccgcaggctcctctcaaactggattcattcccaatgaattcccagtggaagaaagggaagctaataggtcgtggtacttttggaagtgtttacgttgcaagcaacaggtagtcttttctctctatggtatgatctttcctacagtttttgagtgccaatatgcttcttcttttttagtgcaatcctgagttgtttttcatttgcagcgaaactggagcattgtgtgcgatgaaagaagttgagctatttcctgatgccccaaatccgcagagtgtataaagcaattagagcag

SEQ ID NO: 141398 - DNA, 2508 bp, Arabidopsis thaliana landsberg
ctgaagaaacaaatccgtgtgtgttttcccctcgtaaaggatcacttttgctttggccccaagcctctggagggtttccgcaaaagatttactgcaaagatagtgtaatagaaattcaatcatcctcttaactttctgatatacataagacagacaaatacacacaaaagttaaaccataccttgcatctgacgggatggagtagtcatcagtaccatggaataaaataaaaggtgggagacgagcaatgatgtgtttgagattcgggttttgcactactaattcaggagagaactgccttaatgattcctctccttccatgatgctgaggaaaatcaaacgtcacacgttaaactgtaaaaatttcaggctgctctactggccaggtgagtaacgtaagctataccaagattccaaaagagaaaatgctatacctcagaaagatggaacggtacagccccctgctatggaagtggtccacaaggttcaaaaggttgtatctgtagatcacgatcacaaagtttgttaagaatagccaagcagatgatgtgaggcctcatcaaaaaatttgtggctttagttgggtagaaggcaggaatctacttgctactttgagctaatatttgaccattacttcaccgttctacgaattgcctagcatttctacaaaagaccttggtggctagataaaaactggagttaacacatatatacatactcaggcaattaaagaaacttgtttttctcaacttcttgacagaaaaatttacattccaatgtatcgtcttatccttataaatgggaagaccaaaataacaagttattaatctagtcatttgaactctgagaccaaaagaaaggattttgcttaccctccagatagaccaaaataagcatttatttgtgaactactccaagagacactgtccccctcccctgactctttaatgacctgctctacaatggtgcaagctgcgatatgtgcaccagctagactgacccatcagatagatcctacacagcaaaaagatcagaaatcagtgagtaagaaatctaaaactggtgaacttccatgtctaataattgttgacaggactagaacctatctggatcacctccatactcagcagtatgattgcaaacagatgagatgccagaggaagcatacttgaccatgtcactaatagatccttgcggaaaattcctgtgtaagaggagatattgccaatgagattgagaaactctaaatgaatactgaaggaggatgagaggaacccaccacattcaatgtgccagaacaaagaaaaaaaactcaaagcacgcataacttacctgtaatcaatgcatgccacaataatatctctttctgataattgctgtcctaagagagaaccccacgccttataactgtatcaacacaagacattctgtaagatatttgcagctctttctcctcgtcctcaaatgctttagaatgaaaatagtgtccattgggtatcatactcacccaataatccaggctccaccagtcacaaacgccacaactggttttggtccagtagagttcttaggtagatacaagtcaagcctgaagaaaccaaaaaccacttataccaacatacaaaacacaaaccaactactagtctctagagcaataatctacacatgattagaacgaataataagcagtaaacaatcatgacctgtttcttggttgatcaccgtaaactatacttctgcgaacgtaaggagagaagaaatagtagtatccgactgcaaaagtaaagtaaaacctttagcaatgaaacttttagtaactatctcaaaaaagagagagaaagatccctaattagtagatgtcaaacaaaccttgaataaagcctggcattagtagaaatgcataacacccaagtgccataaatcttgtaatccatctataacctaccctgaataatagtttttgatcagtgatcgatcaaaccaaagatcatctttttatatatgcctaagaatatcgatgagccaatttcgtcggattcagcaaatgtaacagataacggaggaaatagatagatacccaagatagcttaggagcttcaaacaaagacgggtcaacaagaatgtttctgcagcggcgtggccaacctcctgaccaatagtagtttgacggtcgccgctattattaccaccgtcggcggttccattagtatcatcggaaaacgcagagagacagttatcgctgttagatcgtcggcgtctattctgataccaaccagtaaatccaccagcagaagaagaagaagacgtcttcatggccgtgccgttgtagctggaagagcgggagaggagaggcttaacggtagaagaaatggtgtggtggtcatcaccaaatcgagagagaagggtcgtagaaggatcatcgtaaatcaaagacttgaacatcatttccgtcgatggtgaagatttaggtggaagatgatgtgagatttggagaatctgcgacggcat

SEQ ID NO: 141399 - DNA, 1474 bp, Arabidopsis thaliana landsberg; identical to SEQ ID NO: 11518

SEQ ID NO: 141400 - DNA, 794 bp, Arabidopsis thaliana landsberg
cacaccgttcaagatgataccgtgaagggttgggccggaattcagcttatcccaagaacaatcttgcttgactctagcggtaagcaactcgtgttttggcctattgaagagattgagtcattgagaggaaagaatgtccaaatgaccaaccagaaaatggagatgggccaacgctttgaggtccaaggaatcactcctgctcaggtggatgtggatgtgacattcaacgttggaagtctagagaaggccgaaaagttcgacgaaagcttcgcaactaaaccactagagttatgtaacttgaaaggttcgaatgtgaatggtggagttggtccttttggtttgatcacgttggctacatctgacttagaagaatacactcctgttttctttagagtcttcaaagatgccgcatccaacaagcctaaggttctcatgtgctctgacgccaagccgtatgttttcctaactcactaattcaattatttatatatgatttttgttaattacaatttgagagtgtctaacattaatcacaataaatcaacagttcgagtctcaaaaaagacaccgggactgacgccaaggagaggatgtacaaaccatcgtttgctggttttgtggatgtcggtctccttgacggaaagatctctctaaggagtttggtacgtcacaaacttaaatcattttactgaatattactcttgtatagagaagcaaataggtaacataattgagtgaatttgcagattgatcactcggttgtggagagctttggagcaaaaggaaagacagtg

SEQ ID NO: 141401 - DNA, 2146 bp, Arabidopsis thaliana landsberg
ttttttttctccacggcttaaagactcactcatcactgtgctactactctctcttcttttggctgagagggtaaaagtcatgaagaaactcctctgagttttttttctttctttcttataataaagctcttatctttatctctgtttctctctccttaatgggtggtttaatcgatctgaacgtgatggagacggaggaagacgaaacgcaaacgcaaacaccgtcttcagcttctgggtctgtctctcctacttcgtcttcttcagcttctgtgtctgtggtgtcttcgaattctgctggtggaggggtttgtttggagctgtggcatgcttgtgctggaccccttatctctctaccaaaaagaggaagccttgtgttgtatttccctcagggacatttggaacaagcccccgatttctccgccgcgatttacgggctccctcctcacgtgttctgtcgtattctcgatgttaagcttcacgtatgtaactaactctctctttctttctattttttgttttgttttgttttcttcatttatgttttctcctctgctctcaaagcagagagatatgggttttgttctgtttttctgattctttgatttttttaattgtttgtttggtgaatctgagttgggttttcgatacaagtatggagatttgtgcctttggtttattgaattgtttgagacaaacgaatttatgttgggagaaaagtttcctcttttgctccatttgcatttcttctcgtggcattttgatgacgaatacttgaaatccccataaattatcttcagttttttctttgatgataatgaatttgatttcaaagtttcgccttttgctccattttgatgacaattgatttcagaacaattcaattctctgtttaggtttaaactttttttgttgttgtgaggattaataaacaaaatgtgggggattttgatttcgtaggcagagacgactacagatgaagtttatgctcaagtctctcttcttcctgagtcagaggtgagtttttctttaggctcttgagttttgtaacaaagagagagaaatttgctcgagcttagggggtttgagttgatttgttacaggacattgagaggaaggtgcgtgaaggaattatagatgttgatggtggagaggaagattatgaagtgcttaagaggtctaatactcctcacatgttttgcaaaacccttactgcttctgatacaagcacccatggtggtttctctgttcctcgccgagctgctgaggattgcttccctcctctggtactaatccactctccgtagattctgtaatcagctttgtacattgcacattgtgttctagagttctcttattagctcatattgagagattttaactacataatcattttgttatgtaggactatagccagccccggccttctcaggagcttcttgctagggatcttcatggcctggagtggcgatttcgccacatttatcgaggtaagtttgttgccttatgttgcaatttttcttgcctggatttagtagatggaaaatttgaatggtttgagtgacttttagggcaacctaggaggcatttgctcactaccgcggtggagtgcgtttgtgaacaagaagaagcttgtctctggtgatgctgtgcttttccttaggtagttaaaaatgcttctatgttttctcactacacaacctctttgattttctgtaagaggttttgtgatatatgggtttctctgatacagaggagatgatggcaaactgcgactgggagttagaagagcttctcaaatcgaaggcaccgctgctctctcggctcaatataatcagaatatgaaccacaacaatttctctgaagtagctcatgccatatcgacccatagcgttttcagcatttcctacaaccccaagtaagccccaaccacaatgaccttttttcgttttcagcatttaaaatttcatttcagaatcataattagaatctcctgaagccttaagttgtgtattgttctagttgattgttccttagaagtttgttaactccaataaatatcaggaatttagcatataatactagttcactggtaaaacattttcagggcaagctggtcaaacgacataatcccgcaccaaagttc

SEQ ID NO: 141402 - DNA, 1711 bp, Arabidopsis thaliana landsberg
ccgagtaactgagagtttgctgcagctatggcgatgagctttcatcgtcttcctcaggtttaaatatacgaaagcttatgaaatctctattttcacttaattcattattgttgattatttgtttctatgggatttttaggcattgcatatgatacccagaaaccctacgcaatcatcgaagaatttaaggttttcttcgtttctatcgtgtgcaccatcgatggattctcgtatatcagtttctaggctttctctgaatcatcccggctcgaaatttgggttctcactcgatactagggtgagaaatgagtttatcgttagagcagaagaaggtaacacagaagctgaatctgaagaatttgttgctgaaatcgctgatacggaaggaaatgtagaggaagtggtcgaagctaaacctacaagaaaacctaggatcaagctcggagatgtcatgggggttagtgaacttctttgtttatcagtaatccaaattatgagtgtttagcaattaggaatcagtaagtctctgtgtacacatttgtgttgagggacttgctttttctatagttatcttataggcaatgttgagggagattgaatgttattatctgttgattgttgtagatactgaaccagaaagcaattgaggtagcagagaaagtgagacctgttccagaaatcaggacaggagatattgtagaaatcaaattggtaagttgttgatatttttgaagcctcttaagttatggattgaatcgatgtttttgattattggtgggatatggtgtttggcttggcaggaagttcctgagaacaaacgtaggctatctatctacaaaggcatagtgatgtcgagacaaaatgcaggcatacacactaccattcgtattcggagaattattgcgggtatcggtgttgaaattgtgtttcccatgtgagttttttcccctctccagtgaccatttggtatgacctactttgattatgagtcttttcacatgttctgagcttttcaataaaaccaagtttatacatagatactgagttatactttgtgttaccttacataaagtccctgtataatagttagactctgtgcagaggttttactgtaataagtctttagttgctgttataccttcccagttatggcagcctgaatcactatggcaactatcatgtctgctcatgtttactatctttcattctgctgtataacatacgagtctcgagaaacttcctgtgatatatcggttattttcttaccatgtgggaattaagaaaagtgtttggtatgtgttgattctcctaatcgtttgatttgacagatactctcccaacatcaaagagataaaagtggtgagtcacaggaaagtaagaagagcaaggctttactatctgagggacaagcttcctcgtctgtccactttcaagtgaacaccatccaccgtgctgtgtttgacctccagaggtagtaatcttccgcattgtgctctttttttgtaagaattgtttctttctttcttttttttaagcctgtaagtcattccctgcacattttctgagaaagtaaattaagattagttgaacttccggttgatggatgtagacctgttccttgtttgataatgaatgatatatggcttaggatgacctaaagtccatactttaatagaaaatatgtatgaatgagtctgtgttctgtgcatat

SEQ ID NO: 141403 - DNA, 2371 bp, Arabidopsis thaliana landsberg
  unsure (1)..(2371): unsure at all n locations
gctgagactacttcaaatccttttgtttctcattctgtccctaatgctcaggtactaatcgttntaaaaatccttgtaaaatcattattaacgtttttanacccccttttaaaaaatcttgtaaaatcattattaacgtttttaaaccccttttaaaaatctttgtaaaatcattatttaagatagattgatgtttgaggtaagctttttattttggcagccgaggctaacctctaggattattgaggtgtgtgtatctgaaacatctagtattcttgatcaacagtattctagttctgcgttttcaactggtctaagtgatgctgattctttgtttattggaaaaattttcaaagacaaagatgaaatggtattcacgttgcggatgtttgcagtgaagcacagctttgagtttcatacagtgaaatcagatctcacgaggtatgttcttcattgtattgatgaaaactgtatttggagactacgtgcaactagggctggtggatccgagaggtatgttattcgaaagtatgttagtcatcacagttgtgactcttcattaaggaatgttagtcatcgtcaagcatctgcaaggacattaggaagattgataaccattttgaaggaggaaagcttcccctcagacctaaacagttgatagaaatatttagaaaagatcatggagttggaatcaattattcgaaggcttggagagttcaagaacatgcagcagaactcgcgaggggtttacttgatgatagttttgaggttttactgaggtggttccatagggtacaagcgacgaatccaggttctatcacttttttcaaaaaagattctgctaataagtttaagtatgcgtttctggcttttggtgcatcaattagaggttataagttgatgagaaaagtcatatctattgatgggactggtttttgaatagttgactctaaaaatgacgcgtcatgggactagtttttgaagtgtttgctgaatataatccctgatgagaatgatttagtttttgtgtctgaccgagctgcttctattgcaagcggactttcagggaattatccacttgctcatcatggaatttgcacttttcatttgcaaaaaaacttggaaacccatttcagaggttcttcacttatttcagtttactatgcggcttctagagtttacacgaagacagaatttgattctttgttctgggaaatcactaatagtgataaaaagttagcacaatatctttgggaggtagacgttaggaaatggtctcgagcttattctccttcaaatcggtacaacatcatgacatctaatctagctgaatctgttaatgccttgttgaaacagaaccgcgagtatccgattgtttgcctatttgagtcaatcagatatattatgacaagatggtttaatgaacaacgtgaagagagtagtcaacatccgtctgctgttactataaatgtagggaagaaaatgaaagcgtcatatgatacttcaacatgatggcttgaggtttgtcaagttaatcaagaagagtttaaggtaaaaggagataccaaaacgcatttggttaatctggacaaaaggacttgcacatgttgtatgtttgatattgataaatttccttgcgcacatggaattgcttctgctaaacatatcaatctgaacgaaaacatgtttgttgatgagtttcattctacttacatgttttatctctattcttcacaacttcacaggcgttttaaaatgttttaatatctctttttatggttttatctgtgtttatgtggttttaatctcagtttacatcgctgtaatttacaggtggcgtcaagcatattcagagagcattcacccaaatggtgatatggaatattgggagattccagaaactattagtgaaattatttgtctcccaccttctactcgtgtacctagtggcagacggaaaaaaagaggataccttctgtttgggatcatggaaggtctcagccaaaaccaaaattacacaaatgcagtaggtgtggtcagtcgggtcacaacaaatcaacttgtgttgctgcaatttagatatatctttatctccagagaattgaatattgttgggttttttaatattttcttcattgtatcgtgttattactctcgtttgttaaaattaccttgtaaatctttcgttatgccacttacatatactttaaacgattgtaaatcaagttaaacacttttacaagcttttaacttgaatcttttaaaatgtcttgtaagtcgtttactaaaattactatcaaactttacaagtaattttaatagtaattccaataatttacctttttaaaatattttgtaaaagcctgtttaa

SEQ ID NO: 141404 - DNA, 231 bp, Arabidopsis thaliana landsberg
gggaagaagtataagaagctgttttggctaccggcaatagctccgttgatcgccgtggtagtgtcaacactaatggtgtttctgactaaagccgacgagcatggtgtgaagacagtgaggcacatcaaaggaggtcttaatccaatgtccattcacgatctcgactttaatactcctcatctcggacaaatcgctaaaatcggattaatcattgccattgttgctctaacc

SEQ ID NO: 141405 - DNA, 1440 bp, Arabidopsis thaliana landsberg
tcttcttcatattttccctatgatttggatctctaaaatcttcaatccccatgttctaatttaaaaaatcacaacactctctttatcatataccctattataaaccaaactttgatcctcgaatatattttattaaaaagataatattcgtgtttctcatgttggagtcataataaagaaacctttgtgttttaatttaatcccctccaagaaacctgaagattctaagaagctgccattaaaactaataaaggaagagagtccaaagaagaagaagaagaagagaaaatgtcacgtcttgacgacataccttcaagcccaggcaaattcaagatggagaaatcttcctacttgcatcgtctcagattccaatcttctctcacaaagtttgcatttttctccttcttcctcctctgtctcatctctctactcttcctccgatctccaccgtccattaacccttcttcaccgtccgatccatctcgccgttcactccgaaccaacacctacggaggaccagcttgggaaaaacgtctcagatcctcagctcgaatccgaacctcaacaaacaacggaatcacagttttagtaaccggagcagctggtttcgtcggaacacacgtctccgccgcattaaaacgccgcggagacggcgtaatcggcctcgacaacttcaacgattactacgatccatctctgaaacgagcaagacaagctttactcgagagaagtgggatcttcatcgtagaaggagacataaacgacgtcgaattactccgtaagctattcaagatcgtctccttcacacacgttatgcatttagcagctcaagctggtgtacggtacgcaatggaaaaccctagctcgtacgttcatagcaacatcgccggattcgtcaatctcctcgagatctgcaaatctgtgaatccacaacctgctatagtctgggcttcgtctagctccgtctacggactcaacaccaaagttccgttctcggagaaagataaaacagatcaaccggcgagtttatacgccgccactaaaaaagccggcgaagagatcgcacatacctacaaccacatctatggattatctctaaccggattaagatttttcaccgtgtatggaccttggggaagaccagacagggcgtatttcttcttcactaaagatattctaaaaggcacatcgatttcgatattcgaatcggcgaatcacggaacggtggctaggcgatttcacttacatagacgacatagtgaagggatgtttagcggcgctagatacggcggagaagagtacagggagtggagggaagaagagaggtccggcgcaattgagagtgtttaacctcggaaacacgtcgccggtgccggtttcagatctggtgaggatattggagagacaattgaaagtgaaggcgaagaagaatttgattaa

SEQ ID NO: 141406 - DNA, 2194 bp, Arabidopsis thaliana landsberg
aaattgatctcatcttcaatcaaattcatcatcttcgatactcgtttcttctctctttggtttcatacagatcccaaatttctagggctcctagtcctttgatttcttcgactggaatcgcaattccccactacgtcaagctggacagacaccgaagggatcgccatgagagtggcggctacgaggattcctaccataaccaccgagcccatcccagaggtccatctcgtccctcagattcacgcttcgaagagggatgatgatgattttcgccgccaccgtcgtacgtcgtgggaagcagccctagcaattatcgaattggaattgggggcggaggaggaggtaatggtggtcgacgctgggaagatgacactcctaaggattttgatggtcccggagatggaggtttccggcagatgaatggtcccccagatagagtagattttaagcctatgggtcctcaccatggtggaagttttcggcctatggggtttgcctacgatgatggttttcgtccaatgggtcctaacggtggtgtgggaggagaagggacacggtcaattgttggagctcggtataactatcccgcgaagtatcctccttcagagagtccagacaggaggagatttatcggtaaagcaatggagtctgattattctgtaagaccgactacaccgccggtccagcagcctctttccggtcagaaaagagggtatcctatctcagaccatggcagctttactggaactggtaagcatgagttcactcttctttcttctatgtatatttattcttgtagtctgttaaggttcctgagtgtctcttatttttgtgggaatcaatgattagagtattgaaaggtagtatggttgttatgttactgtattgttgaaggtttttcatgggatcctttcgattttcccatgtatgtgataatcaaaactatatgccatcttcatgtgtatccttatctggttaatttgatttgcagatgtctctgatcgtagcagtacagtcaagctttttgttggatctgtaccaaggacagctacagaagaagaagtgagttaatcttggaaatcattgttatctatatactcattactgagaaccttttctaaattttttctgttggttttcatattgtagatccgtccctatttcgaacagcatggaaatgttctggaggttgctctgatcaaggacaagagaactggacagcagcaaggtatgtcaatctccattttattaggaaatagtcgtgaattatactttttaaaatttcaggtctccctgaaaaggctgatgggaagcaaccccagtctcatcattggcctccaattgtttgcaacaattttcgggcttattgcttatgcttgccagcgtcttatctgtgttcgattctgtcacagaagaaggctacctgtgctaagaaagggtttatgtacttatgttgggcaaatagatttcgctacttgtgtgtattctagaactttagatgtgtttgaaaagtgtagaatttattgagggtgttttagagttggagttaatgtacagagaactgaattttgctgttgcctttatagtgggaattggttataagaacatcgctattttcctctcctattgaaattcattttctttactcttcctctagatggagtgaacatgttgtgtatggtcttgacaggatgaatgtatttttttaagttggtagtttgataaggacatgaggttcaaaagatggtttcttgatttgccactcctgctggtcaaagatttggccgtctttctaattttatcatgttggaggtttggcgtcttcattttctttcatatcaatttatgggtgtgctgtctattggttaatgatggcattccttttacctttttggatgagtgatgctggaatgaatgcgtttctccttttcttttgttgatggcctgaggaactatgatggctatatttctttccactctctttgaatggcctgaaatgtgtgctttctgtatggtcgtccctctcaatttcttggatggcttgtgatgtgatataccatctctcgtcataggtgaatgaatgatttgtttagtagttcttatgtatgtattttgtatgttcccacgtctctaaaccttggatggcttgtgatgtgatataccatctctcgtcatagatgaatgaatattttgc

SEQ ID NO: 141407 - DNA, 1067 bp, Arabidopsis thaliana landsberg
aagggataacctagggcgtttcattaaccatagctgtgaaccaaactgccgtactgaaaaggtgactacatagtgttctgtgcgatatcattcatcgggtctgattataaattcagtaatctgagtcgggaactttctttttgagctcgtctgcttcatttgttacttcttaaatgttgttgcagtggatggcgaatggtgaaatttgcgttggaatattctccatgcaagaccttaagaaggtaggctctcctgcacttgctattctgcgagtatcatttcagtagtttttaatctgtctggttcgttcacagggtcaagagttgacatttgactacaactatgtgagggtttttggtgctgccgccaaaaagtgctattggtggatcatcacattgcagagggtatatgggggagatcctctgaatggtgatgtaattattcaaagtgattcagatgaagagtatcctgaacttgtgatccttgatgatgatgaaagtggagaaggaatcttaggtgcaacatctaggaccttcactgatgacgctgacgagcaaatgccacagagctttgaaaaggttaatggttataaggaccttgctcctgataatacccaaacacagagctcagtatctgtaaaacttccagagagagaaattcctccacctcttcttcagccaactgaagttttgaaggaaccttcgtcaggcatatctattactgctgtccagcaagaggttcccgctgaaaagaagactaaaagcacatctcccacgtccagttctcttagcagaatgtccccgggtggtacaaattctgataagacgacaaagcatggatcaggagaagataaaaagatacttccacgtcctcgtcctcgtatgaaaacttctcgctcatctgagtctagtaagcgagacaaaggaggtatttatcctggtgttaacaaagcacaggttataccagttaataagttgcaacagcagcccatcaaatctaaaggatcagagaaagtttctcccagtatcgaaacatgtaatgtactagttttagacgtgaattgttaa

SEQ ID NO: 141408 - DNA, 2287 bp, Arabidopsis thaliana landsberg
accagtcttcgggtctctcctcctcgcggctcgaaacgcaagcttcacgcttgaaaatctccgttcgttttctacctcgtttagatcggagatggcggagaagccggcgcaagagcaagagcagaagcgagcgatggaacctgcagttctcgacgatattattcgtcgtttggttgagtttcggaacacgagacctggatcggggaagcaagttcatctcagtgaaggtgaaattcgtcagctttgtgctgtctccaaagaaatatttcttcaacagcccaatctgcttgaattggaagctcccatcaagatctgcggtcagatttttgttccctttagtttagaaagagtgcttttttggattggggttttagttttgattgatttttagaagcgaatttagtgcatgtttagataaagtatcaagctttgttcagtagtaatgagttgaattcttaaagctatgtacatatctaagtgactgaagaaaaaatgtgagattttgattgtcttttgagttcagaacaatgaaatcaagctaatgggtagtataaagtttgaatttttattactaaaagtcttagataggcttaggagttttgactggttctatgaggtttgattcattttatcttaatgttgactagtcaaattatgtgttttgattgggtctgataaaacatttcctgcaaaagtttaacgttgactagtagtatctgatatgccatgttttcttagatgtaatggttatattttgtcttttactttataggtgatattcatgggcagtattcacatctattgaggctttttgagtatggagggttccctcccgaagctaattatttgttcttgggtgattatgttgaccgtggcaagcaaagcttggaaacaatatgtcttcttctagcttacaaaatcaagtaccctgagaacttcttcttgttgagagggaatcatgaatctgcttccattaatcgtatttacggtttctatgatgagtgcaaacgcaggttcaatgtcagactctggaaaatattcaccgattgctttaactgtcttcctgtggccgccttaattgatgacagaatactatgtatgcatggtgggatttccccagagctgaaaagtttggaccagattagaaatattgcacggccgatggatattccggagtctggtttggtatgtgatttactatggtcggatcctagtggagacgtaggctggggcatgaatgatcgtggtgtttcatacacttttggagctgacaaagtcgcagagttcttggagaaacatgacatggaccttatctgtcgtgcccaccaggttttaacttgagttatatctgccatttagtttattatgaaaactgtgcaaccttaatttgagtgtattggctctgtttataggttgttgaagatgggtatgagttctttgcagaaagacaacttgttacagtattttcagctcccaactattgcggggaatttgacaacgctggcgcaatgatgagcattgatgagagcttaatgtgctcattccagattctaaagccgtcagaaaagaagtcgccttttctgtgacaccgattatccagtgaccaccattgcttcaaattaacaattctacaaaaggtaaaaacttttttatgctatggtagcaccacatttgtgtaaccctggttcaacattctctgcttcatgtttagcttgttcaccgtatctagcttttactctgagtggtacatacatatcagcctcaggaaaatgaaatggaaaacatgtattcgttaagctagttataatggtttttttgagttcctgtcacagagatgagttcaaaatcacacaatagttttcttctcttacatttctgtgtaattagctcatgttgcttataatttgtcatcaagaaacagtgttaatcttcgaggtttggtcactgtatgctgaatgttcttatgtggctcagcttttgattatcattttgcattttgttaatttgctgcagttgtatactggcaagaggatctagagacggaaactgctcaattgggaccttaatggtactgataatagagcattagacatgtagctgttgacagtgatggcatcgagcagaaggaacaagtcaagtctgtactgtgattttagcatctctcacatctatgtttgtctaaaatgtgtgtgtgtttttagtcttctctctgaataatattagattctcatttgtactctctatttatttaggagaacccaaattcaaaactttttttagtctcttc

SEQ ID NO: 141409 - DNA, 1167 bp, Arabidopsis thaliana landsberg
ctcttggagctactatacactcttgagtcttgacaagtgtgtttttgtgtattgtctctctatcatctcccaaagtagaaaagctagaaaacaataaaaaggaaaaaaagatctcttccacttatatatctccccttctatattcttctataagcatcaaataaacttcacttctctctctctctttgcctcaccatttctgctcacaagtgtttgttagatttgatctgaaaaagatgaatctatagcttttatagtatcaatctcatcatcacaaccagctaagtttctctctctttctcactttttctccatttgctgcaattattgatcttagctcaagatctacaaaaaaagaaccctaatctctctttgatccatataaaattaaagaagaaaaacaaaaccctaaatcaagattcaatcttcttctacttttccaatatcaagaacaagaaaaggccatggatttgatctctcaccaaccaaacaagaaccctaattcctcaacacaactaacaccaccttcctcaagccggtacgagaaccaaaaacgccgtgactggaacactttctgtcaatacctccggaaccaccgtcctccgctctctctcccctcgtgtagcggcgcacacgtgctcgagttcctccgctaccttgaccagttcgggaaaacaaaagttcaccaccagaactgtgccttctttggcctccctaaccctcctgctccttgtccttgtcctctccggcaagcttggggctcactcgacgctcttatcggccgcctccgcgccgcctacgaggagaacggtggcccacctgaagctaacccatttgcgtcacgcgccgtcaggttattcctccgtgaagtcagagactttcaagccaaagctcgcggtgttagctatgagaagaagaggaagagagtcaacaggcagaaaccgcaaacgcagccgcctctacagcttcagcaacagcaacagcagccacaacaaggtcagtctatgatggctaattactcgggtgcaacagtatgatcatatttatataatttccccttttctatatgtattgtctcttatttgctttctctaagatattaatgtaaaaccttcttttacattatctactgatgcttttgtttctgtactagttgtttatgaataa

SEQ ID NO: 141410 - DNA, 2870 bp, Arabidopsis thaliana landsberg
  unsure (1)..(2870): unsure at all n locations
ggaaaaacaaaacaacaactactctttctctactccattaacaaagtccaccatcagaacctaaaccctataaaagccatacactcacaacagcaaaagcatccagtaccattccccccaaacaagtacttcaagaagattggtgaacacactgagaaagttaaaagagaaaagatgaagagtgactcaatcgccgttgatgtccctgcagagtctagctcagtcatcaaaggcaaagctcctctcctcggtttagccagagaccacactggctctggaggttacaagagaggcctttccattttcgatttccttctccgtttagctgccattgtagctgccttagctgctgctgccacaatgggaactagtgacgagacactccctttcttcactcagtttttgcagttcgaagctagctacgatgatcttccaactttccagtatgactcacaatatttctttcttcttctttcatcttgtgttccatgggtactaagttatctaactttctgtttttttctttcaggttctttgtcgttgccattgcaatagttgcaggttaccttgtcctgtcacttcccctctcagtcgtcacaattgttcgtcctctagccgtcgctccgagacttctcttgcttgttcttgacactgtactcatcttcctcaatacttcaaactcttgatgctatagtttatacagaaattaaacaattctctgttttcttattgatgtgtacaggcggctctggctttggacactgcagctgcttccgcggcagcggctatagtgtatttggcacacaatgggaatannnnnnnnnnnnnnnnnnnnnnnnnnnnnnnnnnnnnnnnnnnntgtcagaaaacgagcggagctgtggtttctgcctttgcctctgtcacctttttagccatccttgtcgttatctccggtgtttctctcaaacgaccctaagtcaacaatacagactctttgagcgcaagaagaagcattgccaagggtttaattagtatttgtgtgaaatgtttatatggaagaagcttatattttgtatttgtgtgctcttggtgactctgttttctgttttgtattgatttttggaaagacagcaaaatgaatggaagttaattgtcactttttcttgtttaaattttgaaaatctgttagttaacttaagcgtatagattagttttgattttgtcccatctctggattatatccatacaataaatccgttccctctccaaatggaccgggccaggcccatattggccgattcatgacatgcttattcgtagtctctccaacagtcctctcgcgacgcataaattttaatggcggcgctcgcaaggatcggtggccggcacctgaaatccgtctgcttaataaactcctccgcctcatgtttcttcacacaacgccgtggtgttgcttccaagctctttattggtggtaactctctattcatttttcctttttgaatctgtgattaatacaatccatttctaggctgtagaattttaaggttttagcggatgcaaatttgttgaatatgattcattttaattgaaaattggtaaatctcttctgtaatgatgttgtaagtcttgaaagttattttcttctgcgagctattctattcactgttgtccagtaaccatttcttctcatggctttgattttttactttgtgtttctcttcaaagccatgtttctgtgaaactttggtctttttgtgctcacatgttgttcggtttgtagtaaattgattatgaacctgatgttctctactttctgaacattttgaatttacaatctccaataatgcttaattcccaataattcgattctgtttacaggattatcgttttgcactacagagcaaggattgtctgaggcattttccaaatgtggccaagttgttgaaggtatcagatgaatatcgatcccacatgtgtttgatctgcttattgtatatctgagagtttttgagatatttttgtctggttcttatcagcacaaatagttatggacagagtctctgacagatcaaaaggtttcggtttcgtgacatttgcttctgctgacgaagctcagaaagctttgatggagttcaacggacaggtatactgtgtttgttgttgtcttgctgctttcacttgcttaaaactatttctttatgataacaaaagacagtttctttcagcaattaaacggccggacgatatttgtggactacgcaaaggcgaagcagtctcttggtggtggtggtggctatccaatagctagaggaccgcctgatccagccgtaatagctgccactagaacaaccgaaacatcgaaaagcgactaacaaaatcgaagatagcaaattgctggacactgctgttgctatgtttcttggattttacttgtgtgcatgtgtaagagatgagcaagcttcggttattagtttcctacttgctctttcttctttattatcttatgaatcattcactgattgcttggaactaaagaataactaaaaacactaacttattatttctctaaaaataaaaattgaaataagtgaggtgggaaatgataatcttacagcgagcagcagaaaggtacatacgtggtatgatatgactggatgtcagttacaaatggagaagtccgttcgattgagtgaattttgtgagctccacgtctacggataaagatcctggccatgccacgtcatcatctgtttctccctccccaaaaaaaactcgagcatcaaattcgagctcagcgttttttcgtttcttttttttggttctctcatcttaatctcattatatcaccagtcaaaagatggtagaagacatttcccaactgatta

SEQ ID NO: 141411 - DNA, 741 bp, Arabidopsis thaliana landsberg
caaaaaaaggcccaaagagtattttccttcgaattcgccgacgactaatcacgagatggcgccgccggtgacggagcggtggtgcttagctttgattcttctctttctctccttgttcgtccaatcttcaacggcaatttactgcggtgctgaagattgttatgctcttctcgggtttgttcatcagcttccgatcttcattttcaaattcagattttgatttcgttctcttaatcgttttgcattatcgatttcagagtcgctcaagatgcgaacgcatcggatatcaagagatcttattataagctctctcttcaacagtaaggatgattctggatttgtttagacattgttcagatttgattttgattagtgttttgctaatctttgtttctcaattttgatgattcgatttagtcatccagataagaatccggatcctgaatcgaggaaactgtttgttaaaatcgccactgcttatgaggtacttcaatatttttatgattctgaaactttggaatctggcttagtcaatcccattatatatctctgcgtataatttcttaggtatgatccagttttagcgaatcgagaatcattacattgggagatagatttgatagtgtatgttttttttgttatagctgaaaataattgaacatgaaagtttctcaaaaggattcgtcttgttgcagattttgaaagataatactactcgggcacaatatgattatgcaattg

SEQ ID NO: 141412 - DNA, 3752 bp, Arabidopsis thaliana landsberg
atggccgaagaaaacgcggcggggaatgcaatttgttcaatctgctacgaagatcttaaaccggtggttgagaatctgcaatcaatctccgcttgtggccatgtctttcacgaactttggttagtacggcaaaatcaattctctaatgaagtttattatctccgaaattttatagatttatgtgtttaatcgatttctttcggaaaccctagtttgcagcaatggtttgagtattgcccgagtacgaacaagcgaaattgtccgatttgtaagcagaagtgctctctaaaggatccttgtcgactttactttcagtcttctgggaatcaaaccgattcgattgcctcggataaggttgttggaatcgaagaagatccggttttgttgagaggagaagtgaagcggcttgaagggaaggtacagaatcttacttcggctctggaggcgaagaaaaaggagaatgttgaagtctctgataaggttaattttgttcatttcgtttgattagaatggtttataagataagataaggttatgtgattttttttttttttgtttttgtttgtgtgtgtctcagttgcatcaatgcaatgagcaattgaaggaggataaagtgaaaaggtgggaggctcttcaagaaatatcaacgactcagcatttgcttaagttaaaatctgaggtttgtttaaactatacaacatccttagattttagatcctttttgcttcacaggcagaattttgtgttgagtttcttagtgtgtttgtttgttacaggaatgtatccagcttaactcacagtgtgttaagctacaggagagaactgtggctcttgccaaggagctcgcatcgcttaaattgtaagataacatctttcatattgctcttttagtgtcttcaggttctaatttaatcattcactcgtatggttaaaccttttctgagtctaatatcttgttttgcatccagggtttctgatttaagcttggaggaagatgatgtactgaagttggccttgttggggaataacgcgaagacgaaagatacaatagacacactagtcaagtccttggttattcggaataggtttgtcacatagattagttccactcagttcacatggcttcacttagttttggttatttgatataggtaggtgcttagcacttagttgtcactccttccctgctctcattttggtcattgacttagtgaacttggttcattatttcccatttgtcatgtctacagcagtgtaatccgattaaaaaagattaatttgaccttcagtgacttatgaaatggtgatttaccttagttcattcgtaacaacaacttgttaaactgaaattacgaaatttcataagtaggtatggtcaagaatttgaggaaaggaggattgaacattgcgtttcttttctcttaggtctttgaattttcttttatgaagtctctaataaaaaacaatctttcttactctgacaggagttataaggaattgctagccaagtgcaatcagctgggaagaggcgaagcacgatcttctgagaaacttgaaaaagctttggaaaagatagaaaaactaaaggtgtgtgttttggtgtttatctcgatcttctttgtgtcttctatatctggctcttattatgtttattctatgaccagaaacgaatgagggaacttgagttgataactgaagagagagagaacagagctctacgggacataaacgtttcaaagaaatgcagttacacagaagtttccgagcctgcaatcgagagcatgtcttctttcagaatgctttcatcagacaacaaagtggagaaaatctccacaccacctggtaaattagaagaaaaggatggctttaccattcaaggatcatgcttaaggggaagagaagactccttcgttagcagaacagactcggttatagatgtagatgatgattatgttcctgaaaccaacacttctggcattagagattggaatactaatattgaagagaaaggtgataattccatggtgaaggatataaagttcaacatcagaaaagacccgacatcatcagtgtcaccttacagcaatggtacttttgttgtacatcatgaattcaagttcttgagtgtagtagtagattgaagattgtccaatgcaggtagtggaaacatttggcagtcaagtggaacaaatagaaaccttggtagatggagcaaacatggagagagaaacgaagcaactccatcactaggaggttctgttccaagaaaagatgatctcatctctattggacctgatggtaaaggtggtagaatcaaagtgctgagatctaaaccccaaatttctgtgagttttacattcttcttcagtttctcctctcattaatttccactaccttgcctaatgtgttgatatctgtgcatagaaaaccaatgcaagctcaggaagtggtaagagattcaagcttggaactaaaacaagtggctcgtcctctcaaggttgtcttcagatagaacactatttcggaaaaactaatcgctaaattttcgacaatgtaactttttgttggggctagtaaacacttgtagttaaagaatgaagattaatactactatttaaatagtggattagtgataaacaaaaattagtagttactagccaaaacgtgagagcttctccgtcctcgagatcgtctccacgcggacatctttatagccgttgattcttggtttaagtgataacactagtttaaggcgtcagtggtatagtctgggtactagagcaacgagaccctaacacgtgtaaaggaaacaatattatgctcctgaaattacaattctacccctctgttcttcagccacaaaaaaaaactggcgaagtcaaaatcttttgacagtgaaaggacctttgaagaagaagaatcgcgatttcgagctctatggtgtccgtaaaccctagacctaagggttttccagttttcgattcctcgaatatgagtttaccaagctccgatggatttggttcgattccggccacgggacggaccagtacggtgtcgttttctgaggatccgacgacgaagattcggaagccgtacacaatcaagaagtcgagagagaattggacagatcaagagcacgataaatttctagaagctcttcacttgtacgtgtaattgtcactcaattgtgtgtttcgtttaagaaaatttcacaagtttcgagatttgattgttttcgtttgattacagattcgatagggattggaagaaaatagaagcctttgttggatcaaaaacagtagttcaggtttaatttgaagaccatcttactattattctctgtattgtttttgaaaatgattgtgtgttgatgatgtttaagagtaataatggcagatacgaagccacgctcagaaatactttctcaaagttcagaagagtggtgctaacgaacatcttccacctcctcgacctaagaggaaagcgagtcatccttatcctataaaggctcctaaaaatggtgacttttgatcatcttcttactctgttttcttctttgctttaatcattttctaatgatttgttatgctgctgcagttgcttatacctctctcccgtcttcgagtacattaccgttgcttgagcctggttatttgtatagctctgattcgaagtcattgatgggaacccaggctgtttgtgcatctacctcttcatcgtggaatcatgaatcgacaaatctgccaaaaccg

SEQ ID NO: 141413 - DNA, 3487 bp, Arabidopsis thaliana landsberg
cttgacatcattcatatgtttgaacccagtcaggtttcagtcttcaacctgtaagtgcttatctttctttcttccgcaggagctgacttgaacagtagctaagatcatttttgtatggatgcagaaaccattcttttctaactttggagccattgttacctttgctatcatcggaacttttgtcgcttcagttgttactggtggtctggtgtagggatcatcaccctcttctttcttagcttctttgttttgcttctaccttatctgtttttcccgccttttttgcagttatcttggcggctctatgtatctcatgtataaacttccctttgttgagtgtcttatgtttggtgcacttatatcagctacggaccctgtcactgtactctctatattccaggtgcttctgcttttccttctactatcagtttccacaggatacaagtattcgcatgtattttccctaaaatgatgccttgcattgtgatgaacatttattttatggcaggatgtgggcaccgatgttaacctgtatgctttggtctttggagaatcagttctgaatgatgctgtgagtttttattatctgctgcgatattgggctcttccttttaagtatatatgcaaacgaaaaaccacaacactcactaactccatcaaatgggttttcgtgtatgtggtgcgcctcgtagatggcaatatcattgtacaggtctgtatatcacatgattcttttccttttagataccttttaagcaaagtattaaagtacaatataaaaactttcgatgcagaacaatgtccttagtaaaccgccagtcctcgtctggggaacattttttcatggtggtgatcaggttttttgagacttttgctggctcaatgtctgcaggtctgtttgctcttattccttcttgatccttcatcacagtttttataacaatattagtctcatcaaagtccctcctaccaaactagacgcactattatctaaacaatgaacaaaagactagtcgactaggtttctttgtgaagattcatagaaccaaaataagcaataattaacttgaactgaaacggtcgtattagttaccctttgaatcagggaatctttttcttttaaagtccttcacagtcacatatacatctacatatataagacctgatttttttctatatatataagacctgttattttcttcgttttcttttctcccagaataaatagttctgccaatagcttctaaccgattccttcatcgacttcatatattgcttaaacatactaacagtcttaatattattctgcaggggttggggttggattacacttcaagctttaatatccttcctcgaatcctctatttttcttattagatgtcacatggccaaaaatgtattgtaaaatcttaactcagaacacctctttaagtatgcaggattggacaccgagaagtaagtgccatatcttttcttaactctttctatactgttgtatttacattgttaatactctctgaacatattgtaaatgtaatgtctctgttttctcttttctctacctcagtcttcagaacttggagtgttgtctctttgtacttttcccgtatttttcgtaagtagacaaaacaactctcctcctgtctcttcgtatttatgacaacacttcttccccctaatgtattctggttattctgtaagatacatgcttgcagaaggtgttggtctctccggcattgtttctatactcttcacaggaattgtaatcgccgagtcattgtagcttttacatcttagttgatgttaatatcttggaaagacatatttaggctgcctaatatagtgctactgtaggttatgaagcgctacactttctcaaatctctcagaagcttcacagagtttcgtatcttctttttttcacttgatatcttcgctagcagaaactttcacgtgagtccagagcaataacatccattgttggataacaatttctacgcttaaagttctattagattgatattgatttgtttaatgcttttctaggttcatttacatgggatttgatattgccatggagcagcatagctggtcccatgttgggtttatccttttctctattgtatcctcatttactgatcgtcagtgattgtatgcagtgttagtcagtgttgtaaatccttgactttaccttttgcttctgcgtttcatgactgacatcagttgtttattggcgtggctaggtgactaaatgcttttttatcctggctgatcgcttcattatcaccatggttttcgattcggatttacctatatgttctgcaatgcttttctcacgcagggctgtcaatgtatttgggtgtgcatatttggtcaacctatttagacaggagaaccagaagatacctatgaagcaccaaaaagccctttggtatagtggtgagttgagctaatagcttttgttcttgtctcctgatgcccatttttatatctacaaactattaaaacttgtacacatattggcacatcgataggacttcgaggggcaatggcatttgcacttgcacttcaatcacttcatgatctaccagagggtcacggccaaatcatctttactgcaaccacaactattgttgttgtcacggtaactttcgtattctctccatgaaaagcatctatgttatttccagtggtagtatacataagaatcagcgagagttggagaataatacataggctgcgtttcttatccattgcagtaatatttcaggttttactaataggaggttcgacaggtaaaatgttggaagctttggaagttgtaggtgacgatcttgatgactccatgtctgaagtaaactctcgacgatctactctaatatctttgaagtaaagttgtgtatgtactttttctaacgctcccagatacgtggttagggctttgaagagagcgatcatcagtatgtccctcctccttttagcattggagcttcatctgacgaggatacatcatcatcaggaagcaggttcaagatgaagctgaaggagtttcacaaaacgtaagaataagagaatggcttagtatgttttcctgagtaaaaagcgatatttgcaattttttgggactcacttgacaaaactttgcagcactacatcattcaccgcgttggacaaaaactttctgactccgttcttcacaactaatagtggagatggagatggagatggggagtagcatggaaaagatgtgtatttgtggtccaggccaagctataattagagtacacatatgtctatgtaagattaacactggttgattttacctctcgcaaaatgcccactataaagttgacgatttccaagacatttcgaaatattatatagatgtatttattgtggtacatacaattaccatgtcaataatctattacaagaagaaactgagctcatgtgtgggggtgaacataagcatgctctcaccaaaatac

SEQ ID NO: 141414 - DNA, 334 bp, Arabidopsis thaliana landsberg
aggagagatgcgagaatatgatggattatataaaaagacttagactttgcattagatggtttcaagaacttgagttggattatgcttttgagcaagagaagttgaagaacgcattggaattgaatgagaagcattgtgttgacatgggtgcgttgacacattaaagtttagttgttgattttttcgttagcagtttttgaactttgtgcaatttgatgacagaggttagtttgaaaaacaaagaagaggagctgaatatgataattgaagagctgaggaaaaactttgaatctgttcaagttcaacttgccagggaacaaacggagaagttggt

SEQ ID NO: 141415 - DNA, 411 bp, Arabidopsis thaliana landsberg
gtatatcatacaccggctgctgctttgtgcacttggccgaaggccagaagatgatagggatcattatggtaacaaaaggctggatcttgctggtcctttacttggagggctatttagaatggtttgttcccggcacacaattatacactcttggggattgttgagtatcagtgttttttttatctcttactgacctaacatcttctctacatgtagcttttccgaaagttaacaagggatgtgagatcttatgttcaaaaggtatcttacatagttactctttctcgagccaaagactttagtattaagttgttattctgtgtttggaagtctgattcatgtttttttgacagtgcgttgacaatggcaaagaagtcaatcttcaatttgccattaaggctaaaacaatta

SEQ ID NO: 141416 - DNA, 1877 bp, Arabidopsis thaliana landsberg
ctttggagctcctcaatctctccaatggcgtcttcttctctctcgtctctctcctcaatcctcagtaaccctcatggttgctctctctgtttcaaagcctctacacaacgttgtttcgctcttagattcctctcctcaaaagcaacccatgcttcttcatcttcttcctctgctcttctccctcgttgccgtagcagcacccatcgtctcacacagaaaccgatcaataggaagaagggatcttccttaaatctttctagaagcttctctatttctcaaattgctagttccggtaagtttgatggtccaagccttcaccagttcgtctccaacgctcaagcacacgcttctcttaccactcccgaaactgaatctgagtaagtcctctgtttttcaaaccccattgttctttttataacttaattggtgttggccattggttagagaacctaaagtttagaaatttaaggaatcagagtgctaattaagttccaggaaccattaaagtcaatctctttgctcatcaatccatagattgtagaagattatgttagtcacagttctatcttttacaagcgattactctcaaattgtggattgtgctgtatagcttatatagatgctaatacttttcttttcggattcattcttgctcttagaagcacactagattctgacattgcatcaaaaggtcggatttatcacgaaacatatggatgtcagatgaacataaacgacatggagatagtccttgcgataatgaaaaactctggttataaagaagtagtgacggatcctgagagcgcagaagtcattttcgtaaacacttgtgctatcagagaaaatgcagagcaaagagtatggcaaagacttaactacttttggttcttaaaacgagaatggaaagtaaatgctgctacaggaagagcaaaatctctcaaacctcctaaagttgttgttttgggatgtatggctgaaagattaaaggacaagattctagattctgataaaatggttgatgttgtttgtggtcctcatgctcatagagatctcccgaggctattggaagaagtagactatggtcaaaaaggaatcaacactcttctttctctagaagagacttatgctgacatatcccctgtccgaatctctgaaaactcaattaccgcttttgtttctgttatgagaggctgcaacaacatgtgtgctttctgcattgttccgtttaccagaggcagagagcgatcacgtcctgtagaatctataatccgcgaggttggggagttgtgggaatcgggtgtgaaagaagttacgcttttagggcaaaatgtgaacagctataacgatgattcagctgatcgtgagtcaggtgctaactgggaatacagtgagggattctcgagccggtgtaaagttaaaaacatgggtttgcgatttgctgatctcttggaccgactctctgtagagtttccagagatgcggtttaggtttacatcgcctcatcctaaagattaccctgacgagttgctgtatttgatgagagatagacataatatctgcaatctcatccatcttcctgcacaatctggtaatagcagaatactagaacaaatgcgtagaggttacaccagagaagcttatttggatcttgttaaaaagattcggagtattataccagatgtggctataaccagcggctttataactggttagcctactcaaaatctttatgtaacatgtctcagaatcggtttacttagaatcttgcatgtaacttgtctgatacaaaagaggcaactgtgtatcttgataggcctcaaggagaaactgaagaagagcatcaaaaatcccttagcgatgctgagagcacttcatca

SEQ ID NO: 141417 - DNA, 518 bp, Arabidopsis thaliana landsberg
cacaggagtcgagagagaaattagccatggcgaccagagctttgctcgccgttatatatgcgtctccgaatcgctgctacatctctccgagcaggatcaaaatccaatctttaacttgttcttcttcaagtcattattaccaaagacagagtagaaaaaaccacagaatagctcgaagttactcgtctgactcggattcctccgttcttcagccgccggatgtggcccgtcttgctcagacagctcgaatctctctaactccggcggaggtactcgctttttctcttttatcgaatctactttgtccagttgagttccgcttcttcgtccattgatccttttcttttttagatagaggaatgtgaaactaaaattcgtcgagtcatcgactggtaactaatctacctctttctgcacgaaattggcttccatgtttatgtcattgaaccaaaagagaaagaatcaatgtgtttgttggattggggagaaatgcaggtttgggccacttcaacaagttg

SEQ ID NO: 141418 - DNA, 864 bp, Arabidopsis thaliana landsberg
agaaaaagaagagagaatgctctcagtctcagcctcttctcaccaccactaaccccagaagaatcctcacagacagagagagagagagagaatcagaatgggtttgatatcagcgaaagagacgaagaacaacactagaggaatgggtttgctcttagtcttcttccccgaccaccacagcaacaacgacgactctccttcttcttcttcttcttctccggcaacaacaactctcttccgctccagatcttctcgtcttctcctctccaaagctcaatccacaatctcaatctgcatcctcctcctcttcctcactctcttcctcttcactctctccaccttcgaaccttcctctggctttcccgccgtttcttcttctcgtcctcaccgtcgatttctcctcaaccgcgacatctccgcctcttctgaatctcgtcgtcgttataaccgattcgctctccaaggtatgggtactctgtttctcagaggaaccaagagcatgcacgatttgattgttgttcatatctcttccgatactacggaagacgatctccgtctcttcatgcgcttgatccaccgctccggtgtcacttccaaatccgacgtcgttttactcttcaattcgggtacgagattcactgaaatgatcgaagaagagaacgactcgttcttaaaactcgttgatgttcatcggaattcgaattcgtcgaatcaaatcgactccgtttggggatttaatctcacgaaattcatgaagaagcaatcgaaatcatcatcgtctgagccaatttgggggaaaaagacgcatcgagctaattacaacgatacgtcgtcgttgaataactcgaccgagtcaaccgagaa

SEQ ID NO: 141419 - DNA, 764 bp, Arabidopsis thaliana landsberg
gcagacaaatcaacaattgtagatgaagcagtgagttccatcaaatcccttgaacaaactttgcaaaaacttgaaatgcaaaagctcgagaagcttcagtattcttctgcttcaacaaacacaactcctactacaacttttgtttatgatccatcatcatcctcttctccaacagctctcctcacaccaatatcaaaccatcccataggcgccaccgcaacagattcttaccctcgcgcagctttcttggccgatcaggtatcttcttccagtgccgctgctgcgaacctgccttacccttgtaatgatccgatcgtgaatttcgatacttggtcctcacgtaacgtggtgctgactatctgtgggaatgaagctttcttcaatttgtgtgtccctaaacacaaaccaggggttttcacttctgtttgttacttgtttgagaagtacaacatggaggttttgtttgctaatgtctcctctaatgttttctggagcacctacgtgatccaagcacaggtatcttatacacataaccatttttatcatatgatatgtggtgacatctattatttaccatggttctttttttttatgtgatgaaacaggtaaatccgagttgtgagaatcagttactgggaaatggtcttggagttgtagacgttttcaagcaagtttctcaagaactggtgttatatttttcatctctataaatcataactggctgcttcggtttgagttttaagtattttcagggtttgttttct

SEQ ID NO: 141420 - DNA, 2511 bp, Arabidopsis thaliana landsberg
  unsure (1)..(2511): unsure at all n locations
ctctctggagccgccacgtctcagtgatccgactacgacacctttcttcactcttcttcttgcgtcttctctgctttcgtggtctctctgttatttaattttaatcgattgagatcgcttttagctctcgtctttgaattttacgggccaaaaaaatgggtgaagaagctcgagcgttagatatggaggagatcagtgtcgacaactcgacgagacgaaacgatgtcgttcatgacttgatggttgatttatacccgcttagcagctactacttcggttcaaaagaagctcttcgcgtcaaggacgagattatctctgatcgagtcatcagattgaaatccaagtaaatcgagttttgatgtgatttagatcatctggtttttttcttattgttttaatctatagctaaagtttcttttttgtttcttttgaagttatgctgctcatggattgagaacttgcgttgaagctgttcttctggtaattttatagttggtagccaaattagggattttgaaaagttttacagggaaaattggtttgaaaggattgattaaaatctaatgttgggacacatcaggttgagttgttcaagcatcctcatgttttgcttcttcaatatagaaactccattttcaagcttcctggtggtcgtttgagacctggagaatcaggtttagtatgctgtttccttgcatctttatgcataaatatcgctgtctcaattctaaacgctaaagtcatgtttctccttaatcttctagatattgaaggtctaaaacggaaactagcatcaaagctatcggttaacgaaaatgtgggtgtttcgggttatgaggtaggaactatggcttcttgttaaagtgcttttgtatctgattgtttctggcttaagaatggtctctctaattataacattgttgtaggtaggagaatgtattgggatgtggtggagacccaactttgagacattgatgtatcctttcttgccacctaatattaaacacccaaaggttggttagttagtttcactttcattgtaagaaaaagttgagacttttgaagatttgcgcttatactaaaagctctgctctatcctcatcttttgtgtaggaatgcacaaagctttttcttgtgagattaccggtacatcaacagtttgttgtgcctaagaacttcaaactcctcgctgttccattgtgtcaactccatgaaaatgaaaaggtatgtactatcttacttgcattgcccttaactcatcgtgaacttttaatcgatgttcctggtaaaactaacagggtcagtcaatcaagctgtatttaattatgtgttgtgatgtttcatttatgcgttgcagacttatgggccgatcatgtcgcaaattcctaagcttctttcgaaattctccttcaacatgatggagatatgaacgaacctcatgatcattgcctctagtagctcttgccccccgcaattcgtgataggattatgtttggggaaatcgtttgtggagcctctctgagtctgtgactatataatgtatatagggcttataatatatagacaatgttgaagaatagcatgttcttgttggttatagagactagacatgaagtatactgatagataaattaatcaaatcgaaacaatttttctttgtgtgataatttcgatgtgtaattgaatgtatacatgagtaaaacaaatataggggtgtatgcttattagtatattccttgttgaagaaaaccttgttatcttcaaacatgaaaccgagaaacataagtaaagattttactgtttgttatatgtgttaattgtatttgatcaaacaatatttgaaatgttgaaaactttctataaatatcaaacgttagttttgcattctgcgttagcgttttgttgtagtggtgattttgggagcgtttaaaaaccacaagctaaagaacgaagaatcactgaattaaccggtatgtttccggttaaaatgtggattaaaacttttcggtcaaagaaaaccgggaaaaagaagtagtaaatgggaaagtctctaagtcgttggtcaacgtcgtgaacatgtgcttgactaatattaattaatggctgttttatttccaaattccaatttctggctgaaaagtacatgaattatgcttacaactgtgttttacttaatatataatgacgaggaaacaacaaaaaggaagaagcgaagaacgaagtagacgaagacgatgaagaaaggtggattcagcaataatctcaagctcgcnnnnnnnnnnnnnnnnnnnnnatccatcaccaaattcctgtatgtttctcgatctctctttctccatggatctgtggatagatagatgtatttgtgtgtggaaatgtctctggttttgtttttgaaggaggaaaggttttggttctctctgtaggactcaaaacggtacgtttaaggatggagatctacgtgttaacaaggatggagttcgaatcatttctcaattggagcctgaagtc

SEQ ID NO: 141421 - DNA, 407 bp, Arabidopsis thaliana landsberg
ttctcacctcttttcctttaacaaactatttgaatctaaattcaaattgatttgttaagggaaacctgagctagaaaaaccatggcaaagatctccttcgtacttttcgttgtggcccttatcgcctttctccacgcttatgaagctcgcaaagtagtaaatctcggtgaagcatttgaaaaagacttacataaagccgaggccatgatcgcggaagaattaaaggctaagaaaacgaacattcaaggtttgaaatctgaggtgaaaacgttgagcaaatcagaagtgatgttgaaggatcttggaaatgcttacaagaaggatatggacataaggccttacgaaaagaaactcaaaaacttcagcaggatcgtagccctcaagaaagcacctataaaaacaacaac

SEQ ID NO: 141422 - DNA, 875 bp, Arabidopsis thaliana landsberg
atggctgctgctgcggccgctgctgcagcactaatcctcatttacaaccgcctcagttccaccgtcaaatcgcagctgcgcattttggttcaccgactaatggtggattcagttcaccgacgagtaatggacagtttggatcaccgactagtaatggatttggatcaccgacgactaatgggaagtttgatccttcgttcttggcggtgaggcaaacgcagcagcaaccaattcagagaatgtctacaccatcattgcatagtccagttagtaattacgttgaggatttggaatctgcaaacgctaatggagggagaactgtcttaactttattcccaactcgagacgattaaaaagtcattatctttccggtaatacttcatcaagattctgattgttgaccctttttgtatttgtgaaccatagcttgctttgttgatttatgtcaggttactagatgttcaaaatgtctctgcagtcatcaagaacatgagtcagctgatcgttcttgtgcatcggttttatccggtggcgtttactctgtgcagtcttatcagtttaacattgatacaatccagcgtcaatgtgtggtcaagttctgtatctgaagctcaagcaccttcaggtcaaggcttgtattaacccttgtagctttcttgtgtaagattaatgtaaagatgagtttacttttgaacgtacatccgtacgaacaaactcaagattggaaaaaagaatgaaaaaaacaaaaacttacttcacaatgttctttgctttcccattttgttgtagatttgttcttaaagctgagtttagctgagtttggttgtagccttttacactgaaagtatattggaattgctgaaactgtttattca

SEQ ID NO: 141423 - DNA, 173 bp, Arabidopsis thaliana landsberg
ttttgctgaaattcaagcatttagcattacacgaatgatcatgggagttttacattgtctttctaatttgtttctcttctcaaaccgaaaacctatcttgacctgaagtacaaaaaacaaaaacaaaaaagaaagtgaaagtctttgtgtcttgttgcactttatttcgagac

SEQ ID NO: 141424 - DNA, 442 bp, Arabidopsis thaliana landsberg
cgctctgttaccgattttcccttactggttcgcgacaatcccagcggctttgcagctcgtgctagaaggaagatatattgttgcagtgattttatctgtgactcatcttgtgctaatggagtatggtgcttcagagattcaagatgacattcctgggtccaatgcttaccttactggactaagtattattggtggagtcactctgtttccttctgctctagaggtaagaaaattaaaggattgggtctttatgaaatttggaacaaaaattggcgattttgtaatgtttttttcgggtattttgttgttgcagggagcgataatggggccgttgataacgacggtggtgattgctttgaaggatctgtatgcagagtttgttctgaatgagccaaagaagatcaattagtcggtattggtttctttaataggagcttcaagt

SEQ ID NO: 141425 - DNA, 248 bp, Arabidopsis thaliana landsberg
ctttttaacgaactctctagaaccctttttctttttcacccaaaacccaacctcgtataaatctcaccaatccatttcttctcttcttctttgcgttttttgtttggaactgaatcgaaaaagatggatgctaatttcgagatgcctccagtcggtggaatgaacgacgacgacgacatggatttcggtgacggcgcctcgtttcttaaagtcggtgaagagaaagagaccaacaaggtttgaagaag

SEQ ID NO: 141426 - DNA, 531 bp, Arabidopsis thaliana landsberg
tttcacctctaatgcgacgaacacagccacgggaactggccgtcactggtttatcggagaatctccaaggatgtgttttccgcacggtgaaacgagcagttctgatcggaaacggctgcgccggcgcggagaatcaatgcatcggtctccttcgatccttaggcctcttcgatcgccacctctattatgtaatctccgtctaaaacactattcctcttctggcttcttcattttcaatgtttctgagtttgttttttcctgttcagagagtagctaaaccaagaggtggaatccttcaatggcttcctatctctctctacaaacgaattcatcgttttatcagcactatctgtgccggattatccattaacgctactggtacaaccttcaacttttattcacagtttgaaaaatgagatttttggcagtaatttgtttccctggaaatggctgtaggaatcacgaatgtgtttgaagtagatgatgcgaagcagattgctgctatggctcgtaaaacgtttgaaaagtatt

SEQ ID NO: 141427 - DNA, 1081 bp, Arabidopsis thaliana landsberg
gattttgtggcccggcataaattttctggtcctcttgaggctgaaactaagccaactgtttctgctcctccggaagttcctcctcctgcagataataatctgaaacttctgatcgaggggtttgcaacttttgtttcccgttgcgggaaactatacgaggatctttctagagagaagaaccaatcaaatcagctgtttgattttcttcgggaaggtaacggtcatgactactacgcaagaaggctgtgggaggagcagcaaaagcgtaaagatcaaagtaagctgacattagatgttaaggtgtctccaaccgtacagaaaatgactgcagaaacacgtggcagcttattaggggaaaagccattgcagagaagtttgaaagaaaccgatacttctgcttcttctggaggctccttccagttcccgaccaatctctctgacacattcaccaaatcagcttcatctgtaagtaaacaacttcacaccttacaagactttagcttgattacacttgatagatgagtttcaagtgatatgcctttgttttccttgcactgacattcttgacttatctttctctccctgaaatagcaagaggcagcagatgctgtgaagcccttcaaagatgatccagctaaacaagaaagatttgagcagtttctcaaggagaaatacaaaggagggttacgtacaacagactccaacagagttaatagcatgtcggaatcagctcgggcacaagagaggctggactttgaggctgcagccgaggcaattgagaaagggaaagcttacaaggaggtcagacgggctaccgaacagcctctcgatttccttgctggaggtcttcagtttacttctgggggaacagaggtatgtctacagaatcttctttgcagttatcagttcatttttggggttctatactcatacgtaaaacttttgtttacagcaaattaaagacactggagtggtagacatgaaatcgagtaagacgtatcctaaaagggaagagttccaatggcgtccttcacctcttttgtgcaaacgttttgatctccccgatccattcatgggaaag

SEQ ID NO: 141428 - DNA, 550 bp, Arabidopsis thaliana landsberg
gtggaggacatacttgggaaccgtgatacctctgttagcggcagtatttactattattctgagcgtggtgatcggctaattgatctatcttccttcagcaacaaactctggcaggtttgttcttgcaataatggacatcagatcttttctctaatgaacattaatgtttctcctgtaattaatatttatgctgattcttttgtttgttcagaaactacattctggatttcccctagtagatagttttccaaatgttgctgagctgagtgaagttagagagacaattcaacagctgttgaaatggggctggaagtataaccgaaaccttgaggagcaagctgcccaacttcatatgttagctggctggtctcagattgttgaggtttatatctttcttaaaaatcagctcacctttagtatcattagcgtgtggcactctcttaagatatcaagtatttatcttttgtgttgtgcttcatatgtttttgttttaggtgtctgcttgcagaagaatatcttctcttgataaccggtctgaaattttgtaccg

SEQ ID NO: 141429 - DNA, 672 bp, Arabidopsis thaliana landsberg
ctactctaggttttgaggattatgttgagccattgaaagtttacttgcagaggtttagggagatcgaaggggagaggactggactagggaggccacagactggtggtgaggtcggagagcatcagagagatgctgtcggagatggcggtgggttctacggtggtggtggtgggatgcagtatcaccaacatcatcagtttcttcaccagcagaaccatatgtatggagccacaggtggcggtagcgacagtggaggtggagctgcctccggtaggacaaggacttaacaaagattggtgaagtggatctctctctgtatatagatacataaatacatgtatacacatgcctatttttacgatccatataaggtatctatcatgtgatagaacgaacattggtgttggtgatgtaaaatcagatgtgcattaagggtttagattttgaggctgtgtaaagaagatcaagtgtgcttgttgaacaataggattcactaacgaatctgcttcattgaatcttgtatgtaactaaagccattgtattgaatgcaaatgttttcatttgggatgcttttatgttttggtgagagttatgcagtgattcaagtgtcaaaatgcttacataaaaaggcagcaaagaaaccagcttcgttagaatctgtgaggaaaggtc

SEQ ID NO: 141430 - DNA, 868 bp, Arabidopsis thaliana landsberg
atggagagagtgtgttgcatgtgcggtgatgtcggtttctccgacaagctcttcagctgcggtcactgccgctgccgcttccaacactcgtaagtagtcctccttcatcattcatgcatatgtatatcagagtgaccattcacggctattaatgggtttcttaattgatcatatatgtgtgtatatatatatatagttattgtagcaactactacggccagtttgcggagcctaccgagatttgcgactggtgccgcagcgacgaccggaagctgagcaacgttgctagacatggcggttcttcttcaaagaagccttcttcttcggttaaatatgaaaatgacttctcaaacagatcggaatattcgcccggccaccggatcaagcataacaataaccgtcacgatcaagtagccaagggcgttgctggagatggaggcggagttacgtcgcctaagacggccacacgaaggtacaagcttctcaaagatgtcatgtgttagttccacctaaacgagaggtattagaagacttactataatcatactactctttcgagactgtgtgattaaattatgtataattagactacggagagagcaaattaaaaaagaaaacgtcgttgtttgttttcatccttttttcctttttactttgtgtttatatatatgaaatgaatgtgtgtttggcgtgagcttgtgttttcttaatcaccatataagctattaataactgcaatttgcgtaaaagactcctttttctttaaaacctttcgtaaagatctttattaaacttaacatccacgtatatataaatataggtctgggttcctttaggtttcgtcgttaaataccattaataatgcgag

SEQ ID NO: 141431 - DNA, 350 bp, Arabidopsis thaliana landsberg
ttaggttgattcggaatggacaatctgatgctgttgaggtaaaaattgtctctgtttctttgacggaccttttccaccaaaaagttatattctgctaacggctagttgaacttagttcctgatttctctgttttgatttttttattttattaccttctcaagcgaatccttgtggttgtggaggcaagtttacgtggggagaaaacatttggatgttctcaagatactagtggagattggtgtcttcttcaacatctccgtggttgttgccttcttgatcaagtacaacgtggtgcaagtggcatattaagagagagaaagattattgatgccatccgctgcttcttcag

SEQ ID NO: 141432 - DNA, 3888 bp, Arabidopsis thaliana landsberg
gtcttccactttgatccacttaaagcagctttaaagctttgaacatgtttagctataatccctgaggaactatcctcatgtctctctccagttgcttgcttcccttttctcaatcagcgacggctccgtcttcctccgtctgctcttgccatctcgccgcctctttttctaattttccggtaagcacatgtattcactctacctttcatgcatgctttcgttttatcaaaaggtcattactttgagaaacaaagattattatttttcttggattatgctaatgttttctgcaatctcaccaaagatctcaaattcgtgttacatgccctctgaatctaagctttagtatattattgaccttcgaaatcaacttgatttctagttgttgaaattcgaattctctattttgtgtgaataggtttcgtcaagacactatagtttctcgagaagtggaagccttgttctcaacggaggaggctcgaatctctgccggagattctgtggtttgaaactgtggatacttaagagcttgaatcgtagacaaggcaacaacagaaaacatcagcctgtaaacgagcttacaacacactcaaagcacactttcctcagcgatgatgaacgaggtctagttctaagatatgagtcaatttacatctcatgtcttcacttgatcattctttagcacttcctgaggtagaatgtgatgcaggttttgctgaagaaactagagctgaagatttacgaccagaagagaatattctgggaacggatttgaatgatgggtttcacaaagttggagacttaccacctgtgtcaaaacaactctcggatgatctttcagatgttcgaagaagggcctcactttgcattgctgttgtaggagccactggtgagctagcaagagggaagattttcccggcattgtttgcgttgtattatagcggctaccttcctgaggtatgacttttgtgctcatgaacaattacaaagtaagcagcaaaacagttggatagtttttttcggttgtcttcttgattggtcttcattgtcacaggatgttgctatatttggggtttcaagaaagaatctgacagatgaagacctcagatccatcattgcatcaacgctgacttgccgtgttgatcatcagtatgtataattcttggtactaccttaaatttggtatctctgatatacggccgcgctagctaaagaatgatgctaaatgttcagggagaattgtgggggcaagatggatgcatttcagagtagaacatactatatcaatggaggttataataacagggatgggatgtcccgacttgccgagagaatgaaacagattgaggttcctaagtacctttttttctttctttcaatgattacattttgtcccagaagtagtcctctttctgagtttacaacattttgaacagacaagcaagatagaataagacattaacagcttttcttcttcagggagaatcagaagcaaataggatcttttacctctcagtacctcaagaagctctggtggatgtggcatgcaccattggagataacgctcaggcaccacgaggctggactcgaataatagttgagaaaccttttggttttaactcacattcgtctcatcagttaacaaagtcacttctctctaagtttgaagagaagcaaatctacaggtccttcttttaaatctagttgctttctgcatgcacagctctccaagttcatatttcttcacacttctgtgcctgttacaggatagatcacatgataggaagaaacctcattgaaaatctgacagtgctaaggttttcaaatctagtttttgaaccactatggaacagagcatacatacgcaatatacaggtagtgtttccttctgattgtttgtagttgtgtatagtgcctgaactttcctcttccacattctggtttgttcactttgtgtataaatgatgtttccaggttattgtatcagaatcaattgcgcaaacagaaaagtaaggcacaatagttctattttcaccatttctttgcatgtgagagtaaattgtgttgtttcagcattcttagacaaatcagtaatgttattttctaatttcctactgctttttaaaaggttttctgatggatatggaataatacgggacatagtgcacagccatatacttcagacaatcgcattacttgccatggaacctccgataagtctcgatggtgaagatatccgaaatgaaaaggtcaacctgtactgtaaagaacaaaatcgtcttatggtatatatgtaagttgtgtactcttgttctgtcaagtgacttggtgacaaacctgcttctgcaggtgaaggttttaagatcaattcgcaagatagacccgcgtgatgtcatccttggccagtataaatccagttcccgagacaagaacggtgtgatcttgaacggtgtagaccctacatattgtgcagcagccttgtatattgataatgcacgttgggatggtgtacctttccttgtaagagttggcactggcctcattaaacacaggtaagaataattattcctactcatagacatatccaactgtcataacaattgattggtgtgccttaatgttgaaagagtggagattcatgtgcaattccggcatgttcctggaaacctataccgagaaaatattggaataaacatagatttggggacaaatgagcttattctacgtgacgaacctgatgaggccatcctggtgaaaatcaacaacaaggttcctggtttaggtcttcagctagacgcttctgaacttaacttgctctataaagacaggcaagttttgcattctcatctttgtgcctacacattttaaaaatcgaacttttgcgccttaggttggttgaattgttggatcaaacctgtaggtataaaaccgaagtaccagactcatatgaacacctaattcatgatgtaattgacggagacaatcatctgttcatgagaagcgatgaggttgcagcagcatggaacattcttagtccggttctagaagagatagacaagcatcacacagctccggagttgtatgaatttggtggacgaggaccagttgcggcatactatctttgggccaagcacggtgccccatgggcagatgactgaagaagaaacatagatgcagcaacaaacaaatgagagtgattctgaatggttattgtgaagtgtgtttgtttagcttgaagctgtgccattccctgtagactgtacatatgtacacatgtatgtcatgttgctatatgaatgtccatcatggtggggtccataatagtgttgaaaagtctccaaagccacccaaaggaaagaagaaagtctgagagacttttagataaggtcatgttgttagtcttcccactagaggcaataattatatcttctccaccaattcctccagaaaattcttccagatgtatcatgtgttgatgatcaaagtaggatgaaaatgatgtaactaaagagaaacattttcataggggaaggaagagagagcggttcaatggacagagacagaaagagggtgaaaatggagaaggaagatgacgaagaagaagagatggaaaagttgtacacagtgcttaaaaacgcaagggaaatgcggaaatatgtcaacagctccatggagaagaagagacaggaagaagaagaaagagcaagggttcgtagattcccttcgtttcagccagaagatttcattttcatgaataaagcagaggccaacaacattgaaaaagcagctaatgagagctcttcagcatccaacgagtatgatggctctaaggaaaagcaagaaggatctgagactaacgtttgtttagacttgaatctttctctgtag

SEQ ID NO: 141433 - DNA, 490 bp, Arabidopsis thaliana landsberg
gtggaggaaatgttggagcagaaagtgagaccttacatccaagactcaagcatggctgttcttccacaacccatcttgttaaagtcacagaagaaagctcaaaaggtatcaattgaattggttacaagaataagcctacttgatatcattctctcttacacactaaataaggttccaaattagatcatacaagaagctctttgcctgaaaatagaacctaagatcacatgttgatttatatgtttattacacagggaagccggcaaaggaagtggtggttcttctaacctgccaagtgtgtcgaaacgaatctatataaaatggattttgaattgagtttttttgtgcttctttgatgaaaatatgctttgatatgaatcttgatgggtgtcaaatatgattacacttcaaaatcagtggtaatgttttaaaagaaatgttgtttttgcagacacttggcagattcgttgtgtaccgccacgtgtatacc

SEQ ID NO: 141434 - DNA, 768 bp, Arabidopsis thaliana landsberg
ctctaatggctacaacaaccacatcatgggaagaactcttaggctcaaagaattgggacactatcttagacccattagaccaatcacttagggaactcatcttacgttgtggcgacttttgtcaagccacctacgatgccttcgtcaacgaccaaaactccaagtactgtggagccagccgctacggcaaatcttctttcttcgacaaggtcatgctcgaaaacgcttccgactacgaggttgtaaacttcctctacgccacagctcgtgtttctctccccgaaggtttgcttctccaatcacaatcaagagattcttgggaccgtgagtctaactggtttggctacattgctgtcacgtctgatgaacggtctaaggctttaggacgccgtgagatctatatagctttgagaggaacgagcaggaactatgagtgggtcaatgttttgggtgctaggccaacttcagctgaccccttgctgcacggacccgagcaggatggttctggtggtgtagttgaaggtacgacttttgatagtgacagtgaagatgaagaagggtgtaaggtgatgctcgggtggctcacaatctatacttctaatcaccccgaatcgaaattcactaagctgagtctacggtcacagttgttagccaagatcaaggagcttctgttgaagtataaggacgagaaaccgagcattgtgttgactggacatagcttgggagcaacagaggctgttctggccccctatgatatacctgagaacg

SEQ ID NO: 141435 - DNA, 460 bp, Arabidopsis thaliana landsberg
gctttgtttgagaagaacccctcagttgatcaacaagtgaatggtatgccatattaacagataacataattatcatcactataagcgagggtcaatataacatctcctttctttttctatctgtcagcaacagctagtgaagaatccaataaatcagatgcggaagatagcgatgaatggcagcgaatatctgacttgcagaaaaggtattcaagactaaatgttcaactgtccagctttaaagttctgtccaatcaaaagaattttgtttagtaaagcatgattgacttcatttggagaccagtctcataaccatttatgtttcatcgttaacacaaatttggtatttgctatgtagaatgtctgtgttccgaaacaaggctgtggacaaatggcagagaaaaacacaagtcacaactggtgcagctgctattaaaggaaagctccacgcctttaacca

SEQ ID NO: 141436 - DNA, 1418 bp, Arabidopsis thaliana landsberg
tctctcgaaccatcgagtctcgaacccagagaggactttcctcagtgagtcctccgttccttagcttctcttccagatccaaactctcaccaaactttctcacaacacacacacaattcgattcgatccacactcttaaaatcccaaagatctctctgattttgaaattcgattcttccccagatcaacttgtgaatttttccacaattttggttcatgattttgatttcgtgaaggacttatggattcacacccttccctaatgggaaggtccattaccaattcaaaccgatcgagcttagatcttggtcgtccttcttcgtcttcttcatcttctccttcaccgttaaccaaatcgatctccgatgcaagtagtcaaagtctctcttcgatccttaacaatccacacggaggtaagtctggtgtttatggttccgatgcatcttgggttggttggtggtcttcatcgacatttgtagctccagctgagttcgcgcctgttgcttcaacgaagctccctggttcggaacttaccagatccgacttccatggctacgtttcttcgatctctgagtctcatggtagatttgaggatattaggaagcatacgagggaggagagctctgggtttgatcaggagagccatgtatcgggtttagctgcgtgtttgcgtgaggttccttcgctttactttaaggaggattttgctcttgaggacggagctacatttcgttctgcttgccctttctcgagccttaatgagaatctagcgcttcaagagaagttgtcacagtatcttgatgtggtggagctgcatcttgtgaaggagatctctgtgaggtctgattcgttttttgaggctcaaggacagttacaggatttgaatgtgaagattgttgagggttgtagtaggattcgtgagttgaaagagactattcggctcctggataggaatttggtagattcagctcgacagattcaagagctgagctcaactaggattaatatgctggagctgcaacgtaaattaagacttattttgtatgttaaccaagctctctctgcactcaaattggtaatttttcttactgatttgcttagagtagtgtcaatttagatacttttttgtttttcctatcttttattgatggaagtttgattctttattgttcagcttgttgcgtccgcagattgtgctggagctttggatataactgacgatctccagaacttgctggtaagttcatctgtgattgatgttggatacttttagacgattagggtgctctttctttagaatgtaaaatggattcctgtcttttttaggctggggatgagcttactggtctatactgcttccgccatcttcgggatcatgttactagttccatagattccataaacaggtgtgtctcttt

SEQ ID NO: 141437 - DNA, 602 bp, Arabidopsis thaliana landsberg
agcaaaaacactcccaaaccaaaaaaagaagaagaagtagctaaattcgaatctctctcttttttgaaatatggctttttccaaatctctagtgtttgttcttctcgctgctcttttgatttcttccgcagtggctcaatctccggctccagctccatctaacgtcggaggtagacggatctcaccggctccttcacctaagaagatgactgctcctgctcctgcacctgaagtttctccttctccttctccggcagccgcattgactccagaatcctctgcttcaccaccatcgccgcctctagctgattctcctaccgctgactccccggctttgtctccatctgcgatctccgattctccgactgaagctcctggtcctgctcagggcggcgcagtttcgaacaaattcgccagtttcggatctgtggcggttatgttaactgctgccgttttggttatctaggttgttccgatcaatgaagcttctttgattttatttatttattttagagatattagagttttgtgagagagatgatgattcattatttttctcttctttctattattttcttagaatttttttctttcttcggctg

SEQ ID NO: 141438 - DNA, 1148 bp, Arabidopsis thaliana landsberg
cagggagatcagaaatcagtgtcacggagacagtggatgacggcatgtgtgtgcgcatctgcagctttaattagcaattcttatacctttgtctctgtacaaagcgcagccgctttagacaagaaaccaggaggttcatgtcgtaactgccagggcagtggtgctgttctttgtgagtgacaagttcttttgttttagtttcttatctggaactctgatatagaaacatatccttaaacgtatattgtatagtatatttgccttgtgtttctttagaatctgtagggtcttatagcttaagattgaaagatataagacctgattgtgacttttaacaacaaacatatggaactcttgataatagttttcgtagacaccttcctatgtgaaaagttcataatgattctctgtttccatttgatatgatgcaaaatgcctcatgagcttactactgatacccatttggtttaattggattttgttatgatataggtgatatgtgtggtggtacaggaaaatggaaagctctcaaccgaacacgtgcgaaagatgtatatgagtttacggaatgtccaaactgttacggtttgtttccttcccgatatctctttagtcttgtttggtttcgtaacacttgaaatttcctgattagttggtggcttctattgcaaacaggtcgaggtaagcttgtttgtccggtctgtttaggtacaggtttaccaaacaacaaaggccttcttagaaggcctggtgctcgtgagctactcgaaaagatgtacaatggtcggcttcttcctgattcatgagaaggtaggtataggtcctttttactacaacttcacattgagattattgggttcacgaattaaaagcttggtgaggacaagcgtgttcctctctcttatctttccatctcttgaaatggttgcagattgttactgcaaatatgattttaagcacagagccagtagacatgatgatagaagcggatgaaaacttacacattgaggatgcatggaaagctatagaagaatgtatcgaattcaacatgtttttataatgctgctaggtttgtgttgtaaattctataaacataaaactttccttcttccccatacagactagacgaatcagtttcgactaagata

SEQ ID NO: 141439 - DNA, 3568 bp, Arabidopsis thaliana landsberg
gagacgagaaatgtctctgaaaccttatttctctctactacacgtatcaccaactaatgcaaaactttccaacttcttaatcgctcaacaaccctccggtgaccggaaaactaccccggccgaggagttttctccgctggttgagaaattcaaccgacggtttcttctgggtgtaggatcatcctctgttcttgcgattggtgcgaatttcggaggaaccacgagttttatactcggtttatcgccagagataggccggaatctaaaactcgacgtcatttatccgattgggggatatagcagatgtatcgataccggtgaaggattcggttagtaagtcatcgaatttctccggtttaagatattaccaattcgaagataaatcaaatgattgtcaattttgtaatcacagaatttatatatccggctacgtgggttggagaccagacgcttttgtatagagcggcggagaagtcagaacgggagaattcgctagaccttcctccggcaagaaacagtcgccggaaaaacgttaatgaaccggttgttgcatttggaccgcccggttcgaccggtgagcttaatgtcagtgttatcgtttcccctgtctcacccagtttctcgtaagtaaaaacatcatcttatagtaaaaaacattcattgttctgtggtaacgactaggtgatatggtttactagatcttcaaacaaacctaattgatcatgagaaaaaattgtaagactagatcgattgttttagtggtctaactagtttcaaagttgtaattttcaagattgtttattacactactacatctagtagactaatacatgtttgaactgaaacaatatatctgtgtgaatacataattctctttactactttgaatctttcacataagttagtttagacatctgattccctaggattgttaagatatattaaagtctgtagcacctagatcgattttcgagcatcgatgttttcttctatctataagattaagacgaacagttgtcattttatttcaagaatcggaatctgttttatgaaagtgtttattgtttatgataatagaatcgaagcgtttggagggccaaaagaagttggagaagcaatagtaagaacagtgacaggatctggtcaacgaacagatttgaaaggaactttgctagaatcaagtatcagacaagattcagagagaaacttgaagtactatgagttagagtttaaagtcgaatcacctcttttccggcggcataatgtagccgtttgttgcgctcacagtggccggctttatacactgaacgctcaagcgccagagtcagcttggtcagaggtgaaatcggaaacttacactactgctaaatcgttcaatatcatttcttgaatgtaaaggatcggaaaacaaattgtaaaaacccaaaaagaaacaagatactacaaagcaaggcttattttttcttcatattgatagggtctctttgtttttcttaattaattcatactattgagttgaatacgatgattaaggtcaaaaatacgaagtgacaataaaaagagaaaagtttcgagcataatcatgtcttcttgatcgtgccgctcgctatataaacactgcaccaagcaattactataaatttttttatcaattaaatattaaattttgagaatatatttctatattaatgaaaaataatttaaagtaatcataagtttgtatctttgaacaaacgaaactagaaaacgcctatctctgctcattggcttctccatctccgatcaaatccgcggtcgtagtcagagagagagagacaaatggctatgcctagggcaacctctggtcccgcttacccggagaggttctacgctgctgcatcttatgtcggtctcgacggatctgattcgtcggcgaaaaacgtcatctcgaaattccccgatgatactgcactacttctctatgcgctataccagcaggtcagcaacttccatttctgatctcttccatttttgatctcacgattgtggattttgcttttgaatttcacgagatctggtcgtttgggtgttgatttatttgttttagtcaccgattcatattcctctcgccgaattcttatcggatgttagaaatgacgcactttacttgtctgatttagctgtgcttgatcgttattttcgatcctggttagtatattcgaaatgctcagtaaaatgttgcccgagatctcatcatcgatttgattggaaacatgattgaaacagttttattttattagatctcagggagcgttggtccgtcagtcgtagtttacttggatctacattgattctataacttgattcgtagtcaagattagtatagtcgtagatgaatttcttacgagggggtgaaactggctgttccttaacatagagagaaacgttctcttgtactaattataatgtcgagtactcgagtctactagtttttatccctgggatagataggctcagtgctgatgatctcttggatttaacattgaaacaggctactgtaggaccatgcaacactccgaaacctagtgcctggagaccagtggagcaaagcaaatggaaaaggttagattgggtgctgtgttttgcccatacttatctacgattaacatttatgcatttatcactggttcttttatttctattcttgcgtttgtgaatcatacttgtaggaatatgcttcatggtagatattaataggagatgtcttagatttcatcaattactagagcgtaagaatccaaatgcattagggaaacgggaaaggagtactttagtgtaagctactagaggaaaatagaaatgcaggatttgaatgtgcatccctggggaaaaaaactaagtgcttacctatgttttggaccttttggtctacattactgaggttgttaatgcttacgatcctttttaaaggaaaataagactttaaagttgtcctcgttcctttcctgaaagatacacatgctactgttctgaagcatttcatatttacttagttggcaggggctcggaaccatgccctccattgaggcaatgcgtctctttgtgaaaattctggaggtaaccgacaaagaggtctatgggttttttttttttaaagacttaactggagcataaccttgctttcttctctattgctcaatttttatcaggaagatgatcctggttggtattcgagggcatctaatgatattccagatcctgttgtagatgtccaaattaatgtaagttttggtatcccatgggattcgatgtccaaaccatgggaactattacacatatcttttgcttgattgaagaaaattatttgagttttttagtgcattcatctttgtagcagagagcaaaagatgagcctgttgttgagaatgggagcacatttagtgagacaaaaacaatttctacggagaatggacgtttggctgaaacccaagataaagatgtagtctcagaagactcaaatactgtttctgtatataaccagtggactgcaccccaaacatcaggtcagcgtccaaaagctcgttacgag

SEQ ID NO: 141440 - DNA, 4982 bp, Arabidopsis thaliana landsberg
tcttactacccggaacgccttgcaaaatgctacattttgcatatgcccggattcttcgtgaccgtttggaaattcgtctgccgttttctagagaaagcaactcaggaaaaggtttgatctttaatctcctcttgatgtatctatctctaatggttcttgagcaacgaatcacataaattatgattttgctgttgcatagattgtgatagttacggatggagaagaacagagaaaattcgaggaggagatcggagcagatgctttaccggaagagtacggtggccgagctaagctcacagcaatccaagatgttcttctttctcaggctgctccagtaactctaacaaacaataatgtttagctctttatttttggaagcattaacctgaatatttgtaatggtcagaacataactagtggtccatctctaaatttccaaaagaagcaatgaaaacatgagaaagtaatgcgaatatattcaatctggtgactgagtgctcgctcttgcttatcttttcttattcacatcataagtaagctgtaaagcaggattgatcaacagaccagactaacttctagaaacttaatgtcctcttgttgtacgtgtaagattccaaagttagctatagatgtctttgagctaaaaaccagaatcacgagctcttaaatatgatccctaagccttgttatatgacaaaagacttttcaacaacttaatatttccaaaagaagaaatgatgaaacacatgagaaagttgtgtgaatatactcaatctggtgaatgagcagtttcaaacatcatgctgtttctgtatcttaaattaaacaatcttgctgttttgaattttgaagatgttggtcaattcactaacacactttaaagtcccaagcttttttctatcagccgcctccaaaatctctctatctctctgtctctcacttcttcttcctcacgggggcgacaatggcgacgttcactcatcaaaccccacaaacccatttcctctctcgccttcctctcagagctaaacctagacacttctccgcaagagtcaaaatgtctctccaagaatctgcgccttcactcgccgtcgttggcgttaccggagccgtcggacaagaattcctctccgtcttatccgatcgagacttcccttatagctccatcaagatgcttgcatcgaaacgctccgcagggaagcgtgttgccttcgatggccatgaatacacggtggaggagctcacggcggatagcttcaacggtgtagacatagctttgttcagtgctggtggatccataagcaaagagtttggtcctctggcggcggagaaaggaaccattgttgttgataatagctcggcttttagaatggttgatggagttccgcttgtgattcctgaagtgaatccagaagcaatgaaagggatcaaagttggaatgggcaaaggggctttgattgcaaaccctaattgctccaccattatctgtttgatggctgttacgcctcttcatcatcacgcaaaggttcgatttttattctgaaatctgcttagtccaaaattttgaagggtagttagagaatcaatggaagctttagactttagtgctctgaataatgtttgattggctataataggtgaagagaatggtggttagtacatatcaagcagctagtggtgctggtgctgcagctatggaagagcttgttcagcagactcgtgaggttttgtttctatttcagccttctttgattgaattgtttaatgattgtgctgagttgtgattctgcttcttcgtcttctttgcattggtgtgttttcttaggttttagagggtaaacctccgacttgtaacatcttcgggcagcaggtgagtgcttaatttgcttatagtttgtatttcgaatgtgctgattatgaaatccctttttgagtaatgtgatggttttgtatgttgttctgcagtatgcatttaacttgttttcacataatgctcctattcttgacaacggttacaacgaagaggaaatgaaacttgtgaaggagacaaggaagatctgggtgagtggttacttaagtgctattttgtgttcatttcactttgatcttttgttcaaaaattttagatatctcacaccaatttcttgcccttcacagaatgacacagaagtaaaagtaacagcaacgtgtatacgggggccagttatgcgtgctcatgcagagagtgtgaatcttcagtttgagaatcctcttgatgaggtaataacacacgtcgaacccgatttctactgattctgtgttgttgtgttaccttatgatttcactcactgatatgacaatttgaatcataatttgaagttttaaaccacattctatggttttaatttaactcaagccattgaaaaatgtggagcagcatgtaatcagcataagtaggcttggatagttcttgatgcacttgcagagttaaaccctgaagttgttctttggacttgctctggtagcatgtattgtgattcttgttgcgcaattaaaagaatcttatgatcaagttcttattcaggttataacggtttttcttactgtatcataacagaacacagcaagggagatactgaagaaagcacctggagtttatataatagatgaccgtgcttcaaatactttccctactccactcgatgtctctaacaaagacgatgtagcggttggtaggataaggcgagacgtgtctcaagatggcaatttcgggtaaagtctcactcttttctactgaatttgaagcaaatgtctttgcgatatgcctaaaaggatataactttgtgaattcaggctggacatattcgtttgtggagaccaaatacgcaaaggagctgctctgaatgctgttcagatcgctgagatgcttctctgaatttgaacccgctctcactttgcttcttatgaaattcttgacaaagagatcactgtattattagatttgagccaagaatttgtctcattttttgttctgtgagttttctattttgaccaattttgttactttgattcataaagttgtctcttaaatctgaactcatcatgcacacgcttgaacctcttggcaattttccggttcgaatctgtaccgacttggttgatctcaccgaagacaaccgggctccacaattatttgacacactgaagactgaaccagtgggggcccactttattgatagttatagcaaatatttacttgtttagtggatattatcaaatcctaaaatcactccttcgttactaagactagggaggagacccgcgttgtttttggttttgtttttggttttgttagtatgcactaaccacttcgattttttttactgatctttgattaaaaagggaatatctttgttatttgctaatcttatcttttgatttctacatttttgtaatctatgtatagttttacatttttttttcatgttgttaccggttatatgctagaatttataggataatagaccaaacttactatcttgtaagaatattttttagagttatatatatctaagcaatgcatttgttacattggtcttgtttttatatattttattttaaattaaaaatacaatggaaatctctctctctctcgcattaagcggttgctgcagaggatagcgaagaacagagactaacgacgaagttattttacacatcgttgccattgttaattttggcccaatatgaacccgcccatttgttttttctctttgtgtctctgttaaaatcttagaaactactctttggtttggggaagatttcacttttcaacgtctcttcgcgaattagccaaaaagagttggattataacaatattaacattgaaagtacgatatgcttagataattaattaaaagtttgattttattgtaaatataaatttccttacaacagcaaggaaagacacacattaaagcaaaagaaataagagtaataacttttactttgttttgagtctttgtgatagttaactgcctcaaacattatagggaattttttaaaaacagtttccaactctctacatgttttgtttaagttataccataaaaatgaacttaaacatttgtttgtaaaaaaaacatttctcacatgtgttgtccaaatctcttggatggcacacgtcggggggtttcatgttgcgaagtgatatcatgtacaatctttttctcgccactctaatcccatttagtcaagttttgatttgtttccaacacgtttcagccatggtggtgtctttagcccattcaagttggctcatataggttttctcctcttcagtccttcctctacataataatagcatgacatacatgtagattgcttctttctggcctccgttagctgttatgccaatatggtggagaccaacgtcacaatgatcaaggttaaagtaccatattataccttttatgtagtgagcttagtttttctataaatagagaggcatctcaaggaaaaaaggaggaagaaatccatattaaaacgtcttcaagctcctcagctcgttctctagctcctctgctcgtcctcaagcttctcagctcaccctcaagctcttcagctcgtcctcaagctactcagctcgtcctcaagatccttagctcgttctgaagctcctctgctcgtcctctagctcctatgctcgtcctcaagctactcagctcgtcttcaagctctccagctcgtcttcaagctctccaactcgtctttaagctcttcagctcgcctttaagctcttcaagctcctcagctcgtcctcaagctcctcagctcgtcctcaagctcctcagctcgtcttcaagctcttcccatcacagcgaccatctcctcgtctagctatcagctcatccctcgactgcgaaactcatctacctcctcgcctagcggcagttcgtccattgactacattgtccacctatctcgtcgtccagctcgtctag

SEQ ID NO: 141441 - DNA, 878 bp, Arabidopsis thaliana landsberg
  unsure (1)..(878): unsure at all n locations
atgggatatccgaagcttgtgtctatgatagaaaatcttcttgaaaggatttctcgtgatacagatgttaaaggagtgttacctgccattaatttagaaaggaaagaacaaatggttgcatgcattgctatattccagactgctttcttatccctatgctttggccgcttgtcagaccttgtaaactcgatattccctatgtcgagccgtgggagtttaccttcgaaagaacagatttcacaggtattatcacacattcaagatgagattgaggctgttcatccagatgctcgtttgactcttctagttttgcgtgagataggcaaggcccttagtaacctagctcaacgagctgagtgccaggtatgatagacctcttgttggttattgtcctcttgttatgtgcgatagctcccttagtatggtatcaatttgtgcttgtattatatagaaattcttaaagttgcatacagttgtataggagagattgagtacaaagtaataattcgtggggcaattataatttcttccagacagaaatgaagagaattagagctacatctacctctactatgcaaatatatacgtgttaactacctgacataattagagttaacagtgtaaagaagttattctgctacttatgcgtttatgtttgaaatgtaacacagctacacttatattgcagatttctacaggccctgagacgcggcagatatcaggtcctgcgacttcaacacagatcaggaacttcacattatgtcagcatctgcaaggaatccacacacatatctcattcatggtagcggaccttcccagtattgctactgatgtattgnctccttatctggctgcaatctatgatgcggcatgtgagc

SEQ ID NO: 141442 - DNA, 596 bp, Arabidopsis thaliana landsberg
gagagctttaccatctccttcctcactgctcttcttctttctcctgataacaccactcttcctctgccaagaaaacagagtctctgcctcaatgcctccatctgagtcagaaactctcttcaagatcatggaatcaatgtcttctgatcaacaatggcgtcaatcccacccaaacccttgtgcacctggctcatcttggccaggcattgagtgcaaaaccggtccagaccacttatcacacgtctctcgactcgatttcggctctgctccaaacccctcttgtaaatcctctgcttctttcccttcttcaatcttcactctcccttttctccaatcagtcttcttcttcaactgcttcactcacttcccaaccacaatcatgttccctataaaactcatccctaactcttctcttcaacaacttagcctcagatcaaacccttctctctcaggtcaaatccctcctggcatttcttctctcaaatctttacaaatcctcactctctcacaaaaccgattaaccggagatatccctccggcgattttctcattgaaaagcctcgtacacctcgatctcagctacaacaagctcacag

SEQ ID NO: 141443 - DNA, 297 bp, Arabidopsis thaliana landsberg
ggtcgtactttgtatctttggcaaaacacaaaaaacaaaaacaaaaaaactccttatatttttgtatttgatgctaattatcgtatagatgcccaaactcaattcaacccaagctcccaatttatttcttctccttctcgttatccttctttgttcaacgcaaacacaatgccacaccaaaggtctccgattacgaccaagaaaccagaagaatatgaacacgacgagtgatcggacacaaaacccggaagatgagttcatgaaatgggtgagattcgttggaagccttaaacactc

SEQ ID NO: 141444 - DNA, 1149 bp, Arabidopsis thaliana landsberg
gacgatcatgacgttgcttctgatatcgagagtgtgaaaggaaaatctcataccggtgagatattcttttctcaaattccacttctcgtgttctttaatgtgctcattggtgctttgatttgacagttgcttcgagtaacattgcaatggctactctgggtgttggatccagtgaacggatcaactggaaacgaaagtaagtttttttcctttgttcattttttttttggaaaattcaagttctttaaatagcttgtgttgaattaggggtgtagtaacatgtgcactgacgattctgacgagttctcaagcgatacttatcgtgtggtcgaaacgagctgggaagtatgagtatagtgttacaaccgccaactttttggtgagtttcatagatgcattaaattgagtgtactgtatgtgttgcaagcgaggccagttttgtgtggtttataatctctgaatcatgatgatatagtgattttgtttactctttggtggacatcaggttgagactctgaaatgtgcgttatctcttcttgctttgacaaggatatggaaaaatgaaggtgttactgacgacaacaggtagcgaattattttgttactcaatctgttgttatcagttttagagaaatttccatgagttttatatctaattcctctttgaacatgaccgtagatagctcactgaatttttcgttactgatacccaaatcctgtctctataacaggttaagcacaacatttgatgaagttaaagtctttccaattcccgcagcattgtatctttttaagaatttgttacaggtggggtgtcctgagtttgttatttttttctgtggctttggtcgatttttcttaacttatgtttttcatgttaatatgtctctaactacttgttgtgtcaccttttacgtggcagtattatatttttgcatatgtagacgccccaggctatcagatattgaagaacttgaacatcataagtaccggtgtcttgtacagaattatactgaagagaaagtaggtttttttaatcatccaaatggatttaacagcttccaatgaatagttgttctggaaatccatcagtgagctgtttcagtttccttcaattcttgcaagtgtgaactgctttgcttactatct

SEQ ID NO: 141445 - DNA, 2786 bp, Arabidopsis thaliana landsberg
  unsure (1)..(2786): unsure at all n locations
agagagagaacgaagcaaaaaacctcgctcgctagctatgtgaagaaactatcttcgttataaaactttccggcgacgttttccgacttccgagagcaggttcggtgttcatcacttgtcctctcacatgcttaattcttttcgattttgttatttagttttttttttagtttctattttgggtaatctcgacttggtttgcaagtcccttggccataatatcggatctgtttaatgttagttatgtagatattgcccgattcaatttctatttttagtgcctttgagaagatttttcattttggattttcttagtgaagaatagtcatcacagttcactcacctacatgttagtcagcaatggattactggatttgattctctctttattttcattctactttgaacttcatttatcttggccatggccagtttaagttattgtgtagattaatggtaagctcttttttttagtgttattgttgaggttatagtcataattgattctgattgagttcttaaattgtgtttttttttgttggaaggttttgaggtggttttatttgtccaaaacatctaaccgaagtgtcgttgtacggtgcttagtagttttcaataacacgcttcagttatggggaatgcttgttgtgttgctactcgagacaaaatggttgtgcctaatacatcagcagtcgagaattttcaaagaaacaatgtgaggtattctcctaactggagcttccgatgggataatagaggaggacgcgtggcaggggaagagacctctgttagtttgttatctgatcggattagtcgtaacgatgtctctgatgtcaaatctgaaactgctcttgtatcatcacaaggttctcctttggacaattttcagacgcagtcatggcagaaatctcctgcttctggtaaattcctttattgctgcttacaggcaatacctctttgatttgtcaaaaaatgtagacttgatgggaaaatgtaggcaccttctttttgaccaacccgcttagaatttaggattacttttctacagagactgttaatgagtgaaaatgacattgatatgtttgttgacataaactgttctcttgtttgtttcttgacttgcttttattgttaaactatgacttttccatgttgtgatatcacgttattgttgtggcagatcaatcattttcaagaattgcctctattgactctgtctctgaacaggttaaatacttaaaagctttgtttcactgctagctatatatttgttatgtatctctgttaatatgactcctatgttactgttttagatcacccaaaaaacaaatgattcaaccgaccctacttattatccatctcctgcaaaactgtctctttcattggcttctcaaccatcatccttctcagtgtcaccagtgtcaagtcagtcccacttgccaatgccacctgcaagttcatcccaattaaagctgacaccgccccctcgtctatcaaagcaagtctcatatggtcaaatctttggattcacctcaccgagcagaagctcangcaactgaagagagattggggaatgaatctcagtctgatggttcgtccatgcaagccttttctgaaatgatggcgtattctcgcacagagtcttgctcttacgataacgagtgctttggggttcgtcgtgacaagatagacaatcttggaagtagaaagtccaatgatcagcaaaactgcggtgcttgctctagacccttgtcggagaaatccttgtggagcagccaaaagatctttatgaccaacgagctctctgtatctgcaattctagcttgtgggcatgtctatcatggggagtgtttagagcagatgacgctggaaattgataaattcgacccttcatgcccaatatgtacaatgggtgagaagaacacagcgaactgtcagagaaagcgttgaaagtagagatggatttgaaagcgagacacaacaaaagactcagaaaccgagttttggacagtgactttgattgcgatgattttgtaatgtttgaccacagccacaggacagcagcagcagcaagcaagagccctagactcgtctcaagttcgagtgctaaaagctattcagcaaagcctttcttggctcgacacttctctttcgggtccagaagtaactataaatcccctaaagaaaatcttcctgtgaaaaagaaaggcttcttctggaccaaatccagcaaaatatgaacttgtaagcctttctctctctgtctctttttcttgctatatatatagttgaaacttgaaaatcaaatcagtgagtcgcaagtaagactttgtggttgttgtatcagatttcgccgtgctctgtactttgactgctgtctgaagcatagaagtcgacacacaccggggcacgataccattcagttaaaagcagtctatttgctgttacacacttgctcaacaaagtcttctcattgtttttttttttaatgaatactaaattttcacacatgtaaagttacaaatttagattacaaggttggggacaaaaaaaaaaaaacattggatcattaatctattgatttgttctggctgtgcatagatcagaactgggctctgaaggcagccgattgggtatagtttgttatgtattatatctaccagcttgacctctcaatcaaacttcttttatgtaaattttgatttgtttctccctctattcctggtgattgtaataaatagacagatcgataagcttttaaaatattatacgtgaattattacacc

SEQ ID NO: 141446 - DNA, 359 bp, Arabidopsis thaliana landsberg
gatttcttctataaggaagtggtaaattttttgagaaaggaacactgaaacaaagagagttcatggccactcaaggagaagcgacgttctccgcggccgcgacgacgacgtcgagctatccgacgggaggtgttggtggcaaattgaagcggcaatcggcgaggaggcatgcggcgacaccttattctcgaccaacacagaaccaggtacaacggaggccgtggatctcgagaatcgtcgatcctgcttatcggattatttccggcggcgctaccagaatacttccatatttcttctcgaacgccgcctccgctcctgctcttgctgctcctccagaggatcaaaatcaacatcaaggt

SEQ ID NO: 141447 - DNA, 1312 bp, Arabidopsis thaliana landsberg
ataggtgaagttattgatagggggttaatgaggaatgtcattaagatgtttatggatttgggtgaatctgtgtatcagaaggattttgagaagccgtttttggatgcgtcttctgagttttataaggttgagtctcaggagtttattgaatcttgtgattgtggggactatctgaagaaatcagagaaacgccttactgaagagatagagagggtagcgcactacttagatgccaagagcgaagagaagattactagtgtggttgagaaagagatgattgccaaccacatgcagagactggttcacatggagaactcaggtctggttaatatgcttctgaatgacaagtatgaggatttgggtagaatgtacaacttgtttcgcagggttactaatggtcttgttactgtcagagacgttatgacttcgcatcttagggagatgggaaaacaactggttactgatccggaaaagtcaaaggatccggtggaatttgtacaacgtctattggatgagcgggataaatatgacaaaatcatcaacaccgcatttggcaatgataaaacctttcagaatgccctgaattcttcattcgagtatttcatcaacttgaatgctcgttctcctgagtttatctccctgtttgttgatgacaagctacggaaaggacttaagggtatcaccgatgtggatgttgaggttatccttgataaagtgatgatgctgttccgttatttacaagagaaagatgtctttgagaagtactacaagcagcatttggctaaaaggcttctctcaggcaaaactgtgtcagatgacgcagaaaggagtttaatagtgaaactaaagacagaatgtggctatcagttcacttcaaaattggaaggcatgttcactgacatgaagacttcagaggacacaatgcgtgggttttataatagccatcccgagctttcagaaggacctacacttgttgttcaggttctcacaactggttcttggcccacacagccaaccatacaatgtaacctacctgcagaagtttctgttctgtgtgagaagttcaggtcatattacctcgggactcacaccggtaggagattgtcttggcaaacgaatatgggaacagcagatatcaaagcagtgtttggaaagggtcagaagcatgaactaaacgtttcgactttccaaatgtgtgtccttatgttgttcaacaactctgatcgactaagctacaaagagatcgaacaggcaactgaaatccccgccccagacctaaagcgaagcttgcagtcaatggcgtgtgtaaaag

SEQ ID NO: 141448 - DNA, 1653 bp, Arabidopsis thaliana landsberg
tgctttactacagcaacatcgatctccacacttgtaataaggctgcaaattggagagatacgctcgcctgttacatggcccccgatcctcccaagttacaggacttgcccgcggtttgcgggtaacgtttccctttccataccaaacacctagctagctaggattcatttctctttagtttttttttggtttatgatgatagagattatattcttttactttaattatgagaaagaatttccacgtacgaattggcgtatttctcatctacttgcttcgggtctactagatcggatatcttgtgtgttttaactcggttattacaaaatttaaacttgaaaaagcataaaaagtcaataattaataactacataagttagtggattctacacttgattttatcatgagttattgatttctaaatagtaattataaccttttaatgatttcattggtttttaataaattatttatttatttcacattggattttaacagatctttcaatgtatatattaaattaaagataaataaatcaaaaagttaaataccaaagttattttgaatagatttgttatatgtgccttgtgaatagctagacgtacgctaatctcttgcaaatattttgatgtgacagggagattatgatggagtactcaaagcaactaatgactttaggtgaatttctctttgagcttctatctgaggctttgggattaaaccctaatcacctcaaggacatgggctgtgccaagtctcatatcatgtttggccaatactatccaccttgccctcagcctgaccttactttaggcataagcaagcacaccgatttctcgtttatcaccattcttcttcaggacaatatcggagggcttcaagttatccatgaccaatgctgggttgatgtttctcctgtccctggcgcccttgtcattaacatcggagatcttctccaggttaaaaagaaaatattgttgcgcttctagcttcatttcatctatggagtgggtttaaccctctgttttattgtgtgcagcttataagcaatgacaaattcattagcgcggagcatagggtgatagcaaatggatcttctgaaccgcggatttcaatgccatgtttcgtcagcacgttcatgaagccgaatccacgaatatatggacccatcaaagaacttttgtcagaacaaaaccctgccaagtatagagacttaaccatcaccgagttttcaaacaccttcaggtcccaaacgatcagtcaccctgcgttacaccatttcaggatctgaagcaattatattggtggctctgctcggtcttcatctcaaagtaactttcgtgaaaccagcttcttttttctttctcaaaaggcataaggatatttgtaacattcaaataaggtacacaatgaaaactactactacttacttacttcatcttccagccgtgatgtaataaaatttgcgaggaactttcttgttttaagtcctcgtgttaccattttcatctacgaactttggggattagattccccctcttttgaaccttgttttatgttgtatcacgaaaaaagcttattggcctcatttatcatcatcatccaccgatgatatatcgtttaattatatgttcatcagatattcttgtaaac

SEQ ID NO: 141449 - DNA, 1331 bp, Arabidopsis thaliana landsberg
gtagactttgtaacaatggtaagttcagaccctgatccatccactggcagcagaatcgtttcgagacatcgttctcctgttataccagagtattttcggtgtccgatatcacttgaactgatgaaggatcctgttatcgtctccactggacaggtctggctttgcaagtttcgttgtgcattgtagtgaatttgattattacacttgtgtatttgttgttatagctgaatttttcgaccttgcagacatatgaaagatcatcaattcagaagtggcttgatgctggtcataaaacatgtccgaaatctcaggagacacttttacatgctggattaacccctaattatgtgttaaagagtctcattgctctgtggtgtgaaagcaacggcattgagctaccgcaaaatcaagggagctgtagaaccacaaaaataggaggaagcagctcttcagattgtgatcgaacatttgtcctttccttgttagagaaattggccaacggtactacagaacagcaaagagctgcagctggagaattaaggttactagccaagaggaacgtggataacagagtttgtatcgctgaggctggagccataccactccttgtagagcttctatcctcaccagatcctcggactcaggaacattctgtgacagctcttctgaatctttccataaatgaagggaacaaaggagccattgttgatgcaggagccataacggatatagtagaagtcctaaagaacggaagcatggaagctagagagaacgctgctgcaacccttttcagtttatctgttatagatgaaaacaaagtggcaataggtgctgctggagctatccaagcacttataagcttgcttgaggaaggaacccgaagaggcaaaaaagatgctgctacagcgattttcaacttatgcatataccaggggaacaaatcaagggcggttaaaggcggtattgttgaccctctgaccagattactgaaagatgcaggtggcggaatggtggatgaggctctggccattttagcaattctttcaactaaccaagaagggaaaacagcgatagctgaagcagaatctatcccggttttggttgagattataaggacagggtcaccaaggaaccgggaaaatgctgcagcaatactttggtatctatgtattgggaatatagaaaggctaaatgtagcaagagaggttggtgctgatgtagccttgacggaacttactgagaatggcactgatagagcaaagagggcagctgcgagcttgttggagcttattcagcgaaccgaaggtctggcagtaactactgttccatga

SEQ ID NO: 141450 - DNA, 824 bp, Arabidopsis thaliana landsberg
aatctaagtagtgagagcctcaatcaccgtaatatataacatccgtggaaggatactacgaaaaaaactttggagttgatactgtagtgacaacgctgattttcaagactagcaagaacaaaacagctggaccgtttgggattgtatctggcacaaagtttgaattcaagaaggaaggttacaagatcactgggttccacggacgagctggtgagtatgttaatgctattggagcttatttagctccatcaggcaccacccctttgactcctgcaacacaatcccaaaagctagaaggagctggtagtgaggcaggaactttatgggatgatggtgctttcgacggtgtaaggaaagtgtctgtaggacaagcccaagatggtattggagcggtctcgtttgtgtacgacaaagcaggtcaggttgtagaaggaaaagaacatggaaaacccacattgcttggatttgaagaggtatactttattagttcttgctttctctttcgtcgtttaaccgtatagtttattatcctcaattttgttcttttttgtgcttcttgaattgcagtttgagcttgactatccaagtgaatacatcacggcagttgatggcacctacgatgcaatctttgggaatgaaccaatcgtaaatatgcttaggttcacgactaataagcgagtatctattccttttggaataggagctggcacagccttcgaattcaagaaggacggtcaaaagatagttggtttccatggaagagctggtgatctacttcacaaatttggagtccatgtcgcgccaatagccaaataattatgaag

SEQ ID NO: 141451 - DNA, 1963 bp, Arabidopsis thaliana landsberg
atggagtacttgtcattctctcctgtggatgatttacatggaaattttgaagaaatagtcgacaggtatttaaatggttgagattttttttcctggcttaaaatatgtaatcttgagataccttttactttagtaatctcaaaagtgaaactttatggaacatcacagggttttgtcaagatctcgggaaatcaaacttgcaaaatatgatccctcaattgatgttgcggagcagcatcgtcagcagagtcttcaaaaagcaatagccattcagtggctctgttttacacctccatctactataaaggatgtcaaggatgttacttccaaattacttttgcgatctttgatgcacaggtacaattgatgcatactgacatatggcctcatgaatatatctgcgtctgagagaaatctcgacatattaggaaaatgtaggctaatttgttcgctgttagcctatttctcaatttcttaatagagacgaaatgaagaaatcagaggacaagagttccttttagtatgcaaaatgtttgtctcatttttttcttcacttttgcctctgtttcatggtatttttgttttttcctctcgtcagcaacatacttttcagagagtttgcattgattgccatgtggagggtgcctgcaactcctgtgggtgcacacacacttcttagttatcttgctgaacctctgaagcaactctcagaaaatccagataccctcgaggattatgtttccgagaatttgcaagagttccaagactgggtatgtttctctgcaattttaactctttattattcctttgatttaaacatccagtgtctagatagctttacgtacctctttgtctttaaacagaatgagtattattcctgtgatgcaaaatatcgcaactggctcaaattccagttagagaatgctgaagtcacaaaactgtcagaagaggaaaatcagaaagctgttgtagcagccaaagagactctggattcttctttgtcattgcttctcagtaagtgatgccaaactttataatatatggttgacttgtgtgcacgactttgcagtttttacattgattgaaaatgctgttaactgtgatactattgaacctcgtaatattaggacaagacaacccctggatgacatttctcgaagaccatgtattcgaatcagaagaatatttattccttgaattgcatgcaactgcgatgctctgtttgccttctggtgaatgtctgcgcccagatgccactgtttgtgctgcactaatgagtgcactttactcttctgtcagtgaggaagttgttttagatcgccagttaatggtactcctttcatccaatgttcttggtccatatgttacttttacctgtatccttgctttcacccatggttatatacaacggttatgcaacaaatttggatattttctatggtgtgacaccatctcgaaagggcagtctactacattaatgtttgtgttgatcttcgcgttcaggtaaatgtatcgatttcgtcaagggacagctactgcatcgaggttgtgctccggtgtttagcaattaagggcgatggacttgggccacataatgcaaatgacggtggtattctaagcgcagtggctgcagctggttttaaaggttcggatatctatggaacatatttctcattcacctatgatttacctcctttctccatagaaatttggggatgtttcaccagcattaataaaacaagatgttacaatgaaagcacccgcattataaaaacaatcacaaacttgaaatttgactgcaggtgagcttacacggttccaggcaggtgttacaatggatatatcccgcctagacgcttggtattcaagcaaagaaggctcgcttgaaacacctgcaacttatattgtccggggtctctgtagaagatgctgtcttccagaactcgttcttcgatcaatgcag

SEQ ID NO: 141452 - DNA, 436 bp, Arabidopsis thaliana landsberg
gtatatgtctgtttattgaagtttcagctgaggaatcagttacgaaatgggaagcagaggtaatcgtgtgggagaaagatggaatgagatggattgtgatgagaaatcgagtgtgattcaggaagagatcaaaagggtttgtaaacttccatcaaacagtgtttatgcagttcatcgtctcaaggttctcaacaaaatcaacgaccttttatctgtccaagtaagtcaatcctcttcttcttcacattactactctatatgaaacacctttgaaactaactaacttatgtttctttgttggacagagaacattgtctcaagagaaggagttggaattgctattcacacagctctccttgtaaaatccagattttgatgtataaggaactaatgtaatataacattttactcgagattgcttgttgattaatgacat

SEQ ID NO: 141453 - DNA, 575 bp, Arabidopsis thaliana landsberg
agatacacgtcgcagtgtgctgcaaatgatactgaagggtgtctacctaaaacgtcttatagtaatacatcatcgggacacataggtatgcctttacatctatggtttatagttcttttttcttcaatcatcaatcatctggggacacaaatcattgcagttaaatatctctgtttcaggtagacatttcccaggaatgatttcttcaacctccagtgatggtggatctatgcgggttatacataattctattggatcacctgtgaattccttcattgaacgacatcgtagtctcagcattcctattggattcccaccttcggcaaacggcatctcagcaagtaagcctgtaggacttcaggagcatggccaccattttgataattcaaatatggggatccaaagcatgccaaatctccatcctcattctttttcggagtacgtcgacaactttgcaaatggtagtccatatacgtcctctgcattttctgaaatggtcagtgatggctcaaaagcaaatgaaggctttatgatacataatgttcgtggagtggaaggctttagtggaggcggta

SEQ ID NO: 141454 - DNA, 3030 bp, Arabidopsis thaliana landsberg
aaggaccaaaacgcagcgttttcttccggagatcagtcggtcggaaagcggctacctttttgtctgcctagagaatttgttcgtttctttcttttactctcttcagacaaaacccacgagatacagaaaaagaggacaagagagaatcgtccatggaagaagacactggtatcgacgaagctaagacatacacggtggagaagagcgagaaagtggagccggagaaggacggactgagtcaattcagagacgaggaaaaatcacttggtgcggatatggaagatttacatgatgagactgtgcgagaaaccctaggcaaggatcaggttcaaggtaacggtttattctgtgcgaaattctttattggtttttatttatttattcgagactttattttttgacgaaatgatgtttgagtttaccaggtgttcgagaaaattcctctgtggaaccaaatgttgaagatgtattagaagtgaatgtgagtttgcttcagactcttctgctattcataaactttcttaacacttacaactttgattctctcattaacattgattgtgctagaacttgtaaagtttaactcatttcagtgtcttcgatgttactcgttcagtgattatacaataacatgggaataggattaatcgtaatggttttaacctttggccaagttcaatctgtatctgtatcagtttgatctgttacattttagtgtgtctgatttcttaggcaattctgaggacaagaatcactgttatcaaggcatgacatttaactgctttttgtatcacattggcaggagactgatagcgtcaaggaaactgttgtaagtgcgattgtgccggttgatgaagtggaagagaatcgtcaggtagaaacatctccttctctggctgcatcgtcagactcattgacagtgacgccatgtcgatctttggatcctgcaactgcttcaaccgcacaagatttaccactggtttcagttccaactaaacaagagcaaagatcagattcgccggtggttaacagattgtcggttactcctgttcctaggacaccggctcgtgatggttataattggagaaaatatggacagaagcaggttaagagtcccaagggctcacggagttactacaggtgtacatacactgaatgttgtgctaaaaaaattgaatgctccaatgattcaggcaatgtggtagagattgttaacaaaggtttacatactcatgaacctccccggaagactagcttctccccgagagagattagagttacaacagctatccggcctgtttcagaggatgatacagtagtagaagagctatcaattgttcctagcggttcagatccgtctgcttctactaaagaatacatctgtgagtcgcaaacactcgttgaccggaaaagacactgtgagaacgaagctgtggaggaaccagagccaaaacgaaggcaagtttgtagaattttgcatttcggtgcttactcttcactttgaaagatgaaattaatagactttcttctctctatttttcagactgaaaaaagataactcacagagttcagattctgtctccaaacctggaaagaaaaacaaattcgtagtacacgcagctggtgatgttggtatctgtggtgatggatacaggtggcgtaaatacgggcagaaaatggtgaaaggaaatcctcatccaaggtctagaaaactaaacgcatgacccatctctttatccacatatgacatcttctaatacgcatggtgattgatttgttctgtttcaaacattcaggaactactaccgatgcacttcagcgggatgtccagttcgtaaacacattgagacagcagtcgagaacacaaaagcagtaataatcacatacaaaggagtacacaaccacgacatgccggtgcctaagaaacgccatggtcctccaagctcaatgctcgtagctgcagccgctccaacatcaatgagaaccaggacagacgatcaggtgaacattccgacttcaagccagtgctcggtggggcgagaaagtgagaagcagagtaaagaagcattggacgttggtggagagaaagtgatggaatcagctaggactttgttgagcattggattcgaaatcaagcaatgctgattatatgtagtttatgagttttatagagttcatcgactcaattttcgcctccttgttcttgttatataataataataaaaaaccccatgaagattaccaactaaatacgttaacattcgtctgtgtaatgatggtatatgtctattgtgatattcagtcgctaattttagtgaatagcctctggctcgtctagagggtcttctgaaacttgaaagggactaaaagacgagaacaaaaaccctttctctctactctgtgtaaaccctagtgtgttcgtgctctccgatggcgagtcttcgatgctttcgtgagctgagccgccgcgctacgactgttttctccatcaaccagacgcgatcgatctcttcattccatgggattgagttttccgggaccagcatttctcatgggaccgtaattccgaatcgatctctcactaggaatttgccatggtacagtcattggtatcgctctcaagatcgttgtttctcttcgaacacaaaggatactgatgaagatgaagaaagcagtgaaggagaggatgatgatgaggaggagggggaagactttgaggattcggcggatatggaagtagaaagggaatattcaccggcggagaaagtggaagaggcggaggagatagggtacaaggtgatgggtcctcttaaaccttcggagagacttttcaaaccctatgaaccagtgtttgccattgttcaggtctcgtctctgtgctatctcaattaatcctttagtttcatttctcactctcactgatgctgagtggttatttttatcctgtagattggttcgcatcagtttaaagttagcaatggggactccattttcaccgagaagttgaaattctgtgacatcaatgataag

SEQ ID NO: 141455 - DNA, 1064 bp, Arabidopsis thaliana landsberg
gaagctctctctctgtttctgcattacaaaaagtgtttgttttcaaggtttctctctttcacttctctttgttttcttcatttcaatttctggattttgcttgtagctacatttggtctcactctattccatggctgacactggtgaggttcaatttatgaagcctttcatctcagaaaagtcatctaaatcattggtgagcatggctctctatctttcttcttttttattttcttatttcaacaagttcaaaatatgtgtttagtgttctgatttggagacttatggtttagggtaaattgctttagttcattttcatggagctaataacttaggtcctttaattgcttttgttagctttaaattagcaaaaagcaaatgaaagcttactgaatcttgctagatttagaatgaagtttatgtgttggtgttgttataggctgcttgaaccaaacatttctgcggggctgaaaagtgaaaaatagcaagtccattgtttctacgttgctgctcttggaatgtctcctgagagttgtttttttatatataaatgtttgattaggaaatccccttgggattcaacgaatacttcccagcaccatttccaataactgtggacctcctggactatagtgggagatcttggacggttaggatgaagaaaagaggagagaaagtgtttcttacagttggttgggagaattttgtaaaagataacaatctcgaagatggcaagtatttgcagttcatctatgaccgcgacaggaccttttatgttatcatatatggtcataacatgtgtagcgaatatagagacttccctcaagtcgcagtagaggttgatgactatgaaaacggtgaagaagaagaagacggcgacgatcaagacaaacatcagtaactaaaatttgggtctactttaagttgctttaagtttaagtagtcagttttcatgttggatttatgtaaccagttgtttagtttaaatattacgaatactagtatttgctttctgctacattctttggaacatggtttaaaagatttactgtgtattgctatca

SEQ ID NO: 141456 - DNA, 2468 bp, Arabidopsis thaliana landsberg
gaaaaacaaaaaacaaaaaactgataatatctctctctctctctctcgttgagtgtgtccatgaaataatactctgccagagacagagagaaagactgtaacggaggatgtggtggcgaagtggccacactgacacactggtttcatgatggtgaaccacaacaatggccagcgacccactgatattgattctcgtctccgacagacagaacaagataagctcttgttccatgactttttaggctccaagaatcctactttagcatccacttccatggctgaccataggctaccaccggataataaggcggctaaagcggcgatgactccttccacggcttctgcttcctccgccggtggactcggcggtctctcctcaacctccgatctcggttctgctctgtctctctatctctctctcctgatgtttttgttgttgttgacgtagtgtgcttacgctgatgaggttttgagctgattcctctgtacatttagggtttctatctatagaaagttcaacttttgttacatagattcgatttaaagttggattctttcttttccccctagtctggattaacgatcgagctttgattcaccatgatttgaaaatgtaagagatcatgtgagttagtttcaaattttttagtcaattcatttatgattagatctcttaagttgaaaatggaacatctttgggttcataaggttgaacaaaatgtgaatgtacattgtcttgtttcatttcttgcctcattgcttttttagttcgacaatttaagaaacatgaacatggattgtgtgtgggcatgtggttgcttgacctcttgtagtgttaaggactctccctctctctctctctctctctctctctctctgcccaaccataatgccctctggtggattagttgggacattgagagtgaatttgactgatgagtttggtgggtcatagccatttgaggttgtgatccttttttatatgaattggcccttctttattgcctctcgttttctctctctatctccttgagttccctcccacaacaatctttaagttacttatccatattttatcattgtttagtcgaaagacacagcggcggtgggaatcatcttgatgggatacaattgtttggaccaagaagtgatgtttctggctcaatcatgagcaatcggttttcaggaaataagagaagtaactctgattctcacttcacgactcaggagcacccagagactctgcattggtccaaggtaactaaaaaaaaaacagaacctacacaacttcaccatggtcacagctacgtagaactcagtttctgtaatatgtcattgtcataacctagttgcttagaaacggacctggaagcttctccatgaatgtgaatcctttggcaaaccagcctccacgcggaggaggacagatcagtcatttgcttcatcagctgtctactagcaggttcaaagatgagaacgtaggcccatcagttattgctcagacagctgctgatgaaggttcacgaacagggatgaaaggtcccggtatcttgagttcttttacaatgccaaactcaagcaagctcgaaagttttgccccttcaaagtcagttagcttctagtgttttgtgtctctggtctttcgatactcttcgagtcatttcaatacactttgtatttgcagtaccggaaatcggaaagacttggcgtcgagtactaagcaaatgaccatcttctatggcggtcaagctcatgtctttgatgacgttcacccaaacaaggtgattctccctaacacttatacacttgatattcaagttatttgactacattttgatatctaaaaaggtagagaattgagaagttcatctgatgaatgttatttttttgcaggcggatgtgataatggccttggcaggatcaagcggaggctcatggtctacgggtttgtctcataaaccgaagtcgaagaacaacacaagtgacggtccatacaagctaggccaaatgtatgaaggaggcagctctaaggaaacaccacaaatgcccccggaatttcgtgcaaggccgagtcatcaacctacctccagtgcctgtcaccggatctttacacaaccaggtgacttctttttaaagaaaaccagatttcagcagaaattttggttagcttcttacaaatactgagtggagtagagtaatcaggtcttattttgcattgtgacataataaaatgaggatacaacagtaaagagttatcaactgttctgggttttatcaacttgaatctgtttgaggagccataaaaccatgtacatgtatgatttgcaggtagagagcatcaaggaagcatcatctcaaggggacgagatatcagagatccggttcacagatcagatcctgaaaaagaagccacatgattaaagtctgaatatgagagacgatgagtgtggctgttcttctaagttgtt

SEQ ID NO: 141457 - DNA, 3234 bp, Arabidopsis thaliana landsberg
ggggaaagaagaaagaaggaagacgatgatgatgctcagaatccgaagcagagatggactggagagagtcacagcggagggagctcatatcactgtttcccagctcaaaaccttgatcgcggatcagcttcagatccctctccataagcagaccttatccaccaatcgtgatctcctcctcgccaaaactcccgctgatctactcgccttcaccgacctcaccgacccaaacctccccctctcctctctcaacctcggccatggctctatgctctacctcgcctacgatggcgagcgctccattcctggagctcctcccgttactcctgccggatccttcgggaggaagatgaccgtcgatgacttgatcgcccgccagatgcgcgtcactcgtcaggagacgtctcactgcgactccgtctccttcgatcgcgatgccgccaacgctttccagcactacgtcaatgagtctctagcttttgccgtcaagcgcggcggctttatgtacggcaccgtcaccgaggaaggacaggtggaagttgatttcatttacgagccgccccagcaaggcacggaggctaatcttattctgatgagagatgctgatgaagagaagcgcgtggacgcaatcgccatgggcttggggatgaggagggtcggtttcatttttaaccagaccgtggtgcaggacaagactgaatacactctgtccaacgccgaggtgctacaggcggcggagcttcacgccgagagcgagctgaaggagtgggtcacggcggtggtgaagcttgaggtgaatgaggatggtggcgccgatgtccatttcgaggcgtttcaaatgagtgatatgtgcatcaggctgttcaaggaagagtggttcgagacggagattatgccggacgatgatccaaagctctctaagatgaagaaggaggtggttgttggtgtgaaggatcttaaggaggtagataacgatttcttcctcgttctcgtcaggatcttggatcaccaggttcgtgtttttctctctacccttcctttgcatcaatcatcattgttctttgtactaatgctctgcttgggcaaataaagtaattgaatctggagcttttaagtcttaggttaatgaagcttgtcagtgtttgctttccatgagataattgaaaattagcatttcgtcaatggtccctgtgttttaacattaggctgctgtgatcaggggcctctgtcatcaacattcccaatagagaaccggagcagtcgagcaacgatgcgggctctaaaaacacatctggaccgggcaaagagcttgccgttggtgaagaagatgtcagattttcatctgcttctctttgtggctcagtttctggacgtgtcatcggacgtccctgctttagccgagtgtgtgcgtctgcagtcgcctgtcccagagggctatgcgttgctcatcgaatcaatggccaacacttgttaatttttgtgtcattgttttttggttcttgatacagtatatcatgttcgttttatggtccagaaaatcttttttactagttgacaaatgaaaaatctctagtgtactcgtgatgtatttgattcaagtttgggggttaatttaagttatcaacaacttgtagaaacaaagttaattcacagagtaataaatcattctaataggtatgctcaggggcaaattggcaaaacataaaaataaaaagagagctactaaagttttcgagcgaaagcgaaaatgaaaattttataattcgagcgaaatgttaaaaagctgaaaattgggggaagaagagagaagagtttcatcgtcactggaatcaatagagtcaattggcgggagaggttagtctcgaaaagaagtggaagccctagggggaaactttctcgctcactcgctcgtctgcaaacaccatggaagacagtcctcaaggccttgtgagtctctctttgcttgtttgattttgtttgggaattttggattactcttaagtttttctgctgggcgtgtagaaaaggagtagagatccggatcaggatcaggatgacgacagcggcgaggctggcaaggccgacggaagcggcggagagaatcaggagcgcagcagcgaccagattgagctcgatgacgacgatttccaggaaacccgtcccaagcccaagcgtagtcgcacccatcctcctcaacagaatctcattggtacaattcatattcctaaatcgctccaagctttgtgccaattgattgtttcctaaattgattgattgtttttcttagagagcttcatcttgtttgtttgggtagatctttcagctttcatattttttttgctaacagaggttgtcaaaggcaacggggatcttatttctaaagccgtcaagatttgggttgaaagatatgaagactctcccagccttgctaccactgagctcttgtcaatgctctttcaggtactccttacttataagtctctctggataccaaggttgctagatccgggcatctcttgttgctgattcaaccacactattcccttctcaatagcttttgtgtcttgtaggcttgcggtgctaaatactccatcaaggatgatctgcttgatgagactgatgtcgatgatgttgtcgtttcccttgttaatcttgctagagccgtaattcgttgctctcttttcattctttttcaattacattttgtttcttaagaaaattttcacaactttcttttcattgtggttggcctatagggggaactcgaagattatcagagttccagaaagaaggaactcaagaacttcaaagaaaatcttgtttccttatggaataatctcattatcgagtgccaaaacggaccattgtttgatagagtcttgttcgacaagtgcatggactacattatcgcactgtcatggtttgtgttcaaacttatgtggttttatgcctcatagaattttcttttcatgtttgtcttttctttttctattgcagtactccacccagagtttaccgtcaaactgccacgctaatgggcctccaactagtcacatctttcatttctgttgcaaacacactcggttcacagcgagaaaccacccaaagacaattgaatgctgaaagcaagaagagagctgacggccctcgtgtggactccctcaacaaaaggttgtctgttactcatgaacagataactacactggaggacatgatgcgcaaaattttcactgg

SEQ ID NO: 141458 - DNA, 688 bp, Arabidopsis thaliana landsberg; identical to SEQ ID NO: 20119

SEQ ID NO: 141459 - DNA, 529 bp, Arabidopsis thaliana landsberg
ctgaagcgattgaatcaagacttaaagatgtcgaagcagaagcggaatctttgatcttgaaaatcaaatcactggaagacgtcacagagaaggaacgtgctttatcagcaaaacacatttcaaagtgcaacgaactgcaagatgagatctcaaaactaaaacaagaactcgagcatcatcaagaaacagagcctgcgcctaaccatatcaaaggttttgagctgaagcaggtaagtttatatcctctcttaggaactcgcaagttaatttctttttgtaataaaactccttgatgacaatgtgacaatgacaggagaaggaactagcagtggctgcttcaaagtttgcagagtgccagagaaccattgcgtcgctggggcagcgattacagtcactagctacatttgaagatttcttgattgaatcttgaggagcaggagcttcgtgaatggtgagaagaatgaatagactctgaaatgtggatgatgttgatgagcagtttatctgcaaaagagactggagatcccat

SEQ ID NO: 141460 - DNA, 1289 bp, Arabidopsis thaliana landsberg
gtgaatctgctcttattttatttctctccatggagcagatggttgacaaaaaattcagggccctactggatcattctctcatgctcttgaggaagaaatggttgtatggcatacttgatgattttgtgacaaagcaacttcccaataatgtgacgtggggattgagtttattgtatgccctagaacacaagggagacagagcacttgtctccactcaaggtgaagatctgtcacacttcattgtagttaatcacttccttgattaacgtgagccagttaagtatttacatgtcctctacatgatgcttttgataccaggtgaattggcacatgcattgcggtatctagcttctgttgtctcccaaagctttatggcttttggcgatattcttgaactacacaagaagttcctggagctctctggtggtattaacagaatttttgagctcgatgagtttttggatgcttctcagtcaggtactacagcatatataggttcacactttggctaggcgatgcaaaatcttggtgctttatgtaacatatatgaagtcattattcagattgtgatcttttcatgaactctttccatcattacctaatgtctgtacttgagttgatcatattcgttatgtccaactattttaggtgttacctcagaaaatcaaacaagtcgtttggattctcaagatctactttccttttcggaggtggatatcattacccctgctcagaaattgatggctagcaagttgtcgtgtgaaatagtttcagggaaaagcctgctcgtcacaggttggtgaattaatctctgtcattgaatttattgcatgagccccaagctaacagtagcaacattttcaggtccaaatggtagtggaaagacttcagtatttagagtccttagagatatctggcccactgtatgtggaagacttaccaaaccatcattggatatcaaagaacttgggtcagggaatggcatgttttttgtcccgcagcgaccttatacatgtttagggacactgagagatcaaattatataccctctatctaaagaagaagcagagaaaagggcagcaaagttgtacaccagtggtaagtccaaaaattcacttacttcaaaaggtctagttggttctcaaatcacatgatctatctgttaccaccctaaaagaattgaagtacaagttaagatatttgatattcctctctctcacatgtgtggaatattggtgtgagtaacaggagagagctcaacagaagctggaagcattctggattctcat

SEQ ID NO: 141461 - DNA, 3076 bp, Arabidopsis thaliana landsberg
tctaaacctcaatcaaaacaaacaaacaaaaaaccatgatgcagcgagtattcacctttggaaaaggaagaagcgaaggcaacaagggcatgaagtccttggtatgttaccaataccatcatcatgatcatatcaattcattaataatttagtgtttgctattttcaagaaccatttatcaaaaatgttaattgttgttgtgtatgaagttgggagggaaaggagccaacctggcggagatggctagcataggcttgtcggtgccgccggggctaaccatatcgacggaggcttgtcagcagtatcagatcgccggcaaaaagcttccagaaggtttatgggaagagatcttagaaggtcttagcttcatcgaacgtgacattggagcttccctcgctgatccctccaagccactcctcctctctgttcgctccggcgccgccgtaagttaattataactttttttcttgactttttattttaaggattttttctaatgttaaatttctgtttttttttctttctatgttttctttaatcttttgaagattttttgacgcagattttgacttgttagatttcttttattgaagttgagattcaaatatttttttggttattttgccatttggccgtttttggaagagtttaaaatgtactagatagaaaatgaataagttttgtggctattgaaagacctaatgattttggtattcaaactataacgtagaaaatgaagatctttcgtttatctatttttaaaacagaactacattgacttgtctttgatcgatattttgcattgtagatctcaatgcctggtatgatggacactgtacttaaccttggcttgaacgaccaagtcgtcgttggtctggccgcaaaaagcggagagcgttttgcttacgattcgatccggcgcacacatgatatgtttggtgatgttgtaagtcctctgtttttcaatactatttcagataacttgcatgacaagaaaattctttgacctaccttataattgttttcttgatcaataaaaggtgatgggaattccacacgccaagtttgaagagaagttagagagaatgaaggagaggaaaggagttaaaaatgacactgacttaagcgcggctgatctcaaggaattggttgagcagtacaagagtgtttacttagaggccaagggtcaagagtttccttcaggtttgttttgattcctacttgaggtcaagtgataaaaattagttattagttacaaatgtttaaacggggttaattgcagatccaaagaagcaattggagctagcgattgaagcggtattcgattcttgggatagcccgagagcgaacaagtacagaagtattaaccagataactggattgaaaggaaccgcggttaacattcagtgtatggtgtttggaaacatgggggacacttcagggactggtgttctcttcactaggaaccctagcacaggagagaagaagctttatggcgagtttctagttaatgctcaggtttggcatctatcacaatgtgtgaatctcatatcaacaagtaagcccatactcattaaatattggttttgggacagggagaggatgtggttgcagggataagaacaccagaagatttggatacaatgaagagattaatgcctgaggcttacgctgaacttgttgagaactgcaacatcttagaaagacattacaaagacatgatggttgatacacataaacaatacttcaattagtcctcatcaacaattctttagtaatttaaacaaaatctcaaatgtgtattgcaggatattgaattcacagtacaagaagagagattgtggatgctgcaatgcagagcgggtaagcgaacgggtaaaggcgccgtgaagatagcagttgatatggtaggtgaagggcttgttgagaaatcttctgctatcaaaatggtggagcctcaacatcttgatcaactacttcacccacaggtacaaactcaaatattcatcttcttcttttttcatagtcataaacttgatgttgaaaccaaaattcgaaacttactggtaatgattggttcacttgaacaagaactaatgggtttaagacgtttagggtttaggagtaaaagcagagatgattgtctgacacgtaaccaatgaatagggtttggaaattttgattcagaggtcaatgaaggtttttttttttttttttattgatggattagtttcatgatccatcggggtatcgtgaaaaagtggtggccaaaggcttacctgcgtcaccaggagcggcggttggacaggttgtgttcacggcggaggaagccgaagcttggcattctcagggtaaaactgtgattctggttcgaactgagacaagccctgacgatgtgggaggtatgcacgcagcggaaggtatattgacggctagaggaggaatgacgtcacacgcggctgttgttgctcgcggttggggaaaatgttgcattgctggttgttccgagattcgtgtcgacgagaaccacaaggtttttggattcgattttagaaacttgtcatataagttaggggaagattgtttctaaagttagggtttaaaaattttcaggttctattgattggagatttgacgattaatgaaggcgagtggatctcaatgaacggatcaaccggtgaggttatattagggaaacaagcattggctcctccggctttaagtccagatttggagactttcatgtcctgggctgatgcaatcagacgtctcaaggtgtttatgagtttctgttcctttaacttgtttgatatttttaaactttctaactcaaatgttcgatgaccgataaggttatggcgaatgcggatacacctgaagacgccattgcagctaggaaaaacggagctcaaggaatcgggctttgtaggacagagcatatggtaactcctcctccgtacttgatttcatgtttttgatgatttagattgtttgtatccaaatgtttaatgttgtctttggtttggtttttaagttctttggagcagataggattaaagcagtgagaaagatgata

SEQ ID NO: 141462 - DNA, 302 bp, Arabidopsis thaliana landsberg
aattctgtttgcacttagaatggcggatcattcgtgggataaaactgtggaagaagcagtgaatgtgcttgaatccaggcaaattcttcgatctttgaggcccatttgcatgtctaggcaaaacgaagaagaaatagtgaaaagcagagccaatggaggagacgggtacgaggtgttcgacggtttgtgtcaatgggatcggacttcagttgaggtgtctgtctcgattcctacatttcagaaatggcttcacgatgaacccagcaacggtacgtttcatttctttcctgatattttttttt

SEQ ID NO: 141463 - DNA, 725 bp, Arabidopsis thaliana landsberg
gttttgagaatttgacaaaaatttgtttatgtaatcttagttttcgctgattttgagtaagttatcgacatggatattgatgtcggaccagttgatccatctgtcctatacgagcaagacctccatgtttcttctgctgtttgggaaggacaggtttttttcttaattcccttgctaaatttcagattttgaatttagggttaatcttatttccccttacttaccttaggaacgaggtctacttcgttgtcaagaacacacttcattgctacatcaatggaaactcactgatgaacaaattaacctcgtggacaaagctggtttcggttactttcgcaaaatcggtccaatgagtttaaacaattcactgatctctgcacttgttgagcgatggagaagagaaaccaatacttttcatcttcctttaggagaaatgactataaccttagacgaagttgctttagtacttggacttgagattgatggagatcccattgttggttctaaagttggtgatgaggttgctatggatatgtgtggtagacttttagggaagttaccatctgctgctaataaagaagttaattgttctagggttaagcttaattggcttaaaagaactttctctgagtgtcctgaagatgcttctttcgatgttgttaaatgtcatactcgagcttatcttttgtatcttattggtagtaccatttttgctactactgatg

SEQ ID NO: 141464 - DNA, 2306 bp, Arabidopsis thaliana landsberg
gtcgccggcgtccaccgttttagtcttcctctcccgccggtactcttattttctcttgctctcacgaacccctgatgtttgagctgaattactaatcttgctgctctgtttccacttttcagaagtgttctctccgtacttttagcgtcctcgccaatggcaagcgcactcaatctctgctaccacatcacttctccgtattcaaccaaagtcaccgacttgttacctccttgagtcacaatgttggtcttttttctcctcttaatggttgctttgattgagaattggtcctgtgatcagtttgttttgaattagaaatgtgctcttacctctttatctgtacttgtctttcacatcaattcttaggtttccaacaaatctgatgcagaggcagagcgttcctgtgatgaaggtatacctatttcaacttctttagtcctctagttgacacattcattccttaacttgagatttcacactgtgttctcttctttctaggagaaatgttggataagaataggataagcaagaaaaacccgtttgtttcggaagagtatgtgatatactaaatctttcttttggtagattttttctatgactctatgctggtgcttgtgagtttgaatatggagtttactagttgtttgtttcttacgttttgtttaagaatcaagaggaaccaatatcaccgattatgttatctcttctttcaatactcaatttcaaacatgttttctgcctcttgtttatgtgtggaatgttttggttcaaatatttgccttagctacttatttttccacttctttggtaattatgacaatgtcatttgtatttcggatatggttctgtccaaatattagctaagatgctttcggttcacattgtatttctggaaggatttggggaatcaatatgattttaacattaacaatatgctttccttttcataaatttgcctgccttgatatgctaccaaaattgtaggcttctcaagaagttgaagagatatggactctctggaatattatcctatgggttacttaatacagtctattactccacagctttcctcttggtctggtgagtagaatcgaattttgaccgtatatgctctgtgtaaagctacaagaacattgttctccatcataacatacttgagccagaacaatgacgattatctatattgttgtatataggttttatgtggctccagcaccgggaaaaatgggttatcttgctgcggctgagaggtatggaatatttttcagtatttcttagagttaaagggacgtgatagattcgtgtagcatacagatttcttaaagtgatggccatggtctgggctggaagccaagttactaagctcatcagaatcggagggtaagtagcgaatataagtttcttactcagttagttctctatagcttaagaacatcagtgtgctctcattatagtttcatggaggaagctgtttaactgcttcctgccagatcatgatgatgcactccgaatctttcatattgtctcatcatgatagatgtgcagactatggcattattgtttgagcatcaataatcagaaaatcatatgatatgcaaagttcataaatgtaaaatatttgtattagtaggtcctgaaaaagtgccaagtacttcacccttttcatgtgtaggtctacaatagagaagtaattgtttcagtttgatcctttggcgcctagtagacaatgcaaatcctttcatattcagtcaaaatgaacaattcataacaatgtatcaactataagtttgtactcgtaaacgtgtagagaacatgttaagttcttaggtgacaaggtaatgctaggagaagtggtcataatgtattagtagtagctaatctattttgctagagaaagtagttcaaaaccagttatagcatagtagatggatgcaggacagtcgcacttgcacttgcatttgtagttttgattgttattgccgaccttatcttgttgtgatgttgttacccatgaagaatgttgatggatgcagggcagtcgcacttgcacctattgttgatagaggattgtcgtggtttacagtaaaatgcaactttgaaagtcagggaaaagtgaggcacctaaattactcttgagtaatacatatgtagatagttgatgatggtgatgaaagagtaattaaattctggatgcattgcttttgacaggcttttggcgcactggttgggatatgtcttggtgtggctttgatgctatttatcgttgtgacactgctttgggcatagcagaagatttatcgttgtaa

SEQ ID NO: 141465 - DNA, 1448 bp, Arabidopsis thaliana landsberg
gacgacagttttgagcatgattacattgaagatggtggagctgatgtgaaaagtacttccactaagcctttagctttgaaaactggaggaaaaagtgtttggaacgccaaggttggctgtttttttctttctcattgataaagattgcctctttaattatgtcattgctcatgtttgcacgatgtatcattgctgctattgtttcggagtatattgaaagaattgctcatgtgttatgggttttatgtgctgttcagatggttttgatgagcgggctgagcaggactgctctggaagatcttgcttcagataaattctttgaggatcgtatacctcatatatgcaacatattaaaattcgctgttcttaaaaaagatcattcgttcatggcgattggtggttcctgggatcccacagatggcatggacccatcagttgatcagtcttccttaattcagacaatgctgaggtttgtctcttcacgtattcttttgtcattctttgctgccgttttgttcattgtctgagacttgaaaaaccttttcctttgcagacactcaaaggataagcttcatcttgatctgagtaactgccgtcactggaatccattcctagaggtaggttttccttctcttggtttaagactgcattgagatgttggacgtgtggggacattacacttgagtattgtagctaagatagtatatataccgtacaatctctcttattttctataggtagaggtcgttgaagatgatatgatattggtttatccagagatttgctctatgaatacttgcaaaaattgttaatttgtgtcctgttttactgcagtttcacttttttgtcaatatggtagacctaggataagttataagctaacaaagcaatgttactttcttgccagtttatatggaaatctaagtagcttagctttgcctctcttttttggaattgacagatacattatgacagagttggtacagatggagtgtttagctacaaagagatcacagtactttttgtccccgatttatcagaatgtcttccttcatttgatgtttggagaacccaatggttggcacacaggaaggctcttactgaaagagatcgactactctctcaggaggttaagaaagatactgttgaagtaaccaaggatgcagagaaaaagtcaccaggagatacttccggcactccgacaactggaactaagaagactgttaaaaagatcattaaaagagttgttaagaggcctgtcaacgatggaaaagcaactggtatgaaaggtgagaagtcggatgttcctgaacatgttgccataccagagaccacagtcccaaaagaagagtccactggtacatcttctaacaaaaaaatagtgaaaaaggtagctgaaactggagatacctcagatcccagtgctaaggctaatgagcagactcctc

SEQ ID NO: 141466 - DNA, 923 bp, Arabidopsis thaliana landsberg
agtgtgaagaggatattcctatgtacagcccgttgatggagcttgacaccggtgaaggtccacctcggttacatgattctctaccacagtggatgtgggctacaaatgtagccatctattcaaaccatttcgcaaaagccaatgttcatgatgaagaaagacctccatgggggtggaccgaagatggtgcagaagtcgagagctcgttatgttctaaaatcacatctttgctggaaactccactgactgttcctagacggttgacaatcccattgattgaggaagatagctggtcaaagacgtatgcggtggctagtgtctcgctggcgcctgtcctactttcctttctttggagcagccaagatgatacgagtcttcaagctcgcattgtagcctattttatcggaattgcgattggatctactcttggatatctcgcgttcaaaaacacagagcccgaccgtccacctcaaatatatttaatcccttgggtacttggtggattcatcatgagcatcgtatggttctacatgattgcaaacgaacttgttgcacttttggttacatttggtggaatctatggaatcaacccgtcaatactcggtctaaccgtacttgcttggggaaactcaatgggtgacttagtgtcaaacatcgcattgtcaatgaacggtggagatggggtacaaatcgcgttgtctggttgctacgcaggtccaatgtttaacacgcttgttgggttaggtatgtcgatgtttcttggtgcttggtcgaaaagtccagagacttacatgatcccggaggacaatagcttgttctacactctagggtttctaatattcggattgatttggtctcttgtgatgctcccacgcaacgaaatgcgaccgaacaaagtgatgggcattggtcttattacactg

SEQ ID NO: 141467 - DNA, 2875 bp, Arabidopsis thaliana landsberg
aaatggacaaaagatggagtctccaaggtatgactgctcttgtgaccggtggagccagcggaatcgggttcgtctttcttctctgttctctctatgtcatatattttacccattggtctgcctctgtttgaacattaagatttgaagtagtttatgtttctggaatgttttagttatgccatagtagaagagttggctggttttggagctagaatccatgtatgtgacatctctgaagctaagctcaatcaaagtttaagcgaatgggaaaagaaaggttttcaagtaagtggctcagtttgtgatgtagcctctcgtcccgagagagaagaactgatgcaaaccgtctcctcgcagttcgatggcaaactcaacattcttgtaagtaaattaatttaaagatactatcaagttaatcatattcgtgtggaaaatcttttaaacaccaattttttcaacatgcataggtaagcaatgtgggcgtaatccgctcaaagccaacaacagaatataccgaagacgatttcgcttttcatatatcatcaaacgtggaagctgcttaccattttagccagctttcacatcctctcctaaaggcttcaggctatggaagcatcatctttgtttcctctattgcaggggttatatcttttgacgctggatccatttatggtctaacaaaaggtagccagagacagagtttttagtagatggatagtgttcattgcaagactgactaataaatcttttatgttctatgttttgttgatttattatccaggagctttgattcagctagctaaaaatttggcatgtgaatgggcaaaagacggcataagagccaacgctgttgcgcctaatgtcatcaatactcctctgtctcaatctgtaataaactaacaactttttcttttctttttttatgtgaatgtaacaacgattttatgtgaattaatctaaccctctcttaattgtgtttctgcaagtatcttgaggacgtcagtttcaagaaggcattgttgagtaggactccacttggtcgtgttggagagccaaatgaagttgcatcactagtggccttcttgtgtctacctgcagcttcttatattactggtcagactatttgtgttgatggaggtctcaccgttaatggcttctactatcagccacatgcttgagctaggtctgtgttgtgtgtattgtccaatgaaaacagtaaaccaaacaataacattggaaaatgaatgatttgaatatttaggtgtaagccttaaaactaaattcattttggtgtgatgacatattgtaaaacgtaatgaacaagaaaccttaacagaagatgtttcttttaagagtacatgagccttgcagaaacagaacacaagttgaactcaaatgagaagatgggcttcgacactcatcaacttacaatgctcagttgatcaagcacaaagacagaatcatgcaatgatgactcaaaaggacagatggcttcactgttgaagattttgactatatgtcattttttgcttgggacacttcgatattttagtcatgttttctaacatacgactacatagtttctcaacatgccacgtacaaacaagacaacaaactcattaattcatacttatctggattctgatccacatttactgtatacataatttgtggcatttctggtcactgctagtaacaagcaagaaaaatggataaaagatggagtctacaaggaatgactgctcttgtaaccggtgcagccagcggtatcgggtttgtttttttctgttctctatatcatcttttgaatcattgttctgcttatgtttcaaggaatttaatctatgtctgtggaatgttttagttatgccatagtagaggagttagctggttttggagctagaatccatgtatgcgacatatccgaaactctgcttaatcaaagcttaagagaatgggaaaagaaagggtttcaagtgagtggttcagtctgtgatgtaacctctcgtcccgagagagaaaaactgatgcaaaccgtctcttcgcttttcgatggcaaactaaacattcttgaagtaaatgatctttatatagaaacaactaagcatttcttttagcaaaattttttattgagaaatcttctttttgttcaacataggtaaacaatgtgggcgtacttcgcgcaaagccaacaacagaatatgtggcagacgatttcacttttcatatctcaacaaacttggaagctgcttaccatttttgccaactttcacatcctctcttaaagacttcaggctatggaagcatcgtgttcctttcctctgtttctggggttgtgtcaataactgactgtggatcactttatggtctaacaaaaggtaaccacaattactacaaatctgactaatcaacaaagagtttttcacttccttattttttagtggtttgttgacttcttttgtaggagctctaaatcagctagctagaaatttggcatgtgaatgggcaaaagacggcataagagccaatgcggttgcacctaatgttgtcaagactgctcagtctcaattcgtaagaaataaatttaaattttttttttacgttttggtgttgttgttgtgaatttaacaacctcaattcctcttattatctctaaatttttgtttcttaaaagtttcttcaagacgtcagtaaaaaggagggattgtttagtagaactccacttggtcggtctggagagccgaatgaagtagcatcactagtggtcttcttgtgtcttcctgcagcttcttatatcacaggtcaaaccatttgtattgatggaggcctcacggtttacggtttctcctctcaaccacaggcttgaaaatggtct

SEQ ID NO: 141468 - DNA, 1121 bp, Arabidopsis thaliana landsberg
atggagcctggagggaaagagtacaattatgcatctgcttcaaaaggcgcaaaggtcttgtcttccaacaaggaagcaaagggggctgcaagcatcctaagcagggacaatgacaagtacctcagaaatccttgttctactgaaggtaaatttgttgttgtagaactttcagaagaaactttggtaaataccatcaagatcgcgaattttgagcattactcttccaatctgaaagagtttgagcttcaaggcaccctagtttatcccactgatacctgggttcatatgggaaacttcacggcttcaaacgtgaagcatgagcagaacttcacacttcttgagccaaagtgggtgagatacttaaagctaaactttattagtcattatggttcagaattctgctgcaccttgagtttaatagaagtctacggtgtggatgccgtagaacgaatgctggaggatttgatatctgtccaggacaacaaaaatgcatacaaaccccgagaaggagattctgagcagaaggagaagccaatgcagcaaatagagtcacttgaaggcgatgatggtgctgataagagcacgcacagagagaaagagaaggaagccccaccagagaatatgttagcgaagactgaagcatcaatggcgaagagtagtaataagctgtcagagcccgtggaagagatgaggcatcatcagccagggagcagaatgccaggggacacagtactgaagatactgatgcagaagttaaggtcattggacttgaacctatcgattctagagagatacttagaggaactgaacctgagatacgggaacatattcaaggagatggaccgtgaagccggtgtgagagaaaaggcgattgtggctttgagacttgacttggaaggtatgaaggaaaggcaagaggggatggtgagtgaagcagaggagatgaaagagtggcgaaagagagtggaggcagagatggagaaagcagagaaagagaaggaaaacataagacagagtcttgagcaagtaagtaaaagacttgagtggatggagaagaaatgcttaacggttttcaccgtatgtctagggtttggcattattgcggttattgcagttgtgat

SEQ ID NO: 141469 - DNA, 1497 bp, Arabidopsis thaliana landsberg
atgctttgtagacataaattattagagagacgaaaggaaaagcatgtttaaactctgtctcgttctcgtcttggttattgcagtagatgcaaatccggctaagtccggttcttgtagttgctccgggaatatatcagcgagcgatgtcgatcgagttcatttcgcgatgaacttggagttcaccgaggccgagttcttcttaaaaggggctaccggaaaaggacttgatgcctataacgcgacacttgctaaaggcggaccaccgccgataggggccaagaaagccaaccttgatcctataactaatcgaatcatcgaggagtttggttatcaagaaatcggtcatcttaggtaaaacaatcaaattcaaattttccttcaatagttgttgtgcatgacctttaaaattttaaaataagttacgatgatattgaagggcgattacggatatgacgggaggaattccacgtccgctaataaatctgacgagagagaatttcgcagtgtttatggatagagcggttggacgcaaatctaatccgcggtttgatccttacgccaactcactcaactatctcttagcttcatattatatcccttatgttggccttaccggttatgtcggaaccatcccttaccttgtctacttcaatatcaaaaaggtaatcaactatgattgtgtatatatattttcgcaggagaagagtaatatggtgctactgctatttacggatttatatttgaaaattctggcaacccaaaaaccatactatataatatgtatcaaaactaaaagtagttgaaagaaatatattcataatcttactttcaaattagtttagatttaaaatagttctaatagcttacgcatagtaaaagctttactaaactctataaaaaaacaggctaatgcaaaaatacatgttataacaaaacatttacatgttatatatatacacgttacaaattatactaaggtacacgttaagctacactatatacacgatcgacataataattttctattagtgattattaagatattaatgtatatcagctagtggcgggtctattgggggtggaatcgggtcaagacgcagtgataagaacgcttctgtacgagagacagaatgagaaggtggaggaatacggtggagtcacggtggctgagctgaccaatgagatatctaacctccgtaatgaactcggtatgtgcgggatcaaggacgaaggcttgtgcgtgccgttgtggctaggagcggagaatcgcaccaccagcaacatcctctccgctgatccttactctctctcttatgaccggacagcacaagagatcctcagggttatgtacggcaccggtgatgagcaccgacctggcgggttttggccgtgtggtgccaatggaaggatcgctaggatgtttcttgatgaagggtgttatggtgaatattgcgttgtatgttcacatgacaattaaaagtttccattgatacaatt

SEQ ID NO: 141470 - DNA, 616 bp, Arabidopsis thaliana landsberg
caaagaaaagagttttctctgataatctttctcggacaagatggcacctgagatgaacaacaagttgagctacggagaaaagaagagagcgtacgttacgttcctcgccggaaccggagactacgtgaaaggagtggttggtctggctaaagggctaaggaaaactaaaagcaagtacccattagtggttgctgtgttacctgacgtgccggccgatcaccggagacagctattggaccaaggctgcgtcatcaaggagattcagccggtttacccaccggataaccaaactcagtttgctatggcttactacgtcctcaactactctaaacttcgtatttggaaggtatttatatacatgatagtatctaggtttaaaagacttgagaatctgaatttaagttttcttgatgaaacaataactatttggatgcagtttgtagagtacagcaagctgatatacttagacggagacatacaagtgtttgagaacatagatcacttgtttgatcttcctgacggcaacttctacgccgttaaagactgtttctgcgagaagacttggagccacacgcctcagtacaagattggctactgccaacagtgtccggacaag

SEQ ID NO: 141471 - DNA, 3335 bp, Arabidopsis thaliana landsberg
  unsure (1)..(3335): unsure at all n locations
cgggaaatcctggcgcggctacttttcgcctactttttttttaaactatcaacctctcaaacaacagcttgggtggttcaatacctcacgatatctttaccacttcgtctccttctctccgttacctcaacttaagcaacaacaacttttccggctccatccctcgaggctttcttccgaacctctacacgttagatctttccaacaacatgttcaccggtgaaatctacaacgacatcggggttttctctaaccttagagtccttgatctcggtggaaatgtcttaaccggccatgtaccgggctatcttggaaacctctcaagattagagttcttaacattggcttcaaaccagttaaccggaggtgtaccggtggaattagggaagatgaaaaacttgaaatggatatacttgggatacaacaatctctcaggagaaatcccttaccaatcggtgggttattctttctaaccaccctgatctcggctacacaatttttctggaccgatacctccttcactaggtgacttgaagaagcttgagtatatgtttctctatcaaaacaagctctccggtcagatcccaccgtccatcttctccctccaaaacctaatttctctcgactttagcgataactcgctctcgggagagatccctgagctcgtggctcagatgcaaagcttggagattctccatctcttctctaataacttaacaggaaaaattccagaaggagtaacttctttgccacgtctaaaagttcttcagctttggtcaaacagattttccggtggaattccggcaaatcttgggaaacataacaatctcactgttcttgatctttctaccaacaatctcaccggaaaactccctgacactctttgtgattctggccatctcactaagctcatcctcttctctaactctctagacagccaaatcccaccgagtttgggcatgtgtcagagcttagaacgcgtgaggcttcaaaacaatggcttttcacgcaagttacctcgaggtttcaccaagttgcaactcgttaactttttggacttatccaacaacaacctccaaggtaacatcaacacatgggacatgccacaacttgagatgttagacctcagtgtgaacaaattcttcggtgaattaccggatttttctagaagcaaaagactcaagaagctcgatttatcacggaacaaaatctctggagtggttccacaagggctcatgacgtttccggaaataatggatttggatttaagtgagaacgaaatcactggagtgatcccaagggagttgtcttcttgcaaaaatctagtgaatcttgacttgagccacaacaattttaccggagagatcccttcgagtttcgcagaattccaagttctcagcgatcttgatttgtcatgcaaccaattatcaggcgagattccgaagaatctaggaaacattgagtctcttgttcaagtcaacatctctcataatcttcttcacggaagcttacctttcaccggagcttttcttgccataaacgcaacagcagttgagggtaacatcgatctttgtagcgaaaattccgctagcggtttacgtccttgcaaggttgtaagaaagagaagtacgaagagttggtggttaatcatcacttcaacctttgcagctttcttggctgtcctagtctctggtttctttatcgttctcgtctttcaaagaacgcataacgttttggaggtcaagaaagtggaacaagaagatggtacaaagtgggaaactcaattcttcgattcaaaattcatgaaatcgtttacggtgaacacaattctatcgtctcttaaggaccaaaacgttcttgtggataaaaacggcgtgcatttcgttgttaaggaggtcaagaagtatgattctcttcccgagatgatatccgatatgaggaaactttctgaccacaaaaacattcttaagatagttgctacgtgccggtcggagactgtggcgtacttgatacatgaggacgtcgaagggaaacggctgagccaggttttaagtggtttgagttgggagagacggaggaagattatgaagggaatcgtcgaagctcttcggtttttacattgccggtgttctccagctgttgttgccggtaatttatcgccggagaatattgtcatcgacgtcaccgatgaaccaaggctttgtctcggttttccgggcttactttgcatggatgctgcttacatggccccaggtataatttacatctctgtgtcaaaacaaaaagaccaaattcaattattcaacttagaataatggctttccaggccaataatacgtcccatgttaaaaacaaatcggttttcacgttttggaaaatatactctaaaatcgatccaaaaattaattcagtttgatcttgattttttttttcctgcttccattgagatttggataaataatttgtataaaaatattaagaagttatgtaatattatagattttcagtataactcaatgtaccttttctatatacattgctaaaagatcaaattttcaatacaattttggttgattcagtttaattgcacaaaattcggatccggcttctaattgatgatcttaactttggttcccgtttgcgtgtccaccactaattaatctagaaaaaatggatgtcttaaaatgtttttgttttcatgttacatgttaaatggattttatttgtgtttctattttcctctaatgctagttcttcgttttgtaacgtagaaacgagagagcacaaggagatgacaagtaaaagtgacatctatggttttggaatcctcctccttcatctcctcaccggtaaatgttcctccagtaatgaggacatcgaatctggagttaacggaagtttggtcaagtgggctagatattcgtattcgaattctcatatcgacacgtggatcgactcatccattgacacatcagtgcatcagcgcgagattgtccatgttatgaacttggctttgaaannnnnnnnnnnnnnnnnnnnngagaggccatgcaccaataacgtgttacaagcattagagtctacctcatcgtcaagttcttcttgcactacttatttgtcaaagatactatcgttggcctgacaattctggcttcgtttgaccccattatatatatgtaattttatttgggttcttatttttgttttaaaatctcattttctttgtctttttttgttaggtttaataacccaaattaatatattgtctatcaagatggttttgtttatgcttgattgtttactgatgaatgtatatataatatataatgtgaaga

SEQ ID NO: 141472 - DNA, 579 bp, Arabidopsis thaliana landsberg
gtttcctcactgcaaccctcctcagagacggtttccgttggagaaaggcgtgacaccgccatggtggccaacggggaaagaagattggtgggatcaactgtctttacccgttgattttcgaggtgttccgccaccttacaagaagcctcatgatctcaagaagctgtggaaaattggtgttttgattggtgtaatcagacatatggcttctgacattagcaacataccgaatctcgtgagacggtctagaagtttgcaggagaaaatgacgtcaagagaaggcgctttatggctcgctgctctttaccgagaaaaggctattgttgatcaaatagccatgtctagagaaaacaacaacacttctaactttcttgttcctgcaaccggtggagacccagatgttttgtttcctgaatctacagactatgatgttgaactgattggtggcactcatcggaccaatcagcagtatcctgaatttgaaaacaactacaactgtgtttacaagagaaagtttgaagaagattttgggatgcaaaagcaaccaacactcctaacatgtgagaacagtctctgtcc

SEQ ID NO: 141473 - DNA, 624 bp, Arabidopsis thaliana landsberg
gtttttctgtgacaaatgctgcaggtatgaaactgctatttcttaatccgcacccttcgcttttcattctttaattcctaactttccttgatccttaatgctattttgtgcagtttacaagaagcgcagaagagaatgaagattaagaaaccgccacacatcttagttatacatctgaaacggttcaaatacatggaacagttgggccgctacaagaagctatcgtacagagtcgtcttccctctggaactgaaactcagcaacacagtggatgaatatgtggacattgagtactctctctttgcagtcgtggttcatgtcggaagtggacctaaccacggtcattatgttagcctcgtgaaatcccataaccactggctcttctttgatgatgagagtgtcgaaataattgaagaatctgctgttcaaacattcttcggttcatcgcaagagtactcaagtaatactgatcatggctacatcttgttatacgagagcctcggaacaagatagagaaaaaagcttttaatcatttgacaagaacataacctctcctctcttactctctcttcgaagaacataaccatgtgcagatctaatgacaagattactatttggatacat

SEQ ID NO: 141474 - DNA, 2037 bp, Arabidopsis thaliana landsberg
atcctcgaagagcatgatatggagttatcagatctaactgcatcgactgtcttgaccgcacaaatgttacccaggtttgttgaattatttcttactctctttcattttcatttctagtaggcatcttgattggtacggtatgttctatacaactcatgggtgattaggtgggacatgtaaagcaccgttggtaaatcccctccatttgtgtcatttgagtttttgggatcttggttgtgcatttactaaattgtttgcgataaaaaatcattgtttacatatttaacttcatgaaatattgtctctggttgcacataacggctaaaatctacttgctgtagagccatacaagcttgttagatggttgaaaacttgtacttttcattgaactgcttctgattgcagtcaatattttttttgttgtatcatatgaaaagagtttcatgggccaaaaaagtctgaatctacaacttcaaaggatcggagtgtgcgattccacagagtgtatatccacgttcgaagatgattacacaaagttcagaacaagtaagtggttgtcaccattttcaaaatttcagcgcaggttccagttatatagctgtagaatatcttctggcgtacctcaaaaatttaatcctttgggttcactactagtttgggctgagcaaggggacgaggttagtttgcaatatgccgggacatatgctcttaagggcgacctcgtaaggtgagtaatctctgtctgtgatccttcttaagatcatattgattacagttggcttacagagttacagtcttgtgatagtgatgatgacttcttttaaccatacatcaacattgttagaagtttccatgctgttctctcagacatgaatacacttgccatattactagactgataacctgtaataacaagcttgagttctctgtttaccttggatgcagttttctctgaattggtataggcctcagcttgaatcaatacaatagtttagaaagaccatgtaaatgataatatttacatattagcaatatacgctatggggtattttggtgcaggtacgggaaacagactatgactggagctatcaaagatggcctcagtgcaatgtcgagatattatctgaataatttccaagatggtgtaaggcaggcaagtttcttctgcaattataattgaatcagcaaattagaggtgaggtatgaagatgagaaactgaaggtagagaaaacaaaattttatttttcaggatgctttggacctcataagtggtcgctacacagtgggcacacacagcccttcacaactccagcccattggatcacaaccgtctgtatgttcctcctaaccgcttaagattgtgtgtttgcattatatgttttcgtttacttaataattttttttgtcaaatgaacccactaccttaaacatactaaaatgtttcattagttaattgcaaacgtaaacgccaaatgaaaatggcgtttgcatttgcactttactggaaaactgcaaatggtaacaaacttagaaattgcatttgaaacgatggagaccatataattaaacaatttggtcaaacagaagatgctgactggattttgtttgttgtggtgaaaataaaacagtttctgccggtagcatcagcattgttgataggtggtgtaacagtgacatctttcacaattcatcaaggtaaaggcttgtaattcatatgattatacattacatgattgtattttgattgatttgtttgtgtatgtgtgtgtgtgttgggtggaaaaaacagcgggaagaaacacgcagcagtatctggcgtcggctttgtgggctggagtgactgcaggagttgtggcgatgatcaaagccaatggaaggcacttgacttcaaggcctcgtctttgccatctaatttgattccatttgaattgagattatttgcgtctcacattcttcccaaaacccacacccactgtccctctttgctttctcgttcaacgtccgcacaaaccaaagatcgaactaaaaaactatat

SEQ ID NO: 141475 - DNA, 1317 bp, Arabidopsis thaliana landsberg
atttaattttattttattttttccattaaagcaaaaaccccacactctctctctctcttgctcctccctctcttcctctctctatctctctctgcaaaaaccctaaatttcctccgatttcaccatcttcaatctccttcacaccccaacttagcctcttaatcactccccaagctaaaccctccaacgattttccatgattcgaagatacagagccttagcgatgaagaaaaagccctaaaaaccaaagctttgatctctccgaaatcggagtttctttctttgtttggtaaatttggttttcgaaatgtataagaaccagctacaagagttggctcagaggagctgctttaatcttccttcgtatacttgtattagggaaggtcctgaccacgcgccgcgattcaaggctactgttaactttaacggcgagatctttgagagtcctcagtattgttctactcttcgtcaagctgaacactctgctgctgaagttgctctcaatgctctctctaatcgtggtccttctcactctcttgccgccaggatcttggtttgtttcgcttcctcttactctctttggcattttacttggaaaattgtgagctttgaatgctgaatttgcatgttgttttaggtgctttaggtcactgatgggtttagtttgtggttaggtttttacttattagggtcggtgctgagatctctgacttgctttttagggatttgggtttctgggttgtctgattagagagagtgatcttcacattcactgatctatggatccaaagtttgaatcttgttcttacccattgattggtttgggacttaaatgagtagaacaaataacttttgtgattttggatgcatgtttacttctgatgttttgcttgttgcatgactgatgatacttttcttggctctgttcttttggattatggtttgtgtaggatgagacgggtgtgtataagaatcttttgcaagagatagctcaaagagtgggagctcctttaccgcgatatactactttcaggtcaggtcttggtcaccaacctgtgtttactggtactgtagaattggctggaattacgttcactggagatccagctaagaacaagaagcaagcagagaagaatgctgcaatggctgcttggtcttccctaaaacaatgtgagtcctaattctgattttgtcagttttgatatggttttagtttaacgaaggcgttgatcaaacccaactccccttacatggtttgatgttttttatgaaattctaagtaacagtggcaaaagaaacatcaagttcaatgcctga

SEQ ID NO: 141476 - DNA, 2099 bp, Arabidopsis thaliana landsberg
atatggaatgggatgcaacaaatcaggctgaagcatcacatcttgatgcttgtattggatcaaaacatcagaatctcccatctgttgattctgaggtcagtttaaaatctgaatacaaggattcatcttcactggcaaagatccagggtcagctgggagaatttcccaacttcttgaaccaaccaagaactcggtgttcggctgtggggtcatcatgggccacaactacgctaatccattcatcttcagctcctatgttaaatgctactacccatgtctctggttcttatgttaaagctgattcgaatgcaaatcctcatgctgttcaaagtcaagggaacttgccttcttgttgtccgtcttccaaggtcagcaacatactacatcccaataaggatgccactgcgtctgagatgccagcttcaactaatgatccagaagtaagagtcaaagagacagatacgtccaagcagcaacagatcaccacaggacttgaagctccagtgggatcttccatttatgggagcgacggacaagcgaatgctcgtctgcctgaggagttgcataccagtgttagctcacagccacaaaaatcagataagcatgaaaaggttgcaagtagcaaagggccatcagcgcctcgtaaaagaaattatgatccagacttgttctttaaagtcaatgggaagctgtatcagaggcttggcaagataggaagtggaggaagcagtgaagtccacaaggttatttcttcagattgtaccatatatgcgctaaaaaagatcaagctcaagggtcgtgactatgctacagcatatggattttgccaggaaattggatatctaaaaaaactgaaagggaaaaccaacatcattcagcttatagactatgaggtacttccttaaagtttgtttttctgatccatgggacagttatgttctttcttagtttctgaagtgcatggttgactattttcatctcaaccagaacactaattttctgttgtaattaggtcacggataagactttactccaggaggttttgaatggcacaatgagtaacaaagatggaagagttaaggaagatggatttatatatatggtactagaatatggagaaatcgatctggctcacatgttatcccaaaaatggagggaaatcgaaggatctgaccggacaattgatgaaaattggcttcggttctactggcaggttcttacacaatactaaactatatcttttcttttgcataggagttctttctgcttctatttttctgtgctcaaaaatcactgattctcatataaattgaaaaacaattgcagcaaatacttcaagctgtgaacaccatacatgaggagcgtattgtgcactctgatttaaaacctgcaaatttccttcttgttcgaggctttctaaaacttattgattttggtatcgctaaggccatcaatagcgacactacaaatattcaacgagattcacaggtaataataccctaccatgtttctgtttttgtcatcatcctcttaattaaaaaagagttgttttgtatttagtttacaagctgctgatattaatgggggtaagtatgtatcgtgacaggtggggactttgagttacatgtcaccagaagcattcatgtgtaacgaaagcgacgagaatgggaacactataaaatgtggaagaccatcagatatttggtcacttggttgcatactataccaaatggtatatggaagaacaccttttgcagattataagaccttctgggcaaagttcaaagtcataactgatccaaaccacgagattacttacaatcaactctcaaacccgtggcttatcgacctaatgaagaaatgtctagcttgggaccgtaaccaaagatggagaatccctgagcttctccaacatcctttccttgcgccacccatcccacacgagcttcaagtgaaaaccattaacatgttcagtctcatagctgaatcttgtggtagtgatgacgataaagcaacattcatgatttctcagcttgagcaactgctttcaaatcctgctcctcgtccaagaaatgatgtgttagaatcaagagatcaaa

SEQ ID NO: 141477 - DNA, 2455 bp, Arabidopsis thaliana landsberg
gtagatttccgttttacttatataagtttcctagggaaattctttaaaaggtaatgtttccgaataggaatatctttagttcattgcatattcatgcttggttttccaaaataaaatcccaaaagatacatataattcataagaatatgtaagtgattcatagacagcatctcgttcttttatcagaggttctaccaagtgatatgttaccccacataattgcaattcaatttcgtgatctatatcttcaatttttggaaacttagcaagttcttctattaaaccctgatcaataaaccgataaaacccttcaaattgtatctgattaaatccgggtattgcagatgttccctctttttcatccccaagcatcttttttgaatttcccatttatccgtttattgaaaaaatcccatcccatttctcattcttcaccgaatcatatccatagaattcgatctagcaataatggaatttctattctgtttactgaatcacatgaaattttatccaactccaagatatatggaatgtattaaatacgtatgaagggagactatattcaattggaattttttataagaaatagatccaaatggaacagaattgagaaataccgctggaacttacggagttttgtaaagactagaaaaaaaaagtaatttcattttcacctatgatattacatattccaattcgattgcataccataaaaaatgtattcatcattggatctgttcgagcagataaacatataataaatagaaaactttttttttaaccactttactttttcatgtattttttttcattgttcaaacaaatatttgcagaaaagagatttatttttacctgttttgaatagaataggaagtaggtaagaaaactttttttttatttattaattgttttattattaaaataaaaaagaatgcacagatatatatgtctctttttcttcttttattgtggtacagttctatttgggacagcgcatgctgggctctataaaaaaggaaatgttctcttcaagggaaaaattgaaatataaaaatttattgagaattactcctcaaaagcatctctagagagataaaataccccattatagagctatagttctataacacaacgtaacgtatgttctgattctggggtttacatatactcatcattactgttataatttaaattgaagaagatttctttttaattgaaaaaaactcaatatagattagttagaaatgcatttctaatgattttcttaatattattagaaataaaaaactggagattttaattttcattcaaaaaaggtcatgaatttacagtcaatagttaatggttctggtttgtactagattcgatattttgtgattgaaaatctatatatatagatttttttcggaatcgttttggcggcatggccgagtggtaaggcgggggactgcaaatcctttttccccagttcaaatccgggtgccgcctcagcaacaaactttaaataacaaacgtaggaaaagactctttatactttcttttcattattctaagcccctggctcgcgaggttctattctctaacctaaagttttgcctatcagattcaaggaaaacttaaagtagtggagggaaatctgtaaatctttacttgccactactaatttagttccacttactgagtcttcaattagattggatagccggagagagatttaaattaatagttttgaaaaggacctaagatactttggatatatactcatgaaagtctcggaatgctcagacattcaatcaatattagattagattaagaattgcctttcattttacttccaaaaataaaaaacgataaaagaaataaaaagtattcttctttctacatgtgagtcagattccttggatacttcaaaaatgtcggtttgcttgtgtttacatcttgtcgattctactagaaattctataaaaaaaaaaaagaatcactcattataagataagtggatttttggagtagttcatcaatggtgaccaaaaacctctcccttttttttgactctgcaccagtgatttcactattattagtgaacaataatggaatagtttcttcatattcatagaaatagggggcagaattcacatggatatagtaagtctcgcatgggctgctttaatggtagtttttacattttccctctctctcgtagtgtggggaagaagtggactctagaaatacttctaattgcggtaataatcaaactctatcaacctgtatcaattgttttcgttttctagaccgttcggcaattttttttaagattttttttttagaaattggatttatgttttattgactcattttctatttttctatcagggtttacacggttaaccattcatggggtaacccctttcgaaatctgaagaagcttccatcgaattgggattatctgtattaa

SEQ ID NO: 141478 - DNA, 2921 bp, Arabidopsis thaliana landsberg
acgatatctcaaaaagcgccatgtaagaggcgaccatggtgtcccattaggtggaattgggtatgtataaccacatgataagatcactttttttctataagcaacatgttgatcttctctaggaatgttgtaaattttacacaaacgcgtatttttagtggaggaagcatcggaaggagttacaaaggtgaatttcagcagtttaagctcttccctaaaatttgtgaagaagctccaatcctcacaaaccagttctctgtaagtctctcttgtacttacacttacaatcacaaagatatacttacttgttgattacgttttgataatgtttaggtttttgtgtcgagacccggtggcttgagctactccactgttctatgcccaacaaagccaaaatctgtaaagtaagccacttaatagctttgtagcttattataacagttataacttatgttgtatatgtagaggtaaaacagaggatttaggaatagaatcatgggactggaacatggaaggggacaaatctacctatcatgctttgtatccaaggtcttggaccgtatacaacggtatgaaatgacataattatggttcattatagatcaaaatgtttcagattcatgatttctaaagattatagtgaaatgtgttcactttggagaacagagcctgaccctgaactcagaatagtttctcgtcaagtgtcgccttttatacctcataactacaaggaaagcagtcttccggtatcggttttcgaatttacggtaagaatattccgagaagaggaaagaatcttctttttatatgactttatctcaggacatcataacacttttgtaactttttggctaatgtttcatagatgagtaaccttggaaaagaagaagcaacggttactttgctctttacttgggaggtaacttatttcaaacaaaatgatgactatctgtttcatatcttttgaattttcaagaccatttttgtttgtgtgcttacttagaactcagtgggaggagcttctggtttaactggagaacacttcaactcaacaataatgtaagaatctacatctcaatctctattgtcacagcttctgttctttagctctgacttctaacacaagaaactgatttttgatgtgatacatcagggaaagagatggagtacatgcaatagttttacatcacaagtaaacctcttttacttgagccttaagtaactgaaaaatcatctgttttagccatttgaagcggggtttagtggcggtttccggaagatttattgcgtcgatatattgcaactgtgatgaaatgaaaacttgcaggacgggcaatggacatccgccagttacttacgctattgcagcgcaagaaacagaggatgttcatgtctctgagtgtccatgcttcttagtttaaggtcactctcctaaagaaatcacagcaaaagagatgtgggatgagattaaaaaggtttcatatctttttgttcacttcttccgcaaccttttttccatatctattcaaagaaagctctaaatgttttgaattctctttcagaacaaatcattcgacgagttaaacagcgaaccaggctcaccttcgagacccggaacatccattggagcagccatagctgctaaagtgaaggttcctccaggttgtgaccgtactgtcacgttttcactctcatgggactgtcctgaggtgcggttcaatgaaaagacttaccacaggtgtgacttcttgattcaaatttccttgtatatatatagtttcatcttaacctaatgtgaatactcatactatacagacgatacacaaaattctatggcaacttaggcgatgcagcagtgaaaatggcccgcgacgctcttctaagtacgcgtgcaatttgcttttgttttcggtttcctctttggttttacttgcaaaaaagtttcatatgatgtttctttttcttgaaacacaagattacgttgattgggagtctcagattgaagcatggcaaagccctattctctcagacactacacttcctgactggtaaactctatattactttcaagcttctcttctactccgcaatcgataaccgatgtatattttaggtaccgagttactctattcaacgaactatactatttcaactccggaggaactatctggacaggtaatatacaaacaactcatacattgtttgactatttcatcaatttctctgatgttatatttttcactatccatagatggcttgcctcccaaggaaagcatagaaagaagcaaggttacaaatacagaacagaacgacattgttatagacctcttccagaaaatcaatgcggtttgtgagcagatttattctcctcaatcctcgaactcggaagagaacattggccaattcatctacctagaaggaattgagtatctaatgtacaacacttacgatgttcacttctattcttcatttgcacttctcagtctctttcctaagctcgcactcagtatccaaagagactttgcagcaacagttctgattcaagatccaaccaagaaaaagatcatgagctccggtgagtgggttacaagaaaacttcttggatctgttcctcatgatataggtctaaacgatccgtggctagaactaaacgaatataacttcttcaacacggatcgttggaaagacttgaacgccaagtttgttcttcaagtctacagagacgtggttgctactaacgatcagagttttgctaaagcggtttggccgtctgtttacacagcagttgcttacttagatcagttcgataaggacgaggacgggatgatcgaaaacgaagggtttccggatcagacatatgatgcttggagtgttacaggggttagtgcttattgtggcggtctttgggtcgctgctctaca

SEQ ID NO: 141479 - DNA, 777 bp, Arabidopsis thaliana landsberg
ctaaacgtcaatgaaactcgttaaagcagagaatctaatgcgtatctcaatgactcatctctccaaagagttttaccgtattctcaaatcgaaccgacgttatctcgaccccgaatccgtctctatccgttcttcaaaagcttccgattccgactccgattccgattccaacaccatggatgatctaaagatgatcgcggattgtatgatatcatctggctacagcaaagaatgctttaaaatctacaaaagaatccgtaaatcgatcattaacgaagcgttaaaccaactcggattcgagaatttaacgttttcgcagattcagaaacttgaatgggaagttatggagaagaagatacgtaaatggttaagaacaacaacaagagcagtgaatactctgttttccggtgaacaaatcctctccgatcatgtcttctcttcatcatcatcaacaattcgtgaatctgcatttgcagaaatcacatcacaaaccgctttagctttgttcactttcccggaaaaaatggcgaaatgtcgaaaatctccggagaagatcttcctcactctcgatgtttatcaaacgatcgttgatctattacctaagatcaacgaactctttagctctgattcaacctccaccgtcagatcacaagtcgatgaaactttggcaaatctccgagacggtgtcgtttcgatgatcgatgaattcgaatcttcgatttcgaaagaatcgtcgaaatcgataataaccagcggtggaattcatcaattgactag

SEQ ID NO: 141480 - DNA, 532 bp, Arabidopsis thaliana landsberg
ttctaagaacttaaaacctttttgaagcacaaacgattttagctgttgcagtaccaaacaagacaaacacaacataaacagtgtaaaaccaaatggggaataaaagtgttaaaagtctttttgactttttagtctcgccctcttttgagtttgtctttctctgaaaatcacttcttcagagtcttttccttatctatgttattagagtgtgtgcttagaggcacaagtctccctccctgtaaacacaaatgcacgtaaaacatgaggagggcctaagagaggtcatctttgtcttttaatttacacttgtcccggggtttcaagatcattcactggccccaacgactaaaaatgcagactctcgatccctttaagattagcctcatagttcttcatgactgaagtagtcgcccttgaaggtgatgatagcttgttgatctcagatgagacgataggtgagtttcgactaacagggatctttgaattggagcctgatccagcttcaacgatttgagggtttgatggctcagaa

SEQ ID NO: 141481 - DNA, 1563 bp, Arabidopsis thaliana landsberg
catcaacgcccatatccacctcaaagcttcgattctcagagctctcagaatcagaccaacactaatcaacgagttccacaaagccctaatcaatggtctactcaacacggtggtcaaatacctcaatacggtggtcaaaatcctcaacacgggggtcaaaggcctccatacggtggtcaaaatcctcaacaaggtggtcaaatgtctcaatacggtggtcacaatcctcaacacggtggtcacaggcctcagtacggtggtcacaggcctcagtacggtggtcagaggcctcaatacggtggacctggtaacaattatcagaatcagaatgttcaacaaagtaatcagagtcagtactacactccgcagcagcagcaacaaccgcaaccaccacgaagctcgaatcaaagccctaatcagatgaatgaggtagctcctcctcctagtgttgaagaggtgatgaggttatgtcagcgtaggctatataaagatgctattgaattgcttgataaaggagctatgcctgatagagaatgtttcgttttgttgtttgagtcttgtgcgaatttgaagtcgcttgagcattctaagaaggtacatgatcatttccttcagtctaagtttagaggtgatcccaaacttaacaatatggtgattagtatgtttggagagtgtagtagtattactgatgctaagagagtgtttgatcatatggttgataaagatatggattcttggcatttgatgatgtgtgcgtatagtgataacggaatgggagatgatgcgttgcatttgttcgaagagatgacgaaacatgggttgaagccgaacgaggagactttccttacggtcttcttggcttgtgctactgttggtggtatagaagaagcgtttttgcattttgattcgatgaagaacgagcatgggattagtccgaagacagagcattatttgggtgttttaggtgttcttgggaaatgtggacatcttgttgaggctgagcaatatatccgtgatcttccgtttgaacccacagctgatttctgggaggctatgcggaactatgctcggttacatggtgatatcgatttagaggattacatggaggaattgatggttgatgttgatccttcaaaggctgtaatcaacaaaattcctactcctccacctaaatcattcaaggaaacaaatatggttactagtaagagtaggatccttgagtttcgaaatctgactttctacaaggatgaagcaaaggagatggctgcaaagaaaggagtggtttatgttcctgacacacggtttgtgcttcatgatatcgatcaagaggctaaagaacaggcactactctaccacagtgagaggttagcgattgcttatggtatcatatgcaccccaccaaggaagaccctaacaatcatcaagaatctccgtgtgtgtggggattgtcacaactttatcaagatcatgtccaaaatcattggtagggtgttgatcgtgagagacaacaaacgtttccatcacttcaaagatggtaaatgttcttgcggggattactggtag

SEQ ID NO: 141482 - DNA, 1058 bp, Arabidopsis thaliana landsberg
tatccgtcacagtgcaatggagacaaatcaccgacgttactgatttctgaagatttatcccggaaaataatctctcttgccgccggtgaagctcatacaatcgctctgaccggtaaaataaaaagttccactgcttcaatttagtagatagagaaatgcgatattgagtttaattttgttctttggaatttatttgcaggcgatggatgtgtttactcatggggaagaggaatgtttggccgtctcggtacgggtaaggaatcggacgagcttgttccagttctagtcgagttcccaaatcaagcggaaggagatcggattcgaatcgttggtgttgctgctggtgcttatcacagtctcgctgtctcaggtggtttcttctattcatatgtctaatttcgcttttctattagcttgtgttgctgatttgaccatatgatttattttgagaaattggtgactgtgatgatcaaagattttgtttgatcaaattagttcctttgtttgcatctatgaacttccttttgagaaataataaatatgcttgaattgtgactataggttttactttgtatgtttatgatatggatctgtattgaccattctcttgccttttgtttcttttgccttgtaagcttttggcagatgatggctcggtttggtgttggggttacaacatttgtatcctttatctgagtgtttctagcttgatatgattgtttcataactacattttctagtgtcctgaactctccattggttgcttcaatccttgactggtaaatagatggccaacttggttttgatggggaaaactccttggcaccatgcttgatcaaaaatttgtttgaacgagaaacatctagttcttctctaaatgattcaggtagagaagttggttcagatttaaaggtatggtcctagaaatgcattcttaggtgttggtttacaagtaaaaaaaagtgtagcataatgattttcggtatgtcttgtaggtttgtactgtaaaggctggctccatgattcttatcgccatcgattatccccgtagtctttta

SEQ ID NO: 141483 - DNA, 979 bp, Arabidopsis thaliana landsberg
ttgctaccgtctacacattgcagtggcagataaatggattgagcttcttaagtatgttctcaggacgtcttggcttttcagtgagattattaagtaagacgttgttatatgatactgaactgatatggcgtgttgtaatctctaggaagagagacgaggactggcaggttggtgatataactttcacgcttaccaacaggaggtggggagaaaaatgtgtcgtctatgcagagagtcatgatcaagcccttgttggagacaaaacgatagctttctggctaatggataaggtaccattttggttgctgatagactcagcaaacagaataactaacatcttactgtctttgaactcttaggtctggttgtaattcagataaattgttcgactaaatcttatgttttttacttgattatataggacatgtatgatttcatggccgttgatagacaggccactccgcgtgtagaccgtgggattgctttacacaaaatgatccgtctcattacgatgggattgggtggagaaggatacctcaatttcatgggaaacgaatttggacacccagaatggatcgacttcccaaggaccgaccagcaccttcctgatggcagagtcatcgctgggaataatggtagttatgataaatgccgacgtaggtttgatctgggagatgcagaatatcttagataccatggactacaagagtttgatcgagcaatgcaaaatctagaggagacgtatggtttcatgacttcagagcaccagtacatatcccgcaaggatgaaggagacagagtcattgtattcgagagaggtaacttgctcttcgtcttcaacttccactggaccaacagttactctgactaccgtatcggttgctctgttcccggaaagtacaaaatcgttttgccctctgataactctttatttggaggcttcaaccggctagatgactccgcggagtttttcacctct

SEQ ID NO: 141484 - DNA, 1531 bp, Arabidopsis thaliana landsberg
tcctctgaggttccttggattttcaaatttcttatgggtcactttgtcttttgtacatggaaatatggcgtggtgggtagatcacctagtgaggagaaggaagaggttcaagttgcacagtcagacgtaaatattcgtaatgttttcggatcttcggatgatgaagacgcagaagaatatgttcggaatgacgttgagcaggatgaacatgtgagtcttgcatctaatattacatttcagtttacagaatatctgtttcctttccagtgtttgcttccttttagaaaccatatgaaattgcatgtatgtatgatgagatgtctaattttgtagagatcgccaatcgaagatgaagagggctctgagaaggatctgagacccgatgatatggtgcttgatgatataatccctgaagaagatcctcaatacgagtcagaagctgaacatgttgaagctaggtacagggagaggccagttggtccccctttggaagtggaggttcctttccgccctcctccaggtgaccccgttaaggtatacctgctttatgttgctaaaagattattcgctgacatggcttcaaatcaatagtttcctttctggtatttccaagttaccaaaatctctcatatcattgtggttcgaagagtgagtatctgatgtcttttatgtggagaaccattgcactgaaacatgcttcgacatttacttagcatgaagggccatttggtgtacatgagcgtgctattctgttttatatctgaaaccccattttctagttgtctatctgtagtgaagatgttctgtagcaaaattgcgcttcctcatataccgttttctctttgatctttttcagatgaacatgataaaagtttctaatatcatggggattgatccaaagccttttgatgccaaaacattcgttgaagaagacacattcatgacagatgaacccggagcaaagaatcgtatccgtttggacaataatattgttcgccataggtttgttaagagtcgagatggcaaaacatatgtaagtgaacacttcttcaaagcttttctgcttttaaattttccatcaaacctgcaatgaagctatgtagtttgcctattactagtacttctgatgcaatgatgtattataagtacatacttttgatgcaatttatgtattccgaattagtttactttgtgcttttcactacggacatgtgttcatatagttggagatgaaattttatgatatctctgttcaacagttcttcttattctttaggcttcattagaaatctgttcataaacaagaattcttggttttgttgcttattgcacacacttcttctactttttccgttacttttgctgtagtaaactcaagtcactcaatattcgtatgcagagtgaaagtaatgctcggtttgtaaggtggtcagatggaagcttacagctattgataggaaacgaagttcttaacataactgaacaagatgcaaaagaagaccagaatcacctctttatcaaacatgaaaag

SEQ ID NO: 141485 - DNA, 397 bp, Arabidopsis thaliana landsberg
cagagatacaaagcaatagaacaacaagaacaagatcacaagaacaagaaaacagagaaaaaaacaatggctgccttgtcggataagttagcggatgcataccagaacgcaaggccgagatatccgatcgattggttcacgaaacttgctgctcgaaccggtcagcacaaatcagcttgggatgttggtactggcaacggtcaagcagctattggtgtaagcttcttccatcttgttccaaaagtttccactttcttatgtactctgcttcacttagatctctcaaacgatgttgttttaatccctctagaagaacacaactatgcatttattagctttagttgagaggagaaaagaaaatgaatggcttctttctaatgattttatgatttattag

SEQ ID NO: 141486 - DNA, 336 bp, Arabidopsis thaliana landsberg
tatttgcagggaatcatatcgatcgagccatgtggaaacgcctactggctcatttcatcgtctcaaataccactaactctcttcttcactctctggatctgcttcagtgacaatgttcaaagccaacaacaatcagattaccatgtctcagtaaaggttcgatttcacacaaatctaacaaacacttgattagtttcaaaaaaagaactagaattgacgaatgtcctaaaaataatttgtgcttgcaggatgtagaagatttgagatcaaatgatggagcaagatcaaacaagtgtatgttccctgtaatggctctattagctggagttttgggtg

SEQ ID NO: 141487 - DNA, 1414 bp, Arabidopsis thaliana landsberg
atgaatactaatgtatttatcaacaagtgctacagcctggtaagtctcaagctttccgatgagtttaccgttctatctagtccggatttgtatctgcagttttgcttctttgttctgtcatgtttgttataagatcttgccttctgagtagctgaacctcttttttcatccttgtgtaggttagttgtcacttctttcctttcttgtaatctttcttatattgtttttcctatgatttgtaaagggattttactggtatcgattcgacagtgttgtttcaattgaaacatgatgctttgtaggaaaactcatgaataactgttcatatagttgctttctgttggtgtttatagcagtgtctttttgttaagtaggttattgcatgatgagagtcttttcatttttattttatatacagtcactgcacttttttcatatctgatgcacacctttcttcttgcagtttttttcgaagctgttggtgagttcccatccttagtactgctagacagttcggtgtgttagttgactttatattcaaggttataggtttagtgttgttagtagagaaaaatggaagccaaaatcgtcaaggtatcggatagtagttataaagatggtcttgggaagaagagaaagcatccagggaactatactccttatgattctggaaggtcatatgcaaagctgcaatgggtgctttcacccaacagttccacccagaagcttgagaaaaggagaaatttggatggtgaaaacaaagttattgtttctgagaatcatgttgagaagtctttggtcagatacttctcttattataagaagacaggagtgccaaaacgtgtaatgttccatgagaatggtgaatggattgatttgcctgatcatattctatgcgacatcaggaatgatcttgaagcaaagagagctacaattgagttcaattggtgcggtcgccattatctcctggatttcttgcacatgtatcgactagacctggaaacaggtgtaaaaacccagcttgcttggattgatattgctggcaaatgctttttccctgaaacttttgacaccctcgaaagggacggctgccatcatatccgtggggaagatccggaacaacatgatcaacgtgagatcaagctgcacattgaaattgatgtaaatagtggggagttaccgaggctgaatttgaatgtggtcactgacgagtctggtgacaatatggatgattttcaagctgttcagagatcctcaaatgggccaaatgacgaggcatcagaggatagctgcagccgtgagcttgatgatgctgttgagaaatgggacaaaacagaaactgatcggttctctggtgtcaagcctgctgaggaggagcttgataaagatgctgtcaaacaaatgtttactttgg

SEQ ID NO: 141488 - DNA, 865 bp, Arabidopsis thaliana landsberg
tgcagagctaacagttgcatagagcatgcgaccgggattatggaggaagagagggctccaaagaatctgtcgaatagaatgtcatctatatcactaaacaatacagctgcgcaggtacaatctcactatcttgccttgttgaatagtggttgatggtagaaacattgattttcaccttatttattatgcctagattatttcttcgaccatctaaatactcttggtgtttgaaacttgttgataaaaatccccaatgtgattagccaagtaatttctgatcatatgctttattctgcacatcagatgtattaaatatcaaatagcataagaagttttccagtgtctgataatcaaacagactgcactctaacggatatttttataaattattattatatgttaaaccaggtggaggagaagtacctgttagacaaactggatgtgtatgaatctgcggttggggattcaaacacgaaaacagccccaaagattgaacggttcccaccggcattacaatctataccgcgtaatccgattgttctagaccttgcctacaactgcatcgacttcccagttattgaaaacaggatgaagaaaaaaggaggcttctttagtagccgaatttcttctctctggtaaaagctttaaaccggctttctctctaaggttaaaaaaggatctcggattcattctccctttttatttaccagactcagaaacttgttgttgctctttcgtagcttctgaaacgaaatgcatgagatttctgttaaatttattttgtcacagaatcacaatttagacattttgttcttccattttagtgacacttggaattttggaaatagagaccagttttattggt

SEQ ID NO: 141489 - DNA, 514 bp, Arabidopsis thaliana landsberg
cgcgagtcgcaaacgcgtttttctctgtttttatggcggttggaaacgttatgggttatgcggctggttcgtacactaacctccacaagatgtttccgttcacaatgacaaaagcttgcgatatctattgcgccaatctcaagacttgtttcttcttatccatcactctcctcctcatcgtcaccgtcacgtctctttggtacgttaatgacaaacaatggtctccgccgccgcgaaatgccgacgacgacgagaagacctcaagcgttcctttgttcggtgaaatctttggagcattcaaagtcatgaaacgtcccatgtggatgcttctaatcgtcacggccttaaactggatcgcttggttcccatttcttttgttcgatactgattggatgggtcgtgaagtgttcggtggagattcagatggaaatgaacgatcgaagaaactatacagtcttggagtccaatctggtgcaatgggattgatgtttaactctatagttcttggtttcat

SEQ ID NO: 141490 - DNA, 507 bp, Arabidopsis thaliana landsberg
caaaatatctcataaagatcaaataaacactaaacctgaaagcaaaaaaatggcagcacgagcaacattcatattctatgctctcttcctaaccacactccaattccttctaacacaccatgtgtcatccgccgcccgaggattatggaaatacatcgcccccaacgtcggaatctccgcgatgcatatgcaacttctccataacgaccgtgtcgtaatgtacgaccgaaccaacttcggaccatcaaacatctctctacctaacggtaactgccgtgacaacccccaagacgccgtctccaaaatcgactgcacagctcactcgatcgaatacgacgtcgcaacgaacaccatccgacctttaacggtacaatccaacacatggtgctcatccggttcggttcgaccggacggtgttcttgtccaaaccggtggagaccgagacggagaacttaagacaagacgcttttctccttgtaatacaatcaatgtgattgggtcgaaatg

SEQ ID NO: 141491 - DNA, 432 bp, Arabidopsis thaliana landsberg
atggatgttgatcttttggagtttggtgtgattaggttgactgagaaagttaatgatagatgggaggtttgtgtgagcttaagtgaaggacaatttcagcaggtatgtatttggttggctgttattattttttgttgttatgaagaatgagttaagtcttaacaaccttttctgctgctaccaggtcagctttgtcaactccatagcaacaatcaagggtggtacacatgttgactatgtgacgagtcagattacaaaccatattgtggctgctgtgaacaaaaagaataaaaacgcaaatgttaaggcccataatgtgaaaaaccatctgtgggtctttgtcaatgcattgattgacaatcctgcttttgattctcaaacaaaagatacactgactcttcgacagagcagttttgggcgaaatgtgaactt

SEQ ID NO: 141492 - DNA, 1065 bp, Arabidopsis thaliana landsberg
cacaagtcaactttgcattataactccatttgccctcctggttcatcttgttctctaccatggctgattcaaaatctggtgacacggaagtagcgcatcgctctagcgatccaagcgaaaagcgtggtggctggatcactttaccgttcatgctaggtttgttttttgtttttttttgaaaccaaaacatatatagatgttgatactggtgaggttttatgttgtgcagttacattattaggtatgtccataacttctttcggatggggaatgaacttgatcgtcttcttgatcgaggaattccacatcaagaacatcgctgctgctcagatttcaaatgttgtcaatggagttgtcaacatgttacctgttgttgcagccatcctagctgattccttttttgggaacattcccgtcatctccacctccactttcatttctctggctgtaagtttaacactcactaattctattctatgttctgatatacaaagcttaccagctttaaaaccattttttcagggaacctctctcttgaccttaatcacatctttgaactacttgatgcctagaccgtgtgaaacggggtcaattctatgccagtcgccatcaaaactacagcttgggatcttgtatgtagccttagctctagtgatcattggatcagctgggacgcggtttaccttagcatccgcgggtgcaaaccaatatgagaaacctaaagaacaaggaagctttttcaactggtacttcctcacactctacactggagctattactggtgcaacagcaattgtatatacacaggaaaatgctagctggaaacttgggttcggtctttgcgccgtcgctaatttgatcagtttcatagttttcgtctctggcaagagatactacaagcatgacaaaccaatgggaagtcccttcacaaatctgatccgcgttgtagtcgctgctacaagaaaaaggaaagctgtgatttcatctagagaagaagactatcaccatgggcttggaagagaaggcaagacatcttctgcaatgccctccaagagctttaggtga

SEQ ID NO: 141493 - DNA, 1090 bp, Arabidopsis thaliana landsberg
ttccgtgctttagctgatcaactgtacaaaaccgcagatcgccataaacatgttcgacgacaaatagtaaaacaggtttggtgatctctttgctcttgagaatctttcctagcttccataaattgcttgaactcattcttttttttgcaattttcatcttctggtttagctaaagtctcgtccagattcttatcaaggatacgttcctatggacttctctgattatctaagaaagatgtctcggtcaaatatcttctcttagtgaactccataaccccatttgctgccaattctattgttaaagcctagtgttaaaatttggaacaggagcggcgaatggggcgatcatgtgacattacaggcagctgcagatgcggtattcattcttaaatcttgtaaaaaaaagatgcagtgatcttccttttactttcctcagttcatagttaatcagtttggtgaaactttataatattgcagtatcgggtgaaaattcttgtcctaacatcgttcaaagacacatgttacattgaaattcttcctacctcccaagaattcaaaggaggtaaagagttttctttcactgtaaattttgtttgtctatactatacctctctcttactggttattacagtgatcttttattttgctcttgttgtctgcagtaatcttcttgagcttctgggcagaggttcattacaacgccatctacttaaacagaggtaacttcgagaaaccttttgtttcacagactatgtttcgcttctttcctcttcatcttaattctcttcttcttctccatattttttggtgttcagatacatctgaaacagagctacagaggaagagaaaatggtggcgtttcggaaactagacagaccattggatcatcatcactgggttacattaatatttattgacttgagagagatgttcttagacatagtcccttcgtagagagagagaggatgctgaacagagctcacagcttcaaagccttacaataatattattttcttctttgaaagaaagaaaattttcttttaaaaaaacagaattaacaaattaaataaaatacacaaaattttgatca

SEQ ID NO: 141494 - DNA, 999 bp, Arabidopsis thaliana landsberg
ccaatcttagatttcatgggttggtaagaatcaatcaatttgggaggtggagtatagtacaagtacttcaatttgcattgaaccctcacattgaatcatctgatttgcagaaaaaggagatctctttatgtaaaagtctctgagaattttggtttaaagagaggattttacggagatgggtttgttggaatcggtgaaatcaatcaactgggaacatgaatcatctccggtttatcaggattttcgagttcttcctctcttcgctgtgttcttcccttcgattcgatttctcctcgatagattcgtcttcgaggtaatatgaagttttgtgatagtgtgtctcctaaagttgttagatttatatagtatcttgtgtgttgcttaagttacttaaaatgattgttttgtttcatcaatgccttagtttaattgtttgcttcagctaaaagtataaaaaggttcactaaggagaatgattgtagctgaaagtatctatttttgataaatgtgaagaatgatttataccttttcttatactttataacaaatgttaaagtttgtgtgaatcaatgtaggtcttgtgatgttgtttgacacttgattgtgttgcattcttttcaatgtagtgagtacttgacatttgtttagctctagttctctcttttgttcctcatcatttatgtgtgcctttggttactttcaagttgggtttgtagaaagcttctttttttggggtcaagttactaactttctaactttgacttgatgattgttttttttgtagaaattggcaaaatatttgatctatggaaaacatagacaggatatgggagatgacacaaccgagagaaagaagaagatcaggaaattcaaagaatcggcctggaagtgtgtttactatctatcagctgagattcttgctttatctgtgacttacaatgagccttggtttatgaacactaaatacttttgggtagggcctggagatcagacttggcc

SEQ ID NO: 141495 - DNA, 298 bp, Arabidopsis thaliana landsberg
atgatttttaacataaattcagtgagaaggtgcaagtcgctcacaagagaagaaatcgacactttttggaaaacgaagaagaagaatgaagaagaagaacatgttcaagccttttccaagttggtaactcaggttaaaaccaaactttaaatttatttatttcttatttcccaaggaaagagacaatatttctactatcagtgatcttagtgaaaatcagagttcgactttaaaatttaccaaaaattattaaaatgatctaaaaaaggctttgaaattgtttgcaggaaggtgcaca

SEQ ID NO: 141496 - DNA, 2186 bp, Arabidopsis thaliana landsberg
ctcgatttcacaggcggaataaacaagttggatggactcggcaaaaagtatttcttctcatcccaaccaatttaggctctatgttattgttatatggttacagttattgttacttttcatggcgtgtatctgacacatccatcatgaaaattgcaggtacttcatcttatgattgcttcttcaaacactggtaaatcctcagtcatttgttgttcaggaacaattataattgggggaagttttagccagtgagtaaggtctctattcgtatatattggcaggttctgttatttatttcgtggctgcggttatagcgacttgcacaaggtggcatcattggtccaacgcattaggttttctactcatgggtaaatatttcattcctttgtgaaggtttgtgtatgtttttcattgatttgtcttatagttaattccctgatgaatcaaattgtacttgcagcctttcccaaaattctgtttctggcaacttttctcctgcttctctctttctggtatgtatattctcaatactctgatcatattgtgttgtccctgattattttatcttaataatgatctgagataagacaatgatgcttcttcatgttatagggtagatgtttgccatcagggaaatggagaggaggatgatgatgatgatgaagaaaatagcatccaacaagtgttgcttgaaaaaagcaagagcaagccaggttcttcgaatgcaagcgatcgtagaaagtgctgctctttccatggtattcatgttggaacccggcagaagtttgttgatgcggcatgggatactttcagttttgtgcattaacctctagccaagtcatttctatgatctttataaaaatgtttatcttttttgctaggcaattattcttgtgttcatcttaatgatatcatttgcaatccttatctggatcgcttccggaaagaatcctatgaattcttcattattggctgaggtatgtggtattcctctgcacattgatatttcctctttcactaagttcttaagctcgagaaatagaagacttttgtctatattttttctggttttatgataaactcacttccttatataggtgtatgtcgatatttttgctgcaataatcctaatcactggaggaggaatctgcttctatggtaagtgatttcttaagttcttttctggtttcagctattcatatttttcttctagcaattcgtgagatgttttggtcagtggtttactggcttattgctatgattgaacagcgtatattcacaaactcttttatgttctttaggcctgcgtctgctctttaatctaagaaaggtgcggtctgaacaagtttcatcagagatgcgaaaggtaactaatgattctttggctcaacaagcttttctttctttgcacatgtcagtcgaatccttaccctgaaagtacattttaaccatttataggtatcgggtctagcaggagtctcagttgtttgcttcactgttagctctttaatcgctcttctcacacacattccagtaagtcattatcactcaaaaaagtatgtctgtaaaccgaaacctaacattcgtcgatacatttaaccaaaaccaatctttgatctcagctcttttatcattggaacccaagcaaattacacggcatcaaagcattggttcttctgatcatatactatttcataggtgaagatttttttctttcgttttgttgttttgaagaccttcaaatgcagggttactgataagaacgctttttaaaggttccaccgtcccattggctttcgttttatgggttttgcgggagttaccccctcaaaacattgtgagtaggcaagaagacaccagaaggattacttatgtcaactatgaaactgttccaaggcaacctcaaggtcctcaacaagactgggcctccgccacagtgtcgaaaaatcaggtacacaattctcttgatgaacatctaaattaggaagtcatgtgtgacacatacaaggagttttatagtaagctgcaaatgcatgcttcagataaactacgggtggtaatattaatcgaagcaaactactctatttatagctaactaactgtatttagataagaaagacttaaacccgttgctcacttttaagatagacccaatgttgagagcattcgagaaaggtttgaactaa

SEQ ID NO: 141497 - DNA, 1069 bp, Arabidopsis thaliana landsberg
agagagaaagagagtcagagagagagagagagagagaatgttccatgctaagaaaccttcaagtatgaatggttcatatgagaacagagctatgtgcgttcaaggcgattcaggccttgtcctcaccaccgaccctaaaccgcgtttgcgttggaccgtcgaactccacgagcgttttgtggacgccgtcgctcagctcggcggccccgacagtatgaacacacatacacaaatatatattcaatccatttaaccaattataaatgtgttttttcaaagtttttgatcatttctatttgcagaagcgaccccaaagacgattatgagagttatgggtgtgaagggtcttactctttaccacctaaagagccatcttcaggtatgtacacaaatatagattagggtttttttcttccttgcttttaattttctctcctctttatcttttctattctttttttcacttaataatataatataataatctaacaacttatttggatctatgggtgcagaaattcaggcttggaaagcagccgcacaaggagtacggagatcactccacaaaggaaggttcaagaggtgaccactcttcctttctctatcaaattagggtttttataaaaaagttacccataatatagatatgtattaatgtatatatatgttctttgaaccgtcttcttctaattttttttaccgtacgtgtagcttctgccatggatattcagcgcaacgtagcttcttcttctggcatgatgagtcgcaacatgaatgagtaatattttaatcagatttcgttaattttctcaactttcattttaatatatattacagcaactcacaccaggttggtttgatcaggatgcaaatggaagtgcagagaaggttgcatgaacagctagaggtaattaattaacctatagatattctatgataactgcttgtacaaaatcaatttgtatcccataaatatagtaaatgatttcattcaatttttataggtgcaaagacatctgcaactgaggattgaagcacaaggaaagtacacgcaatctatcttggagag

SEQ ID NO: 141498 - DNA, 1616 bp, Arabidopsis thaliana landsberg
gaggctccgatcttactgagacatttttgctcgatttgactttcgcctttagagcttctcaggtaactttcaatcttcacgagactcttgcttgacttggttttagctccatgtttggttgctgggaaattgacgaggggatatctattctcactcgtcactcgttgttgagtattactgggtttttggaagatgaatgcaagagtagagagctaagtaaattatgttggacgagattgtgtaacgtgattttgaaatacattttcctttattgtagagattattgtactgaattaatggcgaattctcgtcaatattatccatctcaagatgaatcaatgtccccgacttctgtgagatcaagggaatgggaaggtccttccagatggactgagtacttgggacctgaaatggctgcatcagtgtcttctactaggagctctaagcaaattgatggacatgttggtggttccacaaaggctttgaacatacaatgggtagttcaaatgattgaggttgctgacggtctcatggctaaaatgtatagactgaatcaaatcttggagtatcctgatcctgttggccatgtattctctgaagcattttggaaagcgggtgtcttccctaaccatccacggatatgcactttgctctctaaaaagttccctgagcatttcagcaaattgcaacttgaacgtgtaagtcatgagttctttttttattagacttactgtttgatttgttgatctgatggtaaatgaaaaaagatttattctgcaatacttatgcagattgataagttttcactggatagcttgcatgatggtgctgaacttcacttacagagcttagagccatggatacaggtaataagaaactatctatgtaatatgttgttgggtttacgttctgttgttgtgaaacttgttgttcgagaatggtgaagcatctcggaagtcctacatgctatatagtcaatctttctattagttttctttgtgtacctagtcaatcttcaatcttcagtctgctatatagtcaatattcaatcttctattccatctcaccattagtcagctttatatatctgggcatgcatatatgatttacctaatacatggttttaacttttaaaatgtaaacgagtagttatttgctagccttctttccttagttcgtgtgtagcatttcagtaaggggtgccttcatagtcctctcgtcatgcatttttcttttcttgaatcagctgctgctcgacttgatggcatttcgagaacaggcactgcggcttatattggacttaagcagcactgtaattaccttgctggtaagtcaaagtctctcatctgcggaaagtatttacttgccctgggttgaaactttgagctttcttttgaactcgtaccttaggtggaggtcatgaaatgttttggtacattaagttattatttacttgtcaaaaatgtctgtgtaggatgaagataaaattgttgagtattcatgattagctcataacttagttcagctttttgcagcctcatcagaactcacttattctgcatgcattcatggatctcttttgtgcatttgtccgagtcaatctcttcgcagagaag

SEQ ID NO: 141499 - DNA, 2001 bp, Arabidopsis thaliana landsberg
gatattgataaagattctgctatgtagttaccacaaagctgttgaattctatgagatgcttgcgaaacaacttgttcatcaaggtcatgttcttgatgtttttgctagttctgttgatcaggtgattctgtggaaatatctgtcattgttagtactgtctttcttgttttgtagctatctcttttatttaatatgtgcatctctaggtaggcattgctgagctcaaagttgcagttgagcagactggtggatttgtcgtgcttgctgaaagttttggccactcagtatttagagattctctcaaacgcgtgtgtcagtcaggtgaaaatgatctaggcttgtcctcatggtaatggcttacctaactttcatgtatgttttctttatcgaaaataaacagtcttttgtatgctatgttcagcttcagcgagttgtttcttatgatttgtttctctcttacagtggtatatttgaaattaactgctcaaaggatatcaaagttcagggaattattggcccttgcgcatctctcgaaaaggtatcatataaaactgttaaaggcatctatttttccttcgcttattgtgatcaatatctgatgattatttgcagaaaggaccgttgtgctctgacactgccatcggtcagggacacacaagcgcatggaagatgtgtggcctcgacaacaacacttccatatgtttggtttttgaaattgctaaaatagatacagctgatgttgttttgcagtcgcagagcaatcagttttactttcaatttttgacatagtaagggattgcaagttttccaactaaaattattattgcaagttatggatataataacgtcacacactttctttacaacgctcatgtttctgcagctatcagcactcaaatggtcaaacaagactccgggtaacaactctttctagaagatgggtaatgggaactgaaagcttacaggcaagtttcgagtagtatgttcagaatctattgtgttaaatagggagtccattggaagaagtgggggaagtgattcttataacgtttagtcgtttagaggacagcatttatattaccacttcaatattattggtgggtgtaatatttatgagaaacgagttgccacaccagttatattgtggaaactttatggcttatatcatcttatgttctttgtaatccattctaagtagtgattagaagccaccaggtttgagaattggtcagtggttttgtacatggctagactgatcccgactatggtcattaactattccttggaaattgctatgttaagtataggagttgagcaatggttttgaccaagaagcagctgctgtagtaatggcacgacttatttcctccaccatggagactcaggtactcgatgatgagagctagttagattttttaagctgaatatcggatagatgttatcatgttttagtgtttcttaggtttcttatttcttcttttacagcctgagtttaatccccaaaggtgggtcgataaagcgttgataaatctatgcacctggtttggagattaccagaaaggcaatccttcttcctttagcttatcttctcagttatcaattttcccgcagtttgtgtttcacttgcgccgatctcagtttgtccaggtacttatccacactgtccctatatgcacgatcgactgaaatctttttaacgcacaattttatccttttgggctcatttggctttgccttttgtaggtctttaacaacagcccagacgagacagcatattttcgaatgatattgtacagagagaacgtttctaattcagtcgtgatgattcaaccttcactgatttctttctcattccattcaccgccagagccaattcttcttgatgtagcatccattgcagctgacagaatcttactgttggattcatacttcacccttgtaatattttacggctctacaatcgctcaatggcgaaaagctggataccatattcaaccctga

SEQ ID NO: 141500 - DNA, 839 bp, Arabidopsis thaliana landsberg
gacgcaatcaccgccgattctctctctctctctctcgagtctctcgacggtcgcatatcaaaagtccatttctttcttctctttggaggatcagcaactatggatgaagagtacgaagtcatagttctgggtactggtctcaaggagtgcatccttagtggtcttctctccgtcgatggtcttaaggtctctctctctctttttgaatccatgcttgatctggagattttcaatactcttaattcgttacttacatgatgaacaacggatctagctgagattattatctccgattgtgtgatttaaagctggttgctttgtgagcttcaacatgagaatcaattggcttcgcgattttgacaatgatctgaatttaatgcatttagttagttattgagattgcgtaaaaagactaaattttcatcatctccactcctatatcttctatgtgattgattagctgactttgtcgccaagtttacttctttttataagtaatctaatggtctactaatttcatctatattccaattaggtacttcacatggacaggaatgactactacggtggagagtcaacttctcttaatctcaatcaggtcaatatttttgttaaatatatatgaagactttttgtggtaagttataatcagcgagagttattgaatgttgctttgttttaaacagctgtggaagaagttcaggggagaagagaaggctcctgctcatttaggttctagcagagactacaatgttgacatgatgccaaaggttatcaatattagctactttccagcttatctagcttccttgtaccatatgaatactaactgtctctgc

SEQ ID NO: 141501 - DNA, 2494 bp, Arabidopsis thaliana landsberg
aggtgttactctcccctcttcttttccaaactcccctgatgattcggaccgtcgcagttcttcttcttcttcaaggtaatgagaatcagaaagttccgcttttaacccctggctttagtaattgtcagaacaaaccccaatcattagggtgtattcttaaacaatcttatagtttaggggtataattaatttctgagatctttttcgttgtaaagaaactttttaatcttcctaccacgaatttatgtttgggaaattttgataacaggagaggattgtcgaaacattacaaaggtaaatcacaatcgttcacaacgttggcagaagcgctaactgtggaagatctcgcgaagcctgagaatccattcaacgcaaagctgaagcagcgacgagagagccctcactgtcgtagattatcaggatgcggcggcgcatcggagcgaaatttaagtgtccacgacgtttttctcgctgggaacgatagaccgccgcgactttccggtaacagaccgcctccgagagcccagacgctctcggcggctcatatttcggctttgctcactcgaacctaaaccggaagagaaccgggtttcgtttgggacgatgtttttcaaatcttttgttttctaatcttgtacaagttgttgttactttaaagtgttttgactcttttgataattttgtaagtttcagtttaatttagagagcacttaacagtatatatacaagtaactgaccaattgaaaatgttctgtatttttagatgtgatgaactaagaaaattaaaataatgttctgtatttttagatgtgatgaactaagaaaattaaaattgatgaattaagaaaatgaaaaatctaaattcttagagattgatgggctggactagaggagtcgcagttatctatattgggcctacaatgggctttcttaatttacagcctcttttttttgcggcaaatttacatgtctcttagctttcatatttacaaattttacccactgatactaactagtacaaattccatcatgtattttctttgtcattaaaatacaccttactttttgttttatccaattcatggcagaaattatatgtagaatgctaaagtctagaaatgttttggggtgtattccgaaataattaatagttaggtggttcttttgaaatttcttaatgattattgtataatgctgtcaagatgacgtggagacccatgggatgacgaagttttcactggcacgatccattcttcatcgattcaaactcttggattgactttcagagatcaaaagataacactttctcagatcttaaatttgtttgaacttcctgctcttaaaggttcttgattgtgcaattttttcggtaacaatggcttccttggagatgaatgacctaaaaagtaagtgttcctatcataaactctttgaatagggatgtgataatgaactagtatccattgatcctgaattgctgaatcgttaaggaatttgattgatgtggcagagatagggctaggtttgactggatttggtgtgttctttacattcctgggagtgatatttgtgtttgacaagggactcatagccatggggaacgtaggtctatttataccatctttggtgtgtgttctttacaattttagcaaggctttttaagggtctctgtggtctctttggacagatcctcttcttagctggtgtgactctaaccattggaatcaacccagcaatccaattctttactaaacggcagaattttaaggttctttcatgaatcccttgtgcttccaatttgatgactattattaatacaataatacatcttcttgatatacatacagggtactatatcatttggattgggtttcttgttggttgtgtttggatggcctattttcggtttgcttcttgaatcatatgggttccttgtgctcttcaggtgggttttcttctcctcaacaacatttaatggttttactaattcatttctagttttgatttgctgactcatgtctttcctttattcttctgtaattttaaagtggtttctggcctacacttgccgtcttccttcaaaggatacctctattaggctggcttttgcagcaaccatacatcagatcggtacattcattgcaacttctctctgttttactatttagacttatttgccttatccaatcaaacttttaccaactatatatattggtcactgaatcagttgctggatcgctaccgtggaaggcgtgtccctgtctaaaccttctttgcctttctttctttctttttgtgtgcgaattgaccactatccaattatgaagcttaacatggcatttagagttcttaacactctctagtctcttgtatcatatttgacataattggactgtacaaaaacaaataccttttgtattttattttaaatttacaaaattttacatatatgtaattagaaacctgatttagcaaattagagcaatcagaaaca

SEQ ID NO: 141502 - DNA, 484 bp, Arabidopsis thaliana landsberg
ctatatttgatcgtctttaactctttttctctcttctcacaaatggcgtctacgcaatatggttttgaacatcaaggcggcatggagattatcaacgatgagcttatcttgtcgtttttggaagaagaatcgcccgtcgaaaatcatagtagcatcaacaaagaggaagaagagaaactaaaccgtgtgattaggtcgctagaagtggagatcaacatgagttctccaaccatagaagctaggaaaatgaatatgcaacagacgatatccggtcttgaagatgattttgggtggcttaacgactttgatattggtatgatttcgttgcaaaatgatgatgagatgatgaattggtgtacggaactttcttacatggatggtgtggtagatagtggtgttcttgagattgaaggtggtgattattattctcatattaactatgcactcacatttgaggaaccaactctttctctatggcaagaga

SEQ ID NO: 141503 - DNA, 1613 bp, Arabidopsis thaliana landsberg
ttcgacaaaacggggcttttcgtgcccagtttctgattgagtccgtttcggagctccggaagaatctccaagccagagggtcgaatctagttgtccgtgtcgggaaacctgaagctgttttggtggaattggctaaggagattggagcagacgcggtttatgctcacagggaagtgtctcacgacgaggttaaagcggaagggaagatagagacggcgatgaaggaggaaggcgttgaagtcaagtatttctggggaagcactctctatcatttggatgatttgcccttcaaaattgaagacttgccgtcaaattacggaggtttcaaggataaagttcagaaattggagattaggaagactatcgcagcgcttgatcaattgaaaagcttgccctctcgaggagacgttgagcttggcgatattccttctctcctggatcttggcattagccccactcctaggactagccaggtttgagttcttcatctttgcttagcttgattgattcctttatccatctaggtttaggcatttagaaaaggtggaaacttgtgggacttataattcaaactctgccaattggttccatttctataggagaagagctacttacccatagagtgatagggataagtactatcaattgttaatagtagtagtgctgtttgaaggtccatggattcttcttaggatcaatgaacgtttctctttaggtccaatattcgtctgcggctcttactgtcttacaccttctcttaggagttaacattttgttctgctcaggaggggaaaccgacaatggttggaggagagacagaggcgttgactagactaaagagctttgccgcggattgtcaggctcggttgagcaagggaaaccagaaaggaggcaacaacagtgtctttggtgcaaacttctcttgcaagatatcaccttggttagccatgggaagcatctctcctcgttccatgttcgatgagctgaagaaaacaatctccgcatcaaccaccaccacaactccaaggtatgtctcagaaacgcaaaacacttcagggaactctggtgaacatagtaagtgtatgtgtctaattatcattctttgaaatgattttctcaggaacggaccgggagatacaggactcaactggttaatgtatgagttgctatggagggatttcttcaggtgagctcttactttcttaacttgccccctagtagaaatgtagaatttgtattttgtctgattctctctttgatgtgtgtttaaacttggaacaggtttataaccaagaaatacagctcagcgaagacgcaggtcgaggctggtccggctacagcctgtaccggtgcctttgcttaaacatttgaaaactttcaggtgaccggaaaagttagaagcgacctgtttctttgccctactctggtgtatggtggattaatttgctatccggacaggactttactgctctcttttgaaacttgagtgtcaggagattaaaatctaagcttctttttttggctcaatcaagttgtccgttccctgttctaaacatttcggatactcattccataaaaagtctctacaatttgagacgctctcctttgtggtt

SEQ ID NO: 141504 - DNA, 2069 bp, Arabidopsis thaliana landsberg
ccgaagcgagtctgactctctgagtcgtcaccaccgagtcaactctgtctccgccatggctgctgcttcactccacacttcaatctcaccacgtagcttccttcctctctccaaaccatctctaaaacctcaccgttcccaaattctactgagaaacaaacagaggaattgcgtttcgtgcgcattgatccgtgacgaaatcgacctgattccggttcagagccgagatcggaccgaccatgaggaagtttcggtggtagtgatgagcactgagacggcggttgatggtaatgaatcggttgttgtaggttttagtgctgcgacgagtgaaggtcagctttcgttagaagggtttccttcttcttcttcttcgggagctgatttaggagatgaaaagagaagagagaacgaagaaatggagaagatgatcgatcgaaccattaacgctacgattgttttagctgctggttcttacgctattaccaaattgcttaccatcgatcatgattattggcatgtaagtattgaatttgatgttgcttcagtaattagtgctattgcattattgtttcaatcataaagattgtgactttgatgttgcttgagtgattagtgctattgctcacttgtttccatcacaaagattatgactttgatgttttttggagtgattagtgctattgctctcttgtttccatcacaaagattgtggctttgatgttgcttgagtgactttccctgatgctcctttgttttccatcacaaagattgtgacttagatatttttgagttattcgtcttcactgtttacaatattatttgagtactatgtttgatttgatttgtatgagtatttgaacttgtttgttgtggttttgcaatctcagggatggactctgtttgagatactaagatatgctcctcaacataactggattgcttacgaagaagcgctaaagcaaaacccggttctagcgaaaatggtcattagtggagttgtctactctgtaggagattggatagctcaggtttttgttttgttttgtttctcttctttcccctgttgctatgaatttgaatcgttttgataacatttgtgatctttctgtccagtgttacgaaggcaaaccgttgtttgaaattgatagagcaagaacattgagatcaggactagtaggtttcactctccatggctcgttatcgcatttctattaccagttctgtgaagagcttttcccgtttcaagattggtgggtggttcctgtgaaagttgcctttgatcaaacagtctggtcagctatatggaacagtatttacttcacggttcttggtttcctgcgtttcgaatcgcctatcagcatcttcaaagaactaaaagctacgttcttgcctatgctaacagtaagtagccgtccttcctgtatttcatctgtatcttcaagattcaagattaaacatactttgatatgaatgcaggcaggttggaagctttggccatttgctcatttgatcacatacggtttggtcccagtagaacaacgacttctctgggtagattgcgtggagcttatttgggtcactatactttcgacgtgagtatcaatcttcttttaactctcttgttacattcttgggttgagaagacgaagaacgtctctaatatctatcgttttcttttctgtggtatcttcttcttttcttgatttcagttactcgaacgagaaatcagaagcaagaatctcggactctgtcattgagacctcttcgagttctactacaaccattgatccctctaaggtactttattacctttcgcatttgattcacaagaaaattgatccaacacaaattcatatggcattggtttataacaggaatgagaaagcagaaaagccaaatcgggtcttatcagcatcatattgtatatatacacagagtttagccaataaagtggccagagatttgagattgatacagaggagatggagatattcaaatggatgtatctattaatgtgtaagaaaataaccagaatcttgaatacacaagagaaacaattttatttgatc

SEQ ID NO: 141505 - DNA, 688 bp, Arabidopsis thaliana landsberg
caatttgatctcatctttaaatttttttgtttcccatttctctcagaaagtgttctgttctttttttcttttgtaatcactaaatgcttcaaaagtttgtccacaattatatttgaaaaaaatgtctgtatctgtagcagcagagcatgattacataggtttgtcagagtttccaaccatggaagcaacaacaatgtctgacaaaaccaaaaccagagacaataacaacggtctcaatttcaaggctaccgagttaagactcggtttacccggttctgagtcgccggagcgagtcgactcaagattcttggctctcaacaagagtagctgtcccgtgtcaggtgccaaaagggtgttctccgacgctattaacgactctaacaaatgggtcttctctcctggatccactactgctactggtgatgtcggctcgggttctggtccccgtacctccgtcgttaaagatggaaagtcgacaactttcactaaaccggctgttccggttaaggagaagaagagctctgctacagctccagcttcaaagtaagctttttttgctctgttttagatttttctcagcttttttgctctgttttatggtttctgtgaagagagattcttgatgttttttttttttgattgagcagacgcaagtggtgggatggcaccaataagatcattcaggaag

SEQ ID NO: 141506 - DNA, 417 bp, Arabidopsis thaliana landsberg
agctaaaaatgaactgatcctctgttttctaggagtccttacagaagtttcctcccacctgcatctgtgtcatgttcggaatttgcggtagaaaagcatagcagaaggggaaagggcatcggtcttatggctgcttgagaagttttcttcttgtttgaaggaaaagagagcatagactacttcaacttgagaagcttcacgacattttaaagttgtacttagataatagtctccactgttgttttgtctttttttttttttttactataaagaattatacaaaagagtccttagctaatcttttttgtatggttatttttttgtgttatttgagtttcgaactaagaatttcctttcaaatacttttttttttgttggttgttaccgaatatacaaataaaagtctttgatgtacaa

SEQ ID NO: 141507 - DNA, 603 bp, Arabidopsis thaliana landsberg; identical to SEQ ID NO: 42152

SEQ ID NO: 141508 - DNA, 861 bp, Arabidopsis thaliana landsberg
ttcagtctgtgtctagttccagcagcagaagtaaagatagcataggtgttgaaggatcaaatcgtgttaatcgttctttatttaaggatgatactccaccctcatctggaccctctagagtcagtaatggcactgtggacgaggtttcaaatcagaatgagttgatggtgaatgagttcctgcatgatgggaacctcaactttcctggtggatccactgtcaaggatgaagaggacaatcttaaggtttgctttctttgcagttctgcacattgttgttggactcattacaaattctggttatagtatgttcttgccattgattttgtaaatgtgtgttgcagagaaggataaaggagactatggagagagctttctgggataatgtcatggaatccatgaaattggagaagccagactatagctgcatctctaaccttatgaaagaagtgagtgacgaactttgccagatggtaccagatagctggaaagtagaaataactgaaactattgatctggacattctctcacaggtttgcctcatctctctggtctcatattacgtgtctgtccttttttatatattttagagggtggttctcatttcatcttttattggtagttgctcaactccggcaccttggatatcgattaccttggaaagatgcttgagtttgcgttggctactctgcggaaactctctgccccagctaatgaccgtgagaatgaaagcacccaccgggatttactcaaggaacttcacaggttgtgtgaagctgaagatgagtctggtaacttccgtgctgttgcaatagtcaaggggatcccgctccattcttgagcacattcaggtctgtatgta

SEQ ID NO: 141509 - DNA, 649 bp, Arabidopsis thaliana landsberg
gtttctctcacgttctcttttttaattttaatttctcgccggaaacaatctcatctcccggcgaacgaaacttccggtgtggtactgcaaacggagaaaaaaataaccaaagaagagagaaactcaaaagctactaagatggaatcagaattccagcaacatcacttccttctccacgatcatcaacaccagagaccaagaaactcaggattgattcgttaccaatcagcaccaagttcgtacttttcgagtttcggtgaatcaatcgaagagtttttagatcgacccacaagtcctgaaactgagcgaatcttatctggctttttacaaaccaccgacacaagcgacaacgttgatagtttccttcaccatacttttaacagtgatggaactgagaagaaacctccggaagttaaaacagaggacgaagatgctgaaattccggtgactgcgacggcgacggcgatggaggttgttgtttccggtgatggtgaaatctcagtgaatcctgaagtatcgattgggtatgtggcttcggtttcgaggaataagagaccaagagagaaagatgatcggactccggtgaataatctagctcgtcataatagttcaccggccggattattttcatccattgatgttgaaacag

SEQ ID NO: 141510 - DNA, 1820 bp, Arabidopsis thaliana landsberg; identical to SEQ ID NO: 4056

SEQ ID NO: 141511 - DNA, 1056 bp, Arabidopsis thaliana landsberg; identical to SEQ ID NO: 25802

SEQ ID NO: 141512 - DNA, 990 bp, Arabidopsis thaliana landsberg
ccattcatcatatcattacccactttcttctcctaaattattctctcttatctctctctctctctttttattttctttctttcttaattcatctaaactctctctgcttttgcttttcgtaattccttacatttcactcaatattaatccccagaatctccgatccacccacaaatttagcaattttctgagatttgatcatttgggtcaccaaaaaatcttgtctttttgatctgggtttaacgccaataatcatatgggaaacattagcagcagcggcggtgaaggtagacgccgtcgacggcgaaaccatacggcggctccaccaccacctcctcctcctccttcttcttctcttcctccaccacctctacctacagaaatccaagctaatcccatcgttttcgctgccgttactccctatcctaatcctaatcctaatccggtttaccagtaccctgcttcttactaccaccatcctcccccgggagccatgcctcttccgccgtacgaccaccacctccaacatcatccaccgcatccttaccacaaccactcttgggctcccgtggcgatggccagatacccttatgctggtcacatgatggctcaaccgactccttacgttgaacaccagaaagccgtcacgattcgtaacgacgttaatctcaagaaggagtctcttaggcttgaacccgacccggataatccgggtcgctttctcgtctcctttacgtttgatgcaaccgtctccggaaggtagatttcactttctccctttcgttgatttcgtgatccatttgagcagataacacgtgaattttgttgtgttcttcctcgtgactatgtaatttggatcttcttattgcaatttgatcaaatcttcttcatgtgtaattgaattaagcttatgttattatgttgggcttgtgcaaaataggattagtgtcattttctttgataaagaatccgcgctctcaaactcccgcg

SEQ ID NO: 141513 - DNA, 1144 bp, Arabidopsis thaliana landsberg
gatgttcatgcccctcagagcttgccttcacctctatctttcagagaagttgttgtaggatggaatcatgctttactactgaccggtaatttctgcgtagatgcattgattaccttccagagctcactgaacctttctcatctgcctgtgggtttgttgaacagtcgatggtgaggtgttcaagcttggtagcactcttaataaacaacctgagaagcaacaactgcaaatagattcctctgaagctctctttgagaaagttccggattttgatggagttaaagttatgcagatagcagcaggagcagagcattctgctgccgtaacaggtaaaaggggaggggcaattctgttatttctttcttctttacactcagctaatataaaacaaacaacctttgaatgtcttgcagagaatggagaagttaagacatggggatggggagaacatggtcagctaggccttggaaataccaatgaccaaaccagtcctgaattggtgagcttaggaagtatagacctgcgaacgaaagagatcaaagtatattgcggaagtggatttacttatgcagtaaaacgaaaacaagagctttcaccaacctcgtcatagccatcttaatgtgtaaaattgtacaatgcaataagccaattgtttacatgcctcttgtgactcttgtcagaggaccacagtggtcgtatagtacaatatacagatcattcttactttcttgttttgtcaagataaaacctagtactactgcttacttgcctaccttaccctacatgaaagtgaaattcctaaagaaaaactaaaaccctactgattcagctcatgctacatcgatggtgggattagttcagaaatattgttgcctttgacctcaagagatgattagcagattgttttcatatccaccactagtaacaatgggtcgaagcgggtcaactttcccctggccatcaactataaactttatctgtaaggaaaatatagcaaggttaagattttagtttgcctcgtgaatgggggaaaaatgttaatagaatgatctaacctcatattttccaggatatagctttagagacaaagagaagactccgttctcagctttcttcatcttcctctggttgtaaaatcatataa

SEQ ID NO: 141514 - DNA, 3115 bp, Arabidopsis thaliana landsberg
atgtttaccaacctgatttttacgcttcacagtggcgaaaagactactacaaaagagtggcctattttgctcgagatcaagggtagagtcagattagatgcatttgagaagtttgttcgagagctcccaaattccaggagtcgtgctgtaatggtatttgtctacacgtttacctctatcattaatgtacatgttttatatacgcattctgtgtttgagcccctgcaaaagctattaactgtgacgtttaaccaagcttaagtagaagcatttaggaaagaagaggagagattaacggccaatactgacttgtgaatgattgagaaaaatacattacatctgtgaatcacaatggagatagatggacttacaaaaatattttcaccagaacaattgcatagcttatgtttcttgaataggcctccatattccaataaaactaagacctgtttgttctcgattctatatgtatgtgatgaactcgtttatccatcatggtacttctgaaaccttgctttcgtgttacaggttatgtgtttcgtctgcaaagaagagtgctcaaagacagaacaagagaacatttccgaggtatgagcgttggtagttaaccaagattctgtgtagatccaaataaacgaaaagatgattaaaaaaacttgagatttatttgaatattaatgatttatttgatcaaaactgaacgcgaatctgtacaaactgaaaacccaaaccgaatttaaattgaaacactcctaaatatctgtagaatgtctaacttggtaacgaaatttgggcatttggttttgttactatacaggtggtggattcctacgctaaagatgggagggtgggttatgcagaaccagcttcaggagttgagctatacctatgcccaacccgtgggagaactgtcgagattctaaacaagattgttccgagaaaccaactcgatttcttgaaatctataaatgatgatggtcttataggtgttgttgtatggagaagaccacaatttaaaaaatcaccactatctaacaactctcacaagaaccaccgtgaaaagggttcttcgttaaccacatataatacttctcgttacagtaacatgctacaggtcaacaatgacgatggtgatgatgtgccacctgggtttggcccaatgaccatggctcgggatgaagatgatgacttgcctgaatttaactatttttccagtggggatgttgtcgtgaaccggacaagccggtctgtatctgtaagagagcttattcaaaaatatggaaaatctgaacctttgaggaaccaaagttataatgataatgacaatgatatactaccagagtggcagcctcaatctaactggactcttggggttactcatgtaaatggtggctcgatggttagaccatgtagtgagtggtggtctcatcaggatggcagaggaggatattaattgttttttgtttcaccttagcaattttgtgtttgttatgcattttctgtagcaggcaacactgctttccaaattttgtgattttctctcaacagtcaccgatatttggcactttattagtaagatgggcttgcgcagcccgctaatatattgctcctttctgtaacaaaaagtacaaaagtaacaaaatccactcctatcgattatactataaaacagaagtgcagagaaaatttcagtcatgatattttttgaccagctcgattcagaaatttggaaagactagcttttttttctctcgggtttcactttttaaaggtcgtgaaaatttgggaatcactgatcaattttgttaatatgatttcctgatttagggtttctctgcatgcctctagaatcagcaagtgtaaagcaattaccatggtgactccgaagcagatcgatttctcttcctgtggtggtggtgataactccgacgataccctctcccatcgagaatctccacggaatccttccccaaagcgtgctgctgcttccttcgcagcagaagcaggcgaagagactatgaagaagaaaaagaagaagaagaagaagaatttgggtccgccgttgatcgtccggatctggaacgaggaagatgagctctctatcttaaaggtattctattcatcttctccgttacactttgatttggttttgcattctgattttctcaaaaccagattcgaaatttctcagggattagttgattacagagctaagacaggattcaatcccaaaattgattgggatgcgttttacagtttcctcggaagttctatcgttgcgaaattctccaaggagcaggttttgagtaagatcaggaagttgaaaaggagatttcatgttcattgggagaaaatcagtgaagggaatgatccagaaatttactaggtctagtgattctgaagcctttgaattttcttcgatgattgggggacaaggtggatttggtaatgatgatggtatggataaggagatggtgaaggagcacgaggtaaacggataatggcgcatgcggaaaacgggactgctcgaatagcacaggagaacgagagtgtggaggagatgttgaaggagcatgaggaaatgttaaatgagaatggtgcagaggagataagagacaacaacgggactgctcgaaaagcacagcagctcgagagcgagagcgaggaggagatgttgaaggagcacgaggaaccgtttcatgtgaatggtgcagagaatataagagacaacaacgggactactcaaatagcacagcagagtgagatcgaggaggagatgttgaaggagcatgaggaagtggctaatactgaacttttaaatgagaatggggcagcgaaaacaacagagactgggactactggtggaaaagagagacatgatgacgatgatgatgatgagttatgcgctgtgcaggatgcatttgaggctataatgtcgcaaggtttaagtggttatcaaaagaagttgcagcttgagaagctgatgaaccttggaactggaaaaagaagagagttgagtgatgaatggaaagcgttatgtgttgaggaaagaagattgaatatcaagaagcttagattttccgccaagcttgcagaggcagctaatgatagttag

SEQ ID NO: 141515 - DNA, 571 bp, Arabidopsis thaliana landsberg
caaaatctctctctttctctgttagtttttttttatttcttctgcttctgggtttttttctccgttaactgtagttgggctagggtcttgagctccgttcctcgataatggcggtttctttgagaagaaagctcgtgtcttccttctattaaaaaagctaactttccccttttttatactaactttcaaaatgggaaatttctgaaaaatgtgttgcaagttaagcttgtgaaagtttcgatttttcgttttggggttcttaaattttaggacaattatttaactttttaaagattataggataattattatccgttgggagtaaattggaagctaagttagtgtatctctttgatctgttgtaaagtttggtgagcaatgaatcgaagttttagggcaaaagagtctctattgctggattcagcagagagacaaaggcaacagcttagggcttctatgatggctgagaaagatgaagagctttctttgtttcttgagatgagacgccgtgagaaagagcaggataatcttcttcttaacaataaccctgatgagtttgaaactccattag

SEQ ID NO: 141516 - DNA, 1383 bp, Arabidopsis thaliana landsberg
ctcagaagaagtagaagaagaagcttctccgatctctcttctctcatctcgatctgtatgtgttcttcttcctctcgtcttctttctctatccagattctcaacaattgttcgtgtttcttcgctgtatctaacgatttagctctcctctctctgtgttcgtcgaacgattcctaatctgaatcatactcagtgaaatcaagcgatctagaagaatctggcaaaatcttagctgacgaatgttgggattgcaacgagaaacatcctcgatgtataagagaacgtcatcgagagattattctccgatgatcgacgtcgaagacagctcaggtacgcacgaaacatgcatcattttgtagaaacgagtttcatttattttaatttatgaaatttcgaatttggcttcaggtcttttagagaatgatgtggacaatgaaatggaaactacaaatccttcatggaagtgttctcttccgcatgttctagtggctacaatttcgtcgcttctatttggttaccatttagggttggtgattgattttagcttttcttcttgaatattgttgtgattacttgtgttgagctattttttttggttgctacagagttgttaatgaacctcttgaaagcatttcgtctgatcttggttttagtggtgatacattagctgaaggtattttcattacttctcctgcttagtatttgtcatggcagtggtcatcacatgtactacttttataagttctgttttcttcttatgtgatttgtttggtggttagtgtatgtcttggtggtgcatttctcggatctttattcagtgggggagttgctgatgggtttggaagacggagagcttttcagatttgtgctttgcctatgattttgggtgcttttgtgaggtaatttgggaatttcctcctatctctggttctttgctagtgttcctttaagctagacttatgaattggtctagatagcactgatacctgcaaatatcaagtgactgttctactatataaatttaccagaagtctcagggttacaacatgttaggtccagattcgattctctgtttcatttctctaagaaagatgtacagtgctgaattatgataaatcttgcagaccaaatcaaataaccaattaagcttaccagtattccaatcccactcactaatgtatattttgatgtggctcatatcaaaatattatgatcctttagcaagagttggcctcgtttctactagtttggtttgttgcttatgctaatatgtgtttctttcagtggagttagcaacagcttagctgtaatgcttttgggaagattcttggttgggactggcatgggtcttggaccacctgtggcagcactctatgtgacagag

SEQ ID NO: 141517 - DNA, 367 bp, Arabidopsis thaliana landsberg
gggaaaacaaaaaataagaaaattgtggctggacgactcagcaattcgtcgtcttctttccatatatcttgtttattatttcacaactaatccacttcgattctgctttttatataaagttgaggtttttgagctattttttctcctaaaggattccgaaaaaaagcttagacctttttgatctgatacgtatctataaatctggaaaggagctgagagtttcaaggggttttaatttcgctgagaaaacgtttaattatctttgtcgagatggattgtggtatggagaattgtaatggtgggatctcaaacggtgacgttttgggtaagcatgagaagctcattatcgatacagacccaggaattg

SEQ ID NO: 141518 - DNA, 623 bp, Arabidopsis thaliana landsberg; identical to SEQ ID NO: 14984

SEQ ID NO: 141519 - DNA, 1751 bp, Arabidopsis thaliana landsberg
atcctgtagtggactcaattagagcggcagtggataggctaacgcggtcaacaaactttctacacttcatggctcagcacgcgcttataatgcaagaagagttaccaagtccacaagatgaggaaggggaagaagaagatgggagatatcacttcatgtctctcttgttgaatttggtcaacacgtttctctatatggtcaatacctatatcattgtccctacagcagatgactattcaatgagcctcggtgcagcagcaacggtgtgtggtgttgtgattggtgctatggctgtagctcagctcttctcttcggtttacttcagtgcctggtccaatagatcctacttcaaaccactcatattcagtagcattgttctcttcattgggaacttgttatatgcattagcttttgacttcaattcaatagcggttctcttgatcgggcggcttttctgtgggtaagtctctttagacttcaaaatgctcatagtatcacttcttgatggattacttatattcttatcatactgtttttttcagattgggatcggcgagagcagtgaaccggagatatataagcgactgtgtaccgttaaagatcaggatgcaagcttctgcgggttttgttagtgcaagtgctctaggaatggcgtgtggtcctgcgcttgctggtctattgcaaattagattcaagatctataaacttacatttaaccaagatacattgcctggttgggttatggctgtagcttggcttatatacttggtctggttagctatatcgtttcgtgagcctgcacgtgagcctgaggagattcctaagacttcagaagagtctaatcactctggtatgtctatgtcctgaatccttctctttggtagatcggtagaagttatcgatatctaattgtagcggtgtgtgtttggtttgagtgatagaagctgttcaagatgtgaatctggagaaaggtatgaaacaaccacttctgcttacatcagaagagatagaagaacagggtgaagatgaatgtgatggaagcgaagaagcttccgaggattctcgtacacctgcaaactccattttagctgcttatagattactgacaccttcagtaaaagtaaatagagactcaaaatttacttctgagaaactgaaaacgtaagtttgcaattttgatgattgatttgattgtttttttcaggttcaactattgatatacttcatgctcaagtatgcaatggagattcttctctctgaatctagtgtcatcaccacttactactttggttggtcaacgagctctgttgcgatcttcttgttttgtctcggtctcacggttcttccagttaacctcgtcgttggaagctatataagcaacatgttcgaagaccggtaagtttctctgttttttttactgatctcttctcctcaaagtttccctaaagtcataaactttattgtgtcacaggcaaatcctgttggtctcggagattatggtctgtgtaggaatacttctgagcttccatgtcgttgttccctacactgtgccacaatacgtttgctcaggactcatcatgtttgtttctgcagaagttcttgaaggttaacaaaagattcatattacataaattgaccaaaacttctatttcttttaatttaaccacaagatcggaatgtttttttgtaggtgtcaatctatcgttactctcgagagtcatgtcgtcgaggctatcgagaggaacttataa

SEQ ID NO: 141520 - DNA, 1617 bp, Arabidopsis thaliana landsberg
ctaatcgttctgtgtattaaaaagtattgatcttttaggtttcaggaatgaatcttggagtgaagaagatggctgtgctttaccattatccttgccatgacggtgttttcgcagctttagctgctcatctctacttctcagcaaagtcaatcccttcactgttcttccccaacacagtctactctccaatcacaatcaaccaacttccacttcaagacatcagtcatctctatcttcttgatttcactggacctccaggtttcgttcaccaagtctctcctaaagtcgacaatgtcgtgatcctcgatcaccataaaaccgctattgatagcttaggtgatgtctctttgacttgcaagaacgttactagtgttttggatatagagagaagtggtgcgactattgcgtttgactattttactcagaagttggttgaagaaagtagaggaagttgcaaagagatgaatgatttcaagagaatgagacgtgttttcgagtatattgaagacgcggatatatggaagtgggagttaccagagagcaaagctttcaacagtggaatattggacttaaagattgaatacgacttcaataagaaccaatctttgtttgatcagctactctcattggatcatgaaagtgtgatcaacagaggaaaacagagtttgtccaagaaacataaactgattcacgaggtgttggaacagtcatatgagattgttcttggaggtgatgaggagtttggacggtgtttagctgtaaatgctgatgagattgcagagcttagaagcgagttagggaatcaattggctgagaagagcaagaatctgagtttacaaggtgttggagctgttgtttacagagttcctgagcttggggatgagaataaactgaaaataagtttgaggagtgttgtggaagaagacacaacaccggtttcacagcgattcggaggtggtggtcataaaaacgcaagctccttcttgttaaactccatggaattcgagcaatggaaggtgaaatagaaactcttctactacattagatgttgtatgaatcaggctatttagctcttgtatggaatggctatttgaccggtttggtttacggcattgccaatgattttgttttagactctgttcgattttgactttatgtaccctttagaatatattcgattttatcaaaatgaagaatcaaaaaagagaaaactgtggacaacactcagccaatgaattggtagctggataaggttgactttgactttgaaaaatttgatctctcttcctccaaagaaggaagagtgttgttattgtcttagtttcatatatatatatatatatatatatatatattttttttttttctttctgcttgttttgctttgatctgtcttttgtagtttgttgtagtatggctgaggcagttgtatcatttggagttgagaagctctgggagcttctgagtcgagaatctgcgcgattgaatggtatagatgagcaagttgatggactaaagcgtcagctgggaaggttacagtcgttgttaaaggatgcagatgataagaagaatgaaacagaaagggtgagaaacttctggaagatgtcaaggcatgtt

SEQ ID NO: 141521 - DNA, 2648 bp, Arabidopsis thaliana landsberg
gaggcaagcaaagagctccacaatcgcgtcttaaagcaagagagctagatgcatcagtgaagcaaagagcagaaccagaagcagaggccatagccatcactcaaaaatcggaattaagaagaatgaggaaaacgttagagaggagtagtagtagtgatgacgaagaagaagaagagcctttggacaggtctcgtgttatccgccatgagaggataataaaaaagatgtgacacacacacacaaaaaaaaaatgcccgtttcgtccttcttattatcttcaacgttagatcgccatttctcttgctttccctttccttgcctacttttacattttctttttaaattccaccaaatattgtcttcttttaaaatttaaaaaagtacacaattcgacaaattcttcacattcctattggccccgattttatcggatgtgacatgctattggtcagtgttttaccgactagttaaaacattaggtggcgctaaaacaaataactaggttaaatggaacatgacgtcatcctttttaagtaatggcctttatggcccaaactttcatctcaaacgcttcagcccactgtttaatgggcctaacgctaaagtgatcatcatatcgaaaattacaagtttgccactttctcgctgcttcatccctctcgttggttcgtcagatttgcgtccaaatccctccctaaaaccttgagtcagactcaagagatacgaaccagagaaatgtggaagtacggtttaagaatcgccgccgggaatgtcaaattgaatcggaggtcttcgattctaaataataccgtttgtcatttctcacctccgacttcagccgccgtgggaacacttttcccgagtttagatcacgttcatcgatgcttttcatcttcgaagagcacgaaatcttcaatcaccaaaacgaagaaatctgaaggcaaaaaatccaaacctaaaggcggcgatcctggtgccgccggagctgaggaaggagagtttggagccgccggtggagacgaccttgaagcgggtcgtgccaagagactagctgatgatgagaagattccgtctctagatgttggtcctaatggaaggcctctctttactcccaaagatactacactatcgcagctgactcacaaggatattggctcctacttcaaattcgagtaatctcaattctctctttcccttatgtttctgtttatctatttttagaattttgtatgaatcattttgtgtgtgttgatgtaatatatataatgtgggaatgatagtgaggcagcactgaaagcagttctgccggaaggattagcttcaggaattgaagatgagtttaatgaatcatggagacctgcattgcttgtcagaaaaagttacttggctctgagggataattttagacgccttgctgatcctcccatgtggccaagtgacagtaaaggtgtgttctttgtttccgttatgttgatttctaagtatcacgattagtgatctcttctatggttaacagttttgtgtgtttttattttcctttgaaacgaaagcagcctaatttgtttgctaagtcttgcttgtcatatgcccttatccggggatctgtaataccataggtatttataatcattgcttcctctttctttctgaaaaggtgtcaaacttcagaagcagattgtcttggatggccctgttaagtgtggaaagagtattgctctggcgatgcttgttcactgggcacgtgacgaaggctggttagttttatatgcaccaaaaggacgtgactggactcacggtggctacttctataagaatccacatacagggttttgggacactcctctacaagctgagaatattctcaaggcaagattccacatgcctcctcttttggaatggaattcttcctatttaacagcatttcttaataaacttaacttctgtaggattttgtcaagttcaatgaatcccgcttaagagagttacggtgcaaaatccatgatcctatcgtgcttggagagggtgcgggtgttggatacttgaaaggagcagatgctatgcctattcccgaggattcaactctgtatgaccttgtgcaaatgggaattaagagcactcatgcagctgttaatgtcgttgtgcgacttagaaaagaactctcagttgtaaaagatgtaccagtgttgattgtaatcgatcaagttagtccccagttttcccctttatgataccatatttcgccttctattattttaaatctctctctttttcactagagctaatgctgcttgtttcttgttgtttacttgtctttcagtataacagttggtttacattcagcgagtttgaagagcccgtaacaccgcgttcttgccgacctatacatgccagagaacttacaacggtgaatttttcttccaaattgatttatgatccagaaaacaaaaatcgcaattaactcaattcttttggcaggtgaatgctttcagaagcatgatgcatgaagatatgatggtgggtgcattctcacattcaacagcagtaggaaaactacgcaaagacttgccagatgttccagttgatgctcgtcagcaattcccacgttattctttggatgaagcagaagctgtctgctattactaccttcg

SEQ ID NO: 141522 - DNA, 1363 bp, Arabidopsis thaliana landsberg
ataaactcatttgtcccatgtcttcttcttcttcaatggacttactcatgtgtctgcttcttctaatctctccggttgttctggccaagtcttcttccaccgtccctgctatctttaccttcggtgactctatttttgacgccggaaacaaccattacaacaaaaactgtaccgctcaggctgattttcctccttatggttcttcctttttccaccgtcctactgggaggttcaccaacggaagaaccgtcgctgacttcatctgtaacaaattacctcccaactcgttaactaaaacatttcttcttctgcaaggaaccttacttttgtctcttttttcttttcttgacgcaataattgcagcggaatttgtaggccttccattacagaaaccattcttggaattgcagattcaaatcttgaatggaacttcaaacttttcaaatggcattaactttgctagtgctggtagtggtctcttgcttgataccaacaaatttatggtaaatatctaccttgaccaaataaaatgtttgtttcttgtgaatcactcattaagtacacatatcaaatgtagggcgtgacaccgatccaaacccagctacagcaattccagacacttgtagagcaaaaccttatcgaaaaatctataatccaagagtctctcttcttattagaaactggttctaacgacatcttcaactacttcctcccattccgagctcctacactttctccagacgcttatgtgaacgcaatgttagaccaagtgaacaaaacgattgatcagatctacaaactaggcgcacgccgcatcgctttcttctccttaggtcctgtaggttgtgtccctgcaagagccatgcttcctaatgccccaaccaataaatgctttggtaagatgaatgttatggccaagatgtataataaaagacttgaagatatagtgaacataatccccactaagtaccctggagccattgcggtgtttggagctgtatatggtatcactcacagatttcaaacctaccctgcccgttacggtaaactcaatatagttaattaacttccatctttgagatctttttcaaatgtgtctatgagaaagctgaatcatgtttttggtgaagggttttcggatgtttcaaacgcgtgttgtgggaacggtacactgggaggattgatgcagtgtggaagagaaggatacaagatttgcaataacccaaatgagtttctgttttgggatttttatcatcccacagaacacacttaccgtctcatgtcaaaagctttatggaatggaaacaaaaaccatatcagaccatttaatctcatggctcttgccaccaacaagatcacattt

SEQ ID NO: 141523 - DNA, 716 bp, Arabidopsis thaliana landsberg; identical to SEQ ID NO: 11610

SEQ ID NO: 141524 - DNA, 575 bp, Arabidopsis thaliana landsberg
agagtgaatattagagcagtgaagcaatggtgcaagcagattttaaaagggcttctttatttacatagtcgttctccaccaattatacatagagatctcaaatgtgataacattttcatcaatggaaaccaaggtgaagtcaagatcggtgaccttggactcgctgcgattcttcgtaaatcacatgccgttcgttgcgttggtacttcaaaaccttcacatcattggaactttattgctttaattatgttttttacaactttggacctacctttactatgtttatgtgttgttaaaggaacccctgagtttatggctccagaagtgtatgatgaggaatataatgagttggttgatgtatatgcttttggcatgtgtgtgttggagatggttacttttgattatccttacagtgaatgtactcacccggcacaaatctacaagaaagttacctcggtaaattatcttggacttgcttgttcttgaagctaatttgaggtcaagtcttgttttacttacattcttcatttcaggggaaaaagcctgaagctttttacttagtgaaggatcctgag

SEQ ID NO: 141525 - DNA, 378 bp, Arabidopsis thaliana landsberg
ctctctctgctcccaaattcagaaaaaaaggaacgatttttatttccggtgaatgagaattttctctcgaatttgatcgatcacatatttcatctgtgtgttttcattttgaggatgccagcaacggaatatcaaagatcattcgggaggtcttttctgaatttacggcgagacacggcggtgaactcggttgagtcaacgacggttacccccgagttgactcagatggaagcagagcttgtttcgtttcagagaaaagttgctgagaggtttatcgatctcaatgcgtctagttgtgaagatctactgtctctcgaatgggttgggaagcttcttgattcgtttctatcttgtcaagaagagtttcgttccatagtc

SEQ ID NO: 141526 - DNA, 475 bp, Arabidopsis thaliana landsberg
tttcagggtaagatcttatatgaaatgatttgctaagaggactataagtctcggtgatcggggaattcgatatggaggagagtgaaacaaaggggagaatcagtcaagaaactgataaggcttgtgtttcagttgagagaattgggtctactttactctcatcatttgtgaagaaaggtaaagaagtatcaaataagagaaattctaagcagaataagcgaaaagcggaagaagaactctgttcgaaatcaagaaccaagaagtattctcggggatgggtccgttgtgaggaaatggaggaggagaaggttaagaaaacaagaaagaggaaaagtaagagacagcaaaaggataataaggttgaggttgatgattctttaaggttgcaaaggaggacaaggtatttgctcattaagatgaagatgcagcagaatcttatcgatgcatacgcaactgaaggttggaaaggtcagag

SEQ ID NO: 141527 - DNA, 1243 bp, Arabidopsis thaliana landsberg
attagatccgaccagattctctatttggagacagacattactcggatctttatttcattttgtatgattctttattgtagattttgagatcaggtagtgtggatttgagatcaggtacatttacttgcaaggtgagttccagatctggttttggttatttcatttctggagttttatacgtttttgcaattttggagattttgttgattttagattaggatgatcattgcattttctttctctttcttgtttgatttcattggttaatgattgtggattactactatttaatctttttataaaaaaatccaaatccttagctcatgtacttataaaagaatgattttatgtttgatagtgatctatacatagttataaacaaatggctgatccattgaacttagtatgatgaatcctgttacaaagagcttatgtatctctttaatgtctaaaagctctagatagaaccaaaatatgaaaattgcaatctttagtaatgaaagtgtgtgttgtgttatagtcttgtgttattgcttgaccataatattttgtgattgttcggactaatgcaggtgttttgaattttggttgtggacataatgggaaagcctgcaaggtggttaaaaagtgtactacttggaaagaaaccatctaaatctagtggttctaaagataaggaggtaacacacttccgcacaatgttgtatgataaaacaaatgaatttcaagcttgcatagttaaatttctcaggttgattacagtagtggttctcgtagaggaccttgactgcttgacatctcttttactagttttttcactttagacattgcaaatttcccactaattttgtgtcgtctactattgtctatggtgtcactttctgatttcatttccctttgttgtctgtttctaattgttcctgacaacaattctctatggtttatcacgtgcagagaattgtgaatggaaaagaagtagtggttatatcaaagattgaagaatccgatgttgtttcggatcttccatcaattggaaatgcagcagtctataccagtggtattgtagagacgcagaatctaaaacatgaagatgtttcggacgacgagatacaagtttctgaggtccaaccaacagattctcaagatgttgcttctgttcctgatgattcgctatccgaatcagagatgattcatcaagagatcgcagcagttaccgtgcaagctgcgtatagaggaattcttg

SEQ ID NO: 141528 - DNA, 1988 bp, Arabidopsis thaliana landsberg
cgcgaacagtcttgttgggttttgggttttgagagacagagaggttttggcttccgggtcgttagtgtttgatcatcttcgtatctcagaagggtgaactttgttgttttggcttttgcgtactgttgaatcagcttttccaggtttggtttcgttttctggtttttgattagagaacttaaattaaggacctttaatcgtttatggtgtgcttccaattctttgttaacagttccgtgaactcaattcatagagctagtctgattatatcttaggttttagtgaattagtctgaatattaatcagctgtgaattgaatgaaacagatgcctcgaagaccatcatcaggaagaagagtgttaaagcatcagcctttaacattttcaccgtttatgcggttactttcctttgcttcaatggctaggcgtgatttgtctcatcctgaagattgtcaatgttctgatgaagatatatcttttggtgagtaaaccacttagattgattgagacttttcttttcacaaacattgtaattatagtgatgtatcattctcattttgtagatgaaaagcaaaagatccctaatttaccaagaaaagggaaagaagaacaagtctcggactcgtctgatgaagaagattctcaggtaagggattaatttactcttcttctgttggttttgtagatgaaaaagatcataaattcgtcttttattcaatgcttgatctttgtaggaagatgtccaagcagactttgagttctttgatcctaaacctacagactttcatggtgttaagatcctgttacaaaactatctcgatgacaaggagtgggatttgagcagttttgttgattgcatattggagcaaacaactgtaggaactgttgtgaaagtagctgatgatgaggatgagtcagtatttgctcttgtcactgctcttaacatggcaagagataggcaagtcactagaaaactcactcgatacatgctttgttcttacaggaaacttggtgtttgattttgttacgcttgttgaagtaattctaatcatagaatgtgtgtgttggcatttgttcaggacaacaagtgttttagagagttaaaagagtttcttcgtaaagtttgttctgaaaagaatatagcgaataatctagaaatgctcttagagaaaaaggcacaagatgttggtttattggtatctcaaagagtgatgaatcttcctccacaacttcttcctccactttatgatggattgttcgatgaagtctcatgggcaatcgaagatgaggttcgatcttgtaaactaaacttatatgtaactttttatgaacaatacaaatataacagttttaaagtttttttgtttgttcatatagcctacagaaaagcttcgaagatcattccgttttaagtcatatcttctagttaccaagatttacaaggtaatttttgtgttatgctaaggttttatattgtctagcctttttgttttaacaatatgatatgtattcttggttatatagctgaagaatcctaagcagagaaaacctcgacatggtgaagaagacattgaagacacagtatttcttaagcctgaagatgaactctttctcgaggtaacttattctcacatatattgactcgactacccgtgtgaaatagataaacataatctctgaacatatgttggaaaaactgcatttgcagcttagctcttggtccttcacattccctatgcgctcacagctcgttacttcccaagaagtaagtttatctctccggcttatacacattgtttttattttattgtttctggcttgtcatgtttggtttttattggctttgctcgcagatgaagaattatcagctgatgggtttagtgatggccgtggaagcaaacaagattcctaaattcagacagatgttgaactctctcattgattaacaatgatgaaacatcttttcttaaagattcaattaacgggtta

SEQ ID NO: 141529 - DNA, 1954 bp, Arabidopsis thaliana landsberg
aactctgtaaaccaaaaactgaaaaatagagacaaaaagtctcctatcgacgacgaatacgaaagatctctctcttcagaagaatttaacgaaactcaactgtttcgaattcgatttgaatctcgacccgttacttagcaggaagaagatgaagcagcgcttcaccttcttcttcgttatcttctcttaataatccccaatggcttcatcatcatcccaacgacgctgcgtttttggtaactcactcttcttcttcttcttccattatcactctgtgaattctcttcgattttggattcaattggcttaaagttttcgactttcttcgtctattttagttgggaacattccttagggcgggggtgatgaacaacttagagaaatttgtggagaagttggacctgttgtctcgtttaggtcagttttatcgttcaattatgatttagggttttgataaaggaaacacttttcttcaaacaaacgaaacacagaagcctaaaaaactttgctttattggattcagattagttacggatagagaaactggtaaaccaaaaggctacggattttgtgagtataaagacgaagaaacagcattaagtgctcgtcgtaatcttcagagttatgaaatcaatggtcgtcaattaagagttgattttgctgagaatgacaaaggcactgacaaaacccgtgatcaggttactcctctctctctttcttctttcaatgttggatggtttttaactgttgtcaagaagttataactaaagatggtaaatttgggttttcagagtcaaggaggacctggtttgccatctactactactggtatgttttgttttcagtctctgatactttactgactgcaattgtgtttggatgaacacaaacttatcgttgttcttctttcttttggctgtttagtgacagagtctcaaaagcagattggagggccagtagattcaaatatgcatcagccagttggtctccaccttgctacaacagctgcatctgttatagcgggtgcgctaggtggtcctcaggtcggttcgcagtttacgcaaagtaatctgcaggttccagctagtgatcccctggctcttcatctagccaagatgtcaagaagtcagcttactgaaattatatcgtccattaaggtgtgaatcttgatatcgttttttctttcttttttttgggtgcattgttatactattggaagcgagttgtgtgatgtgattgtgttctctcaatgtcagttaatggctacacaaaataaggaacatgctagacagttgttggtttcaagacctcagttgctaaaagctgttttcctggtactcactcatcctcttattttgcaaatcatttttcattattgacaaatatttcttatgatacttacaccatatttgaacctttactttgtctacccttgtaggcgcaggtaatgcttgggattgtgagtccgcaagtggtaagttttccatcttatcgaacagttttgtgctacttccttctttatctatctgtcatgtcttaagaggactattgccattcttgaattgtgcagttacagtcgccaaatattgttcaggccccaagtcatatgacagggtcttcaattcaagatgcgcaattatctggtcaaaaccttttaccgccactggcacaaaggtcacagcagctaagtcgtgctccccatagtcagtatcctgtccagcaatcttctaaacaaccttttagtcagattccacaactagtagcacaaccaggtccttcttctgtgaatcctcctcctagatcccaagttaaagtcgaaaacgctccattccaacgccagcaagtggttccagcttccaccaacataggttatagtagtcagaattcagttccgaataatgctatccagccatttcaagtaccccaccaagcattaccaaattctgtgatgcag

SEQ ID NO: 141530 - DNA, 652 bp, Arabidopsis thaliana landsberg
atgaacaacaccaaaatggaaaacaaaagccatagcaaccaccaccggtaccatcatctatcatcccggagccacgagcaaaaccagcgtggcctaatttcgataaatgccataatcatcattggcatctccattatctccatattcataatccttgcaattctcctaataatcattttacttcatcgacttaaatccgcaagagtcaaagcacaagaattatcttgcaaagaaagcttcaacaacatgaacaatggtggagcttccaccaactacagctacacttctagccctggtaaaacacctaaacattcattccataattttgtaaagaatcataagtttttaattcaaaatcaatcagcaatgagtggagattctcatatctttatatcagtattgaattacttccacatccaatgtgtatttcttattcgaactttaatgttcttgttagatgacatcaagagagattgtctatactcaagaaacccaacatcgttcagacaattacccccacagacaaaaagttgtaggagaagccgagccgaaggagtagaagtgtacacatacaaggaattagagattgcaacaaataatttcagcgaggagaagaaaatcggaaatggagatgtgtacaaaggagtactaa

SEQ ID NO: 141531 - DNA, 1299 bp, Arabidopsis thaliana landsberg
tggaagttctgtgggtgacattccatctgattctcttctcagtccattggcgtctgattgtgaaaatgggaaccgaacaccagtaaacatatcttcgaggtgagtttgaattgtgattgttactattgtgtattgtgctctctctctctattgctctctatttctaaacatgttatatcctactctttatgtatagggatcagtcaatgcatagtaacaaaaactcagctgagatgtttaagccagtccctaataaaaataggattctgtctgcatctcctaggcggagacctctgggaactcatgtgaagaatctacaaatcccccaacgagatttagtgctatgcagtgctccagatagtttgttgtctagtccttccaggagtccaatgagatcctttattccagatcaagtctcaaaccatgggttgttgattagtaaaccatattcagatgtttccttgcttggatctggacagtgctcaagccccggttcaggttacaactcaggtaacaattccattggtggagatatggctactcagctgttttggcctcaaagcaggtgtagccctgaatgttcccctgtgcctagtccaagaatgacaagccctggtcctagctctagaatacagagtggtgctgttacacctcttcatcctcgagctggagggtcaactactgggtctcctactagaagacttgatgataacagacagcaaagccatcgtctgcctctcccgccgttattaatctctaatacttgtccgttttcacccacatattcagcagcgacatctccgtctgtcccccgaagtccggcaagggcagaggctacggttagccctggatcgcgatggaaaaaagggagattgctggggatgggaagttttggacatgtgtatcttggctttaacaggttcgtaactaaacaagtctggttttagtttcaaagatgttctgattgctcattgtatcgcattttatactggctatggcctatgggaagaatatcactgctgaatccatcccatactggtagaaattattgttccatatgttggttaagtttctcaggggcaaatctcagttttcatggttacaaattacaataaactgatttgttctcttcacaaaatattgaataggagaactcaaatgttatatttctatgtcacccctggtttgatcggttatgttttcttcctcagtgaaagtggggagatgtgtgccatgaaagaggttactctatgctcagatgatcctaagtcaagggagagtgcacaacaattggggcaa

SEQ ID NO: 141532 - DNA, 250 bp, Arabidopsis thaliana landsberg
ctcgtcgtcttctctacctgaatcagtgcgtctggctcaggtgacaatgcaaggaggatcatcgggtattggatacggtttgaagtatcaggtgattcatcatcttcatatcttccttaattttccttaggaagattctttaaagacggaattcattttgtttcagtctagatgtatatcggatgtgaaagccgatacggattacacaagctttctcactggaactcttagtttaaaagaagaaaatgag

SEQ ID NO: 141533 - DNA, 471 bp, Arabidopsis thaliana landsberg
cctagaagtcactaagtcgattcaaaatggttgcgagaagtgaggaaattgtgatagtggaagaagatacgactgcgaaatgtttgatgttgttatcaagagtcggagaatgcggcggcggctgcgggggagatgaacgtgttttccgatgcaagacttgtcttaaagagttctcatcgtttcaagctttgggaggtcatcgtgcaagccacaagaaacttatcaacagtgacaatccatcacttcttggatccttgtccaacaagaaaactaaaacgtctcatccttgtccgatatgtggagtgaagtttccgatgggacaagctcttggtggtcacatgaggagacataggaacgagaaagtctcaggctcgttggttacacgttcttttctaccggagacgacgacggtgacggctttgaagaaatttagtagtgggaagagagtggcttgttggattggactagatc

SEQ ID NO: 141534 - DNA, 328 bp, Arabidopsis thaliana landsberg
atctcctttcggtgaacatgagatcatatgtcctcccagcttctaaccagctccagctccagctcggtcctcactcttacttcaatccccaggatattctggttcttaaacaaaattcaaatacataatcttatagggtctcatttagcttattggaagtaatctcaagcctcaaggatataaatattattgtaggaggagctgagagatgcaccgtctaacatgaatatgatgatgatgaatcaacatcctactatgaatgacataccatctttcatggatcttcatcaacaacatgagattcctaaagcaccacccgttaaccgcc

SEQ ID NO: 141535 - DNA, 202 bp, Arabidopsis thaliana landsberg
cgcaaaccctaggtcatggctgggatgtacaatcaagacggcggcggaggtgcgcctattccgtcgtacggtggtgatggatacggcggagggggaggttatggaggtggtgatgctggatatggtggacgcggtgcctctggcggaggtagttacggcggacgcggtggttacggtggaggccgtggtagaggaaatcgag

SEQ ID NO: 141536 - DNA, 906 bp, Arabidopsis thaliana landsberg; identical to SEQ ID NO: 12259

SEQ ID NO: 141537 - DNA, 788 bp, Arabidopsis thaliana landsberg
tctaatgtctctcgttacagagcgttttgtgtttcttcaagctctcctccagagggaacagtctccgtagtcgatttccatgagaaagattggtcctttctcgaatctatggaaattgactccactgaacatactcagaagattgagaggatcataaaggctggagaattatccgaatcttcgagggttttggtttcaattagctccgaaacattcgttgatcgtttggtagaatcttcaccttctcagcttttgctcattgtccatgactccctttttacgttagcctgtatcaaagagaagtacgacaaagtcaaatgttggcaaggagaaatgatctatgtcccggagaaatggtctccattagacgctgtgtttctctactttcttccagctttgccttttgacctcgacgaactgttcaagacactctctcaacgttgttcctcaggtactatgttctgacttttcttcactcactatgtctcaggctaacacttgttggagtcttagttgctaacactagtctaatgcttgggacaggtgcaagagtagtaatcagtcacccgcaaggtacactaggcttggagcagcaaaggaaagagttttcagatgtggtcgtctctgatttacctgatgagtccacattgagtaatgttgctgagaagcattcatttgagctaacccagtttgttgatgagcaaggcctttatctcgctgttctgaaatcctctaaacaatagtagattatgtcaagagaacatctgttgtatgagattatatttttg

SEQ ID NO: 141538 - DNA, 729 bp, Arabidopsis thaliana landsberg
caataccgaacctatcttcgatatctctagtctgtttttgtcgtaaatccattgatcatgccgcctggtgccaaaaagagaaaggctttgaagaagaagcagcaggagcaggaagccactggagtcgctaccaacaacaaaggcttcaatggtcatggtactggctttgttactgtttttggttttcgcttaaaatttggagttgctggatcgatatggattttggtgattctagttgctgtttacaggattttatgtctcaaatgggtttctggtgttaggtaaagtttcttcttttggtattatacaaaacgaagtgaatgatgctttggtcctactttatagggaatttttggtgggtggggatgaatctgatggggtattgagatttagccaatctctgtttaattattgttccaaagtttgtgactttactctaatcacatcatgtctgagttgtctctgtgttgcttctggatacttgcaagttgcagaagtgctggatgttttttcctatcttttttagtaatcctctttgaatctgaagagtaagtctattattgccctggatctataagtttactgaatatctcaggacatgatgaacatggaagccaagatgagagagacagtgatggcaatttgagttcccctggatctcaaggaaatgaagaatttgggactagagatccatcacctcctccattatctagtttagggaaagacatt

SEQ ID NO: 141539 - DNA, 2602 bp, Arabidopsis thaliana landsberg
atgaatgggtcaaatgagacggtggagagaagaatcgaactccgacgaccgttggtggacacggagaagaaacttccgttagaagtcgggctcgagagcgtgttaacggagagtagcttgccttaccggaggcgcgtgtacttaggcatgtgcatagagttaaaactacttctccggttagcacttccggctatacttgtctatttaatcaacggtggaatgggtatttccgctcgtatcttcgccggacatctaggcagtacacaactagccgcggcatccatcggaaacagcagcttcagcctcgtttatgccctcatggtacgtttaccttacatatgtatggagacttggggtactatgggatcaccaaaataattcataaaagtttttaaactaagactgtgattggttaacccaattaactatagtaaatgaatttggtggaaaaacgttttttttcctttttttttttgttctcaccaagtgaaatctatgcatggtaattagatttgcataaaaagaaaattcacaatttggagtgcgtaagagtatatacatataatctttcatttccattcatacatagcttgtaattttttttttaataaactataatttttttagtgtccgagaagtttttaaaaaaaaaaatgtaaaaacaatttcaacaaataaatatatttatatagtatatgcaaccatagtgtcccagaaattatagcatcatttacttttcttgtcttctgaaaattcttgtctgcttcggaaaagtacgtatagtcaaaaacttattattctctttctcagaataagtcaaagaaaacaaaaaattagctttttataatgtttatttcttccttttttagttgggcatgggtagtgcggtcgagacactatgtggacaagcgtatggtgcccaccggtacgagatgcttgggatctatctccaaagagcaaccattgtccttgctctagttggctttcccatgacaatactatacactttttcgtacccgattcttctcctcttaggcgagcctaaaacggtatcatacatgggatctttatacatcgccggactcatccctcaaatcttcgcttacgccgtctacttcacggcccaaaagttcctccaggcccaaagcgtagtggccccgagtgcgtacatctcagccgccgccctcgtcctccagatatcgctgacgtggatcaccgtttacgcaatgggccaaggcctcatgggtatagcttatgttcttactatctcttggtggttcatagttggagcccaaacgttttacgttataactagcgtaaggtttaaagacacttggactggttttagctggaaatcgttacatggtctttggagcttctttaaactgtctgctggctctgcggtcatgatctgtttggaactgtggtatacacagattctggttcttctcgctggtttgcttaaagatcctgcactctctctagattctctatctatctggtaagttcattaactaattacattttcatatactttttcagtgtttggatacacttgtatttaaacaaagattgaaacaagtattgttcttcgatgtatcatttgtttattttgtttggcagtatgtcaatttcagcattatcattcatggtctccgttggctttaatgctgctgtaaggttagtatttatttcttaatcaataccagattattaattaaacgtacgtttactgaaaattggaaaataaaataaaataaaacgtgacagtgtacgtacaagtaatgagcttggagcaggaaatccgaaatcggcgttattctctacatggacagcgacttttgtatccttcgtgatctccgtcgtagaggcacttgtcgtgattgcgtcacgtgacaacgtcagctacattttcacgtcggatgctgacgtggctaaggccgtctctgacctatgtccttttctcgccgtcaccattattcttaacggaatccaacctgtcttgtccggtatacatgcaaataatttagctaaaaccggataaaccggagtatattaacggaaccggatgtgacaaatttcggtatgtttttgtttgtaggagtggcagtgggatgtggatggcagacatacgtggcatatgtgaatattggttgttactatatagttggtattccaattggatgtattctcggcttcactttcaattttcaagcaaaggttcgcttccaaatattttctgtatgatatatgctttattactatctacagtatttaataagaagacttgtatgtgaatttggttacaggggatatggaccgggatgattggaggcaccctcatgcaaacactaatcttactttacgtcacgtatcaagcagattgggataaagaggtaatgttacatgaaattaagtcacatcatattaaaatttttacaatcctctatcaaaagttaaaaatagtttcaaaattattaagatgattaccatatgatgattcaggttgaaaaagcgagaaagcgattggatatgtgggacgacaaagagcctctccagaattaataattttgttatgaagtaaatttgtttttgaaagaaa

SEQ ID NO: 141540 - DNA, 404 bp, Arabidopsis thaliana landsberg
gcaagcgctccatgttcaacgtttagctgagcgaaccgcagtgaagagactaaaggctctagcatacataaaaagacagatcaggaatccgctatctgggatcatgtttacaaggaaaatgatagagggtactgaattaggaccagagcaaagacggattttgcaaactagcgcgttatgtcagaagcaactaagcaagatcctcgatgattcggatcttgaaagcatcattgaagggtatgctagaatgaaagtccatttaaaatatggtttatctgtgttcttatgttggaatttgactgtgcagatgcttggatttggaaatgaaagaattcaccttaaatgaagtgttgactgcttccacaagtcaagtaatgataagagtaacggaaagagtgttcgga

SEQ ID NO: 141541 - DNA, 803 bp, Arabidopsis thaliana landsberg
attatcgttctgagaactcggaagccatccaaacgtttggggtaacacccatcttgttgttggagctggtttaagcgctgcagttggtgtgactggacgagcagttgaagcagatatccgtgcaggtagcggtggatatgctgcttgctacacctacagctgcagcaaaggtaaccatatctgattcatgtgtctctagccaaaatagctttcagtaggttaatttttggttaaggtttcttagacttcctttccatgtctaaactgtgagatttcatgggccactctaaatctgcaaccattctaatatttcaggtgcatttgtcggatgctcgcttgaaggaagcatattcacgacacgtacaagtgagaactcacggttctatgggagtcagtccctagctgcgtccgacatactccttggctctttgccaagaccacctgctgctgctgcactctaccgtgcgcttggcgatctgtatcagaagatgggaaggtgattttaacagttgaagggaatttgtaattctgactccaatgatggaaaagttcttgacctggaaattttcttgttggtgtgcagtgaaactgttcggtctccagcaatttctccattgtctgaagactaaacttgtggaattggcttcatgtctttggaagaataacaacagtattcttgtatagattcatgcaattcttgaatgtacatagtttggtagtttgtggtttgtaaataaacatacattattatctgaagttataaattgtttcaaacttaaacccctgcatttttttctattttt

SEQ ID NO: 141542 - DNA, 453 bp, Arabidopsis thaliana landsberg
aaccaataacactttttctctcttctcagtccttcaatggcggactacgacgacgaaattgaccagaataaccaacctttcatccccaaagaaactgctctacaagcactaaactcaataatccagctccacttcgagaaaaccttagagaagaaacgagccattgaccaccagaagaagaagctccacaagctatttcagctcttcttcatcttcctcgccgtaatcttcttctccctctctcaaccctcaggtcgtcttcactgccgccattgctgggcacccatctgcctcctatccttctctcacctcttcttctacgtctccgtcgctcaaactctccgttgcatcaacggcttcaagtaccagcgtcgctgccataagctcactctcggtctcgccactcacaagctccgtttcatcaagtcaagaatcgctgccggagatttcctc

SEQ ID NO: 141543 - DNA, 4300 bp, Arabidopsis thaliana landsberg
tttcttgcttgaagatggtaaccaatctggttttgagtttcttagtttgaactatgtaaaggtattaacccttgagtggtatttgaaagacttctgttaagctggggcagtttttcagtctgtggaaattatatgttgtcaaatacaatctcatgttgtttcaccgttttttgtaggattaccaacaaaaacacccagaagtgactgtgcttgatcctccaggatcaatacagcgtatatataatcgacaatcgatgcttcagggtatggcagatttgaaactgtcagattgcagtggtaacaatcctcaataagttcttttgacatcgaaatttaagaccttttctaagtttctctagaagtgattttttgcttttggtaaatatttgtaggcagcctttttgttccaaagcaaatggttgtcttgaaagattcagcagctagtgctgatgcagttgtggaagctggtctcaaatttccactaggtacagttgaacatattatcttggcattgaatattcttgtatgtataaatgatgatcatgaatttaaacttgtttatttcaaatttgtcccagttgcaaagccgctctggatcgatgggactgcaaagtcacatcaattgtacttggcttatgacaggcgctcgcttgcagagcttgatccgcctttagtccttcaagagtttgttaatcatggtattggttaatatgacacttcaatacgcagttgtcccatgtatatgtgttttcaaaaaattcaatgcatcttttttggtgcctgaaggtggagttatgttcaaggtatttgtggtgggtgatgttataaaagtcatgagacggttttctctaccaaatgtgagtaattgtgaaaaagccaaagttgatggcgtcttccaattcccaagggtttcatcagctgctgcttcagctgataacgcagatttggaccctcgtgttgctgagctacctccaaagcctttcctcgaggcgcttgtgaaagagctaagaagcttattggtatagttttagctgcctttctccacattttactttacaaatccggttttgattatcataatttctaactgcttttctattattagggacttcggcttttcaacatagacatgatcagggaacatgggagcaaaaacgtgttttatgttattgacatcaactattttcctggcaagtttttcccttatttttgaagcttttgtgtagttctctcatggaagcagagaagtgaacttttctctgtttgatatcgatttgcaggttacggaaaactgccagactacgagcaagtctttgtagatttcttccaaaatctggcgcaggtcaaatataagaagagacaacattgtaaatgaaagaaaatggcggcagtttttagatggtctactaagaagcgacaaataataaaatgtctaattatggatttgtacagaatttagctctcccttttggaagcagtatcagataaacaagttttgattactgattttgaattttcagtgaaataaacgtctcttcatccaaagttgaccaaacgatatctgaattcttattttgaccatagcggttcgttatataaaccgaatcaatcttaaccggttcgatcgaattgatttcgtcgtctctaaaaacgcaatcccttaaaccttttctctctttatctaactctcgtcccacccaacaatgtctctcctcctacgaactttgcctctccgacctactcgtttcctctccgccacagccatatccatctctaacgctactaatttcttcgtcgtacccaaacggacaaacccacttcccggaactcgaagaaccttctccagttcccctgttgcagctgcctccggcgatgtagtagtgaagccggttccatctcctccgtcggttctccggtgggtgtcacggacagagctatgcggcgagttatcagtcaatgatgttggtaaaagagtccacctttgcggatgggtcgcccttcaccgagttcatggtggcctcactttccttaatcttagagatcataccggcattgtccaggtttaaggtttcacctaatgcttttttgcattatatagtcgtgaagcataatgtttcagtagattagtatttagaagtttcgtctcagcaatgaactttctactcagtgattggtgttgaatctgaataagaaacaattgagtagagtttaattcaatccgattcctggattttacttgagtttctctttagttgcttctttggttctagatgattatccttgattcgaccattttcaattctttcttacccaatttgtgtaacgcaaagatggatatttggggactgtatgattcgtttatgtttgaaagttttataatcttaggttaggacgcttccggatgagtttcctgaggcacatggcttgatcaatgacatgaggcttgagtacgttgttttggtggaaggtactgtgcgtagtaggccaaatgagtccgtcaacaagaaaatgaaaacgggattcgtcgaggtatgccttctcattcagctcagctgcattttatatatcctatatgtaacgttgatgtgtgtagtatgttgcattaggtagttgcagagcatgttgaaatattgaatcctgtgaggacaaagcttcccttcttagttactactgcagacgagaacaaagatttgattaaagaagaaattcgcttaaggtgaaatattagatatatgattgatcttgcgtgggtggtttatcgtatcgaatctccaaatgctaactcatgttttggatttggcttgtatgatgttagatttcgatgtcttgatctgcgccgtcagcaaatgaagaataatatagttcttcgccataatgtggtgaagctgattaggagatacctagaagacagacatggttttattgaggtgtgttcctactctatttgaaatctaatttatatttttcagttttggccatttcccagtttttcatgttggtctgttgtttatgtcagattgaaactccaatactctctagatctactccagaaggcgcgcgagattatctggttccgtcaagaattcaggtgccaatacttttttcatcctaatgtatttcccaacaaagaattaagtttccctgaagtataagcttatatcatagtttataggtctgattctatctaattttctttcgaagtcaggaacattctatgctttgccacaaagtccacagctcttcaagcagatgttaatggtctctggttttgacaaatattaccagatagccaggtatatatatgatctttggcacttaagtttggttcagcataagcctccctgacataaatggctcatcaccttcatttaccaccaaaagcaggactcctgatgcaaatgatttctctctcatgcgtttgttttttctactatcagatgttttagagatgaagatctaagagctgataggcagcctgaatttactcagcttgatatggaaatggctttcatgcctatggaggacatgctgaagctgaatgaagatcttatccgtaaggttagagtactgttgaaactgttttttatgactttgtatcttctgtgacaatgacgcatgtggctcaatgttgtacaaacttgttgcttcttgatatgtttctagtaattcctttatgtcctgaaattccaaagctcattttgtatgtggatctcttctctttaaattagtaatgtgctgtcagcaattttgattgcttgaccttcttgtgcaggtgttttcagagatcaaaggtatccagctacctgatccattcccaaggcttacatatgctgatgcaatggatcgttatggatccgatagacctgatacaagatttgatctcgagttgaaagatgtaatattatccacatcttggtttttagctaatgttacaaagaagcatctatatgtctctttgcctgcttttttttgtgcatgggaataattgcttatgctggattttttcttcaaccaggaagagcattttagagctgcttcccattttctgtgctgaagtctattttaaagttaaaatctcaagcttctgaaattgcaggtttcaaacgttttcacagaatcgtccttcagggtttttacagaggcccttgaaagtggtggaatcattaaggtattgtgtgtgcctttgggtgctaaaaagtattcaaactcagctctcaaaaaaggagatatttacaatgaagcaatgaaatccggagcaaagggtctgcctttcttgaaggtcttggataatggtaaatag

SEQ ID NO: 141544 - DNA, 5352 bp, Arabidopsis thaliana landsberg
gtcgtcgagattgatcggatccggatcattagacgtcgtctctcttcctccaagaaagaagggatgagaggtgaagatagtgacctttgcttcgattgtctcgatcaacgtatcaactctgacttctccgatcagatcgtcttctcttacggtgtctccgattcgccgctaccttttggatcctccgccgtcgttaaggtggatttttcaattgtcattatttgaattgtagatttcaatggtggaagtattggaatttaagctgctttaaatggcgtttgtgtaggtttctgattctagcgaggaattttctgcttcttgttcttcttgtgaatccacttcttctcagttcattttggagtatctccggaaggacgaacatgggtgcttagctaaatacgtgtacgttcttgtttatgttctccttaggctaacgatttgattctatcaatcattgtggttgagcaaattattctttttctgcagcgacaaatttgttgttaaggatcgagagggtaattcaaacgatgctgttgaatctgatgagtgtttggattgttcaaccagtggctctcaagctactgaagatgatgacacagagaatattacttgtggaagtgttacttgcgagcattcaggtagtttttcatgttggagaactgtagctgcacttttaccaatcgctcagattagaaaatgttctgcatctgaacttcaaaagcttgcttctagtttccattatgagtgtccagaagatcaaattttagcctctttacatcgcctgattgatggaaagtcatctggacaagcaacccatagtttcctttgtcttcttcttgggttaccgttgttagaggaaaaaagcaagcttcgatgtctcaggcatccaaatctatcaccggtcctaggacttctgacatcatctgattgtttggtctcagtgctccccaaagccccttatacattggaaaatattctctactacagccccagtgctataaagtcagaatggcatagaaattttataatatatcagctattgtctgcgttagctcacttgcatgggttgaaggttttcacatggggacattcgtccgtcaaacatattgttgtctgattcattatggagttggttaacgatctatagcaaacctgatttaggttctgtagatgccaattcatctgcttcaagaagaaggtggtgtgttgagggttgttattcttatggcctttatgctgatcttaaaatttcttcacatttggactggcagactcactttgataaatggtggaagggagagctaagcaattttgaatatttactcgtcttaaacaaactagcaggtcgaaggtggggggaccacacatttcatccggtaatgccatgggtcatagatttcagcaaaaaacctgaaaatgatagtgattcaggatggcgtgatttaagaaaaagcaaatggagattggcaaaaggagatgaacaattagattttacctactcaacatttgaatttccgcatcatgtatcagatgaatgtctttctgagctggctgtttgcagctacaaagcaagaagactgccactgagtgtcctgcgaaaggcagttcggtcggtgtatgagcctaatgaatatccctctgacatgcaaaggctttatgattggacccctgacgagtgcatccctgagttttactgtgatccccgcatcttttgctcccttcatcctagtatgtctgatttggctgtacctccatgggcaagcagccccgatgagttcattagattgcatcgagatgctctggaaagcccccatgtttcatctctaatacatcactggattgatattacttttggttacaaaatgtcaggacatgctgctattactgcgaagaatgttatgttgtcttcatctgaacccacagtaccgaggtcagttggacgtcgccaactcttttttcggcctcatccggtgcgccttggtttctcccgagagaaggaacaaagtagaaatgaactagaaatgcatacattccatggctttggtgtggacaacaagaggtccgtcattctcctagctgatgagtatctggaagaaactgaagaggcatctgcattttctgatcatgcaacacatttatgtccaaagtatcaccttcgtgaaaacctggttgagtctcctttgcatgtatcttacagtgaaaacactaagaaagtaaatactagtctccctggaacttcaaaaaacaaaggtttatcatcaaggataagtttgaattatcttttagagcatatggaggtgagagatgaagcatcgactgaacttcaggagttgttacaatggcggcaagatttctgcacaggaaacatttccaaggacattgctggggatattttttctattggctgtgtcctggcagaactttatttgatgaagccgctattcaactcagtgtctttggctacttatttagaaggtggtgacttacctgaactgatcaaagaacttcctcctcctactcaggtaattgtcgaagcatgtattgaacaagattggagaaggtatttttctctctctcttttcgggttaactctggtcttctttgatacttcactgtgtttatgactgtgtggggtgtgatgataaaaattgtgtagtaacacgttttgtgtattttaaatgtgtgaatgtctaattactctctcttacttttgaaacatgcaggaggccctcagcaaagagtcttttggactctccgtatttctcagctacagtgaggtcagctcacttgtttgctgctccacttcaccttttggccaaaggtcaaacacgcttgtgttatgcagcaagttttgccaaacagggagtcttgaaagtaatgggaacatttgtggcagagatgtgtgctgtgtactgtttgccactggtcaccacacctttatctgaggacgagtgtgaattggcttatgtacttctcaaggaatttacaaaatctttgacaccaatggctgtgcagagacttgtcttgccttctatccagaagatcttactggtacgcatatattgttggttcccgatggaatttgtaattctaaatttctgtgtggttataaaatcaacatcttgttaagttcaattaatatcttctgacagagtataatatgttagaccacaggttactcgcatttgaaagtttctcttcttcaagattcgtttgtgagagaattatggaatcaaattggaaagagagtatatcttgaaatgattcatcctttagtcatatcaaacttgtataattctccggacaagatctcagcttcggcagcctctgtgctgttgattggttcgagcgaagagcttggtgcccctgttacagtacatcaggtcagataagatttcctgttcttgtcttgcacccatatattatatatatgcctttcatcgggcacgtcacgtgtttctgaatttcttatttggatgctgacttgtcccttaatacagactatactgccattgataagttacttcggaaaaggaatatgtactgatgggattgatgtgctggttagaattggtacaccctatctgttgattcatgcaccttagctctacctggaaatttcatattttgctaagtgattgttgtattgttaacttttcagggagactattgggcgtgaacttcattgtcaaacagatgctgccattactggaacatgttgtttgcttctgtatcgatctctcttcgatgaaaaaaccagagcctgttcatagttggtgttctttagcgctgtctgattgcctaatcacactcgatggtctagttgctcttatatcagacgagttgctcatacatgagctgaccaaagtatgtttaaaattttatctatctatctttactagctttacgttaaacacctaatttttcgttctattgttgtggtttgtcttatcatcacatagggtcggttgtgcctacatgtaagagttcttatgcagaaaaatctagagttgcgggtccttcaggtattcttgattttccttttctttttctttttctttatcagtaactttgagggaaggataatgatgtataatcaagatgaccttgtttaagttgtcactgagcgtcccactcttaagtggtgaaagaagattgactccaaaaaaagagatttagcttaattttaagggctctgttgtgaaatttgttctattggtatttccattgttaggcatgcatcagtgccttatttataggaggatccattagtgcacctctgtaatgctcattcaagcatatggaaagcctttttaacacttggttttcttttaaaatgttgctttctccaatttttcagtttgctgcaacttccctgatgtcaatttgccagcggattggacaagaaatgactgcattgcatgttcttccgcagttgaaggagctttttgatgagtttgctttctctgagaaaagtacagatgcatctgactctttaagctggaagattaggactgccgaacaaaaatttcatccagaatctccaatcaaaagccgtatggatcttgtgtgcgtgtttcatctgaatcatcagtgaatacaaaaagtataattccgttctatatcctaacgttgtaggaatcacaggttgctcctctatccttctttcgcctcacttcttggtatggagaaattacgccagggttgtccaacctggctactccttgagcagtatctgctaaagcatcataactggaaggtatcctgtctttatatatagaattctgggatactgttgccacaatatctaatatataaaattccattgagctatggacatttatcactgaatctattgtaattcagtgggaatacaccggacgatcttctcgatacaatatggaagcaaggcctgtattaaaacagggccctgcatctaagcacactcctaaggtgttgcttaatggatctggacggtcggttccccagtcgcaggggttaagaaattccaatcacttaaaacttcatatacatgtcccagttgaaggacaagaagcagttctaaaccctttggtgcatgaaccctggtcatggtttcctagtccagtaacttgttgggatgggcttgacattgggcgttttggaaaccccaaagatgagaatcgatggaaaattagagcatctgttttgtcttctgcgcgggcccatcatggagctctaagatctttagtggtttctgaagatgagtgtacagttttcacttcaggaattgatccagggtttaagggaagtgttcagaagaaggaactagcaagcttaagttgtgtatcaagttatcatgcccacgaagag

SEQ ID NO: 141545 - DNA, 1372 bp, Arabidopsis thaliana landsberg
atggcgactaggtttttggtgaagagactcacggcggtgaatgtttcaagaactcctgggggagatttctccggttatgctctccgacaagctacaatcggaatcaaccacttctcaaccggatttaagcaaacggaggtgtgtccacttttctcgtcaaaagtatatatttattcggtattatcgctaataaattacggattgatttgtagggctctactcatgacgataagtccacgacgagttacgtggcagacaaggcaaaggaaggggtgaagaatgcgaccgacgcagccgtcagcacgggtgataacatgaaggatgcgatggatggtgcgtggaaaacggctaaggaaacgggtcaaaacattagcgatgcggttacgggcgatgatgatgacggcagaattcaagaggataaggtcgcagtggaattgaaggatgtgcaacagcctgtggatacgacggagtatagaggtgtggaggatctacatcagcaaaccggcggagaagttaagtcaccctaagctaatgtgttagggtgtctatcctttctttcattgttgtttcagtgagaggttgcttgtgcctcgtggttcaaattaaaggtttatgaatggaccgtggcttagatcgcattacaatttactcttattactagttgaactaaagcaaaataaacaactactccgattctccgaacaaatttctagatgtttttttctaaaatttatatgcacatacattatctcataattattttacgtcaaaatctcccaaatatttttcatcaaaggataatacaaatatgatgtgattgcatgcaagaactgatacgataagtgggtgtgtaaattgacatatatctacggagttttggtgtggggttgggactgaacacagctggatcgcatagtctgcaaggaatctcacgttggcaaatatttaaagctggtgtcattgaaaattcccgtaaatggagggacaaattctctaggcttacgctctaacagatcagacaccaatcgtgtactattatttactaaaactagtaattcaacttcttcctctaaaaacaatcaaagtatttatatacacagaaaaaaaatcaaacaattgtgaatacataaaaatatgaactatcactagtcccatttgcttttgtttataaacgcctatcgtgaacaaatctacagttctaacaaatttttaatgtaaatatattttagttatttaatccatgattctgtcatatccagtttttggcatctatgacaaataaacataacaaatgctctttggttctgtaggggacaagtggaaccgaaaacgagaggaggcatctctgatatttggtgtagtagtggcttaa

SEQ ID NO: 141546 - DNA, 1219 bp, Arabidopsis thaliana landsberg
acataaaatcacaaaacacgacaatggcacaacgtcctaacttgttatctcatttgcaagatctggtcaccaaatttaaaaacatgacaatggcacaagatcggttcaagttcgttttcactgccaacgaagcagcgttggaaggtgtcacgaccccatcagacttccaaatctgatcagaaaggcgatgtgtctcgctcgggctccaatctccaaatacaaagtcggagccgttggacgcgcatcatcaggtcgggtctacttaggcgtcaatgtcgacttcccaggtcttcctcttcaccactccatccacgccgagcaattcctcgttaccaacctcgcactcaactacgagaaagacctctgtaagttagccgtcgccatctctactgacggcctcgaattcggcacaccgtgcggaaactgcctccaatttcttatggagatgagcaacgcgcttgatatgaaaatcctgtccaaaccaaagcatgaagcaggatcattctcgagccttagactcctccttccgaacgtcctcccgaaaggttcccctttccttctcgagaagcgctataactgcctcaccctctcgggttctgccggagagatatgctcattagattgttcccatttgaagcgcagggctctggccgcggcaaacaattcgttctcgacgtacaccgagtctccgtcgggagtagcgctgctggataacgacgggaactggtaccgtggatggtatattgaatcagtggcgtcgaaccctagtttgggtccggtacaagctgcgctggttgatttcgtggctcgtagccgaggcaaaatgttcaataagatcgtccaagcggtgctggtggaaaagaataacgcgagcgtgagtcaagagcgcacagcgaagataattttagacactatagctccgaactgcgatttcaaggtctttcattgctccgtggattgcgcaaaaagactgaagtatcttcgtgaaaccctggtgatagatacgttaggggattacactggtcttcattattaaactaatttattattctatcataattatgctttttgtttacttcttggtttggtttggttcgttaaaaccttttagatttttaataatgtcatagaatcataattacgttatgttttcttctccggttcctgttacttttaatttcagtggtgtcaatatataatatataaaaattatgtttta

SEQ ID NO: 141547 - DNA, 4574 bp, Arabidopsis thaliana landsberg
cctatttcctattatataatctctccgaccatcataatttgaccgttggagaacattactacttttcgcaaaagaaaggaaaaaaaaaaagagagataaagctctcttccattcttttgctatcttctctcctacggttgtttcaatctccgaccaaacctatacaccacttccagtgctttcgaatagaacccagaaatggcatcgccacagagtaccaaaaccggtttgaatcttcccgcagggatgaaccagacttcgttgcgtttagaaacgttttcgagctcatttcgtgggatttcgagtttatcctcgccgtcaaaatcgacttgcagcgacagattcataccgtgcagatcttcttcgagactccacgctttcgatctgcaggataaggaaccgactaccccggttaaagagggagggaatgaagcctattctagacttttgaaatctgagcttttcggatctgattttgcttctccttgtttgtctcctgcaggtggtcaaggatctgcttcttctccgatgagtccatgtactaacatgttgagattcaagacggatcgttccaattcaagtcctagttcgccgttttctccttccattctcggaaatgataatggtcactccagtgactcgtctccgcctccgaagccccctcgcaaggttcctaaaacacctcataaggtattatatcgtttagatccaacctgtttatgtgatgttattacagattcatgagaagtagaaatgatagattgttttgtttttgatgtggtctcaggtcttggatgctccttctttacaagatgacttctacttgaatgttgtggactggagttcacagaatgttcttgccgttgggcttggtacttgtgtttatctttggacggcttccaatagcaaagtgagtgttttgatatacttgactagttcttaagatttgcacaagtttttagttgtggtgtattcatttaacagtgaatttgttggttaggtgacgaagttatgtgacctagggcctaatgacagtgtctgctcggttcagtggacacgggaaggttcatatatatctattggtacaagtcatggtcaggttcaggtgtgttgtttgttaccttccaatctgtggttgtggaaagttttgttatgatgcaatgaagttactaacggtttaatttttggcaggtttgggacggaacacagtgcaagagttttcgaaccatgggaggtcatcaaacaagaactggtgtcttggcatggaactcaaggatcttatcatcagggagcagagacagaaacatccttcagcatgatatccgagtccagagcgattttgtcagcaaactcgtgggccacatatctgaagtctgcggtctgaaatggctcatgatgatagagagctggcgtctggaggcattgataatcagctgcttcattcgcataaccttaaatgtaaaccctaaaccctaaaccctaacgctaaaccttaaaccctaaaccttaactctaaaccctaaaccgtacatactaaaccttaaaacctaaaccctaaacgcaaaaccttaaccttaaaccttaaaccttaaaccctgaatcctactttaacttccaggttcttattgcgtttttagtttttataccgaatgataaacaaaacatcaagtcaatttggactacaaaaacacaaaccaagcttcttcatgattctcaaagctttgatggtgaacccgaagttcttaacagtttttggttttgaatcgtataacaagaaagcactactttactcttcgggatctcgttgaggttctagttttatattcaatcatacacatgacagcaggttatatttcacttagaaacgctaaccaagattgttttttcttcttaaaatattatagtatatttgctcttaaacactaaacataaactctacaccataaatcctgttggattccacccaggtaaccgagccaaccatgatcactgcctcggagatcatgtcgaagaaccatcccgaaccgggcctcaaaacacctcggagatcacatcgaggaaccatcctgaggcgacatcgagaattcctcggagcatcaccacaaaagggttccccgacccggtctcgaagtgcctcggatggcaacctggaaaatcatcccgaggcgggtttcaagatgcctcgggagtgcatcattcgactagcgcggtccaagccgctcagccacgacccgagggtcagctcaacccggctcggaagaacttcggatcgggtcagaaaaccttcaaaaaaagatattagagaatctccgaggatgtcaccgaatatagaagttcctaaaatcttcggaagataaagaaaatctccttcgccaactctaagataaagaaaaatcttccgagaatatcgcgagaagcgatctgccaaagccatatataaagcacctctaaggacaaacaaaggggacacgcacaaaaacgctctcaacctcaggctatcaaaatcgctttgattttgaaggcaaaacacttattttccatatttctaaacacttgtacgatcaaatcctcattatttcaataatataaccaagaacaccgtccgcggtaatcagcaattctgttgttctttgagaatctcacaaagatccgttctttgaaggaacccttagtacaatttctattgtgcgagttttgactctcacaattgggcgctagaaggaggggggatttagatttctcctacttcaagaacacaaaaccatcgaaccaagaagcaatgaccaacaaccaggtcctcgctaacactgtcgacgtggagggaaacccgaatcatccagtccagacgaacgctcctgaggttgccgctcctgcagtcctagcagaactgagaagcatgatggcacaactctagaagaaagtggacgaccaggaaaaaagtgcaccgatctttggcgcagcagctccaggcgggtacttcccaaggacagctgaggaccactctcatcggcgcgcaacaatttcaggctcggcgagtaacgacagacctcaatccaacaaggcttgtgttcgctacacctggcaaaacgacgagaccaccccggctaatcgcaccagcactcgttggaaccgaagcagaattgacatgtttaggagaacagaacccaacaaaccaggtgggagcgtttgatccgcaaaatcacaaacttcgagctgaaactgctggagccgatcaaatcgaagcttccgacgacaaggaatcggaagaaaacatccgatgggcagaagagtacgctagggagcaagagatgaaagccatcagactctccctggccaaggtagaaaccgagatgaaactcgtacggtcacagatgcacaacacggtttcctcggctccgaacatcgaccacatccgggaagaatcacacaacacgccctttactcgtaaaatctctaacgcgataatctcagagccatgaaagatgaagatcgagtatttcttcgggtcatctaacctaaaggggcatctcaaatctttcataatagttgtagctcgggccaaattcagaccggaggaaagagatgctggcctttgtcatctatatgtcgagcacctgaaggggtcgaccttggattggttctcgagacttaaagggaattcggtttacagtttccaagagcactcgacgtttttccttaagcaatactcagtgttgattgatctaggcacctcagacgccgacctttggttgctatctcagcagccaaacgagccactcagagatttcctcacaaaattcaggtccaccctacccaaagtcgagggaatcaatgacgttgcggccctctcccccttgaaaaaggctttgtggtacaagtctgaattccgtaaggaattaaatctatccaaaccacaaacgatccaagacgctctgcactgagccttagattatgtcccatgaggaagaaatggaattgttatcgaaaaggcacgagccttcgaagcaaacacctcgaattgataagtcccaacctagcgctccgagccagaaaaagggcgctcaaggcaggaccttcgtgcatcatgaggggcaaaacttcaccggagcacacaattaccaagccgacacgccccgaggtcgaggaagagagtcctacacttgaactaaatactgcgagttgcacaagagctaaattggaatactgcgagttgcacaagagctacggtcgtcacacttccaggtgtcgtagtcttggagctaaattggcggccaagttcctagcgggtgaaatcggatggggtttgaccatcgaatatttagaagtagagaaagctagagttgagcaggtgaatgctgtggtgaaactcgagtaggcagtccccgcggcaaaccccagtccccgcggcaaaccctgaagggcccaagagaggttagggcgaccccgaggcagatgacgatgaagcagaagctacttggagcaaaatcttcacgattttgggaggttcaaccttttgtcaagatacaacagcctcaatcaaggcttctcaaacgaaggtcgattcaaatcgtaac

SEQ ID NO: 141548 - DNA, 601 bp, Arabidopsis thaliana landsberg
cgatagagaaaacgtacggagtaaaaaatggagacttacgttgatgcgattggagaggacacggcagccacaacaacgacggcggagacggctgcaaataagaacaagaagaagttgaaagtgatggttgcgattgatgagagcaagaacagcttcgatgcgttggaatgggctgtggatcatctcagagttgttattagtgccgaaccggaaaccggtcaagaaggcggtttacttacgttgcttcatgttcacccaacgtaccttcaatatatctatccttctggtggaactggtgaagaaaaaaacgcttctctctttcttttattctctatgcgtatatatatattatatgggatgtgactgtatacaatattgagtgagtttggaaattcttagcttcggcggtgtatgcgacagattcagtgcccgaaccaatgaggaaagcacgagaagagagtacgacaaacttattcacacgggcattggagatatgccgaggcaaaatggtgcgctatatgtgtgaaataatttcctaaaaattaccatcaagacatgtctagtttcaactttcaacatactacaagtttggaaaaaattt

SEQ ID NO: 141549 - DNA, 3376 bp, Arabidopsis thaliana landsberg
cgccaaaccaaatactcctatctcctcttctctcatacccaattccccaacattttcctctacaatagtctcatcaatggcttcgtcaataatcatctcttccatgaaaccctcgatctcttcctctccatccgcaaacatggtctctacctccatggtttcaccttccctttggttctcaaggcatgcaccagagcctcgagtcgcaagcttgggattgatcttcattcccttgtggtcaaatgtgggtttaatcacgatgtggccgctatgacgagcctgctctctatctactctggatccgggcgtttgaatgatgcccacaaactgttcgacgaaattcctgacagaagcgttgttacttggacggctttgtttagtgggtatactacttcaggaagacacagggaagccattgatttgtttaagaagatggtggagatgggtgtgaaacccgaatagctactttattgttcaggttttatctgcttgtgttcatgtaggggatctcgacagtggggagtggatagttaagtacatggaagagatggagatgcagaagaattcctttgtgcggacaacacttgtcaatctctatgccaagtgtgggaagatggagaaagcacgttctgttttcgactcgatggtggagaaagatatagttacttggagcactatgatacaagggtatgcatcgaacagcttcccaaaagaaggaatagagttatttctccagatgttgcaggaaaatctgaaaccggaccagttttctattgtcgggtttctttcgtcttgtgcaagcttaggagcccttgatctaggtgaatggggaattagtttaatagataggcatgagtttttgaccaatctgtttatggccaatgccctgatcgacatgtacgcgaaatgtggggctatggctcgaggttttgaagtatttaaagaaatgaaggagaaagatatagttatcatgaatgctgcaatttctggtctggccaagaatggccacgttaagctctcatttgcggtttttggacaaacagagaagttaggtatctcacctgatgggtccacgttccttggactgctctgtgggtgcggtcacgcaggcctaatccaagacgggcttcggtttttcaatgccataagctgtgtttatgctttgaaacgcacggttgagcactatggttgcatggtagatctttggggcagagcaggaatgttagatgacgcataccgtttgatctgcgatatgcccatgaggccaaacgcgatagtctggggagcgttactgagcggatgcagactggtcaaagatacgcagttagctgaaactgttctcaaagagctcatcgctttggagccatggaatgcaggaaactatgttcaattatccaacatatactctgttggtggcagatgggacgaagctgctgaagtaagggacatgatgaacaagaaaggtatgaagaagatcccgggatatagttggatcgagttggaagggaaggtccatgagtttctagcagatgataaatctcatcctctaagcgacaagatatatgcaaagctagaagatttgggtaatgaaatgaggcttatgggttttattccaacgacagaatttgttttcttcgatgttgaagaggaagaaaaagaaagggtcttggggtatcacagcgagaagcttgcggttgcgttagggctgatcagtacggatcatggccaagtgattcgggtggtgaagaatctaagggtatgtggaccttgtcatgaagtgatgaagttgatatcgaagatcacaagacgagagatcgttgttagagacaacaataggtttcattgttttacaaacggctcttgttcttgcaatgactactggtgagctcgctatggtaaaacaaactgatgtgaaaacgtaattgttttgtagctttgacatttttggaagaaataaacatatttttggtgttacatggtttttaagaaaagttggcagagacagaaatataccttttttgacatgtcacatgtctaaacatactagataaatagtacatattgatgaacaaaatcaaagtatgaattttaaacttgttgcatatagatttaagtccggtttgttgagtagtacataactcaatactacaagaagacatatcaaacaaatcaatgtccattggtccatctcaaacatgtatgatcaaaatgttgcaattatagtaacggcccaaaaagcccaagcaactctataaatagtagtaatattgccgccacaacaaaatatatccacaaatccctaaattacattccctggttgatcaacggcgattcaactccgtcaatgtcttacccggaaagaaagaggaagaggagtcggtggtcaaagccgcattcgacccaaaacccgtcaccgtcacttcccgatgatgtgctattgagcatcttcgcacgcgtctcaagattgtactatccgactctctcacacgtatccgagagctttcgatctctcctagcttcaccagagctttacaaagccaggtcactctcgggaaacaccgagatctgtctctacgtgtgcttacggtgctctactggttatcgctggtttagcctcagccgtaaacctgatcaaaccctaacctatgaggagaggaagtcaagtggttatgctttggctagagtcccaattcccggtggttctcctaatgtacgatcttcgagtctcgtggcggttggttctgatatctataacatttgcggatccatcaacaaagcgtcctcctcctctagcgtctcaattctggattgtcagtctcacacgtggcgggaggctccaagcttgccggtggagctaagttcaatttctgctagcgtccgtgatggaaaccaaggcggccatgggtattctgattcccggaaaaactcctttaaggtgtttgcttacaattccaaggaaggtagatgggatcacctagttggacttggggcgggtagttttatgcttccagattcttattgcgtgatagataacgtttcgtactctgtatccgatggaatgttcagatggtatgacactgaggtaagaaggtggaaagatttgaggggtttgtttcagctacctaagttctctgcgggtgcttgtgttatattggctgattatggtggaaagatggcggtcttgtgggatcaattgccttatcatcatggctttcataagacgattcagtgtgcggtgattgcgcttgaaaggcgcacaagttttgtatttcgggagaaaagttgtcaaatttgggggaaggttgagtgggttgatgatttacttacagtccctacatcgtatgatcttgtgaaggttcttgttgctactctttga

SEQ ID NO: 141550 - DNA, 850 bp, Arabidopsis thaliana landsberg
tgagtccctggtatgtggttttgatgtagctagaatctgtgctgggacatggaatgttggagggagagttccttcatctgacttggatattgatggttggctagacactcttgaacctgctgacatttatgttcttgggtatgtttttttttcttctgaatcttttgtaactaccttggtgaatgagttctgtattcagtgtttatgattcatttcgtttcagtcttcaggaaatcgttcccttaaatgctggaaacatttttggtatggaggatgaccagcctgctttggaatgggagaacttgatacgtgatgccttaaaccgagttcaacctagaaagctgaagattaaaagtcacagtgatcccccttctccatcaaagtttaagcaacccgaagaggttccttatagtgtagaagatatgtttgttgaaaccagtcatgatgcttgcgatggaattagttcaatggataacacactcaactctgttgaaagcacggacgtaccaatcgtaagcgaagattcacttactaatatagacgttttgggttctaccaatgacaatgcgtcttgcttaccaatacaagaatatctacagagacaattttcaacaccaaatacgccagaccgctctctgtcgatgcagattaatagtgattccaaaagggaagaaagatttagttacactgaaagggtaggtttgagctggccagagcctccattaaggctcctaaatcaatatgtttccgaaagacgtggttccttcaagtcagtgaatctgactatcacgaatctgagaaaaccatcgtatgttcggattgtgagcaaacagatggttggagtgtttct

SEQ ID NO: 141551 - DNA, 1274 bp, Arabidopsis thaliana landsberg
  unsure (1)..(1274): unsure at all n locations
atgtcaagtctttgtccgttaaaaccgttggaccgcttttcaaagttgctacgacagttacttctgacgtaagcggtgacatttgcaaatcaacagataaatgcctcgagtggttagactcgaggcctaaatcgtcagttgtctacatttcgttcgggacagttgcatatttgaagcaagaacagatcgaagagatcgctcacggagttttgaagtcgggtttatcgttcttgtgggtgattagacctccaccacacgatctgaaggtcgagacacatgtcttgcctcaagaacttaaagagagtagtgctaaaggtaaagggatgattgtggattggtgcccacaagagcaagtcttgtctcatccttcagtggcatgcttcgtgactcattgtggatggaactcgacaatggaatctttgtcttcaggtgttccggtggtttgttgtccgcaatggggagatcaagtgactgatgcagtgtatttgatcgatnnnnnnnnnnnnnnnnnnngactaggccgtggagcgaccgaggagagggtagtgccaagggaggaagtggcggagaagcttttggaagcgacagttggggagaaggcagaggagttgagaaagaacgctttgaaatggaaggcggaggcggaagcagcggtggctccaggaggttcgtcggataagaattttagggagtttgtggagaagttaggtgcgggagtaacgaagactaaagataatggatactaggcaaaagtctttgactgtctatattctattttgataatgcattattactgttccatctttgtcttggtgtattctaaagattgcttgttttgtagttggtaaccgtggtgtaattgattaattcaatgttcggcttcggcacatgtttgtatcccgacaaagttttcatccatgtacaaccagttcacataaacatacaataaacaaccatgactcaccataagtttggactataagttattacttttattaagaaaacataaacataaatcttagaaactgaccttgaaattacgatctagagatccatgcatagataagagataaccgatccagctctccttgtcgtcctctcagtcactttccatttctctatcaacacctttttgatgtgtggacagctcgagacgactgtagccactccagcggaagtgatccctgggcagtaaaccatgtgacaagtctccagaagtttgcacttctgtacaagatggttcagaccattgtctgttatatggtggcaatgag

SEQ ID NO: 141552 - DNA, 1794 bp, Arabidopsis thaliana landsberg
gaggaaagatattgacagagtaaacgatgacttctctgatttttccctctcttctcccgccaggaagattcgtcgtctggtaaattctctttctaagttgctgaaaaccctagaattcgtcttcatgatgatgatgatgatgaattggtgttatattatgttgattcaggatgtggatttgccaccgattatggaggaagaagagattgatttaccgatgcagagatacggtcgcggaagaaatcgaacttgagccggtgaacgatgagagagcaattgttctatttaagcctcttcattatcagcagccttcttctggaaacgtatttgttgatcgacacttgatttctgggtttaagagtaagtttctttcaactttcatcaatttgttcatgttgtgattgaagcaatggttcatgattaggtataacgttgttgttgaagtgtattagtgatgattcttttgaactttctttagtaatgagataagtttcagtctatgattgttaaagggcttgtaagttaactttagaaactactatgtcacaacaatgtcttagctcaataagttaagagtatcttctttattttgagatatctccataagtttcagtaaacagtgcagataatctagtttatatggtatgaactcatatagttttatatgttgaacagattgtcatgttaactgggaaattatcatagatattatgaggattttgctgtgtcttagtgtcagattttgttctggttcgttttgtttgtttgcctttaacttgtgatccagaatgttgactaaatacagacggttgtgtcaaaattctgaatgttaacacttgtgcagatagatttcttcgcgatgtatcgatagctgatgataatcagtatgaagatgagagattaaacaagtgtcaagctgttgtttgctggaatccgtctcagtctacttactcacagtccataggaaccttccaacaaccgcggacactagagattactgagttggatgagacaggtgaggatgtggtaatggatgatgcatccaatgagatagaagaggatactggaagcaccagtctatctttccctcagcaaggacagcagcaagagcaagagcacacctatggttttggcttgcatccgtggcagcaagcgcaaaactgtatgattccgcagcttcctcaagtcagtactactcccactcccatcacttggttccgatgatacggcttaaccacgggaaaactgaatagggaatgcacgaagcaggatagtagaaggcagatttgttgttagtttttgtttctgccttttgcgcagattagagatatggcatagttttgttgttgtatgtttaccaaactaatagcttcagccatatctcccctaggatggttttgactttcgaatgttatcttttggatgtcgttaaaatatcctttgagataaactacgttccaacttaacatgcacatctacagttaaacagactctgatctattcttatctgctttcttgtgtcagtcctctagtggatttgtgagataatggaatttggtaataatcaaactttaggtttaaaaactttcagcatgaaaatccagttatttggaagcaaaaaccaaaaggacccatcttcttcatagaaagtatgttacactgcaaaacaaaatagatggtatacacaaaaaacaagctaaccacatgctttcagtttcttcgataagacaaacccaaaaaacgaagaaagaagacgggttatataccagagaagacgagataagttcactctcg

SEQ ID NO: 141553 - DNA, 3676 bp, Arabidopsis thaliana landsberg; identical to SEQ ID NO: 33545

SEQ ID NO: 141554 - DNA, 1151 bp, Arabidopsis thaliana landsberg
agtaaacaatcagacccaaaaaataaaaaattccaattaaagttctccaactggagttgattctgcccttattagagagatctgatctttccccaattccataacccgaaaaatggaagaaatcgccgataaaaccttcttccgatactgtctcctcactcttattttcgccggcccaccaaccgccgtccttctgaaattcctccaagctccttacggtaaacacaaccgtaccggatggggtcccaccgtatctccaccgattgcttggttcgtcatggagagcccaaccttgtggctcactctccttctctttccctttggtcgtcacgctctcaaccctaaatctctacttctattctcgccttatctcattcattacttgcaccgcaccatcatttaccctcttcgcctcttccgcagctcctttcccgccggtaaaaacggatttccgatcaccatcgccgccttggctttcacctttaatctcctcaatggttatatccaggtacggttttagctaatttcggtttggttcgtttcgattttccggttttcatctattttgctaatttcggtttgtctgaacaggcgaggtgggtttcgcattacaaggatgactacgaagacggaaactggttctggtggcggtttgttatcggtatggtggttttcataaccggcatgtatataaatatcacgtcggaccggactttggtacgattgaagaaagagaaccggggaggttatgtgataccgagaggaggctggttcgagttggtaagctgtccgaattattttggagaggcgattgagtggttgggctgggctgttatgacttggtcttgggccggtattggattttttctgtacacgtgttccaatttgtttccgcgtgcacgtgcgagtcacaagtggtacattgccaagttcaaggaagagtatcccaagactcgtaaagctgttattccttttgtgtactgagaattgagaaagttgaaaactagtttatcatatgttatgtgtcaatttgtttccaaactacctttgtcaaaatttccagtaaccggtttaattccaacacggtttagatcttatgttggtatcttcaacaatgcacaacaaactgtgtattctttagacaaatttta

SEQ ID NO: 141555 - DNA, 703 bp, Arabidopsis thaliana landsberg
gagatacggggcttgtttcctcccgaacacaacccattctatgctggttttggaaacagagacacagacgagataagctaccttaaagtcggaatcccccgaggaaagatcttcattattaacccaaaggtacacattcttaaaattggaaatccattagcataaaaagagaggaattagcaacattttgtggaacaaactatgcactcaggcttaaaggactcaactgtttgtttgcatttgcatctgtgtttgtttgtgaaaggagactatgagttatatagtaagtttgcatttcgtatttgacattcggtcttccaaaatgcaaaaggaaaaatctcatgtgtttgcaaacgcaattattggcattagaagcaactgaaacattgcttgtgagaattgcagggagaagtagctgtgaatcgtagaattgatacaagatcatacacaaatcttcatactcttgttaacagaatgttcccagctacatcctcttcagaaccggtatatatatcatacactttactttgtccatttcattgaaagaagttgcggattctgatgaagttttataaacaggaggactttaacacatggaatttctggaaactgcctcctccatcgcttatgtgatactgatgatgatgatgataaagatgatgatttgtcttcaagaaaatgcagattagttgatagagataac

SEQ ID NO: 141556 - DNA, 3916 bp, Arabidopsis thaliana landsberg
atggatcttagtggttgtagagatataatcagtagtttaccagaagccattagttgccatatcctatccttccttcccactaaagaagctgcttccacttcggttctttcgaaaaaatggcggtatctctttgcttttgtccctaatcttgatttagatgaatctgtttatctgaatcctgagaatgagacggaagtttcttcaagttttatggattttgtggatagagtgttggcattgcaaggcaattctccattacataagttctctctaaagatcggagatggcgttgaaccagaccgtatcattccttggataaataatgtgttggaacgcggtgtatccgatcttgatctacacgtgtatttggaaacggaatttgtgtttccttcagagatgttcttgagcaagacactggttaggctgaagctaatgctatatcctctcttggaatttgaagatgtttatctcccgaagcttaagacgctttatattgactcatgctattttgaaaagtatggtattgggcttaccaagcttctttctggttgtcccatacttgaggatttagttcttgatgatataccttggtgcacttgggattttgcctcggtgtctgtcccaactctcaagagactaacgttaagcacgcaagtgcgagatgagtttccaaagagtgtgtctattgatactccgaatcttgtctacttgaagtttactgacactgttgcaggcaagtatccgaaagtgaatttcgattcgcttgttgaagctcatatcgatcttagattgttacagggccatcaaggttatggtgaaaatgatatggttggcaatgcaacagattttataatgcgtatatgcaatgtgaagactctgtatctatcttccaacactcttcaggtttgttttcatcatgaaaaacaacttgtaatctttttaacattgttcaaggatttgagttagtgattgcaattgagtgatgataatctagttgttgtggttgtgtttcaggtacttacttacagttgtgatgctataccaatattcaacaacctgactcatttaaccatcgagagtaatcccgaagtaggatggcagtcattgccaggtttgctcaagaattctccaaatcttgaaactcttatcttccaagtaagaaacaaaacccttggaaagcatttgttgactcaatttttcaaagtttaagaatatttcactatgtatgtttcagggcctcatccacaaagccaccgataaatgtggagacgtgtgcttgtgcaaacctcgtgaggagattcgcagttgcttagcatcaagtccggtgaaggttataaagatactgaaatttggtgaaatcagtgatgacatggagaagcagagagagcagatcaagtatttcttggagacaatgccgaatcttgagaagatgatattgtactacaatacaacaagtgttgaagatgtaactgaagtttcaagccgacttcagaggctagtttctaaattagcttcatcgacgtgcattgtccaactaatctctgataacctcagcttgtcatctactgtatcgacaaatgggctcctctgtttctaaagggtacctcttcggtttgaagatgaacctctttatctcagagatgattaccaaagctcagggagtaccctagcttgtcgtcactaaaataatcttctcttgtttctgcctaattatgttctaaagacgtgttatttgggctttgtccttattgacttgcaatgttaacttcagttttttcttgttacagttggtctgttgtgtaaaatgatcttgtaagagtaattggtaggagtaagcagacaacaaaagctgaaacatcccttttgtgtaaagatctgcaacaaaaccgaattaacattttatctaatcaaacaaataaaacaattatcgctaaatcaaattatgtcaagtaatgtttttgtaagatgctagtatatctgattaaatatattattttatctaatggagctcaaaatatcttccaaaatcttacaaaatcttttagccttttaggacaagacactaaaaaaaggctagcctaggaagtaggaactcacactttcttcttcactcttgcctacaaatacaatcgccaaaaaccctaaatttctacaatagttgagtcattttggtgagctatcttcactttagcctacaaatacaagtttcaatatcgatcttcttattttttcaagctagcgtgtttgtttgtttgtttgattcttagcttctcggttggaacacgtagaggaagattgaatcggtctcgtgtctttggttttcaggttgttgaaaaggatggatcttagtggttctagagatgtaatcagtagtttaccggatgacattagttcccatatcttgtccttcctccccactaaagaagctgcttccacttcggttctttcgaaaaaatggcggtatctctttgcttttgtccctaatcttgatttggatgactctgtttatctgaatcctgagaatgagacggagatttctacaagttttatggattttgtggatagagtgttggctttgcaaggtaattctcctctacacaagttctctctaaagattggagatggcattgatccagtccgtatcattccttggataaataatgtgttggaacggggtgtatccgatcttgatctacacctgaatttggaatcagaatttctgcttccttcacaagtctacttgtgcaagacactggtttggctgaagctaaggtttgggctatatcccacgattgatgttgaagatgttcatctcccaaagcttaagacgctttatattgaggcaacccattttgaagagcatggtgttgggcttaccaagcttctttctggttgtcccatgcttgaggatttagttcttgatgatatatcttggttcatttgggattttgcctcggtgtctgtcccaactctcaagaggctaaggtttagctggcaagagcgagatgagtttccaaagagtgtgttgttagatactccgaatcttgtatacttgaagtttactgatactgttgcaggcaagtatccgaaagtgaatttggattcccttgttgaagctcatcgatcttcgcttgttgaagcctctattgataaattaccatcaaggttatggggaaaatgatatggttggcaatgctacagattttataatgcgtatatgcaatgtgaagactctttatctatctgccaacactcttcaggtttggtttcagtctatcccgcttttaaatttatgttacttagaagaagacaaacaacctgtaataacattgcttaaggatttgagttagtgattgcaattgagtgaatctagttgttatggttttgtttcaggtacttacttacagttgtgatgctataccaatattcaacaacctgactcatttaaccatcgagagtaatccgagagtaggatggcagtcagtaccgggcttgctcaagaattctccaaatcttgaaactcttatcttccaagtaagaaacaaacccttgaaaagcattttgttgtctcatttttcaaactttgataacatttcacttatgtatgtttcagggcctcatccacaaagccacatatcgatgtggagatgtgtgcttgtgcaaaaagcctcggaaggagattctcagttgcttatcatcaagtccggtgaaggtaataaagatactgaaatttggtgaaaacagtgatgacatggagaagcagagagagcagatcaagtatttcttggagacaaagccgaatcttgagaagatgattttgtactacaatacacaaattgatgaagatgtgataagcaaacttcagatgttagttacctcgtcgaaatgcactgtgtatatattccccgaggtctaa

SEQ ID NO: 141557 - DNA, 1846 bp, Arabidopsis thaliana landsberg
  unsure (1)..(1846): unsure at all n locations
tttaaaaatatgggctaatacaaaagtcaaagactcaaaaagtgtttagttaagtctgcgtcgaatcacttgcnaacnatcnatagcttcattcnaatcttcggtgaacaatcaatctcgaagaagacgaacataaaattttcnatttctctgtatcttcgcttcctgcgaaaccaattctctatgtcaggtctgtctcgttctcctccttcttcatctttcgatttctgtgcatgttcgtgttatttttccaataaagttttgatttttcgacatacccagattgtgattatgtgttagattatgctttcgggttttcaaagttatgggtagttcttgaattatgttgaagctttaggtaagggttttaaaaagctgaacttttatgtgaattgtaccaaacccttgtttaaagtttgtatttttgcaggtaatcaagaaccaatcttggtgaaagaagagagtgtggttggtataccaacaccactcttgaagcttaaaagttggcaatggtgggttcttgtatccgttaacatctttttccttattggtggtcaagctgcttcggttcttcttggtaggttttactatgatgaaggtggaaacagtaaatggatggcaactcttgttcaaacggctgcttttcctatactctatatcccgcttttgctacttccgtcttcggctagtgtagagtcttcggagagttcgtgttcactcaagtacattgttttgatctatgttttgctcggtgtgatcattgctggagataatatgttatactctgttggacttttgtacctctctgcatcgacgtattcgctcatttgcgctactcagttagctttcaacgcggtgttctcttatttcatcaatgctcagaagttcactgctttgattctcaactccgttgttctcttgtcgttctccgctgctttgatagctctcaatgatgatgcggatactccttctggtgtctccaggtctaagtatattgttgggtttgtgtgtacacttgctgcgtctgctctctattctctgttgctatctcttatgcagttctcgttcgagaagattctgaagagggagacgttttctgtggttcttgaaatgcaaatctacacttctttagtggcgacttgtgtttcggttatagggctttttgctagcggggaatggagaacgctgcatggggaaatggaaggttatcataaagggcaagcctcttatgtactgaccttggtctggacagcagttacttggcaagtgtgttctgttggagtcgtgggtttgatatttctggtgacgtcgctcttctcaaacgtcattagtacgctctcactcattgttacgcctcnnnnnnnnnnnnnnnnnnnnnnnnnnnnnnnnnnnnnngttaagatggtcgcgatgctcattgccttcatggggttcgggttttatatctaccagaattatcttgatgacctgaaagtacaaagagcacgagaagctcaggctgaatagttctgctgtgttttattagttaattttgttagtaacctttcttagaacaagctagctacaagtgttgtattgtatatagtagagttcataatccggtgataatatacataatactaattgcatatggagcttgtttttacgggccaaagttctatgcagaatctacatacgtaatagatcaacgtatgaggttaagtataatggtggattcatcgagaatctcggagacacacatgttgtttcagaagatcatgatgttgctgatcttgaaacaaaaatggttgaaagcaataaacatgttgatgattcaactttgaaagcttcttcatcaaagaggaag

SEQ ID NO: 141558 - DNA, 952 bp, Arabidopsis thaliana landsberg
gctccagattacaaaaagaaacagctcgtttttttcactttcaaaaaaatggaagctttgaggatttatctatggagtctctgtctctctctgtgtttgattatctatggagcaaactcagatccattagaagacaaacgcgcattgcttgagtttcttaccattatgcaaccaactcgttcactcaactggaacgagacttctcaagtctgcaacatctggaccggagttacttgtaatcaagacggatctcgaatcatagccgttagattaccaggcgttggactcaatggtcagattcctccaaacactataagcagactctcagctctcagagttcttagtctcagatccaatctaatctccggcgagtttcctaaggattttgttgagttgaaagatttggcctttctttatcttcaggataacaacttgtctggtcctttgccattggatttctctgtttggaagaatctcactagtgttaatctctcaaacaacgggttcaacgggacaatcccgagttcgttgtctcgtcttaagcggattcagtcgttaaatcttgctaacaatacgctttctggtgatattcctgatctgagtgtgctctctagtctgcagcacattgacttgtccaacaattatgatcttgctggaccgataccagattggcttcgaaggttcccgttctcgtcttatacaggcattgatattattcctcctggtggtaactacaccctcgttacgccgccaccacctagcgagcagactcatcagaaaccgtcgaaagctcgcttcttgggactatccgagacggtgttcttgttgattgttattgctgtttccattgtggtgattacggctttggcgtttgtgttgactgtttgttacgtaagaaggaagttaagacgcggtgatggggtcatttcggataataagttgcagaagaaag

SEQ ID NO: 141559 - DNA, 4324 bp, Arabidopsis thaliana landsberg
catcaccaaaaaagaaagcaatttgtcttcaaaacatatttctctctctaaaacctctttttcataaaaggttgcgtcatctatacgaatccatacgtctctttgcttttctccgatcggtcttcttttctcatcgccggaacgctttggtaatgtttctcatttctccgatcattattgttgtttcgccgttgagctgattatttcgtgttggtatgtataaacaagccgatcgttgtttccttttttctcttgtgattgtgtgatgatggattgtttctttttttcggtttaatccggtttattcccggttttgctgctacatcggtgacttttcccacaatcttcgggtatgatcgcgatcatgtccgttaaccggagtcggttctgataatttcagacttcgaatttgttctctttcacgtagttgttagctttttaagattccgatactgagaagagaccagctcggtgattagaggagatgttgtaagctttgtgttttggttagctgttgataatgttgttcaggctgctacttcagcgatgcgggtaagctagtttgggatatagtgtattagcataacctaggcttagctggtttgtatcctgcaggctgcaggtttagtggcaatggtggtttctagttctatcatacctttctccaccacgaacctctggtagttgagaaactggagaaaagcctaatcagtgattcaagtgtttggaagatttgagaactagtacggctatagtttcaggtcagaattcatcttcctctttgagaacttttagaaactttgaaattatggcatcattcttaaagaaattgcattgataacacatttcaaacagatgttagttcctcatgttagcccattaggattggtggctggcctatccttgatgtattctgatttgcggattgtgttgtggaccttcttggttgattgggaaagcaaagcgaacttgaactcaagtcatctagaagttattctgatccataggggtaaggaaataaccataactagtctctgccatcacatgtgtaccagagtgtgtttagtcagttgaagatgcttgaggtacggtatccatgagtggggaacttcaatcttcctaacaaactacatctatcatataatggtttctagagtgacatgctgtcacgtacaagcatttgatttggatgcacaatgatgtgaaacataatgctaattttaagaaagcatcctttcacacaagcccgaattcaggagtctattaaggtgtgctggtgggtttgaagacaataagagcgcagaaatagtaaatgaggtagtaagcctttgcaggctagtacttttgtggactaaatccgtttatctaaggaaactgtagtgtattcaatttgtggatcagaggagaaggaatagaatttggtgttctcattgtattagtgaagtcaagggcctaattgcttcctgttggtctactttaaaggtgtgcagaaatgatgaatcagtgatcaatcaagcacgacggctttatcacttgggtagtgtagtgtattcgtggttaggactttctaaacctatatccttctaggattatttgcctgcaggtgcacttttgagggtttcggttcagaaaaatattttaagcttaagtcctgctattggattttccatgtaattttcttgctcatgtcatctatggttgtaagtttagtgaaatacatgtacaaggcctttacttgaatataaacgaagaagtagtacattgatagaaactgaaaagatgatatcaagtgttacctattttgcatgaacttgctctgatgctcttttatgcggatacagtatatgataatttgccatcgtgccttattctttcatcctcttctatttcctaatcagtttcctatagacttttctgtaaattctatagactttttgaaagtgtgtaatttgatgaactccttgtattactcttcacttttgatggctctggtttggagagtcgagaaccttagtgatactttaaatgcaaaggcttcttagtttcccaaccgtgcttgttttctgcctctcttttcttttggtttaaaagaagtatgtctgttgttattgacaaactcttctatgtaagtttttcttatgaactaaaagatctgtactattaaggtttatttttcatgtataagcatcatgaactttcctgcagcacagagcctaagtccacaaaaacttgtttgcttatgatatcatgagatctgaggtatataatatggtaggtacatgttacaaaggtaatggtactagagcttgaaactatggactgatttcttatatatttacttgggaaatttggctatcagactgaaagtaaactatgttggttggaaattatagattttttttttttctgagcttgcggatgttttcctgggattttgaatggtgagagaaatttttgtgcaggtttaatggggcacagacattttcttggttcatcccagttttttgatgatgaacatgatcaaggctggaatcatacacacccagaacatccatattcgagtcaaggtaattagtccttcattctatagttccttaatctgttttttatttattgaaatttggttgatgatgcatgtttagttttagggtaatatgttccatatttctgattaattattgtccatcccacattttctcagcaacatctgggaccagtgagaacagatcacatgtttatccagcagaaaacatgttgaatgaaggaatgccagtgtcttctcattggaactcttctccaggaccaaatgcttatactgactcaggtcatagtgtggagagaccacactacaatccgggggtttcggggccgtcccatgatccttccgtgaattcaacagttccaactttctctgctccacatgagaattatgtgacatttgcatcttcttcaagctacaacagccagacatggtcaaatgctagttatgttgatcatcaatctatggaaagtgtgagaggagcacaaaagagaaaacgaccatgtccttcttccatctatgaaatgggtagttcaagccaatatcacggtgacagaactcctgcagacactcatttcccctcggaattgcacttgggaaaatcaataacgcatgatcatgaccctcattacatgccatggcttatgaacccaacttacagaagtaataatctctcgatcaggggagagagctcttcaaggaatgtccggagtcgtcctacacttgattcagagaccagcttaggtagaaataatttgccaagaagcttgagccttgattctcattctacacaccaccacagtgttgatcattatggctcaggtcaatttcctggtcagacatctcacggaaataaagactggaactgtgctagattgtccccagttcttagaggtatgcaaagttcactttgtctcgatatctgaatcgtctttgtttctaataatcacattaattcccactttgcagatataaatggctttagtccagagacaaataatttccttcctgcaagaagtgttgtcaacagcttatctgttaatacttccggctatcatcaccatgagcttaccggaaacagaaaccctacagtttcccacggggttcctggaacttcaacactatctacaagcagcagccgcttctctcataggtcaacatccacctatagatcttcttcacacggttcgcgatcgggacatgtagcatcttcttctggagacaggtctcatttggtcactgagacttatccgtctaggcatttaaggccaccaccacacatttcatggcgtagcggtgatcggccagggagacgcagaagttcctatgagaggtttcagcctcctttcgatgaagttgctctccacgaacggttttcatctgaggtatatatttcccttacagatgcattatttagagtggaagtctgtctaaattacatttagtattaagataaagatcaagccgatatgatacagtgcatatcgaatattaagatatagatttgcaatcttatcattttctgctgcatgctgaactgtaatctgttattttttggggtgtatgtaataataggaattcatggttgaagatcgccaaccacaatactacggatccagaaacatgcttgatcaccacagagacatgaggcttgacatcgataacatgagctatgaggttaatagccaaacacttatcttttgaagcctcacataggcaaaacgaaaagttttggtactgacatatatatgcaggaactccttgatcttggagaaaggattggga

SEQ ID NO: 141560 - DNA, 3030 bp, Arabidopsis thaliana landsberg
atggcacgtcgaagattttcgaaagtgatagatatctctgtggatcccatcttcatggattcattccccagactgaaacagtggtaccggcagcatcaggaatgtatggcttcaattctctctgaactaaagacaggaagcccagtgcatcacattgtcgattccctccttagcatgatgttcaagaaggcaaacaaaggtggtagtcagtcactgaccccatcttcagggagcagtagtttatctacttctggaggtgatgactcgtctgatcaactcaagttacctgcatgggatatcttggaagcggccccgtttgtgcttgatgctgctctaactgcttgtgctcatggatcactctctccccgggaactagcaacaggtttgtccattccctgaaactatagaaagtgttatctgcttaatgacaaggggatacttacctacatctgacgatcataagctattttattgtcttactgtctggatgcatcataaacgctacttcagaaggtagctaatagttgggtgggcgagatcttaatctgtcccttgatttgtttcaggtcttaaaatcttggctgattttctgccggcaacacttggaaccatggttagctacttttcttcggaagtaacacgaggtctgtggaagcccgtttccatgaacggaactgactggcctagtcctgctgcaaatttagcaagcgttgagcaacagatagagaagatcttagcagctactggcgttgacgtaccaaggcttccagcaggtaatgcttttcttctctaaggataatggatattctcaggtgtccaggggttttgtcatgaaagattagaaccttagatgcagtcatggcagtcccggataacatgtccctggagggtcttgcttagatttgtaaacaattgtgatatctataaaactgaaactgcggagaaagtgtgaaaagaacatgctggaagaaacgaatacaatgattatgctgaaaaaactctcatagtttacacacgtctgtctttgcagatggaatctctgcggctacacttcccttgcctctcgctgcactagtgagccttactataacctacaagcttgacaaagcaacagagcgcttccttgtacttgtaggaccggccttagactcccttgctgctgcttgcccctggccctgcatgcctattgtgacatcgctgtggacccagaaagtgaagcgctggagcgactttcttatcttttcagcctccagaactgtgttccaccacaacagagatgctgttattcagctcctcagaagctgcttcacttgcacccttggtctaacacctacttcccaactctgcagctatgggggagtgggtgcactccttggccatggctttgggtcccgttactctggaggaatttccacagctgccccaggaatcttgtacataaaagtgcacagatcgatcagagatgtcatgttcctgacagaagaaatcctgtctcttctgatgttctctgtgaagagcattgccacgagggagctaccagcagggcaagcagagaaattgaagaaaacgaaagatgggtcgaggtacgggattgggcaggtttcactttctttagcaatgagacgtgtcaagctggcagcttccctgggagcctctctggtgtggatctccggtggcctaaacctggttcaggcactgatcaaggagacattaccgtcttggttcatctcggttcacggagaagaagatgagttgggaggtatggttccgatgctaagaggctatgctttagcctactttgcaatcctgagcagtgcatttgcctggggagtggactcctcatatcctgcatcaaaacgtcggccaagggttctgtggctgcatttggagtttatggtgagtgccttggaagggaagatatcactgggctgtgattgggcgacatggcaagcttacgtgacaggctttgtgagcctgatggtgcaatgcacgccggcttgggtgctagaggtggatgttgaagtaataaagagactaagcaaaagtctgaggcagtggaacgagcaagacttggctctggctctgctttgtgccggcggccttgggacaatgggtgcagctacagaactcattgtggagacttgccatcaacattagcttgacgtctttcaactttcttttctcgactaatctaaactgtgatcatgatcacttttgttcctgagattagctctctctttttttttttttgtttgtctatattgtatattatatttattatttagagcaacatgattcgctatgtgtcacagacactgactggggaaacaacattagattatgaaaggaaatgaagccaacatttttcagatttctttgagacatttttcaattgagctactagtactaagctacaccacggggtttaatttgtgaaatccgaaactagggagactaaatccgaatagatatagatagcctaagggattcggggctgcaacaaaatcactcccactcactgcgaagctcgactatggcggcgacgtcgctggttctgacgtgcgcatcccctctattcagcagccctcgggttatttctgctacgaagaagctgactacagagttgtcgatttctacaggtcagtttcgcggggtttaatttgtgaaatccaaaattagtttgtttcatctaaaatgatcctctgccgatgtctcagctaaattccgaagaagatgctcgggaaacaatgatgaagtgcttctagaaggaatgccaccggagtattacgatgatgttcgtctcctcatcctttttttgtctctcagtctgattttttctaagtcggttggttttttgataccaggaatggcaagctcgacagagagagaagaccaaagaactgcggcggatgcagcgggaggaagaagaagaagaggagagaaagattgaagaataccgtgaaattggcacgaggttgaaggaatttcccgagcaagacttaaggaaagccagaaagctcgtctccagct

SEQ ID NO: 141561 - DNA, 1495 bp, Arabidopsis thaliana landsberg
gatctgtgttcgatgtgacgaaaggaaatttcattacggtagtgaggagggtacaaccatttgctggaaggtttgttttgttaaaaattatgtggagagattctcatatgttcttctatcttcttcttgttaatctttcatgtttgtagctgatgggaagtgtttttccatgtcattctttcgctcagagacgcttctcgtgcatttgtttctggcaactttacaggtacgaatcgtttgctgcatcctaatcaccatgcctgtttgatccagataaatttgtggaaaattttgtagtatattatggtctttgcttctgttagtacttatggacattggcatgacatcctcgaaaaaaatgagatttcattctcttttcttgctaatgttatgaggaaattttctgtgttcctcccattacacatctttgaatcctcataaacaacattagtcatgcgtgaagaagtcagaattatccaaactttgttagttatttggagaatattatacatcaagtccctgaaatctgtggaaacttctcatttgtgtgctatgattattttcttgtacaggagatggacttacagattcgttacaagggttatctagcagtgaggtaatgtttttttagctccatatatctcatcaatgaaattatagaaacgtctaaagtagtctttgatcttgccattgtgccagatgtgcttatttcttcataactattactttctaagatattgaagtagcatatagtttgttaactgtttgatattctataactccgattatgtttagttacatgtttgatatggcttgacaaagatttcttgtccgcaggtgaagagcattgttgactggcgaggtttctactccaggacctacacgtaagttattacttttatgtttaattcacacaatagaaagctgatgcatagttaaactaagaaggtggtgtatggataatacattgctcaccttaatccttgtattatatggccctcttggtttggttctcagcttctaatttgtgatcaacagtcctgttgggaagcttgttgggcggtactacgatagccaagggaatccaactaaacaccttaaaggagctgaagcaaaagcctccagaggtgcacaactcatggagaaacagaatactgaataagccaagcaatcgaattgcaactcacgatggagtcaagatgaaggtggagaggtagaaactcttgttatcttctatcaatccggtttataggggagagaactataacgtattagtgaatccttgatgggactaaaagcataagctattatgcaggtttggcgtgatgttggagtgccaagactggtacaaagacctttggagatagcaataactggctcgatgagcaaacgctgtgcttgctttgaggaagaccaacttgatcagtctggcttggagatctataaagactgtgaaccttttgccaagacttgcagggtttgaatatgattcacg

SEQ ID NO: 141562 - DNA, 1383 bp, Arabidopsis thaliana landsberg
cttgtctggtaatcttgcaattaagtgaaccagaatccttaatttatttgcaggctggtgcttctttggaatcgcttgctaaaggtgctgtgcagttttctagaagattttctattagagaattgcaagatcgatggcatgcactgctttatgatccagtagtttctgtagaggcggcttttcggatggctgagcttgaacgtactaaccctaattttcctactaagtttggtagaactggatattcaaaagaaaacaaaagttcatctaggaagaggaatgctgaaaggctaaaaagtacttatcattccttaagaaagcaatttaggactgagccattcaattccttggatttaggtttccctggtccacccaatgatagccatttcatggataatggtgatgcaacacatcttggtcttgaggactctcacatggatattatccacaacgcgtttccagaaatcttggctgaaggtggttgcgtgacaactcatgttctgccagaagataatttacagggagacattccttacgtagaaggagaaaatctcacattcactgaacacgcaggtctatcagtatgtgatgtggttcatcaagattccgagcagaaactagagaatactgctcacgaggcaaaaaacacaatggctagcactgatttcctggcacagctttcaacttctcttttcgaagaagacatggaaccgttcatggaagtagatggcaaagaagttgacaagtcatattatgatggtcttagctcactgttggtgaactctacaaatgatacaaaccgcgaggcttttcctaaccccaccgagcaagaaccttccattgcaccaactcatccaggagaggcaaccctggatgatcatgtgatgcttgagctagatggtacaatcgctttagatcctcatcctgagattgttgggggtgtaatctgctgtttattaaacgaagaggatcctgatattccgtgtaatgatgacattttcctgtccaacaactcccgtccgatgtcagtttcttctttagcccggcggaactttaaggataccaatagtccaataactacatgtgtaagagacgtctccgccagtaaggaaaaaagtgagggatattcactccaggctcaaaagaaaaaaccaggacgtttacaggggtctactcaaggaaagccagagatggcccaaccaagtaaaggtagcaaattcagggcatcgactagtactgagttaaagaatactgtagctcctggtggttcttcctctgcacaggcttgctctaatactctactttctactggtaacggtgcaaaagatggaaagaaagaaactgctactggaacactctttgtcggatctgatggccgtggcc

SEQ ID NO: 141563 - DNA, 1113 bp, Arabidopsis thaliana landsberg
gttcctctctaagccttctagtctaacaattttctcaagctttctccaattcaattaaaaatacttaccaaaatggcaatcaatccattgattctcttaaccatattcccactcttccttctcttgagcttcaccgacgccgaaatccctcgcgtcttttcaggtggttcttggcaaaccgctcacgccactttctacggtggaaacgatgcttcgggaacaatgggtcagtctactctccttaaacacatatttcaagaaccatacttcatttctcatttataccaactctctaaaacagagagctctgttttttttttcctttcatttacttttgtttttgttgttattatttaggtggcgcgtgtggatacgggaatctgtatagccagggatacggaacaaacactgcggcgctgagcacatcgttgttcaacagtggccaaagctgcggtgcatgcttcgaaatcaaatgtgtcaatgatcctaaatggtgtcacccgggcagtccttctgtcttcgtaacagcaaccaacttttgccctccaaacttagcccagcctagcgacaatggtggctggtgcaacccgccacgctctcatttcgacctcgccatgcccgttttcctcaagatcgctgagtatcgtgccggcattgtccccatctcttaccgcaggtatacttaaacatccctatatgtagcttatgatttgagaaatgattcgtatattaaagaagttgtaaatgcaatgaatcaaaatgctaagattatgaaatgtgggtatttgtaaagggtggcatgtaggaagagtggagggataaggttcacgatcaacggtcaccgttacttcaacttggtgctgattacaaacgttgccggagcaggagacatcgtgaggacgagcgtgaaaggttcaaagactggatggatgagtttaactaggaactggggacagaattggcagtctaatgctgttctcgttggtcagtcactttccttccgtgttacatccagcgatcgtagaacctctacttcatggaacatcgctccttcgaactggcagtttggacaaacctttgtcggaaagaatttcagggtctaaagtgaattga

SEQ ID NO: 141564 - DNA, 780 bp, Arabidopsis thaliana landsberg
catgtaatcaacgatccagatttcatcgaatctcatcttcatcgcgttcttcaaaccggtgatcatctcatgattcttctcagaggagctcttcgtctctactctgtagatctcgattcacttgattccgtctccgacgttgagcatccgatgaaacgtggtggtccgaccgaagtttttggttcttccaacggtttaatcgggttatcgaattctccaactgatttagcggtttttaatccttcgactcgacagattcatcgattacctccttcgtctatcgatctccccgatggttcgagtactcgtggttacgtgttttacggattaggttatgattctgttagtgatgattataaagttgtgaggatggttcagtttaagatagattcagaagatgaacttggttgtagttttccttatgaggttaaagtgtttagtttgaagaagaattcatggaagagaatcgaatcagtggcgtcgtcgattcagcttttgttttacttttattatcatctcttgtatcgtcgtggttatggtgttcttgctggtaatagtcttcattgggttttacctagaagacctggtttgattgcgtttaatctcattgttagatttgatcttgccttggaagagtttgagattgttcggtttcctgaagcggttgcgaatggtaatgttgatattcagatggatataggtgttttagatggttgtctttgcttgatgtgtaactatgatcagagttatgttgatgtttggatgatgaaagaatacaat

SEQ ID NO: 141565 - DNA, 1942 bp, Arabidopsis thaliana landsberg
  unsure (1)..(1942): unsure at all n locations
ctacgacactgttttcggttacggatcagcgttgatcaagtcattactcttcaaaacctcttatggaagaacctctccaatccttggtcacacgacattactagggaatccagctgggaaagaattcatgctcgagtccaaatatggaggaaagcttcttggtttccatggacgttctggtgaagctcttgatgccattggacctcacttctttgctgtgaactcttctcttaagcactttaaaccgcaagggtggtgaatggagggaatgcttgggacgatggtgcttttgatggtgttagaaaagtgcttgttggacgaaatggtaagtttgtgagttatatcaggtttgagtatgcgaaaggagaaagaacggtaccacatgctcatgggaagagacaagaagctccacaagaggtatcttcatagaaatatttgtgttgtttcttgtttactaagatatttttattattgttctcttttgactggataaagttttaaatttggttgcagtttgtagtggattatcctaatgaacatattacatcggtcgagggaacaatcgatggttacctttcgtcgctgaagtttaagacatcaaaaggaagaacctcccctgtttttgggaatgtggtcggtagtaaatttgtgttcgaagaaacaagttttaaacttgttgggttttgtggtcgatccggtgatgctattgatgctcttggtgcacattttgcccctcttcctgctcccactccagctcccgcgcccgctcccgctccagttcccgtgcccgctcccgctccagttcccgctccctcgcccgctccagctccctcgcccgctcccgctcctgcgcctgctccagctcccgcacccacgccagctccagctccagctcctcctaacaaagtggaagctctaggaggaaatggtggaacaatatttgacgatggtgctttcgatcatgtaagaaaggtttatattggtcaaggtgattctggtgtagcttatgtaaagtttgaatacgaaaaagatgggaaaagagagacaggggagcatggaaaaatgacagtgttaggaacagaggagtttgaggttgagtctgatgattacatcacatcagctgaagtttctgtcgacaatgtctttggttttaagagtgaaatcgtcacttctcttgttttcaagacctttaagggaatannnnnnnnnnnnnnnnnnnnnnnnnnnnnnnnnaaattggaacttaaagacggtaaaggaggaaaacttgtgggattccatgggaaagctagtgatgttctttacgctcttggcgcttatttcgctccaacaacaaattcaattacaccatcgactccttctactgctaagaaactacacgcaagaggtggaaatggaggagcttcttgggatgatggtgtttttgatggtgttagaaagatacttgtaggtcaaggaaacgatggtgtagctttcgttacgtttgagtacaacaaaggctctcaagcaatcctcggtgatggtcatgggaagcaaacattacttggaactgaaacggttctttcttctctccagtctgtttctagtttcacccaaaatttgatttcttgacctaatgttcctcctcttcttttcttttgtagtttgagcttgattatccaagtgagtacatcacttcggtagaaggttactatgacaaaattttcggagttgaagctgaagtggtgacgagtctaacgttcaagactaacaagagaacgtctcagccgtttggaatgactgctggggaacatttcgagcttaaagaggacggttacaagatcgttgggttccatggtaaagctggtgatttggttcatcagatcggagtccatgccgtgcccattttcaccaattacagatgtgttttctagtttctttctctgatgattccgttaaataa

SEQ ID NO: 141566 - DNA, 3688 bp, Arabidopsis thaliana landsberg
caaaattcaaaaacctcacatttcacttctctcttctcgcttcttctagatctcaccggtttatctagctccggtttgattcatctccggttatggggagagaatgaggagttaccgttttagtgattatctacacatgtctgtttcattctctaacgatatggatttgttttgtggagaagactccggtgtgttttccggtgagtcaacggttgatttctcgtcttccgaggttgattcatggcctgcggattctatcgcttgttttatcgaagacgagcgtcacttcgttcctggacatgattatctctctagatttcaaactcgatctctcgatgcttccgctagagaagattccgtcgcatggattctcaaggcgagcctattcactttttttctctacctctcatttttttcaatgctaaaatacgccgccggagagtgtgtagacgctaaaatacgctgatcgaatcgttacatgcagagaatctttttttttacagtagtgtggtattgtttggtttacaggtacaagcgtattataactttcagcctttaacggcgtacctcgccgttaactatatggatcggtttctttacgctcgtcgattaccggtaaatgttttaaaaacgtcaacgttagttaattctattgtctctgtttttttattatattgatatgacaaataacaacccaaaaaagtcagttttatttccctttttttttttcaatggatcgatttgtttattgacttttcttcagaaaaaaatgaaaacgactaaaaatttattagagcaaaaaattataatcggtatagaataatttagtagaaattaatcttatattggaatgtacgtaaacgatagaacaggagcgggctggggaactttttttcgttttttaattattttattgaaatttatattttcgataaaaaattacattgacgtttacataataatagtatacttttgcagtaaactttccacttcatatatcggctttattgaaaactttgtaatcatagtgttaaaacgctcctactactatataatattttaaattaattttgtaattaaacttaatagagtatatagtaatcaatgattatattaatcagctttaatttctgtaaaataggaaacgagtggttggccaatgcaacttttagcagtggcatgcttgtctttagctgcaaagatggaggaaattctcgttccttctctttttgattttcaggtaaacatatattatcattctttctttaacattctgaatttactctgtttttttaagaaactttaatttatgtatctctgtataatgtaatgtaggttgcaggagtgaagtatttatttgaagcaaaaactataaaaagaatggaacttcttgttctaagtgtgttagattggagactaagatcggttacaccgtttgatttcattagcttctttgcttacaagatcgatccttcgggtacctttctcgggttctttatctcccatgctacagagattatactctccaacataaaaggtacgtaatatttgtatgatatatgatccataatgtcatttaggtagcacatttttgggttggttctaacacatgaccaattagtacagaagcgagctttcttgagtactggccatcgagtatagctgcagccgcgattctctgtgtagcgaacgagttaccttctctatcctctgttgtcaatccccacgagagccctgagacttggtgtgacggattgagcaaagtaggatttgttatatcacgtttagatggaacaagggagtaacagattgctaattaatgtcttttggttatatttgactttcaggagaagatagtgagatgctatagactgatgaaagcgatggccatcgagaataaccggttaaatacaccaaaagtgatagcaaagcttcgagtgagtgtaagggcatcatcgacgttaacaaggccaagtgatgaatcctcttctccttgtaaaaggagaaaattaagtggctattcatgggtaggtgatgaaacatctacctctaattaaaatttggggagtgaaagtagaggaccaaggaaacaaaacctagaagaaaaaaaaccctcttctgtttaagtagagtatattttttaacaagtacatagtaataagggagtgatgaagaaaagtaaaagtgtttattggctgagttaaagtaattaagagttttccaaccaaggggaaggaataagagttttggttacaattacttttatggaaagggtaaaaattgggttttggggttggttggttggttgggagagacgaagctcacattaatggctttgcagattcccaagaaagcaaaatgagtaagtgagtgtaacacacacgtgttagagaaaagatatgatcatgtgagtgtgtgtgtgtgagagagagagagaagagtatttgcattagagtcctcatcacacaggtactgatggataagacaggggagcgtctgcaaaagatttgtgagtggagatttttctgagctctttgtcttaatggatcgcagcagttcatgggacccttcctcagcttcatcatcaaacaaaaaaaaaatcaagttgcgaagtatatataatttgttttttgtttggatttttaagatttttgattccttgtgtgtgacttcacgtgacggaggcgtgtgtctcacgtgtttgttttctcttcaaatcttttattttggcgggaaatttttgtgtttttgatttctatacgtattcgtggactccaaatgagttttgtcacggtgcgttttagtaacgtatgcatgcgtgtaaggtgtcacgtatgtgtatatatatgatttttttttggattcttgaaaggttaaattttatatataaaacgtttctattatatgaaggaaagagtacattgaactcaataatggtcgtggagaaggttaatagctatgtgagaggataatatgagtggtggtgagatttgattttggtgtggcctgtgggagcacaaagcatgtgaacatatgtgttgtggatcgagtgtatgttttattgaatgacgaacgtataaagacaaaagaagattgtatttaagttttaagaccaaaagggaaaaaaagtatttaatgttcaaaatataataacattcctcatttttgccctaattagtaaacacatttctttgtttgtttttgggcaaacgattaagggttttatatacctattttaacaacagtaactatacaaaagaaaatcaaattatctcaaaatcaaattacaaaagaagtaaaaaatagtggttaatttctctcttggttttagtaaagaggaacaattaataggagcaggtagcatacatgtgatgttgatctgtctccatgtcagagaaagtggtctcaccacgaaaccataacgtagctacaccgttctatctctctcgaacccctcaaacattagccacacaaaaataccatctttgactatccatttatatatgtatgcacacgattttacaagtaaaaagggaaataagaagtgaaagaaaaagaaaaaaacttactgcaaaacaaaacattttacaaaagtgtgttttaatcttataactaagttggtttgtgccgacagaagtgcaccccacgtcgagaaaatgtctccatcctcataattctagttgattag

SEQ ID NO: 141567 - DNA, 1105 bp, Arabidopsis thaliana landsberg
aacaaaaaatggcaacagcaccatcagcttctctgttttcaactgtttcttcatcttactccaaagctagctccatcacacattcaagactccaatctgtgaaatttaactcagtccctagcttcaccggtctcaaatcaacctctctcatctccggatctgattcctcttccttaaccaagactctccgcggttccgtaacgaatgcacaaacatctgacaagaagccttacggattcaaaatcaacgcttcgtacaaagtagctgttcttggtgctgctggtggtataggtcagcctttatcacttctcatcaagatgtctccgttagtctctacgcttcatctttacgatatcgccaatgttaaaggagttgctgctgatctaagtcattgtaacactccttctcaagttcgtgatttcactggtccttctgagttagctgattgtttgaaagatgttaacgttgttgtcatccctgctggtgtgccgaggaaacccggtatgactcgtgacgatcttttcaacatcaatgccaatattgtcaagactcttgttgaagctgttgctgagaattgccctaatgctttcattcatattattagtaacccggttaactctacggtacctattgctgctgaagtgttgaagaagaaaggtgtttatgatcctaagaagctgtttggtgtcactactttggatgttgtgagggctaacacttttgtttctcagaagaagaatcttaagcttattgatgttgatgttccggttattggtggacatgctggaatcaccattttgcctctcctctcgaagacaaaaccgtctgttaactttactgatgaagagatccaagagctcactgttaggattcagaacgctggtactgaggttgttgatgctaaggcaggtgcaggttcagctactttgtcaatggcttatgctgctgctagatttgtagagtcatctcttcgtgctcttgatggagacggagatgtctacgagtgctcgtttgtggagtcgactctgactgatcttcctttctttgcatcacgggttaagatagggaagaacggtcttgaagctgtgattgagtcagaccttta

SEQ ID NO: 141568 - DNA, 903 bp, Arabidopsis thaliana landsberg
caacaggtgactcatcctctatgcgatagaaatttgatatctgctcggcttgatgctgtttctgagatttctgcttgcatgggatctcatagttcttcccagctcagcagtgagttggttgaagaaggttctgagagagcaattgtatcacctgagttttatctcgtgctctcctcagtcttgacagctatgtctagatcatctgatattcaacgtggaataacaagaatctttcatcggactgctaaagccacagaggtaaaaatttggcctgtcctttgccctcttatgtatgtgcctgtgtaagttagttcaactcatatagtgcaatactgtaataattttgtccacaaaggaagtttaaatcgcccccatgtatattgataaaccaagtctaatcattaaaaaatccctctgaagtgagttgcaaataatacagcgtattggtatctttgtgatatctagtcatagagatacttgtttcatggttataggatctgttagacattattcaatatcctatcctcttttctcacgatgattttcgttttctatatagtcatatgtaaagctataaacatcaccgcgccaattcttagttatcttgattaagaaaaataaacaaaggggagaggaggatagagtgcagaattatacgagttttgcttcccacccctgtttttgttaactagctcttgctttacagctcctcctcacctggcttgagggttcttaactttttggatgaaaagttcattgcagttatggaagctattttacttgcggggaagcaaattcagcggcttggcataaagcaagactctgaaatgaggagtatgcaatctgcaactgtgcgatctactcttttgagaaaattgatttctgttatttcatcccctgttg

SEQ ID NO: 141569 - DNA, 307 bp, Arabidopsis thaliana landsberg
atcgtctcttttgattttgattgtgcttctgcaacctttgatactctctctgaagctctgaggaagacatgatttcgtctctctcagcttcttcttcattggtttcttctttcgtcgccgttaaagcgactccggtcaccggacctctgattccccgtcgcgatcttctttctattcgtatcagagctagctcgaatcagaatagttctggttattgttttccagaaaagtttaaatcttttgccaaatcagcgattctcatcggtgctgctgtttcaatgaccggaaagttttcaactttaccggc

SEQ ID NO: 141570 - DNA, 1198 bp, Arabidopsis thaliana landsberg
gccgtttctgttttaacaaaacaaatatcaggccgttccaagcgttcactaacgacacgacgtttgtttatgaaccaaaaagacgaatttttcaaaacctcgtcggagaggtttaggcttaaagaaacaaattgttggaatctcaattctcgaatctgacatctcggagaagagatatggcgacagagtcatcggaatcggaagaagaaggaaagattagtggaggaaactataagctaatcatagacgacgatctaagagagatgggtaaaaacgcagcttggagcgttagctcttgtaagcccggcaatggcgtcaccactctccgcgacgacaatctcgagacttattggcagttgagaaaacgaaaaaaaaactaaagctcttatctttccctcattcttcgtctctattcaattaaaggattcgacttttttttgtttctgaaattgtagatcagatgggttacaaccacatttgattaacattcaattccagaagaaagtgaaactgcaggtatgattctattttcatgagaaagttttcatctttctttttttgtggttaatgaattttggcttgttttgattttgaaagttagtggttttgtacgttgactttaagcttgatgagagctatacaccaagtaaaatctctattcgagctggtgatggttttcataacttaaaggtaatatctttttcctctgaagaagaagagaggattctcttagcttgtgaaggattgatatatcatgttgtgtctccttctcttttgattgttttaggagattaaaagtgtggagcttgttaaaccaactggttgggtttgcttatctttgtctggaaccgatccacggtatgtttgcttcttatcaagttgtggtttttgtggttgtttcttactagaatctacctagctgctgataagatgagcagatgtctttgctacaatgttagatatatgatcagattttgctactcttttttattgttagtacttcagagaaagtttgcaagattattagtattgcttagatatgtctgtagatatctaggtgattagttagttagtaaaggtctaaactaacttatgctgccaagaatgaattcgttctgtaggttactaagcattgagctgataagtttaaccattgtgtcctcttctcagggaaactttttgtcaagaatctaggtag

SEQ ID NO: 141571 - DNA, 3269 bp, Arabidopsis thaliana landsberg
gcctgaaatttgttctcttcttttggttgcaatttctcgatctcgaattttctgagagaatacaaaacttaatttctcaaaccccagcagattcgaatttagggtttcttacacccattagatttcgcgtcgatggcgtccaatcgcggtgcgggtggttctctatacggcggagctgatccgtatagatctaggtatatttctaatattatcagtttctccttttctgaaatcgattctggatagagaaaacgggtcctagatttggtgaattctgcgtaaagtacaagtatttatctttggtgtgtgatttgtagagaagggctaagcactagaaatgcttcaggttcagaggaaattcagctgaggattgatcctatgcactctgacctggatgatgagattctaggtctccatggccaagtcaggcaattgaaaaatgtaagaaaccctctaaatcctatttcgatctttctactttttatctatagtgccatctgtattgtcttcttgtggttctgaaggatcattgttctctttaagctttaagttgatcatatgaatttggaaatttgtcttcttttcggttttgacagtggttagagcttggctaattagttgtgtaggtgtttttttgttcagggtactatgataatgttattgttcacaatacttatcagtcagtccacgattaattagttgaatccacttgtctgatgtcttttgtatacatctgtggttattgttttatatcaccacccttcttgaaggaatcagtcgacattctctacaattccttgtgttttaccttgcacttttgcgcattatttatccctcatgattttttgttatatcgttgatcgcttattttgatgcagattgctcaagaaattgggtcagaagcaaagtctcagagggacttcttagatgaactggtatgttgttgatgtccctttagttttttctttatccatcatagtaaattgcaatgtaagcacttaacatcagtaacatgcattcatttactcttctttacctttaagatgaatcactgattatatatagtatatccgaatatcggtttcctataacttgtttcagatgtctctgttcattattagttgggaaaatatagtttcatcctaacatatgttagataactttaaccgtagcttacaaaaccaatgaatcttgataaatccaaagtgtacattatgtttacttaggatctggtctgaacgctggtggtgggtaggattaaatatcttcaatctcacctagtttggtgaaatgcagcaggaaatggttacagcttatcattgagttcctgccactttgtcaatgagaatgttggtgttgaatgtgttcattgcttttagttcgttctagttttttcttttgttacctagaagaacatcctagagaagataatgacaaacaactagatttggtagtgagactgcagaaacaagcatttagtgctgttataagcaaaataaaataagtagacgaaatgttgttcttgtctgaaacataaaacgcttcaatggtattttgtttttgtttgtgacagcaaatgacattgatcagagcgcaagcaggggtgaagaacaacataaggaaactgaacctaagcataatccgtagtggtaacaaccacataatgcacgtagttcttttcgcgctcctcctcttctttatcctctacatgtggtccaagatgttcaaaagatagatagagagactcatggcatacttgtgttaccccccaaaaaaaaaaccttgatgaatgttggataagttgtagaaaatatcctctagattacaaacattttgtggttcttctcgttacctgttatatagagtgcctgtttttcacagtttacatgaagcaaaattgtatcacagaacaacagcatgagatattttagaccagttcaaatctggccttaacctgattaattacccgtccggtccaattaagtattgggctttcatagtcttatgggctgaagtgtcgtgatacgtgtataattatggttggttcttatgtgtaagtttatggtggtatggtctgtagaggataaagcttccacactatgtaaaggagaccggagaaacaaaggaactgggtttggagataagaagtgggaacttgaatggcttccttatccacttccgttgtagcttcggcttcgtcgcgtttatggaatcctgctgcttccagcggcaagatttgcgttccttctgcttcgctttctctgcgtaccggttctagacggactccgtcttctctcacctcttccgcttcttcccaactgcttcattgctcgtttctctcgtcgcctctttccctagcgtctccattttctggtacatcttcaaattggttcgaattattgtttgtgtttagcttctggtggtgtaatgtatcctgttttttacccaattttgatttttttctggttctttgggtttggtggatttatcactgttcccgtgtgttagactctagcttactttacaaacctaaataattcgaagtttttttttaggagaatctgggaattgtgaaacatagttgtcaatggtgaattcgatttgggagtgagtgaaagaagccattttgtttgtttctgatatttcttgttaactttatatcaacaagtgaagataacattttgcaacttaagcctcactttctgatatcttagctcatgtagttgtagccgcaaataatgttgtttgattttcggtacaaaaaccttttagctcatggcgattatttaggtacaatggttatagattcgctcacagatttgcttcaatatgtcacatgaacttgtccctcctcctttgatcataattttcttgtaaagtatattgtacgaccattgtaactaggctaagatttgagcagtgaattataagctttgccagtttagcaacagacgttatggttagttgatagctcaaggttaaaagggtacctatggaatgcattaaagtcattttggatttgtcttgagtcttgattctgggcagtgtgtcgagagtttggtattgtatggtgagttctttgggtaattaaaggaaggagtttaccggttccaatattatcagcttgatacactatcaaacctataatgtcacattgatcaaaatggtgttgctgtcttttcaggtttgtccattgcgtttgatctcagcagtcaaactagtggactgaatggccagagacgcagaggccttgggtagagctgaaaagc

SEQ ID NO: 141572 - DNA, 625 bp, Arabidopsis thaliana landsberg
catgcacttcgctgaagttcgagagctacaaagaaacgagacacgagaattcgatatatacataaatgacgttatacttgccgagaatttccgtcctttttatttgtttacagacacacgctccactgtagatccagttggcagaaaaatgaatgaaattgtccttcagagaactggtgtatcgacccttccaccgatcatcaacgctatagagatctatcaaatcaacgagttccttcagttaccaacagatcaacaggatggtaaggctttctgactcaaaagatttcctcttctgtactttatttgattttgttttatcttgtcttagttgatgccatgacgaagattaagttcaagtatagagtaaagaagaactggcaaggagacccatgtgttccagtggacaattcttgggaaggtcttgaatgtctccatagtgataataatacttctccaagatccattgctctgtaagaattttttcagttcacaactgctctgcttttctctgctctgctcttgctgttacatgtatctcaaacaacgttgtgattcgcaggaacttatcctccagtggactgactggccagattgatccagcattcgccaacctaacatcaat

SEQ ID NO: 141573 - DNA, 1303 bp, Arabidopsis thaliana landsberg
atgacgttagatctctactatgcctttgtgaccatattcgagaacaaaggagtttcaggtacgtaagatatataccaacactgtatatgaccaaacataaccgatcacgtctttgatagattaaacagaaatacatatacctaaatagatgggatatataatataaatgtttaaatttgggcaggagtttcgacatttccggatccgtttaaggcatgttgtgcaacaaaacgaggtaccttttgtggagatagaagcttgagtggtaaaaagttgtacactctttgcgatgatccaaaatcattcttcttttgggacaatgttcatatcagtgatcaaggatggcgttctgttttttctcttcttcttcctgattcacagttttaaatcaactagatcaatatgcaataattctccattctaatgatatatgatgattatcaattgtcttcataacaatgcatacaaagattatttcaatacccacttaaataataattattaggctagagactctagtctagagtcaaaaccaagggccacaaagatcaaatcaaagttttaggtgcgaattgtcaaaactaaaatagtggggcattatacgaaagaaccaagaatacagggagaagtagacaaagaatcttgcaagtcttctttctgtgtttgattctcatcaaagacttcacttttgttctttgtcgcttcaattcaacgcttattcctaaattcgattttgcgttgtcaaattccttaaatttcgttacaaaggtttgatatttctgatgagatctccagcaaagacgatgccgtcgatgtcaccttcttcagtttccacggagaaatctccacctccgtcagatacttcaatggctatagtagctttcgataactccactactcacttctcttcttctccatcgccgccacattctcttgatcattccagtgaatcggagaaggaagatgcgaaaagtaaacccgagagtagaagaaacaagaatcctgggaaggttgaggaaactccatctccgattgtggtggttcataatcacaatcgctctgtgaaagaagtggttccgacgagaaagagtgcgagagttggttctgggagaagtagtggccaacgatctggagctgtttcggctattttgagaaggtctaggagagaagaggtggtaaagttttcagctttagggtttcggttgagtgaggttgtgttggctttgatatctttctcaattatggctgctgataaaactaaaggttggagtggtgattctttcgatcgttacaaggagtacag

SEQ ID NO: 141574 - DNA, 224 bp, Arabidopsis thaliana landsberg
gtttcatcagatccagactcaaaaaatggagtcaccgcactcgaatttgctccctgaagtcgattctttacccgatggattcgtcgacggcgcaacagagccgcctctcaattctcccaagacccaggaagaaacaacaaaccatgaaactgttgcgatcgagaaaacagagaagccaagaacttttccggttccgttgtgtgaaactgatggtaatggagatg

SEQ ID NO: 141575 - DNA, 2892 bp, Arabidopsis thaliana landsberg
  unsure (1)..(2892): unsure at all n locations
agtgtaggaagaatagaagaatctattacttttctctgccactcacatgtgtagctagtgggccttttagctgtttaataatataaaagaaaaagaagccagcttctattgtcttaaacttttgagtcatattttgtggtaattctttaatacaggaccacgtcaaactctgctgcttccacagaattagcaaacgacagatctgagaaatggaagaaaagtttagaaacttaatcgaggtatggatctctgctttaatctctctatcttactgttattacatatcgtctaaactctccaaaggtgttcttcgtctcctctctattcttccagtctgcattctgtttcttgttcttcctctgttcctctcttgtgtgcacttttgcgccatttcagttctttttctttcatggcttgcaaactttaagcttcttctatttgcctttgatgagggacctttgttcccacttcctccaaaactctcccgtttcatctgcttcgcttgtttacccatcaaaatcagacaagacccttctccaaatgcgataccaaatcttcatcctaaacctatgcctaaatgggttttggctgttaaaattttggtcttgggcgtcttgttacatgtttatgaatacagggatggtttgcctcggtttgttgtcttggctctctattgtctccatatttaccttgaggtagaacttgtcttggtctttgttggagccgtggtatctactcttcttgggtgtaacatcgagccggtgttcaatgagccctacctagctacctctctacaagacttctggagccgcagatggaacctcatggtttcagccgtcctacgctcaaccgttcacattccggttcagcgttttttcaaacgcatactcagtccagacggggctatgtttgctggggtcatggcattgttctttgtctcaggcttgatgcatgagctgctctacttttacatgatccgtaagcctccaacttgggaagtcacttgtttctttgtgttgcatggtgctgccacagccactgagatagcggtgaagagaacacaatggttgaggccaccgcaccggcctgtctctggtcttgtagttctgacgtttgtgagtgtgacgggcgtttggctattcctcgctcaagtgctgagaaacanatgtccatgagaaagcgattggagaatgtttattggttcttgacctagccaagttattcacttcttcatgattctttattaaaggcaaagagcggtagcagagcaaccaaactttgtttctcttcattgtttgaaaacgtatatagaagtgtgagacacgtcgtctagtgtgaaacattcttgacatgctattaaattgaatcaagctcaacaaattcaataaatatggcgtaaatgttttctaagttctaacaaatgatgaaatatgaacatcttactttgtatattattaatgcaatatttgttagaagaattttaaaataaaacaaactctgccaaatctataatcttactttaatcatgccgcgtcgtttgtctggatttgtcatacgaacattccgaatctatttggatttcttgattttataatgtaaaagaaaatgtaatatggagttttttctaagattcatttatcttttacttgcgaattgaaaatctggtaaatacatatatgttatttccaaatcattaaataattgaataatacaagtttaaaaaataaaaaaaatgaaagtacatgagacaataaaccctctaactttgaagttctatccttttacctctttgaaaaaaatagtttttgaatgatccaaaataaaaatgacgcaaacttgacaaattagaaacgtattaccagttatggtttttggcattattcatgttcttctggttgtagataacattatttaagtcgcatcattatgacacagttagcaaccaacagaaccaagagagaaaagatggaagaagagttgagaaacctaatcaaggtttggatctctgccttaatctccatatcttactgttactacatctcatcaaaaatctccaaaggtgttcttcgtctcctctctcttcttcccattttcatcatctttcttcttcttcctctcttcttctcttctgtccacttctgcgtcatctcaggtttcttcttcacatggctcgcaaatttcaagctctttctctttgctttcgatcaagaacctttaagcccacttccctcaaatctcacccgtttcttctgcttcgcttgtttccccatcaaaatcaataaaaacccttcttcaaatcgaatccacaacaaacctatgtctaaatgggtccttgctttcaaacttttgatcttttccttcttattacatgtgtatagaaacaactatgattccggtttatcacggttcgctttcttggctctctttaccattcatgtttacctcgaggcagaacttatcttagccttcgtcggtgccttgatgtctatgcttcttggttgtgaaatggaaccggtattcaatgatccttacttagccacttctttacaagagttttggagccgtagatggaacctcatggtcccagccgtactccgtccagccgtccacataccggttcagcgattttgtgcaccgttactcggtctacaccgggctttttacgctggaatgttagccacgtttattgtctctggtttaatgcatgagctgatttacttttatgtgatccgcaaatctccaacttgggaagtcacttgcttctttcttttgcatggagttgtaacttgcctagagatagcgatgaagaggatgcggtggcttctacgccacatcgggcggtctcgggtcttgcgactacgttggttttggtcgttacagctggttggttga

SEQ ID NO: 141576 - DNA, 835 bp, Arabidopsis thaliana landsberg
ctaagcgagaatccaaaaatgagtgaagaagatcacattgcttaggtgaaaaagtctccgaagaatctctcaaaactatcttcgtcttctcttacaattccgacgaacagagatttccattctctctccaagtccgacgagttcaagcgtccgatcgatgagttagcttggagctcgcagtctgttcttgagacgattggtggtaagaaatcgatgagatttgatgatcccatggatgagttcaagaggaatcgaaagatggaggaagattcgaagaaggtaatcgatgtgaaagtggctgagagtgataagggattcgcgaaatttggcaaggcagaggttccgtttcatataccgacgttaacgaagcctcaagaggagtataagattttggtagacaatgctaataatccttttgagcatgttttgttggagaagagtgaagacggtcttcggttcattcatccactggttagtttcgttgtctctgaagttgattaaaagctgtataatgtaatatctcgagtgtggaactgtaatctttgatttgtttaggttacctttttctgtatgtgattttgtttgcatctctgttctcgtattgtaggaggaactatctgtgatggactttgttgatagaaatctaagtgagatgagacctgttaagcctctcccattggaagagactccattcaagctagttgaagaagtcaaagatcttgaggacttagctgctgcattgcaaagtgttgaagagtttgctgtaaattttcttcctctgattgtttttagtccgatgtgcaatgtattgttaaaatgtggcactttttggtag

SEQ ID NO: 141577 - DNA, 1034 bp, Arabidopsis thaliana landsberg
atggggtatgcttctacttctctaggagatgcgttttatggaaatatcaaagaagataagcgccttagttctgaagataagcgccttattcacaaaatgcataaggttgtattctttgttaggtttatccagctctaaacaaagctcaaagctcagaaccatacttaacacctgttcaatattgtagggagttccttatccagctctaccaaagcgtgataagccaaggcgtgttgagctttatttctcaagttgggttatcagagcgggtaagccttttgatatacaagtctttttttctttaagacgggcatagattttgattttaaagcaaattcaaaacaaatgcagttgaatcccgaaaaggagatggacagcaaacggcttgtgaagtttcccttgtccactacgaagacatgggcatcccaaaagacgtagcaaagttaggtgtccgtcatggcatgtggggagctgtcaagaagctaaactctggtttacgagcgtaccaatccgccagaaaatcagactcatctctatctcggatcgcccaaatggcaagaatcactacaaaactgaacatggattctgcagaatcatcttcaagagatgaagacagaagcagagcaatggaatatgcgagacaacgggaccatttgagaatggactggaaatgggttgttgtcggaggtgtcgcattggcttgtggccttcactctgggatcattggcaaggctttactggctggagctggccagagactggctcgtaggtgagaaaccttgtcgtattcttattatatcttcccttgacagaaaagagaaacatatgcatataactaagggaaatgtattatttttgcaactcctctgagaagggcatgtggttttggtggtgaaccatgtagagtagtagctttaaactatggagtcataagttatttgagttctatcttgtaccacaggatagtgagatatgtattttataaactatatgaatctacatagcttctaaaagcttaaattctttgcatgtga

SEQ ID NO: 141578 - DNA, 714 bp, Arabidopsis thaliana landsberg
  unsure (1)..(714): unsure at all n locations
gctttacgtcntaatggtccacggattgttcggttaaccgggatcggttattcgttaaccgatattcaagaagttggttggaaacttggtcagcttgcgagtactattggtgtcaatttcgaattcaagagcattgctttaaacaatttgtctgatcttaaaccggaaatgctagacattagacccggtttagaatcagtggcggttaactcggtcttcgagcttcatcgcctcttagctcatcccggttccatcgataagtttttatcgacaatcaaatcaatccgaccggatataatgactgtggtcgagcaagaagcaaaccataacggtaccgtttttctcgaccggttcacggaatcgctacattactattcgagcttattcgactcgctcgagggcccgccaagccaagaccgagtgatgtcggagttattcctaggacggcagatactaaaccttgtggcatgcgaaggagaagaccgggtagagaggcatgagactttaaatcagtggagaaaccggttcggtttaggaggatttaaaccggttagtatcggttcgaacgcgtataagcaagcaagcatgttgttggcactttatgccggggctgatgggtataatgtggaagagaatgaaggttgtttgttgcttggatggcaaacgcgaccgcttattgcaacatctgcgtggcgaatcaatcgtgtggaataa

SEQ ID NO: 141579 - DNA, 1140 bp, Arabidopsis thaliana landsberg
aacaagagtatatcagaagtaatgttcgtgtttacaaagggacaaagattttgttgccaaagatctttcaacattatgttaaagacatgtcaatggatgtgtctaagctcatggaagcaacatctcaatgtttaccagaagatgcaaggaaaattgctgagaaatgtttgaaagagaagaagagtaagaattttgaatggttaccggaaaatttgagcttccggtatgttatcgccggagaattggtcggagcaagaaataagacgtgaagggtttattcaagaaaagtgttttttttttgcctcctgatgtgattaaataatctgattacaattagtgttcaatttcattttttttttcaagtgagaaattgtaaaaccagtgtttgtttgtataatcttaataaaccgagaactactaaatactaattaaggttttaaaccgtgtaacgaaaataactgggagtaaaccgatcgagcaaaccgggtcttaaagcgaagatacttgggcctgggcctaatattcattccactaatccagggtttaataagtaatgtatcaaaacacatggcgtaattttgattttgataatactacaagggcctaataaataatttggtttttgtatcttgacgccgatgatttgttttccggtgagaggaaagttagggtttgagtaagagatagagtaaacaagaaggaagaaattcacatgtttaatctttcccttcttaattatcttcacttcagattgaatattattctttcctggtttccaaatcttcgatctttcacactaaatttgttctaaaacattgaggaagacgacggtgaggatggaattagagcagcttaagaagtctgtagaagagaacccagatgactcttctctacaattcgaactcgtaagttgttttccgaccataaatttagttcctttactattggttctcttggtatcttctgctaatggaattttttttggaactttgattttgattgcagggtttgtatctgtgggataatggtggagattcagagaaagcggcggagcattttgtgttgtcggcgaaatcagatccgaataatgcagtggcgcttaagtatttagggcattactactcgcgtgtaacgctttga

SEQ ID NO: 141580 - DNA, 983 bp, Arabidopsis thaliana landsberg
cgtccttggaggggacgacgacggatctgtctttctgtctactgaaaatccaaatttcatcctctccatttatttaactttttcagatttagttttgtcaagaaaacacaaaatgtcttttcttgcgccttgtcaaattttggagctgaatattatttcggcccaagaattggcgcccgtggcacggtgtatgaagacatatgcaatcgcttggattgatccagagcgtaaattgacgactcgggtcgacaatacgggcggaacaagccctacatggaacgacaagtttgtgtttcgtctagatgaggaagcagtctacgatgccacatcaatagttgttatagagatctatgcattgcattggttcaaagacattcatgttggaacggtacaagccttaataagtgaccttgtaagcccttcttcggctatgagattcgttaccctagaggttcttcgtgcctctggccgcccccacggcctcctaaacattgcggtggggcttatcgataactcaggccaaagcatgcctcttttgtttgaagaagatttgttgtttcacaagaaaaacatatcttcaaaacccgtagggcttcgacggtcaaaaagtgatacaagctcaatggtggattcgccaaggaaggtgacacaatcccgtgtgagttctactacaaactcaggatttgataaagatgagttttcttctgactctcaaatggttgtgtatgagccccaaagaaaaatgccgaatacaatgaggcaaacaaagcaacaactcgtgtatgggacaccgatgaggccaaggaaaacgacagcatatacccccaaaaggaacacaatcgaatatggaacaccaatgaggtcaagaccaatcgttattacagaatctgacttaggtccttcagcctcagtagttgctgcccaaatagcaaaagagaaagcacttacagggaaagatgcggagagtactgtgataagtgttg

SEQ ID NO: 141581 - DNA, 648 bp, Arabidopsis thaliana landsberg
tcttcctcctgcaacctcttcttccctctctcagtttgatttgaccggagtatatggcggaagtacgatcacgatcacggagaacggaggtatccagatctatatcttctcctttgcttcttctgctcgtatagtttggttaaattaggttttccgaattttggggataacgatcatgtgaaatgttgcagagcaattgggctacaatatgctgctcagctttctcgtgtctccagctctactgggcacgtattgttctccgtaaatggttcaatgtttctgcttctgaatcagattatagtgctgatagtgacgatgactacgaagatagatcacaaggtcagcttaaactctgattctccggaaataattaggttttgtattctctactgtgactgaatctgaatttggtgtagcagaatttgatccaattagctctggagttaccaatcctcgtgttgatactgacggtgatgtgatatgtaactctcagatttcaatttttatttctagaatcattcattgttgctaattttcggtgatgatgttttcattagaagaacattattgctcattcagatccatttttcttaatttcagataggcctaagcttagaagacgaaattctaaaactttcagggtgcagt

SEQ ID NO: 141582 - DNA, 2478 bp, Arabidopsis thaliana landsberg
atggtcaaaaccaaacttaaaaccgtagtaatcgacataacggtcataccattcgccgacgattttttctgccctggagctccagccggcgtagagatatcaccagcggctgatggaccatctcctgaaggacccatcgccgagcctgacggagaatctgacggtgaagaagaagtagagcctcccggagccaacgatggagaaacggtgggtgagtttgaaacaggggatgaagatttaggtgccattgatccaggtggtgaagtcatcggagcagaagacggaggaatagttgaagatgatttaggtgccattggtgccggcggtgaagtcatcggagcagaggatggggaaacaggggacgtggatttaggtggtgccggtggtgaagtcgtcggagaaacaggggagccggatttaggcgccattgatcctggaggagaagtcgccggagagacagctgatgaagatttaggcgagtgagctcctccaggcggagtagtcgatcccggaggagaagtcgtcggagaaacaggggaggaagatttaggcgagtgggctcctcccggcggagtcattgatcccggcgtagagcttcccggtgcagcggcgtgaggagactgagccgttgatggaatcctagcagatatgacaacgacattaagcttttgacccttcttacagttatcttcattgccactgatgaagtaaaacggaccataacgatcaagagagatctcagaatctccatcgtccactcttttgatcggattctttgtattacaagcgtcgtaatcagccttgttcacctctagcaccgagtcagctcccttagcgtagctaaaatctgcaagaatcgaaattgagtttcagacaaaacaaaagtacactctaagttaacgaaatgacacaaacgggtaagagagtgagagagagagatgatatatacagagagtgtcgtgaacaaggaaacggtttttgccagaccaagattcgtagttttcaggtgggtttgtaacccacgcgccactgcctccgacattaaacttccgtgcgttggagatggtgaagagggtcgagagagagaggaggatggtgaagaagaaagaaaggcttttcatttttagaaaggtcatgtttttcaaaagctgcgagagattttcaacaagataagagatgtttatatagaaatgaagcgtttataatgggctaaggaaagtgtgaagcttttttgtcttaatgatagagagaggtcgtttttatgggtaatacgtgttcgaaattgaatctctgtatctactcgttttcctcacattaaaagaagatattgcttcttcgtatctgccgacgtgtttaatttaattctttttgggatttgaagttatatgaatttatccccgggaaaaacgcattagagaacagttggttttgtggaaagaatcggattcaacgaatcatatgcttccattatatatgagaataccgaaaagtctgaaatcttgcatcaggtcttaattgcaaattcattttccatttgatatgagaataccaaaaagcttcaaccatatcgacattagtacatattggtctgatggtctctcctacgtattttcgacgaaagaaacttgcgaactcggaagagcggtacaggtggtagtccgtagtctatagtagatacaacacttgcaacattttgaacatatgggctgggcttataaggttcgggccctttattttctttcttagagttgatgatgataagaagactagagtcacttttttttagcacaagaatctctgaatcagcctttgcttctgttgctctggggacacgtgagaagcacagtgattagccacgtgttcttctcccgacactaactcgatcctcaaagtacttccatcggtgtgtatatagatgagagcgagagctagataatgaattgaaaagtgtagaaaatggcggctatgtttttagcaaagagaggagccataaacatacatagagcttcttcattacacatagattacaacaacagttctcgatctgttgttgatggagtcattactatcactaactctcgttacttcgcatcccacgtacgtttttgaaatttgttgaagatagattaattatgcatacaaaaatcgttgagctgttttcacttaatattttcacatattctgcaggggaacaacggagagaagtcagaggaagaggcgatggggacaactacagatggtaaagctccgaatgtgacattgggtcatgcggcggatacagccaaagaaggattgaaacgagccaccgatgcagccatcaagaagagtggagatgtgggcaagccgaagagtgtagagaatgatgaaggagatgatcaggaggatgtagcagtgggtgatgatggaactgtcaaaggccaaaatcagtcagcaggatgagaatatatatagagacttcgttaaaagattatccttaga

SEQ ID NO: 141583 - DNA, 2835 bp, Arabidopsis thaliana landsberg
atgaaagtggagatcagtgcacagccgctgtacataagcatccttattcttagtttctacgaggaacaggatatcaatcttatatttacaattgatatccttcaaaaaaggaattgtcagggggttcctcaaaccctgacaattccagtgcaaaatcctcattttggaaggggtggcttcggggtttccacctcccctttagcctgtgttgatggtcgactatgggttttccttttattggttgaagcttcatcttctgccttctcagtttccagtttacgtttgatacctcgatctataggtggaatcgaggaagatctcaattcttgaacagcaaaggtttcattaaaggaaaataaccgaatgtatactaaattttaaaaccgaaaaaaacagaccgaacctaaaccgaaccgaaattttaaaataatcgaatagatattacactttagaaccaaaagaaccgatggccgaatagatacgaatagaaaccgaatggataaccgaacgccaaaactatataaaaatcctctcttttttttgtcaaagtgtctaatgtaacaaaaattgtaagatggttcagtggtttgtttaaaatctccggttatcgtaaaccggtaacttgtaccgataccagaaccgagccaattttttatgagaacaaaaacctcaaaatcacatttttgtttgttgggataagtttgagcggtggattttgtatggagccgccgagttcgagaccggaggaacctccgtcatgggaggacctttacaaaatcaatcttatgccgtcgcagctattccttaagttccgcaaagagcttcaaggccttcgcgtcggcgtcaatctcgaggtctttccttctctatgttcaacaaaactttgagtttcttcttactggctaataaaatgggtatgaagttgtaaagtttgaaacttttttaatgataatggatttgagtgttggagttaagtattcggtttattaggcataagttacatctattgatgcattcaaagagacctgttttgtgctgtggattccatgagatgtcatcactgtgtatttttgactgtgtgtgcttttatataacgaaaccgagaatcattaacacgcgaagcttgtcttgaagttgtaaagtttggaactttatggataatcttccagttgtgtaacgaacccacaaatgatcacatttgcaaagtttgaaaatttatagataatggatctaattatttggtttattaggtattgattatctattgatgcattctcatatattttctgtgatgtttgagctatgagatgtctcatcattgtcttgaagttgtaaagtttggaactttatgaataattgatttgtgtgtggaaataaggattcagttttattagagatggttcacctattgatgcattcttgcttatgttcttttgcatttttgagccacgagatgtgtcgtcattgtcatatttttttgcattttccagttatgtaacgaacccacaaatgatcacattgcaaagcttgttttgaagttgtaaagtttgaaaatttatggataatggatctaagtatttggtttattaggtgttgattatgtattgatgcattctcatttattgtttgtgatgtttgagctatgagatgtctcatcattgtcttgttttggacttgtttggttatataacgaaaccaagaatgattacattgcaaagcttgttttgaagttgtaaagtttgaaaatttatggataatggatctagttatttggtttattaggtattgattatgtattgatgcattctcatatattttttgtgatgtttaagctatgagatgtctcatcattgtcttgttttggacttgtttagttatataacgaacccacgaatgattaccacgcaaagcttgttttgaagcctctatgtccagaaaggaagtggaagtttatatatgagccgctacaccaagaagttcgtgttttatcgaagaagattcctgtcaccagatttctaaacctccaggtttttttgttgtatgccttcttgtgtctctttgtggaaggtggaaatacatgtgttgtaatcttatcatatgcaggttggtgttggacataactttcaaatgaatgcaattggttggaaatggaagcttacttcatgtttgggtggagatggtgtgtctcggattcgaaataaaactactcttggtcttagtcctggtatcgatttccggtttggatggagagctgattttgtactcccagaggttactgggtaagtcacaagctttcatgtattccagtacactttggccttgtgttttggtcacaatgcttagctgatgaatgaaacagggcccttggtactgaggaaccgttattcaacatgagctccgggcgtttagaggcatcactagacagagtagaggccattgtaacccattcagattatctatagccaatccgtaagtgtcggtcttatgtagtttctttcaaactagtcactagatctgatcaaactagtttttgttacattcaggtacctttcgtgtgcaaacgaggacgagatcttgcattatcagaaggcaaacatgtgaaagcacaagcactttggtgttcacaaccaaaacataagaatgtccataagattttgcttcagagagatatgctgaaagcacaagcactagtgggtagtttcatcagttattatactatctggtaatcactagtttgatggacgttcatacaatgcatctaaagaaatgtataatcgttggatcgttgatacaagttaggttagataatgtatttgccaaatctagtatacggca

SEQ ID NO: 141584 - DNA, 960 bp, Arabidopsis thaliana landsberg
tagctcattcttgcctccaaacaaatattcctgacagaccagaccactcgtaagacagaccaaaccctaaactaaaagcatccacgttctttgtttttgtattgatggtctgatctcatatccatggagatggagaatcaccgccccggcagtttcacctacatgggccgcaaattcagcgatttaagtctcaacgatgactcctctgctttcagcgattgtaacagcgacagatccggcgaattccccactgcttcctccgagagccgtcgtctcctcctctcttgcgcctctgagaattccgatgatctcatcaatcatctcgtgtcgcatcttgattcctcctattcgatcgatgagcagaagcaagctgctatggagatcaggctcttatccaagaacaaacctgagaatcggatcaaaatcgccaaggccggtgcgattaagccgttgatttctctgatctcttcttcggatcttcagcttcaggagtatggtgtcactgcaatcttgaatctatctctctgcgacgagaacaaagagtcgattgcttcttccggtgcgattaagccgcttgtcagggctttgaaaatgggaacaccgactgctaaagagaacgctgcttgtgctctgctccgtctatcgcagatcgaggagaacaaagtcgccatcgggagatccggagcgattcctctgttggtgaaccttctagaaacaggcggattcagagcgaagaaggacgcgtcgacggctctgtactcgttgtgctcagctaaagagaacaaaatcagagccgtgcaatcgggaattatgaagccgcttgttgaattgatggcggatttcggatcaaacatggtggataaatcggcgtttgtgatgagtctgttaatgtcggtgccggaatcgaaaccggcgattgtggaggaaggaggagttccggtgctggtggagatagtagag

SEQ ID NO: 141585 - DNA, 1761 bp, Arabidopsis thaliana landsberg
gaagaagaaagaagatgcagtcggcgaaggaaaagatcagtgacatggccagtacggccaaggagaaactcaacatcggtggcgcaaaggcacaaggtcatgcggagaagacgatggcaaggaccaaaaaagagaagaagttggcccaagagcgagagaagtctaaggaggcgcaggccaaagctgacctccatcaatccaaggctgagcatgctgcggacgctcaggttcacggccaccatcttcccggtcactccacctaccctacccgagccaccggagctaattacccgccgggacagatctaaaactagctctatagctatattaagattagccgccttgtttaacaatatgatatgtacgttttttctaatataagatcagcagtcatgaaattttcttggttagtttcttttgatagtttatgcataaacaataatgtaatcttgcagaaataaacgtacttaaataattagtccatgtaaggtaatgaggcgagcgtgattatgcgagggaaaaaattggttgtgatactaattgattcagactacagtacgtcgaatgtcgatatataatactagttttagaaattagtgaaagcgatggattagatataatttccacacaaaaagttcaactaatattatttattagtcaaatagaaaatatgaaatacatatttaaaagatatccaaatttggttgcagtatagatacaacatatacaccttaatattttaaagtgatcaaatacatatctcgccaatatataacagtactaaaagaagaagaaaaataactagttagatagaattataagttttgaattttacaatggttttgtcaaatcagaaaatcaatattcataactcataagccatgcatactttatgttttaaaaaacctattcataaggcacaacgaacttctataacgacatcattttcggtaacatacttttagttaatgcaaagcttgcgtaaatgtctaggactagaagttagttggaaaatatctttctcttcatacaatggtatatagctggaaaattttcatactaacatacatgtgaaatcgtcctctgtctaaaaacaagtggacggagaaagacagtttagccggtgggtcagccatcgaactctagacaagtaacttcctattataacaaccaaccatagtttgccacgtattaaatcttggcgtgaaaaatctgtcatccgtgcatatacacacggtctttacatataaaccgcgttttaatctgaaaccatgcatttgtgttcgtattctttgttgtttataagctctgtgtttttatctttggtgaatgatctcgctcttaagtcttaacaactctgatccttctctcaaatgggttgtctgatttctcctgtaatgaaactccgtcgtctctcctcagccgactcgcggcgatttgcataccggaatctcgccgagaatatggaagatccagtcataagggtggtggtagggaaggagaagaaggagttcatggtcgaaccgtatgtactcgaagagtacccgttcagagtcttgataggttcagctagggatcgtgccaagaaccggttaaaccggaccggtagagtggtgtggcttgatcatgtcgactcgatcttatttgagcacttgctatggcttcttcggaacgatgcctctacgttttcggatttggatgttctcgatatcattgaattctatgctcaagattgttagggaaagaaatggattaacagtg

SEQ ID NO: 141586 - DNA, 1242 bp, Arabidopsis thaliana landsberg
atggctaatgtgattgcaaaacacataccaagagagcgtcatgtcacaggcttttctcaaaagactgtgcagcgatcgagtcgtgacagtcagcaggtaatactacatcctgctatgtacatctagcccggtccttcatatatcagatctgacttatcatgtattattgcaacaggaactcaacaaaactttggctttcagcttctgtgcgccctcacatgcgaatcaaaattccaaacttgatctgcaaccaggatcttcttcaatgacacgactagatccttcttggaggaacacacttgtgggctttgctatgctggtgcaagtcgcattttccgagggttactgtgatgatactgattttggcattagttgtgtttgcaaatggaaaaacaaggaaggccactctcataggagagaaataaatttgcattgttgggctttagggaaagctgttgaaagggatcatacgtttgtcttctttgatgtcaacatgcgtgcagataccgatgaaggaaatgaccccgatatctgggctgatttagttgtttttgagttctttcctgtcaataaacagagaaagcctctaaatgatagttgcacagtgacaagatgtggagtccgtttaataactgctgtaaactgcaatacaagtatcgagaatatatcaccagttttgtccttggatccgatggaggtttctggttatgaagatgaacaagtattgagagtcagatatgctggtttacaggagatatataaagctttgtttctttacatagcgggtttgttcaatgacgaggatgttggtttggtagcaccacttattgctcacattattgacatggacgttagttatggggctcaaggtcttagcctataggtctctcatacgtgtatcttccaatggagaaatagtgatgcactatttgctacgacaaatgggtaaagaaatcctccatacagaatcaaagaagactgacaaattggtcgacaatattcagagttccatgatcgcaacaaaggaaatcgagatcactcgttcaaagagtcgccgaaagtatgttgcttagtttttagattactttttgtagtatatcatacattttgtagattgtttaaaatgagttcttattgacggtggatgcaggaacaacaaggaaaagagagtggtttgcgtagtggatcgaggcagccggtccagtgacctatgggtttggcgaaagtatggtcaaaaaccca

SEQ ID NO: 141587 - DNA, 1168 bp, Arabidopsis thaliana landsberg
gatatttcccaagactacacggtttgactcatctaactatgatcctctcgttgggtggattcatggggctcaaatggttgccttcaatatgcaagtaatagttttaacactatcctctatagtatataagcagagattcttaatagtaaataccaactatgttttgtgtaaatgcagagccatgggaggtatctgtggatgatgcaaggaatgtttaaagccaatggtggatgtggctatgtgaaaaagcctgatgttttgctctccaatggtcctgaaggtgaaatctttgacccttgtagtcaaaacctcccgatcaagacaactcttaaggtttggtctttgtctcagtttctgtttcctgttcttgaaaagtaaggaaacatcttagcttcgtgtctttgtggtgtatgattaggtgaagatctacactggagaaggatggaatatggactttcctttagatcactttgaccgatactctcctcctgatttctacgcaaaggcaagtgttcattcatatgtagaaaacgcaataagaacatggtttaatagccctatgaagaagcttataaaccctaattaggtttcttggctatcaagtcattggatatatctcaaatgtagttgttttcctttcaggtcggaatcgcaggggttccattggacacagcaagttacagaacagaaatagataaagacgaatggtttccgatttgggacaaggagtttgagttcccattacgtgttcctgagttatctcttctgtgtatcacagtcaaagattacgacagtaacactcagaacgatttcgctggccagacatgttttccgttgtcggaggtaaggccaggtattcgtgccgttcggctccacgatcgtgccggagaggtctacaagcacgtgagactgctcatgcggtttgtcttggagcctcgttagcgcttcgtggataatgttcatttcatcactcgtgtcaatgtcggtacacgttttttatgtttgtaatgttaaggtgtcggtatacattagtcagtcatactaagccatacgataataagagatgtgaaaagaaaaaattaaacgtaattaagatcagcaaaattatgaaacgtatgactttaatataaacaatttgtttgaacagttgataaagataattttgttt

SEQ ID NO: 141588 - DNA, 513 bp, Arabidopsis thaliana landsberg
gcattccttgttgggtttatggattttataggtggtgttgactccaacccatcttgccattgccatggaatatgctgctggtggtgaactattcgagcgtatatgcagtgctggaagatttagtgaggatgaggtgagcttgccatttgaaaaattgtgctgtgcttttgcgaatatgaaattactagtatttaggataatctgcatggtctttggaaagattaggaggaagggaacaagagaaaacatgtgaacctccttttatttagtatcaggcattaaacagttagggtctacgttctaatcctttctctcttttccaggcgagatatttcttccagcagcttatatcaggtgttagctattgccatgctatggtaatgtagagacaatgacttaagaaaatttacttatccattggctgtttgaagtcgtttttttttaatcatgtgttgactattttgttgcagcaaatatgccatagagatctaaagctcgagaatacgctcttgg

SEQ ID NO: 141589 - DNA, 306 bp, Arabidopsis thaliana landsberg
atgacggatgatggaaagtggctggtaagtgtatgcaaagattccgtgatatctctatttgatagagaagctacagttgagagattaatagaagaggaagacatgattacgtcgttctcgctttcgaatgacaacaaatatatcctggtaaacctcctcaaccaggaaatccgtctctggaatattgaaggtgaccccaagattgtgtcgagatacaaaggccacaagcgttcacgattcatcatcagatcatgctttggtgggtataaacaagctttcatcgctagcggaagcgaggactctcag

SEQ ID NO: 141590 - DNA, 1334 bp, Arabidopsis thaliana landsberg
tcacaattccaacactcccccaagaatccgtagattaaatccccaattcaattttagggaattcaatcccattgcttcttcttctcttggtgattcgcctcttctcttgtgtgaatccctttcacgatctttggcacagctcactggtaagcttgccttcttcatctccctcttgctttgaatatccttgcatcgagtttcttcttctcgacgtatttgtgcgtgaagttcttcatctccctctgcttcgattttccttaatcgaactcatcctctactttcttcttttccaggtgatctggagtgaagtctcggtctcttgtcttcctctaggtgattttcttcttatcacacaaaggcaactcttgactctttaatctttatcacttcaattcaactactccttcttctcttttctacaattgacctgtcttgtcaattgtttctgattttcagatattggagctcttgggatttctctttccctcaagcagtctccatgtcttctccgcatcttctctgtgagcctccctcacgtctcttccggttgtcgatgcagccttcttcagcttcctctctctcatgtaagcttctcttctcctcttcttggtgtccacctttgaacacctccttctttactttgattcttggaaccatcaccttagctttagcttctgtttgactcgaaccatcatcactcggctttctctaaccgtagtctatttggcttctccttgagtcatcaccttagcttcttagccttagccgtttggctctgtagagaaaacgaaactgaacggttgcttgtcagagaaacaaacacaaaaattgataaccgagttcacggcttaaccgctatgtctcgggggagatctcttgcttccaaagcttcgctatatcaaagagattacaaacaccatctgacttgtgatgttgtctttggtttcaggtacaatctcaagaagaacaaagatcaaagacaaagaacaaagaaggagaaagcttcttgaagaataaactctcgtttcttctctttctctctagaactccctttgtgtcttgtctcacacctacctcaactatcatatcccacgtagagatatatagatgtgatgggccacttttgctcttcttttctttatgtcaatttcgtctggcccaataagagctcaatgttgtgtgttttggtcaaacccaataacaatctccacctcttgacaacaacacactttctcgaagacttcgacatctccatctccgacaaccaacgtcatctctttctcatctcgggaaataaacaccattgccggattccaaccttcttccgcgaacat

SEQ ID NO: 141591 - DNA, 383 bp, Arabidopsis thaliana landsberg
aaaaagaatcagaaagaagaagaagacgactccaaaaacgatgccgtattacaccaacgacgacaatgacgtcgacgatttcaccgaatacgatccgatgccttatagtggaggctacgacatcaccgtgacatacggccgttcaattccaccgtccgacgagacttgttaccctctctcctctctctccggcgacgcctttgagtatcagcgacctaatttctcttctaaccacgattcttctgcttatgacgaccaagctcttaaaaccgagtacagtagctatgcacgacccggacccgttggatctggatctgattttggccggaaacctaattctggatatggagggagaacggaggttgagtatggccggaaaactg

SEQ ID NO: 141592 - DNA, 2372 bp, Arabidopsis thaliana landsberg
atgctaccttggcttgccatacctttgattggactatgggctctctctcagcttcttccaccagcttttcgttttgagattacttctcccaggcttgcttgtgtatttgagctcttggttactttgttctggtacgaggttatgatgcctcagctctctacttggagggtacgtagaaatgcccaacttagggagagagaaagattagaagctattcaactgcaaaagttgaagaaaaatgccacaaggcgttgtcgtatctgctcaaatccttacagggaccaaaatccaggtggtgggaaatttatgtgttcgcattgtggacatgtatcaaaacggcctgttttagacatggccttgtcttccggattagagatttctgattcagggattttgaaggatcttgttggaagaggtggaaagatgttgaatgggaagggatggagtgagaatggatatttgcacaggcaagagtggtctgacaacagcacatggactagcgggtcaagctattggcggaataatagtggcgatacgtttgaaggagatgaaaattgtttggtggagaaatcatattctggtggtgttgtttttgcttgcaggttgttgacttcttttttcatgagcattttgtggctttggagaaagatatttagatttagctcatcagttggtgattcatcacttgaccctgagcagaggcggatgttggctaggcagggtgagaacgggacaagcagtcatgaaagtagggtagaaaaggcacgtagaaaagcagaggagaaaagacaagctaggctagagaaggagcattcagaggaggaagagagaaaacaaagagaggaagtagcaagattagtagaggaacggagaaggctgagagatgagatacttgaggccgagaaatgcagcaaattttcagtggctgctaaggagaaagacactaaggaggcagaaaagaaacgtcaggagagaagaaaagagagagatagggcctcaagtaagagcaattctgatggtgaagaggttgacaagagaacaagaaaggaaaccgagcagaagcgtgggcttaataagagtgatcatctggaacatgagaggcacgcacctgataatttaagggtccccaacatggaaaggagacatggacatggtttagaaaataatgtcaccagtaacggtacaaaatctggtggtaggtactttgatcgaatgaagggtacatttttgtcttcttcaaaggcttttactgatagtcgtttatttgggagaggtgttaatacttctgctacaattgcaagagaaaacaagcccattggttctgcagataattctcatacctatgctcattctagtcatactaatcctcctgaattcgtggctatgaaatatgtccctaatgaagaggaaaggaacactaataatccagtaagtaccctttccaaaatgtctcatctatttggggtctatagtttcgagtgactagtgtgcttaaagaataaatttcacctgcactcatatgttttctgttataaatgatttcgtcttgataaattttcaagtaaaatctaattcaatttacttgaaacttatttttgtcaatgaaaactgaatatttgatactgtttcctcaggttgtttctgagccaaaaccgagtagagaacctaaaaaatcatggcaccaactgtttgctcgttcaactcctgctcctgtttcctcaaatgttaatactataagtagacctagcacgaatccccagccaaatgttcagagctcacaggttcccagtcaagtttcctcaatacgaaccttcgacaatcccatcagttttgggctcccatcgccattcaccataccggtgtactctagtggatccactaccagtagtttaggtttctcacctccaacagaatttgtttttcctcaacccggtgaagatgagcgttttgaagatccatgttatgttccggatccgatatctctactaggacctgtttcagaatcacttgatttaagagctgctgggtatgaaactggcataggacaggtaaaataccaggcgatgaagaatacaccttcttgtgaagccaacaagccatctccaattgagtctcccttgtctagatcacgggctgcggatgaaaaacaagctaatgatggaagctggcaaatgtggaagagtcctctaggccaaaacggtcttggtttagttggtgggtcagcaaactgggttataccttccgaaataagtagatctatcgaggaaagtgatatgcatcacgcgcctcagcatagaacagaatcattattttcaaaagaggattgccagcttcatcaaggtgcttattcacaaagattaataattacataa

SEQ ID NO: 141593 - DNA, 1637 bp, Arabidopsis thaliana landsberg
agtaataaatctcaaaagactggaaacgactgcgtataagtccgtgacctggttatcggagcgtaacttctccggcgaattggacaattttgagaaagacggattatggactccatggaagctccatctctaccatttcaatctccctctcgttccaggttttaattttgagtttataaggattatctcataccttctaacaaaaaccctaaaaacccaatttgtttttttggtttgcagtcaacaattgcatttctacctcgccgtggatcgtccccaattcaaaatggtaagtaaattgtatcaatattccttgtaatttctcatcaagactgagattctgaatcgcaaatttcgaaactttggatgtgggcacaggagactgtagtggaattattaggcgttctaggtcgtcgtccatggcttccgattgtagtctgttgcagctctcgtgacgaacttgacgccgtctgttcttccttatccactcttccttacatttccttagccgctttggtatctctctctcttcttctctttaactttcatagctgaggcatgtttcttcttagtcttctctttggtatttgatttgaaaagacccttcttgttgattcacttgcttggttcatcatgatttgagttcattgtctttcattgtttgattgatatcatcggttttttatatccgtttgttattgttcttgttgtaccactttcttgttcatcatggtattaacttacatgttcttcccactaggttatgtttatgttcaacgtcttttgtgtctacagtacagcgatctagcagatagagaacgagctatggttatagagaaattcaggcaagcaacaatcaactggaaccagcaacttaactctgtggtagaagaaggtttggaagagagtgaaaacggaaaagaagaaaagacatctcatttggtagttgtgaccgatgtttgccttccgttactctcatcaggagaatcttctctatccgcacgcgttctcataaactacgagcttcctacaaagaaggttggttggtatttttcttaatcaatctgcaattgtcaagtcaaaatgtccagaaccttcctcttattcactacttgtaatgaccatgtttcaggaaacatatacaaggcgtataacaacttgcttagcttcaggttctttttttttttctttcaaaacaaactctttttgttcatcaaacaatgtcacttaacatttgagacttttctcttaaggtggaatagtcataaacatggttgttggaggtgaagtaacgactctcaaaagcctcgaagaaagcagtggcatactcatcgctgagatgccaatcaatgtatacagtagaaccaatcaatcaaagaaaaagcaagaaacattctgctgtttttatcttaggttaatgacttcaaatgtgctttcttattgcagatttctgaaatcttataacaacacatggatctccgatctgaagaattctaaatggggttaatggctcttaagccttttgaaggactagaggagatgaatggtggattgataacgctttatttgtttgattgtatccagatgtctcttgaccattgcgctcaaatcatcaaagccaaacttattgtaaaacc

SEQ ID NO: 141594 - DNA, 738 bp, Arabidopsis thaliana landsberg
gttgccaaaattgattctcacaatcctgacattctcttggtggagaaatctgtctcgcggtttgcgcaggaatatcttctcgcgaaggacatatctctcgtgttaaatattaaaaggtcccttctagagcgcatatcccgctgtactggtgcgcagattgtcccttcgatcgaccagctcacatcaccaaagctaggttattgtgacctgttccatgtggaaaagtttgtggagacacatgttagtccttgtcaagttgcgaagaaaatggccaagactttaatgttttttgatggctgcccgaaacctttgggttgtacagtaagttccacaacattttaaggtgttttaacacattagatccttgacctgttattatgtctatgcatactgtatgtctgatcaggaaataatcttaagtatggtgcttgatctgtctttctcagatattgctcaagggggcacatgaagatgagctaaacaaggtgaaacatgtgattcagaatggagtttttgcagcatatcacttggctcttgagacatccttcctagcagatgaaggtgcttccattagcgaacttcctttgcagaccccaattactgtggcgttacatgataaaccatcaatggttaacagatcaatatccacaatacctggttttactgtgtcaagtgctgaaaagtctccaacaactgagttaaggggtgagccacataaagccaatggcgaccttactg

SEQ ID NO: 141595 - DNA, 5199 bp, Arabidopsis thaliana landsberg
  unsure (1)..(5199): unsure at all n locations
taaaaatgaaatcaaatcaacttatgggtaacactaaagaatgtccagccttctatgtttacggataaagggttggaatttcgttggcaaacctgtcaaacttcatccaaaaacagaaacatgttcgagtttcgatgaagcacaaattttagtggaggcaaatcttacaaaagacttactgactgaatactcttttagtggtgaggaagaaggagagttagatgtggtgatcaagtatttatatccttggctgccaccaagatgtaattgttgcaagaaatggggacactttcaaaacacgtgcttagcactggactcgaacttgtctcacagtaaagtttccgatatgaatgaggtggatagcgaacaaataacagaagagtatcaagagcaaacaggctattgagaaagttatggtggaaaaaattttggaagaggtccaagcaaggataaatttacctatcgggggaaacaatcaagataatgcaacagaagaagagtggtccagaccatcaaagtctactcgtacccccgggaaaacaatagatataccaaagtttggagaagtctccatcctttctaattcctactctgctcttggcggtttagttgaagaggttaaggagaagagggaagaagatgcagacatatctatgaaagagggggaaaatcacgttgataannnnnnnnnnnnnnnnnnnnnnnnngaaacaatagaagaggagtcatctgatacaacgataacaaatgagatacctcttttatctaagtcgatgcactctaaatcacaggttgattcctagatagaatctacctagaggatcaaaaacagcacataagacagtttccgttgcttatactcaaataagaggtcgccctcagagtaagaagcgccaccaaaaaaattgataatgtcgtgcttctggaatgtccgcggtttaaacaaatcaaataagcattccgttattaagaagtgggttaaggagcagaagtttgggtgtctaatagagacaagagtgaaggagagtaaagctgaaaggttaggaagtaagttatttaaagacagggctattgttacaaattatgaatccaaccgaagagggcgtatttgggttctatggagaaacgatgtcagattaactccgttttgaaaagcggccaagtaattacgtgttcagtaaaactagaggatcaagagaatgagtttttttgttcttttgtgtatgcctcaaattttgcagaagagagaaagaatttatggagtgagttgcgagatcacatcgactctccaattattagtaataaagcgtggattatatttggagattttaatgaaatcctaaatatggacaagcattcacaattggagaaccagcctgttgtaacttctagaatgagggatttccaagacgtaattcaatactgcactctttcggacatggattctcacggtccgctatttacttggagtaataagagggatcatgggttgattatgaagaaacttgatcgtgttttgatgaatgacgtatggctgcagaattatcctatgtcatatagtgtttttgaaacttaagatgtaagataaatctgactacagtgaatgaagaaaggggtcgtgagcggcgaccttttaattttgtcaacgctattgatatgtctataatttgcatgttttcagtgtccattcatcatcgttttgagtccagtttcgtatcattcatcactgtgttatatcatttctcatcattcttgcatactttgcatgattaggagagttttgcatacatatttcatttatgagttgttttcaggttatttggagctgtttgcaagcaaattggaagaaacgagccagaaccagaagacatactcgacccccaggtcgagtgactttggagccattcttcccatccactcgaccaccaggtcgagtgactttggagccattcttcccatccactcgtccaccaggttgagtaacctcagctcaggccactcgatgacactactcgacccccaggtcgagtgtcttcactcaccaccatcaccattatctcgaccggacactcgatcacatcttcacaggggagctcaaatccgcactcaaccagacaagctgagcacaaggaagagaagaggagaagacaaagtgtttggaagcggcctggacctccatcggatcacgaagcccatctggcccattatcactctatgggccaagcgattaggttattggcccgtctactatcattttatttcgttttgtataaatagatgtcttagggttctgtcctgacatctagtcgacattgagtttttgcttcagttttattttctgttttactctactgcgccgcttttgcttctgcaacctgtaattcgagatttttccaagttattcagattccgcatttggtttcatctgtcatcctttttttctactctttatctctttacttatgcaatattatcatttatctgcgtttatatctttgagcatgttgtctgagtagtgacttagaattcttagggatgggatagagtagttgtggaatccttagtttgtagaatggtcaagttttagaattgattgaatcccttcaagactagttgcgtttactgcttatttctttctaatcaactggaattcgatcccaagcattcccgcacccagaaggtgttcgatggaatgcttgatccactagttcctgagatactcgtctctatcccaaggatttggccgtttagagcctttattgactttatcagtctattcttattgcttgcatagttagattccgttaatgggaattagtctgggctagctttgcttgaggatttctatcacgggagtgaattgatttgttgttgaacctgttgtctagggatagcttgattgcgcctgttaatcattcggataggctaggataccactctattcgattaccccatccttaggaatttctcgtctatctgatttctctgttttatcgttatcacttaatcgttctcattgcttgtttctttgtttttgcaatcactcgatcaagttactcgaccacacccagtgtctggcaacagactgtgcagtcgagtatatatgtttcatatcctgcctgttactcggccacatcctacttctggcatcagcctgttgtggtcgagtgattttagtaattctgttattgtttctgttttctgcatgttcactaggactgttagaaaccccaaaactgttattgcttggcttgacttagtgacttctgatcacatctcatctgtttgcatcacacccatttggattgacacctaaaatactacaacgacatgattggtgttttaggacaattgactaaaaacctattatcagtgggcttgggttgaagaagcataagtcggagtgaagcttgtagattgctgaaccggtttctgatgtgtagattgctgattgtagctcatatatccatgttgatccatcttctctaaagtggcaaaactgtcaacatgtgcaacatactgaacttgcgttttccttgtaatgtcaacgttgttggtactaatgctagaagataagctttcaatcaacattgttgcatcctctggatatcttgacatgaaattcccattactagctttcaatcaactcctctaaggaagatacctaacaactgaacctcactgaaacaatgatgcgggcaatctctctgatatcctctgaatctgatccaagcggctttaaatgcttcagctgcttcttgagagaaggtagagatcttcattctcagctcctcggaccttgcatcattataaaagttgttgagaaaactaacctttattgctttccaagttgtcgtcgatcaacaccatcggcgatttctggtatcaggtttccctgttcatctattttctgacccttttcattgtatgtctgaccagctctgtcgcgtaacactccaacagcatcaggtactactatcaacatcgtgagttgcgtttgaatttcttaaactcctgaaacacaagaaaaaaaagaaaaaaaacacgcaagtaacaaaagaaaagaaaagcttagcctaaattctacacctaatctactggtaaatcgaagagaacttcggcaacgacgccaaatttgatatgagtcaaattaccctaatgactattctctcaaataaagaggttgttatagcacttagggactgaattccacaaagttctcggatcacacattagactaacagtttcgaataaagctaagcagaaaatattataaaagtaaaagacaagaaagcaattaaaagttggttttagattcagatgattaagatgtcgggtttaggaaaactctcaggagatatcagaatagtagatttagcagtaaattaggaatattatcgaaccattctagaacataaatcactaatataaagtaaccggtggtgtgtcgtgctactcactatgcttaatagtattgattccaactctcttgtaaatctcaagaactaagcaagcattataatcaggtttgataagttcacctaagtaatggacgctagcacgcatctaaatactaggctcatctaagatagttccagtaatagatacctatggtgggtatacctattatcctaaaatcaagttttagttagttactctaaaactaacattaagaacaatcatgaagaattctaaatatattatcctaacagggtttttgacctactaattcaaccaaatccctaatgagcatccctaaacccaacaagagaactagtcaagcatgatcatagaaaaacaaaacatgattgaataagaaatcaatgatgaaattaagaagagaaaatagtgtaaaagaatattctctaaagggagtctccataggggtttgccccaaagtacagaatagagaataatacttagatctaaacaatgaccataaaaatcaatatataagttcctaaaacgtgatgggccttctttagaaataaggaaaggttctgggccgaattgggaaatcttcaaaacttcaataagttgcgtctataagatgccgtccggtattggtgtcgctcgacacctacgtggtttttagtccccagatatcttctgcagcataagttctctgttttcctctagaatgctccattatctccaaatgaatcccgaaacatgtaataatatgaaaaagactagaaa

SEQ ID NO: 141596 - DNA, 2339 bp, Arabidopsis thaliana landsberg
gcaaacaccgcctttcaggtcactgggacagacaataaaaaaacctttttcgtttatgttccatgtctgaaattaaaacattttcaagtctcgtgtatttcagattctccatcttagttcttgtaacctctccctcttcttctccaaattccacctgagagaagagaacttattccacccaaaaagcaataatatatagtaccgtactttgatttttttgataatctgttgattgaagttaagccaaaactcagctctgttcttattcttcttcaaacccaagtttcccacttcactgattctttcatcttagctcgttttaaccacaaagttcagttcttttttggtgtgtttctttttcgttattggcttttgccttttttgggtatagggtgtttacgatttatctctcggttccgatgttgttcaaaggtgtttttgctgtctttttcgtaatcactttgttgtacgcaagtttgttaattgaagttgaagggattggtgtgaactggggctcacaggcgaggcatcccctacctccggctacggtggtgaggcttctccgagaaaacggtatccaaaaggtgaaacttttcgaggccgactctgcgattctcaaagctttaagtcggacagggattcaagttatggtcggaatccctaacgacttgcttgctcctttagccggtagcgttgcagccgctgagagatgggtctctcagaatgtatctgctcatgtctcctctaatggcgtcgatatcaggtttgtgcttatatctcattgaaacaacatgttctctttgtttgttttgatcaagagctttggaagaaatgattttagaacccaaagttccagtctttagattttgatctaaagcaaagagattgaagttagttggtttgtgtttgaatttaggtatgtggcagttgggaatgagccttttctaaaagcattcaatggaacatttgagggtataactcttcctgctcttcagaatatacaatcagctatcatcaaagctggtttagcgactcaggtgaaagtcacagtgcctcttaacgcagatgtgtaccaaagtgcgtctaatctcccttcggatggagatttcaggcctgaaatccgtgatctcatgttgaacattgttaagtttctgagtgataacggagcaccattcactatcaacatttaccctttcatcagtctctacaacgacccgaatttccctgtggagtttgctttctttgatggaactggtactcctataaacgacaatggaagaatctacgacaatgttcttgatgcaaactacgatacacttgtgtggtcgttgcagaagaatgggtttgggaatttgactattattgttggggaagttgggtggccaacagatggagataagaacgcaaacttgatgtatgccaggcggtacaatcaaggttttatgaaccgtcaaaaggctaataaaggaacacctatgagacctggggcaatggatgcttacttgtttggtcttatcgatgaagatgccaaaagcattcagcctggaaactttgaaagacactgggggatattttatattgatggacagcctaagtatcagctcagtcttggcagtggtaacgggctgatccctgcaaaggatgttcattatttggctaagaaatggtgtattcttgcgccaaatgctaatcttcaggatcctcagttgggaccaagcgtgagctacgcttgtgatcatgctgattgcaccagtcttggttatggctcctcttgtggtaacctgaatctagcacagaatgtttcgtatgcgttcaatagctattaccaggtaagtaatcagctcgacagtgcgtgtaagttcccgggtctctctatagtcagtactagggatccttctattgggagttgcaaattcaagataatgatcaagtcagaagatgctagtgaagcaagtgccatgatgcctataacacgatcaacggcagtgctgctacttctctccatctgtctgtatattgttctgtgaatactgaagaaaatttgatgggtttgattatttctttttttccttttttcttttgcaaaacttttggtgtttatggagaaacagaaaactacagtgagatttatgtatacttggtttgatctcttatttctcgagagcagtttggtgttcactgtctctcttatacctctcttgttagtaatcagaaaatgataaaaatctcatctttcactttagctgttaaagcccaacccgaagtttcaaacattacaccttatattagttaagcaggtttgctgcaaaagaggaatcaatgaggcttcactgctgtga

SEQ ID NO: 141597 - DNA, 843 bp, Arabidopsis thaliana landsberg
atgagagttccacggaggattcgtgagaggcttttgtctgactgtagtaataagaagacagtatcttttgttcaagatattgaagacaagcttcttcatgcccatctacgaagacaggttctgtttttttttttttttttttttaatttcctgattaagcctttacctctgaaatgactaagtctttgatttctatatttaatttgcttaaagtttttgtcttttcgtgaattctgtatagcaattttatcataacgtttcgagaaaggctcgtgctaaacctagaagtccttcacgatcatctgatgaagaacttggccaacgaatcgaagcaagacttctggctgctgaacaaaaaaggtgaaaacttcaattcaaagtctaagtctttcgatggtttatctctgtagattgatttgattgttgaaattgttaggttggagattcttgcgaaggcacagatgcgtttggcgaagttagatgagttaagacaagcagcgaaaacaagtgtggagatacggtcggagagggaacgtgtgaagcttggaactcaagtggagtctcgtgttcaaaaggctgaagctaatagaatgaagattctcaaggcgtctcatcagaaaagggcttgtgctaaagagagaacgtcacagtctatgatgaggaggatggctagagagagtaagtataaggaaagagttcgtgcttcgattaatcagaaacgtgtagctgctgagaagaaacgtcttgggttgcttgaagctgagaagaagaaagcacgtgctcgtgtccaacaagtacgtcatgttgccaactctgtttctaatcagcgtgagatagagagaa

SEQ ID NO: 141598 - DNA, 1284 bp, Arabidopsis thaliana landsberg
ttctacaaaaaattcaggttccggttaaaaaaagtgagcaagagagtaacaaattcaaagatccatatatattatccgatctaaacgaaccaccaaaagcagtatctgagatttcatccccaagaagttccaagaacaactgtgatcaacagagcgagatcacaacaacaactaccacaagtactacatcaggagagaaatcaacggctctcaagaaaccggacaagcttgttccatgtcctagatgtgaaagcgcaaacaccaaattctgttattacaacaactacaacgtgaaccagccacgttacttctgcaggaactgtcagaggtattggacagctggtggatctatgaggaacgttcccgttggctcaggtcgtcgcaagaacaaaggatggccttcttcaaaccattacttgcaagtcacttctgaggattgtgataataataactcggggacgatcctcagtttcggttcttcggagtcttcggttacagagactggtaagcatcagtcaggtgatacagcaaagataagtgctgattcagtttctcaagaacataaaagctaccaagggtttcttcctccgcaagtaatgttacctaataattcttctccttggccttaccaatggagtccaacgggtcctaaagctagtttctaccctgtccccttctattggggatgcacggttccgatataccctacatcagagacttcctcatgtttaggaaaacggtcaagagatcaaactgaaggaagaatcaatgacactaatacaacaataactactacaagagcaagattggttccagaatctcttaaaatgaatatcgaagctagtaagagcgcggtgtggtctaagttcccgacaaaacccgagaaaaaaacgcaaggattcagtttgttcaatggatttgacacaaagggtaacagcaacagaagtagcttggtctccgaaacttctcacagtctacaagcaaaccctgcagcgatgtctagagctatgaacttcagggagagcatgcaacaataatcagacactgatatagatatatattcatgaactgagagatttgagtttagctaattgttaccttgtggaagaaggcaaagctgtgtagatagttttgttgtttcgacctaagagtagacatagtatttcctgttgtacacaaccagagatatttttgaagctgtagatatttctctccattgtgtgatgaagttgcaacatatataaacctttagattaatatctacgtgatctatcttgaacttac

SEQ ID NO: 141599 - DNA, 122 bp, Arabidopsis thaliana landsberg
catgatgatgagccatcacgcttcagctcaccacccgaacgagcatttggttatggcgactcgcaacggaagatcagtggatcatctacaagagatgcgtcggccaccaccagccaatagac

SEQ ID NO: 141600 - DNA, 832 bp, Arabidopsis thaliana landsberg
attaacaaacgcttctaggctaaaaacgttatcgtaatctttaatcttcaggcttcttttctaaaatcccgactggttaccgagggctagaaaatccggtcaccgtcgccggagacaacctcggtttctaaacgaaaccatcgtgaaggacgggaaaaaggagcttgaagacaaaacaatgacgagcgttttcgacgaacataaaccctccgatgactctcacgagtccaagatcgtcatcaatggtaatgtatctctatgttccttcggtttatttcggtttatcccggttttgtttcgattctttaaatcttctagtcgtttatggttggttggtttaagagtgtgtgtttggattgaattttaacgtgcaggagaagaagaggtgttggaggaggagaatgataatccgattgaagaagtccggttaacggtaccgataaccgacgatccaacactaccggtgctaacgtttcgaacatggactcttggacttttctcttgcatattgcttgccttcgtgaaccagttctttggtttccggtcgaaccagctttgggtatcttcagttgcggcacagatcgtgactcttccgctagggaaactcatggcaaagacgctaccgacaaagaaatttgggtttcccgggacgaattggtcgtggtcttttaaccctggtccgttcaatatgaaggaacatgttcttattacaatatttgctaacaccggagctggtggagtttacgccaccagtattattaccattgttaaagcgttttataatcgtcaacttaatgtcgcctccgccatgttgctcactcaaaccactcag

SEQ ID NO: 141601 - DNA, 514 bp, Arabidopsis thaliana landsberg
  unsure (1)..(514): unsure at all n locations
cacacatggagacntcacagtctttttctccgtcttcttctttaacgttttcatcttcacagtcttcttcttcgctagagtctctcgtgtcttcctccgcgaccggctccgaggagctaggggagattgtagagctcccaagtttgggatcgagctatgatggtttgactcagctaggtaacgagtttatattctctgactccgcagacttatggccttatccaccgcaatggtcagaaggtgattaccaaatgattcctgcctcgttatcacaagattgggatcttcaaggactgtataattattaagtcataatcataaaaatatactagtaatgctgtgtttaataattactttttaatgacccctttattttgtatagggcggctttaggtttatttgtctttgaatcttcttttctcaatttgtgggtgtgagagagctcgatatatgaatacttgtacatacttctcataacatgtgtttttttttttcttaataaatgtggaaactt

SEQ ID NO: 141602 - DNA, 550 bp, Arabidopsis thaliana landsberg
gtggttattctcccggacatatatgcaaactctggaggagtcactgtaagttacttcgaatgggttcaggtatgtatgagtctctcaacaacttacctttgacagaccaagtactcgaacaaaaccgattttgatcagattagttgtttccggtaatgtgcagaacattcaaggctttatgtgggaggaagagaaggtgaacgatgagctaaagacttacatgactcgctctttcaaggacttgaaagagatgtgcaaaactcactcttgcgatctccggatgggagctttcacactcggtgttaatcgtgtggctcaagctaccattctcagaggctggggagcttaaagattatctaatctcttatgcaatctctttagcagctcctgaataagaattgagccaaactttaatctactttttgttttatcctcctactttggcttagaggtcatcctgagttaacagatatgtgtttacaagtactagaagacgcttctgtatgtaataaaaccttggactctaatagttaatgagcttttttactct

SEQ ID NO: 141603 - DNA, 385 bp, Arabidopsis thaliana landsberg
gttttatttaggctcttttgtgatggaggatactcggtcagttgcttcactcatggactctacatcatccaagattcagcagcttcagaaggcgtttgctgaacttgaaagtcagcgtgctgtaacacttaatctgaagtggaaggaacttgaggagcattttcatgggcttgagaggtctttgaagagaaggtttcatgagcttgaagatcaagaaaaagagtatgaaaccaaaacaaggaaagctcaagaactggtggagaaaaagaaggcagctgttgaggctaaggagaaggcggcgcttgaaaggcttcagaagaagagagacgcagctatgtttactataaacagtgctttggataagtataacaacgctcctgtcaga

SEQ ID NO: 141604 - DNA, 498 bp, Arabidopsis thaliana landsberg
ttgaatataagagatacagctaaaggcaatcataataagctgaggaaagagctttgaatcttcatctcaaaaacgcaaactgcctaattattatccgtaaaccttaaactcaaaggataggttggaattagatctaattaagcaagcttggactgaaaaccaacgccatcaccaacacacatacccaatgaattcttatctaaagacaatcaacggtcgaaacgtaaccgtgatataaaccaaaaggaaaagaaaaccgaactacgccggattaacaccgtgagctagccatcaccgctgaaagagccgatgatgctagacaagggccgaccatgtactgctgtggaagccaatatatgtcagacgaaagccggatactacaccggacggcaattcaaccatcaccgacgacatcaatttaccgtcgtcgaaaattttggtttgatgtcaatctctctctctgaaaattttgagagagagaagagagagagggccaga

SEQ ID NO: 141605 - DNA, 2408 bp, Arabidopsis thaliana landsberg
gtctgcagttcctgcagcttgaggaactcatgcgaaaaggcatttttgttgacaaacaaagaggatgaggctcgaaccattgaccttatgcgcattttgttcacctatggttttgacccattgaatggaacagtggccaacaaaagtctcctgaagaaaaagtctgttaagtctgtggtgcgtaaactgctgcatgagattgtcaagttaagcgctgtaccaatagatcctaatctcactccaccagttatcaaaagagcgccccctaaagtcaagcagccaccgccaactcctaaacgacgtgttggccgtgatgatgttgagatgaagaaaggagattggctatgcccaaagtaagtcacacctttgctcatctgatgacctcatggttttctttataagcctatatcacagtcttagcttaaccaactgtaaaattagatgcatagccttagctttgaatagaggcttagaattacaaagtcataaatttgtccctgttctgcttgtaatactaagaaagagtcttccgagtccaaggcgtcgatcatagaatatatcatggtttccacgtgacaatgcatattagttattgatgaagttaggtgagacataactcttcttctacatttgatccttcagccatccagaccgattagttattagcttgagatgtggtctaataaattttacatagagcatcaggtttggttgaagataaatcctataagcgttctccagttagattatcaaattttggactttgaggcctaacaaatcataaatcttgcatagaacattaatttcagcagaagctaggcacatcttttgtcttatattctaagtttggcatttttcctgagatgttaataccacttcattgttgttcttaggtgcgatttcatgaactttgcaaagaacacgatttgcttacagtgtgatgcaaagaggccaaagagacagctccttccaggagaatgggaatgccctgagtaagttgctacacttttgaggaaatgtcgaatctgagaataaggatactgattgaatttttatgtcatggaactgatcatgttgcatgtttttatgacagatgcaacttcttaaactatagaagaaacatggcatgttttcattgtgattgcaagcgtccagctgatgctatcctagagaacaaaccacaagaaacttatcgcttcactgaagcacaaacagacagggttgtgaaacgggatgatgtttccaatgcatggaactttgattttgatgacgatgaatcagacggagcagaagttgctgcttttgaatatgcggattccagtaaaaagaatgaaaaccttctccgggagggtttgagagatcctgaagaagaatttggtaatcttcctccaggagcccgagaaagttctgagtttggcagaagcagaagacctggagttgggtttgatgattttgacgatgaagatgacattgatagctatgaaatagacgaatctaaagagagagatgtcccagtggaaggagctcgatcttcttttgcttctgacgagttctcagaggatgaaaagtttccagaatcaaagtctggttttaatgcacacagaggaggaagttcaaactttcacaacagtggaaagaagcatggaaacagtaagggaggtttctctagggatgatgagctcggttttagttcagatgatgaggtttccgccaatcccaggtggaagtcaagccatgtggcttcgacccagagaggtccaccttcgagaaaacttacttttgggtcagacgaagaatttgggctcgattctgatatggaggatgatagtcccaggtccggtttgaggcgtggacaaagaaacaacggtgcgagaggagggttcaagggaaaacgaagctcctattcagcttcagaatctgatgatgacatggatgatcaagagtacagagggtcaagtttctctggtaaaagatcgagaggaagtagaggaagaatgagaggtggaggacgaggtggtttcaatgataattttgcctctgatagctacaggggatcaaatggctcctcggctaatagatcaagagggagaggaggaagaacaggaagcagaaggagtagttttgatagtgacgatgaagattacagagggtcaagttcctcaactagtagatcaagaggtaacagagaagatagtggcggggttgggggaagaatgggaagcagaagaggcggttttgatgatgagtttgatagaaagagtagccgaggacgcggttcaggtagtttcaggggatctaacagaggaggaagaggaggaggaggaggaggaaaccggcatgggcatagtgatggtaaagacacagacgttggtgatttcagaaacagtcgaagagttatcgagagatag

SEQ ID NO: 141606 - DNA, 907 bp, Arabidopsis thaliana landsberg
acctatcattcaatgaaaacctttggtcttcgcagagaatttcttcttcattttggacctcgggcagcagcatgcagagtaaaaagtgactgtgatacagatgaggttgtcttctgggtagatcttatacaaaaccaactgctgagggctattgatcgggagaaaatatggtcaagattaataacgtctgaaagtatagaggtaatgaatagaaacttgtagaggacatatctgaacagcttttagaatctctgtacagtatggatgtgagctcgtactatttgaaaacattaaagaattatgggcaagggaaggatttttatgacacagccacccttccatgttgaaatcattggatatatcatttgctgtaccttttcttataagtgctatttagattataaagaacatagccgaaacagtttgcaaacgtaaatgacactatctaggatcttcgtagagtggcacttatcgaaacagaaatctgttttatcttttagttttataactcatagagtgtttagattgttgaaatcagtaataaaagttgacttgcttggaaatatcttgggagcttatcatgacttgttggtgatgccttgcaggttttggatagagatttagctatttttggattcttcattgccttgggcaagagcacccagtcttttttagctgcaaatggtttcagttcgctggagaatcctgtggaagaccttgttaggtgactcattgtttttcttctgtttgcttaccatactctttgatacaccctatcacttagatcttctttatttaggcacttcattgggggaagtctcctacaatatcctcagctgtcagccatcagttcttaccagttgtatgtagaggtaggcataaatcataccatcactggttgaaaata

SEQ ID NO: 141607 - DNA, 1261 bp, Arabidopsis thaliana landsberg
attatagacactcccagctgtgtggcgttggtggaactcagaggcaaacttcaaatgtacttcatccgcctctacgcggtgtacaaagccctgtgagaaattgatttcaattttgtatcctctaaaagataaatgattaaacatatttgcagttgtgaagcagaaagtgatctgaaagtatgagaaagtaaagcgagaacaaaacctgataagcgtggtcagttccatcatcatatgcatgtctaacaaagatgaagtctccatggacaagggaaggtcttctctcagcaaggccaggaacttcgagggacaaatagataccccttctcttcattgaaacattctccatatcataagctcgcatgtcttcctaaacaaccaaaaaattacaagaaacatgattcatggtacaagaggtttattgagttattaacaaaaatctgaaacaatgaggatacctcgagttgtaattcttccataatcagtaaagttttatagtagttagcatagttccttgctgtaagaccttcgttcaaatcatcagggaattccttattctcgatcatctctctaatctcctttggaatttcatacagaggaagcctatttctaaaactacgttcaaccacctttgaagggcgtgatcccttcacataatcatccacagcaaaatctttcttcggagcccttctacttctagagtaaggcctgttagaagtcagagaactcgaaatcttatcctcagccaaaaggaaaacaacccgctcaaccctatcacttccccactcagacagtaacaacagtggtatgtaaaccaatgtccttaggcttacaagacacccaaatggtcaaagtgtcaccaggctcaagcatcctatcttccagagtaaaagtttcataaaaacactgtctctctttcaagtctgaatctttcgaaggcggtttcaatatcgagagagtaaaagaatcctcagggttagatgcgtaaatcttagtccagagatcaacaggctcatccatagtgttcttgacagtgaaagaatcaaaagaagtctctccaacggttaccgattgaggcttctctttcttaaatgggaaaggaacagaaacaacaactggaccttcatcaaatggattgtagcaaccagaagatccatcattctgatagtctataaatccaatctctcccttgtctgcgattacagaatattcgtcatccgatttgtatccactcacactcattgctgatgatgatgacaat

SEQ ID NO: 141608 - DNA, 839 bp, Arabidopsis thaliana landsberg
gaacgctttatcagaaccatgtaaaggaggttttcaacattctgaaccttgttcgacccaaattcctcaaattggatacctccaaatctgctgtgaagagaatcttggcttatactccatgcgatgtcagggggagacttactggaagtaattcagatatggcttcaatgttcaatgaaactgtggagcacaccctgcagaagagcgaggatttcacagtgaaaattaaagtaatccaagatttgcgggagatgacaaagaaagtgcttcattactataaaggagatttcctagatgagcttcctggacttgctgatttcactgtggttcttaatctgtctccaaagcagttgaacgaagtgaagaagttaagacgtgagaagagaaaatttaaggtttcggctgtgggaagtgcaatttaccttcacccgaagctgaaagttttctctgacaagtctgatgatgtttctgatacaactatggacgaaatggtagagaagctagatttgaatgaaggcgtcaaagcaaagttcttccttaacttgataaacctgtgcgactcagctggtgaaaagctcttggttttcagccagtatctcattccactaaagtttcttgaaagactagctgctttagctaagggatggaaactagggaaagaagtttttgttcttacaggcaataccagttctgagcagcgtgagtggtcaatggaaacgtttaacagttcgccagacgccaaaatattctttggttcgataaaagcatgtggagaaggtatctcgcttgttggagcatctcgcatactaatattggatgttcccctaaacccttctgtg

SEQ ID NO: 141609 - DNA, 755 bp, Arabidopsis thaliana landsberg
aaagcttatctgcttcttggattgaccacaaagggatggctctggaagctgctttctccatgagtttttgctccttctctgtccctaaagcaatcttctgtgagagagaaacttcatcttttcaacgaatcacctcgagagcaaagggaattgcgggtgagagtcaagttcaaagctctgatggagttgagactcaagtcaaggaaacttctcccaaagtatttgataaactgcctgaaagaaatttagatacttggagcggtggcagagaaacagcaagaggactttcaggttcagtagtaagaaacactgtacgaaaagatactactttacgacatatctcaccttctagtcattcaacaaaggttagaggagaaaagccagagatttcagggggtgagaagaaagctattgtagatagaagcaaggcctacgtaaagctgaaatctttagggaaagaagtgagagacgcaggctatgtaccagagactaagtatgttcttcacgacattgatgaagaagctaaagagaaagccttgatgcatcatagtgaacggttagctattgctttcgggattataaacactcctccagggacgacaataagggtgatgaagaatctgaggatatgtggagattgccataacttcataaagatattatcgagtatcgaagatagagagatcattgtaagagataacaagaggttccatcattttagagatggtaactgctcttgtggagattattggtag

SEQ ID NO: 141610 - DNA, 960 bp, Arabidopsis thaliana landsberg
gaattatagagatttaagagccatcgatgtgtgtgtgatcttcaatgggtttatgcttagctcaattggctgtaacatgtttgttcctagtaccttttgttctgtctcaagttacaggtacttatggcacataatctgtttgtttaaatgcttcaatgagtgtttatttgtgtgtgtctgtgtgtgtgtgtggaaattcttgttcttgatgtgttctttaacttgttttttgatgttcaatcacaaatttttgttcttatttgcgttgaagtcttcaattttagactatttatggttaaaaatgttcaatttatggtgtaatgggattgaagagtaggggaatactaagattctcttgtcatgcgttttattgtagttagtgggaaatggatgaaattttgattgagtggctatatttgcagagtttgtaagtatagattgtggtggctcaagtaactacacagacccaagaactggactaggatgggtttcagattcagagatcatcaaacagggcaagccagtaactttggccaataccaattggaactcgatgcaataccgtaggagaagagatttcccaactgacaataagaagtattgttacagactcagtaccaaagagagaaggcgatacattgtcagaactacatttctttatggtggtttgggtagtgaggaagcctacccaaagtttcaactttacttggatgcaacgaaatgggctactgtgacgattcaggaggtctctagggtttatgttgaggagttgatcgtaagggcaacttcaagttatgtggatgtttgtgtatgctgtgctatcaccggttctcctttcatgtccactcttgagcttcgcccgttgaacctttcgatgtatgccactgactacgaggataatttcttcttgaaggttgctgccagagtgaattttggtgctccgaacatggatgccttgag

SEQ ID NO: 141611 - DNA, 634 bp, Arabidopsis thaliana landsberg
ttttgtctttattcgatttaaaagttgatgtactctgcatctgattgtttttctcgtgttttattaccacgttgtggttgaaatttgacggcggaagttcatggtggggtatgaagccagttggattcagatttttttgccaagttgattgctttctagctgattcattgaaaataacgttcctttttaaaaacccatttgttatcattgtcttctcaaaacgtatgatctggtttttcaaaagtgagtctggttgatttctctgtgtttgtgaaaatgtctcaatgagtgaaattttgtttctttttatgtttttagtgtctttgtctttggttatatagatgttgatggcttgtgggtttggaaatattgtaggtgaaggcaagagattttatgaagaaagatggttgcggcgaaagagaacaagtttctgacagtggcaccttttgagtgtgcttggagtgatgatctgaagttccgggaagcgggaagaggttgtgttgcgtttgatgcgtttgctcacaatgatgtcacggtggtgtttagagagaatgtggggactcaacattaccattataagaaagataatagtcctcactacattgttatcattggtagcaataggaatcgtagg

SEQ ID NO: 141612 - DNA, 455 bp, Arabidopsis thaliana landsberg
caaaagtacagtttctttattcccttttttgaacactttaaacatcatcactcttgaaacacttcaaatctccggtcaacaaaaaccatgacttcaatttcttaaacaaaaagtttcaatctttttccaaacaaaacccatttcagattttgttctttgagaaaccaacatgagaaagacttctgtttcatctaatagctttggtgggtttttaagtcccggagctccgagttacgctgacaacaaaggttggagctccgagagagttcctcatccttcctccactacttcctcctctgcaattaacggtggtcgtcgtcacatcggctcttcttccgctttaacgacgccgttttacagcggcagagcaattccttcgaaatgggaagatgctgagcggtggatttgtagccctgtgtcgacttacccacaaggtgtttgtttaaattccttca

SEQ ID NO: 141613 - DNA, 929 bp, Arabidopsis thaliana landsberg
gtcaaatcaagataaactcagagtacacagagcatttaagctcatacgaaagagcttgtagtgaagatccaaagcttgaatcttttgactctgcgcttcacgaaagaactaacagagtcatcaacaagcttgcttcaggagttgagatcaagtctttgtcgtttgattcacttagggaagtgacacaatgtcttttagatatgaatcaagatgtggtcaaagttatattgcaggataaagaagatatatggaacaatcaagatttgttctctcttgtgaatttgtattttgaaagtactgcaaagactatggatttctgttctgagcttgagaattgtcttaaccgcgcgaggcggagtcaagtgattattcagtttgctgttaaccagtttgaggaagagaatggggataaggagaatagaaagtatgagaagactcttgaggagcttaagaggtttaaaatagctggtgaaccgtttacgaaagagttctttgctcttttcgatttggtttacaagcaacaggttatgatgcttgaggagcttcataagttaaagagaaaactcgataagaggcttaggaatatcaaaacatggcgaagggtatcgaatatggtgtttgtgactgcgtttgtctctgtgcttatcttctctgttgttgcagccgctgtggctgcaccgcctgttgtggcggctatagctggtgcattggctgttcctgtaggttctgttgggaaatggtgcaacactttgtggaccaagtatgagaaagtggttagagggcaaatggagattattacatcgattagaattgggacttatatctcggttaaggagatggataatataagtattcttgtgcgtaaagtggaagtagagattgaatctttgttgaagaaagctgagtttgctattactgaggagaaagaa

SEQ ID NO: 141614 - DNA, 941 bp, Arabidopsis thaliana landsberg
gctttcaatgagttcaatgctcgtaaaccagatgagaagaacatcttcaaaggtgtgatcaagaatcgtctctttatgggaataatagtcataactcttgtgctccaggtaaataatgatttggtgtatcagaaaaacttagtaagttacatttcacaaactcttatttctaaatcaaaaccgtcttattttcgtttgccaggttatcattgttgagttccttggtaaattcgcttccacgacgaaactaaactggaagcaatggcttatctgtgttggcatcggtgttatcaggtcactttcattataatattgtttacaattgaaaatgttgatacatatttataaataatatgtgcaatgcttgttgaaacataactaacgttatagttgaacctttgtaatttgaacagttggcctcttgctttggtcgggaaattcattccggtgcctgcagctcctataagcaacaaattgaaagtactaaaattctggggcaagaagaaaaattcttctggagaaggtaatagtaacttacagcttgtgattatcaattgaactagattcataagaaaagtttgggttggtcagcttgtgtagtagaacttatcctgaatttaaactgtagtaaggatttggtttaagctttatgcaggactgaaatgaatttgaaaatttgaaaataacaagtttgcttttatttttttctcaggttcactctgatttggaggccagtttattatctctcagacactgatgagattgtttgatactcttttaggactaacagaaaaaaaaacgtttggtttggtatgatggatttattgatatttttcggaaacccaaccccccaagtacagtttttcggggtttgttggtcgagcaactttggattactggttttctttttggtctttttttttgtaatatgatcgactacc

SEQ ID NO: 141615 - DNA, 308 bp, Arabidopsis thaliana landsberg
ggcggagatggagaagagacggctaatctggaaagtagaaggctcggcggtggaggaagtgaagagaggagaggcggtggacgcagagaagctagtggttgagcttgttccgatggaaattcgaaccttgttgatcaagtttgatgatcaaattgaaatggttggtgataaagagcagcaacataggttatgaaataatacacgttgttgttgtctttttaagtttaatcggagaagagaaaaaagtttgaatttagtgtctgatgcgagtttaaaattcgggtgattgcaacagtcacgagtgcgat

SEQ ID NO: 141616 - DNA, 1616 bp, Arabidopsis thaliana landsberg
caaagaagaagaagacattattttaagtgagttctctctctgtcacactcacaaagctttatactttctggctactgcaagctcatcactgaaaagagcttaaaccagagagatctgataagagaaattttagagtctctctgcttcaacaagatctacatcgaccaggttcaatatttttctctactgttagttcgtgttctagctctgtttcaacgagatccgattctgtgttttcgatttcagtgctaaagttacggtctttgaatctttctatgttaggattagtcttttgaatccataaactcaagatttcaattgttaaaggctaggttttgattagtttgaattagctagatcctttttaacagatcttgatgtttaagctcaaagttgtgtcgttatactgagaatcaagtttgtgatttgttgggaatggtttcaggagattagaaagaatcatgggttctaagcataacccaccagggaataacagatcgagaagtacactatctctactcgttgtggttggtttatgttgtttcttctatcttcttggagcatggcaaaagagtgggtttggtaaaggagatagcatagctatggagattacaaagcaagcgcagtgtactgacattgtcactgatcttgattttgaacctcatcacaacacagtgaagatcccacataaagctgatcccaaacctgtttctttcaaaccgtgtgatgtgaagctcaaggattacacgccttgtcaagagcaagaccgagctatgaagttcccgagagagaacatgatttacagagagagacattgtcctcctgataatgagaagctgcgttgtcttgttccagctcctaaagggtatatgactcctttcccttggcctaaaagcagagattatgttcactatgctaatgctcctttcaagagcttgactgtcgaaaaagctggacagaattgggttcagtttcaagggaatgtgtttaaattccctggtggaggaactatgtttcctcaaggtgctgatgcgtatattgaagagctagcttctgttatccctatcaaagatggctctgttagaaccgcattggacactggatgtggggtaagtcgatttctgtttgatctagtaacatatcttattcatttcttagattcttattgatgctaatttaccatctctaggttgctagttggggtgcttatatgcttaagaggaatgttttgactatgtcgtttgcgccaagggataaccactaagcacaagtccagtttgcgcttgatagaggtgttccagcgattatcgctgttcttggatcaatccttcttccttaccctgcaagagcctttgacatggctcaatgctctcgatgcttgataccatggaccgcaaacggtaaatattaactatcaaattaggcgaaaatccatttcttgcttgtactcatattggtgtctttgcttcttgattgcttgtacagagggaacatacttaatggaagtagatagagtcttgagacctggaggttactgggtcttatcgggtcctccaatcaactggaagacatggcacaagacgtgtaaccgaactaaagcagagctaaatgccgag

SEQ ID NO: 141617 - DNA, 601 bp, Arabidopsis thaliana landsberg
gaagttgctgagatcgatggtgcaccgagaatggtgagtattcttgacctatatatgtttgatttggtatccatagttttcgttagatcatgtcctgagttagtttgtggtgatgtagggaccaacttttggtgctatgatgatatcgggacaaaaggcgggacaacttgctcttaaggctttggggctaccgaatgctattgacggaactctcgttggaaacctaagcccggagctggtcttagccgcagcagattcagctgaaaccgtagatgcttaaaatcaaaaggttttaacgttaagaaaagtttcccttgatccttcggatgttgaaggagtgcaataaaaggagtttaggtgtttaatatgtcttgaacttttctggtgtctttgtttctctcttctgaacttctgtgtaaaatatcgtatccgttcattcgtaatgcgtatgttctcgttcttctccttctttatggctctagtacaagcagctttctcgttgtcgttggcaatacaaaatctgtctaaatttgagggatgagattagtgttggatgtcggattcttgtcttcaattctgattcttatccttgaagaaatta

SEQ ID NO: 141618 - DNA, 1618 bp, Arabidopsis thaliana landsberg
  unsure (1)..(1618): unsure at all n locations
cacaattctccgaacatgcgtttgctttctttattctctaataaacctagtaaactcttcttcttcgttactactatataatatagctgagagttttggaacctgagagaggttttacgtttttcttattttatttctctccatggggattctttgggagtcgtttctcttgttacttgtgtcaacgtttgctctgttcttagttaggatcctgttattcaaaactggattgatttacatggtcaagttatggcgtaggaagatcatcgactggtttcatgtttaccaattctacaaagtcccagaattcaacgacaacgttcaagagaatcatctctaccaaaaagtctacatgtatctaaattccttaagctcgatcgagaattctgatttcacgaacctcttcaccgggaaaaagtccaacgaaatcatcctccggttagatcggaaccaagtcgttggcgacgagtttctcggcgctagagtttgttggattaacggagaagacgaagatggagcgaggaatttcgttttgaagattcgtaaagctgacaaacggagaattctcggttcttatctccagcatatacatacagtatctgatgagcttgaacagaggaacacagagcttaagctttnnnnnnnnnnnnnnnnnnnnnnnnnnnnnnntaagaagaagaagaagaacggacggtggagatcgattccgtttgatcatccttgtaccttcgacaacatcgccatggaaacggatctgaagaacaaagtcaaatctgatctcgaatctttcctcaaaggtaaacagtattataatcgtctgggccgtgtttggaaacggagttatctcttatacggatcttccggtaccggaaaatcaagcttcgtcgcagcaatggcgaatttcttagattacgatgtttacgatatagatctctccaaagtagttgatgattcagatcttaagatgcttctgttacaaaccagaggcaaatcagtgatcgtgatcgaagatctagatcgacacctctcgacgaaatcaacggctgtgaatttatctgggattttgaatttcactgatagtattctcagctcttgcaccgccgatgaacggatcatggtgtttacgatgactgggaaagaacaaattgacccggctatgcttcgaccgggtcgggtcgacgtacacattcattttcccttatgtgatttcacggcgtttaaaacgctcgctaataactacttaggtgttaaagagcacaagcttttctctcaagttgaaggaatatttcaaaacggtgcgtctttgagtcccgccgagatcggagagttgatgatcgcgaatcgtaactcgccgactcgtgcattgaagcatgtcatcaatgctttgcagactgatggtgatcggagaggaactggacgacgtttgcttttagaaaatggttcgagaaagtcgacgtcggaggatgtttctgatgatatgagtggttcgctttgcggcggtggcggaggaagttcgccggcggtgaaggagtttaggaagttgtatgggttgttgagaattaaaagtagtagaaaatctggatcgttcgatgtggctcgagagatgagggacggctag

SEQ ID NO: 141619 - DNA, 633 bp, Arabidopsis thaliana landsberg
aggtcttttattggtttgaatgagattagtgaaggcagcttctcttctgatttcttcaaccaaacctccgtctagggttttttactcttcccatctccgccgcccttttttctctcacttccgtttttcttccccttcgtcgacgtcttcctccgtcgcagtcatgccgggttccgaaccatcggagactcagtggccagcaaagagagtccgggatacttatgtcgatttcttcagaggcaaaggccacaagttctggccatcaagccccgttgttcctcataatgatcctactcttctcttcgctaacgctggtacgataacttcgattcctcatatctgtttttgccgataagattgggaatttgtccaagttgatctatggaattcagattctatagagttgagttattctcgaattggattctagttgatgagttcagtggaatgacttattctgtcttcttttgtctttgaagctttgggacttattcaaatttctcaatttcagttttggtcgaaattttctgatattgatactgagctatggaaataaagttctcttgatatgtctggcgaaaaatagaattataatgacattgaacttctttgttttcaggaatgaccagttag

SEQ ID NO: 141620 - DNA, 3296 bp, Arabidopsis thaliana landsberg
atgaacccgagttacactgacctaccatcaagcctcatagaggttataatgtcacatcttgccttaaaagataacatacgagcatcagcagcttgtaagttatggtatgaagctggtgtctatgttcgtgtagtctaaaaacatcattggcttatgtgttttcctaaacgtggcaacttgttcgagttccgcgaccctttacactagaagttgtacactttggttctcccagagttagctgaatcaattgttgttactcaagattcagttggttacttatgcgtaaagctacatcaaaagacgtgttttttttcaatctgttttctagggatatcataagtttgccaaagtgtgagcttgcttttgagcatattgcgttctcttgtcctcctacatcagatgattgtgtgttattagcgataaagtttgttccggctgataatctcgtcactgtcagtacttgcaatcctggagcaactgagtgggttactgatgacttccctacttttataagaccgttttacatgcaaagcaaccttgtatttcgcagagatatattctactactttaatgctgaaggaactttgtataactttgatccatcttaccgcacatggaattacatttgtgtggataaactcatatgcccgtatgtccatgagaagcaatatgtgtggcatgagaaagcagttgtcttggtagagaagaaaggagagatttttgttatgtttacatgcagtaatgagaagccaatggtgtataaactattctctttggagtggaaggagttgagtaggacaacacttgatggcttgacattttttgtcagtttttataactctgagttgaggaataatctcccatggatgaggaacaatgtctatttctcaaggtttggttacaatcgcaaacattgtgtttctttttcatttgatgaaagcaggtacaatacgcctaaagaatgggagcaatgggtagaactttgtcctcctcaaagcctttggattgatacgccgaagaatgtgttagactacttcttgtaagattttcataacaattgagaaaggttttttttattgggttagatatgattagaagtcaggtttaattgggaacttgggagtcatcatcactggttgctgttattgtaaaagtcttcttcttcttcttctaaagttgacattggactgtttctgattctcccttgcaattgtttagagacaaaagtttacattctctgcaagaccttcaaacattgtagagcattgacttaattcagctttgcaggttaacactcattagctgtttagttgtacataggtcattagcttccctaactaatccatgcatgatctcttagtcaccaaagttttcaactgtacacatgtcacccgaggcgaaagatcttttgctatttcaataagcggacaagtttgaataaatcacatatcaacggaaactatgcaagtgttttgtttattcttgttataagtgtggatcttggaaacagcatcagattattttttctgaaaagaaagcattggaatattatagtaataaagggagagctttgtatcaatgcttacagggttttctttgacaaggtgtaaaactctctctgcttcatttttatatatgtaccttagcttccaaaatgtttcagggcataaagttctcaaagctaaatccacttagttcatcttatgccaggtagagttacaccagagagagtgtagtattcagttttggaaccgttttgctggatctcctgcttcattctttctcagtgactatgcaatgttatgaattctgctcttgagggtcaattctcaaacgaaatggaagctcagccacatgttgtctgcagtatgaagctcgagaaagaccaaatgtgaaatctctcgtcacttcaattgccacactcaacaaggaaaatctgatgtagcttcatatgttcttatgggtattaacctgaacataatccaggctgtgaacatctctgccatgtatccatatgtggatttgtaaccatcagagttctctatatgctcagtcagtaaatgatcatgtttatctagtcagtaaatggttgtgaaatgtgattaacactgatttcatgatatccatcttttaggtatcctttgaaattattgtgagttgtcaagccttgtacactgaaagccgatatcgttttggtttgtcgaccaattctattatttagttctcatttcacttgtggcaggaacatgacagatcttccattatgaagaaggcagcagttcccatcgagtctttagtcgaaaatgaagatgccattaccctacttgtataattaaatacttagatattactatgcttttctcggttgtttgtaagccctttgacgtgctatatatattctctttcaggataagtcagagacaacctctaaaacaacggacacagatggcaaagacaatggtgaggaggtgaaagatgaacaagaagatacagtagctgaacattctgatcatgaagaaaacgtcacagctatgggtggtattaaagacccccttgtgagaagacaggagttgcttgtcaacagtggccttgctgaggtttgtgtgacgtggtgactcagatttcagtttcttgattgttttctgatacaatgttgcaactttagttgtattaactctcatggatcattcttgatttttctacagaggcttattgatgtgtgtgtggagaacgccgaggaattcctccagtcaaaatttggcaatgaggtcatgtatgaggtaatttgtggtctcacttcgtttgttggttttagtcctgttgtaaaaatgttttgatttctgtaacttgtagataccaattttccacatgacatttgttagggtagatagtcgtatactcttatccacctttcataacagatgctactttcattcaatatttcttgaaattcaatctctaccccagatgaatcatatattttgataacaaaatgctaatttccagttttcttttcttttgtgttgtcatgatcttcttcctctcaactaatctctagatttcatcaagctaatctctagatttcatcattttcacgtttgttttgtatcaggttgcaatcggaggctctgatggtattctctgcccatctctgagcgagaagctgtgtgagctgtacgaagctattagctctgtagcagcagaaccgaaaccccaagaatctgagaaggattcagaacacatcctggaaaactttcactcaagtcggaccataagaaggcttgtcgtgaatcgcc

SEQ ID NO: 141621 - DNA, 948 bp, Arabidopsis thaliana landsberg
ggttgagggaggtaccaatctctctatcaagatgacttggtctcagaagttgacgtataaccaagggcagttttttcttgatattcctttcaactttcctgagtatgtgactcctgcggtaaagaaaatctcaaaaagagaaaagatttacttgagtgttaatgctggtactggaacagaagttctctgcaaaggatgcagtcatcaactaaaggtttgattttataaatttttctgagtacactccataatatttcaatttttttgctctatcattttaactcttattcctttcttttattacaggagaaattgcggagtgcagggaagttgaggtttgcatatgaagcagatgttttgaagtggtcgaacactgactttagcttttcttatacggtattggctttaactggtggtgctccaacttcgcgtatgcacttgcaaaaaatttggattgaatttagttgtaaagagtgcttatgcttttatttgttttctaataaatcgtaggcctcctcaagtaatatagttggtggacttttccttcaatctgcgcctgttcacgatgttgatcagagggacatattttctttctatctttttccaggaaagcagcaaaaaactaaggtttgatttttaactctttcttttctctagcaataaatccatttgcattttaatcttaagttttgttttgtcaactttaggcattcaagcgggaggtagtatttgttgttgacataagtaaaagtatgactggaaaacctctcgaggatgtaaaaaatgcgatatctacagctctatctaagcttgatcctggagattctttcaatattatcactttcagcaatgatactgctctattttcgacatcaatggagtcagtcacttctgatgctgttgaaagaggcattgagtggatgaacaagaactttgtcgtcgcagatg

SEQ ID NO: 141622 - DNA, 1910 bp, Arabidopsis thaliana landsberg
atggaagatgtaaaggtggaaatgaaggtaaggaagaatgagaatgaagcgttggaaacgggtttggcagagagatcgatgttgctgatgaaagctccatctctcgtcgcgagttctctccaatctcattcttttcctgacgatccgtaccgtcctgacgccaaagtcatcctcggcgtcgatcctctggctcacgaggacgaagggacccaagtatgttttcgtcctgcgcattttctctcctctctgcatgcgtatctctcgttacattgaatcttcttcaggaattgcgtggtttagctatttagggtttctagtaaccattcgggaaaatttcatcctttgagaaacttgcttttacattctctgaaattccatggatttggggaaatgggttttctgagtttggagatatcaagtggtcctcactttgatcatgaaattccttgtaatttgaggattgggtagtgtatgaaacatttctgcaaattagagatcttttctcttttctttctacatttgagcttgctttctatgaactttcttgctcgtcacttaaactacgagtttcttggtgtaaaacatggtaactcttttgccttgcagttcgtaatggaattagctcgagctgactctggaaacatgccgaggcgttacactttggatatgtctaaagattttattcctatgaatgttttctgtgagtcttcagatggtaagttgtacacttctccacacattgtactccgaagttattttacaactgttggttcatctatggcgttacgttggttataattgttgaataatggcatttacgtttataagattttggatcattgggtgaagaatttagcattggtatgttcatttacagtccaggtgtaccttattttgtttgacagttgtgcagattttcttcaacaatgttctttgtaggaaagatgtcagtagaagggaagataaagaacaaatttgatatgaggcctcataacgaaaacattgaaagctatgggagattgtgccgtgaaagaacaaacaagtatatgggcaaaaatagacagatccaggttgttgtaaagtggtgtgtggtgacttggagtttcaaacaaacctcctctgcatttttccatgatcatgtttctggtttcttgaccaggtcattgataatgccagaggaatgcatatgaggccaatgccaggaatgataatcccaaccgcggctccggtattttatctttcccaattgtaacacacacattactgtagcttaaggatcttgaattcttacaagtcattggtttttatcaggaaaagaaaaaattgacgaacaggacatcagaaatgaagagaacaagaagggtccgtagagagatggaggaggtgatgtttaatctctttgaaagacaatcaaattggactctgaggctgctcattcaggaaactgaccagccagaggtgagcacaaggaaattacagactttttgtttagtgtttgactgagagattcaatggagaaataagaaaacaaataccaaaaatgaaggtttgtgttgcttatggaaaagtgtatttggtgcagcaattcctgaaagacttgttgaaagatctatgcatatacaacaacaaagggagcaaccaaggaacttatgagctgaagcctgaatataagaaagccactcaggaataggtttggtcaaaaggttttttcagggtttgttttggatactatcttttgattatctatagtgaggttaagcttgatcagttacttaaattgtaactgatcttcatggctataataagaaaggaaggttcgttcaattgtatgccttaagtattcacaatattaacgtaactaatcatttttagtgatgctttagaaagtaatcagttgttttaacttttgg

SEQ ID NO: 141623 - DNA, 370 bp, Arabidopsis thaliana landsberg
tcctctcgtcctctctcccttcccttcaccacaattttccctctctttctcgcctccgcttcaacaattttcccgcactttccttcaaaccaaacacttcatcatcatcttcatcattcttcaaatccccagatataccctctctctcctccaccacaacaacaacaacaacaacaaccaccgaaaccctagaatcctcaatccacgagaaactcatttacctcgattcactcggaatcgatttcctaaccctaatcaaccgtcatccacctctcctctccaccgctctctccgccgttgaatccgtcgtcgattacatgaccactccaccaataaacttcactttacaagactttcgccgcctcgtctc

SEQ ID NO: 141624 - DNA, 592 bp, Arabidopsis thaliana landsberg; identical to SEQ ID NO: 50004

SEQ ID NO: 141625 - DNA, 468 bp, Arabidopsis thaliana landsberg
tttgaaaacctgtttcatttatcacttagcactgaagtttatttctgttggaatgttctaccaattctgcttgagaaatctccaaatctaaagactctcaccattcaggtatgacctaagacccccaaaagtatattggacaaactaaagagtcaaaatcttcaatctcaaaattcctgtcttttctaggctttgcattatactactaatcactatggggatgagaacactgtttgcgattgtttggaggtgtattctttcttatcgtcctgccatattgaggttctaaagataacccagttcaagggagatatcggagagatggtgcaaataaagcatatcttggagaaattgccgagtcttgagctgttggaaattcatggtcaggtaaaaggagatgacaaaaagctgcagatcatgttggatctcctaatgttcgaaagagcttcgtctgaatgcaaagtcgag

SEQ ID NO: 141626 - DNA, 422 bp, Arabidopsis thaliana landsberg
tgtgtaaattggcaaattggtgttagtaagtgacttgttgtgtctttgttgcttttgttttcaggaaaaccccttgtgatcaaaatttgaggggtttttgttttagcttgagtttctgaatgtatatcaattcagctacccgtttatttaataaataatctccaattttaaatgttactctcttttctttttgtgtgttttcttcttactagtgaccaatgtaacttgacagtgtcttcttgtactagcgtactagcgtttgcttgtcccagtttgcagttactgtgtaattctttgtaaccataccagtttgaagatgcaaactggtaagttttatgcttaagagaatgttgaatcttcctgtgttcttctttctcttttcgttgatacgagttgataagaagaacaatgaactgcttatg

SEQ ID NO: 141627 - DNA, 1051 bp, Arabidopsis thaliana landsberg
  unsure (1)..(1051): unsure at all n locations
ttacgaaatcaaacgtaagaaacgaaacaaaatttttgctgcggcgacgatcggcaattcgaaatggacgacggagaaggcatggaaactgcagcggcagagcttgagagactccaaattgaaatcctccacaaaatctccattcttgagagctcttttctcccacagaattcctctgctgctccgtcgccttctctaccggttgatgaaaacgaaactgtgactcgcctctccaccattctccagtccggcggcgttaacgacttctgcttcaagagagttgctaccgattactatgactggcctctcgaatctcngtcgcgacgttctcggcgcttcctcagtcgaccatctctgcaagagtattgttctggtacttcaattgctatataattgaattctatcggatttagtgtattttatggaacaattttaaaatcttctactacttagttgatatgtgtttgtgacactacttattgaatttctgtgcctgtgtttgtttcctcacgagatggggactatattacaggttaatactcaagctgcatcaaatattttggattgcagtgatccaaacaactcaaaatactatgtggttgtggttcaggtgctcctcatggttcctgtagaatagcattttcacctttgtttcgtctttaatcgtattcatctgactattttacttatggtagtatactgctagattcaatgctgaagcagtgaagcagtttctttattcactaaacgagggcaagatcccaaagaaaagatttaatcgttagtgcttcttatttctatgatctgttaacatattgaagtgtatatgatatgttgcttctttatgctgaggcttgtgttaacctctgtgtagtgagacttgctcctgaggagacgtcgattaaattgacggggtttgagcataatggggtaacctgtattggtatgaagacaaacataccggtaagttttgtttccacaccgttatttctgtgataggtttaaaaatctttgtttgattgaagctggccaacttttctacatcatgcat

SEQ ID NO: 141628 - DNA, 547 bp, Arabidopsis thaliana landsberg
tgttggcgactcacgcgctggtgactccgattccaaagttgactgctttcgtactctctctatctactactccatcaagattgtctggttctgttccgggtttgattgatttctaccgtcgccggagattttgtcgtgtaatcacctccatggctgaagcgggatcggtttacgtcgatgtagctggggaatcgaagtcggagcatgttactgggaagtggttttcggtgccggagctccgactgcgtgaccaccggttcatagttcctcttgattattccaaaagttctcccaaaattaccgtctttgctcgagagatcgttgcgggtaacttgaaatttggagctttttgattcagagctctttctgtgattacgaagctaaaagtttgtgtcttttgttttttgtagttgggaaagaggagcaagcaatgccgtatttattgtatttgcaaggtggtccaggatttgaaggtccaaggcctagtgaagctagtggatggattcaaagagcttgtgaagagtttcgagtggtcttactcgatcaa

SEQ ID NO: 141629 - DNA, 645 bp, Arabidopsis thaliana landsberg
tttctagaaacagcatccgtttttataatttaattttcttacaaaggtaggaccaacatttgtgatctataaatcttcctactacgttatatagagacccttcgacataacacttaactcgtttatatatttgttttacttgttttgcacatacacacaaaaataaaaaagactttatatttatttactttttaatcacacggattagctccggcgaagtatggtcgtagtcttcatcttcttcctccatcatcagatttttccttaaatggaagaaaccaaacgaaactccgatcttctccgttctcgtgttttcctctcgggcttttattgctgggattgggaatttctcaccgctctcttgctttttagttgctgattctttttccttcgactttctatttccaatctttcttcttctctttgtgtattagattatttttagttttatttttctgtggtaaaataaaaaaagttcgccggagatgacggcggtgacggcggcgcaaagatcagttccggcgccgtttttaagcaaaacgtatcagctagttgatgatcatagcacagacgacgtcgtttcatggaacgaagaaggaacagcttttgtcgtgtggaaaacagcagagtttgctaaagatcttc

SEQ ID NO: 141630 - DNA, 445 bp, Arabidopsis thaliana landsberg
gagtggaaggctaacgattgatggatgtgtgcttcaatgtgagacaaaccctttggatcatctctcatacccaatcgtgagcactgctggagatgaagacattgaaaatatcttaagccatgtggaagtgaaagaaactgttactggaaagattaaagcaaacagtgtaaccgttttgcagacaagaatcgagggaggtgcaaaggctgtttcaacaaggggagacttggttctgcagcgtgttcgagtcatgtattccaaggcttacctctatttctggtttgatgtagattatgaatgatttttgctggttttatttatttttcttcttctgtctgtaacattagtaatctgtgtgatgatgggaaatgatccatcttcatttgtactttgtgtttccccttaagaccagacaggtcctttgttgtatgcttattatgttcag

SEQ ID NO: 141631 - DNA, 1153 bp, Arabidopsis thaliana landsberg
atgtccttgcaagagacaggagcaaaaggtgaaagaaacagtagtttggggtaaaattcataaaaacacaaattgatggagacatagtgtttctgcttcttctccttcttcttagtcactgatgcagagaagaaaggtagtcactgatgcagagaagaaagggtccccaagaacacagagactactactaactggttctctctttgtattacattattaaccatttctaaatcactcagacttgaaacaatcacgatcacgggttcatcataaagatagggaatacaactgaacaacaatctgtttcttgtgaaggaaaatgaagtgttttgtagttcataaagctactagatatcttattgaataatcaaacaagggagatattttttgtcggtagagatgtgtcacgcgcagtctttcccccatcagtacgttacaagagaaagacgagatgagcaaaaaacctgcaaagaaggataaatattcatactcagtctggataaatggaaactcaaataatactagccatttaaatgggtttttggagacagagatttccccgcgtttttgcagtaagtaaagtgaatgcaaggcgataccaaacaagaatatttgaattactaaaacagatgcagcagttttaacttgtagcaagctaaaactggtcaggactcagaagctagctaaatctcttcatacaaacaatctatctacctgagcatcacaaagttcatctagtcaagaccaaaatgaaaactcacactctctggaaagttacagcaacagggagaaatagaaaaaacctacaataaacatgacagtaagcacagaatgccctaactctaaatctattgcagctaatagtgcaggacaaaaggtccaaacaattccccccctgatgccatcatgttcttcctccacctaagagctttaatttagaactgctcatcaatgtttggattctaacctcacagagagaaaaatacttcaaaaacgaccataaaacctagaaaaagcttactatactgtaaatttagtagaatcgaattggtataacgatggctcactcttgagcataagtttaagttatgacctagcccactagcttatgaccccaatttcactaagtgacatccccaattcccaatcgaaa

SEQ ID NO: 141632 - DNA, 1994 bp, Arabidopsis thaliana landsberg
ttttgtagttaggtatgggcagtgcagtcgaaacactatgtggacaagcctatggagcccatcgttacgagatgcttgggatctatctccaaagagcaacaatagtcctcgctctagttggcttgcccatgacattactatacaccttctcgtaccctattctaatcctactaggggaacccaaaacggtgtcgtacatgggatccaaatacatcgccgggctcatccctcaaatcttcgcttacgccgtcaacttcacggcccaaaagttcctccaggcccaaagcgtggttgccccgagcgccttcatctcagccgccgccctcatcctccagatattgttgacgtggatcaccgtttatgtaatggacatgggctttatgggcatagcttatgttcttacaatttcttggtgggtcattgttggatcccagtgtttttacattgcggttagtcccaagtttagacacacgtggactggtcttagctggagatcgctccaaggtctttggagcttctttaaactctctgctggctcagctgttatgatttgtctggaaatgtggtattcgcagattcttgttcttcttgctggtttgctcgaaaatcctgctcgctctctagattctctttccatctggtaagtccattaattagttagtaacttgattcttgattctatatcattttcttaatcacttatactttttttttttggttttaatgtgaaggaatcacttatacttctcttttatctaactatttttttcttgttatttttgtgcagtatgtcaatttcagcattatcattcatggtctctgtcggctttaatgctgctgtaaggttagtatttgtttctcaatcaatttcagattatcatccaaacattgctcaggttaaatcataattttctatacaattactatgcatggacagtgtacggacaagtaatgagcttggagcaggaaatccgaaatcagcatggttctctacatggacggcgacttttgtatccttcgtgatctccgtgacggaagccctcgccgtgatttggtttcgtgattacgttagctacattttcacggaggatgctgacgtggctaaagccgtctctgacctctgtccttttcttgccatcaccatcattctcaacggaattcaacctgtcttgtccggtataagttcatttagatttaaactagaaaacttaactggtgcaccttaaccgaacatgaccaaataaatctcggtttggtgttgttgtttgtaggagtggcagtgggatgtggatggcaaacatacgtggcatatgtgaatgttggttgttactacgttgttggtattccggttgggtgtattctcggcttcactttcgattttcaagccaaggttcgctttcaaatatattatgtatagtattagtatatgctttgttactatcagtttaataaaaataattttacgtgaattttggttatagggaatatggaccgggatgattggaggtaccctcatgcaaacactcattttactttacgtcacgtaccgaacagattgggataaagaggtaatgttacatgaaattaagttatatcatagtgtaagctgaatttgattcaaagagtttgtccaaattattaaggtttattattattgtataataatgatacaggtggaaaaagcgaggaaacgtttggatctgtgggacgacaagaaggagcctctccaaaactagtaatggattttacagaataaaagtatatttttaaaaataattaacattaaactttacaatctgatatttaatattcaggttataacaagtttggtggagtgatagacaataaagaaaaggaaataagtgtcgtgtgtgcaggtgatttcaatgtacgtagcttttcatggttattatgcttgttctatggaaatagaacaattaaaatatatttttgtctgatggattattctttatttacgaaaagttgttcttaaa

SEQ ID NO: 141633 - DNA, 852 bp, Arabidopsis thaliana landsberg
aatcttcttcttcttcttctccgatcagatcaatgctcgagccaccacaaagcttatttccttccaagggagagttcttcacactattgaaggttttgcttgtcgcttgtgctgtagcttttacctgcaatttcctctctaagtctctgagctcaaacccttctaaatctttctgcgatagtaactttaatcccatcgattcagacttgggtaagctcgaaactcatactcaattcctttatatcatagttgaattatgtaattccttggattaatcaatttcattgtttcagatatttgtgaaccttgtccaattaatggagaatgttaccaagggaagttgcaatgtcatcttggatacaaaaatcaaaggaatttatgtgtagaagatggagaaatcaatgaatcaactaagaaattggtattgaattatgcgaaaaatcggaacttttagatttttttgtcttgttgataatttggtttaaattttgcccactgttgttcattcaggttgggtattttgagagaaaagtttgtgaatcatatgctcataatgaatgttatggtacggcaaccatttgggtatgtttctgatatctttaactattgtgttttggtttacttgtgtgttcatactgtggtaatagtgagcattgtgctgagctattttcatcgatgttttaggttccagaaaatgatgtttggacagaactacgtagtaacagtttcttgagtaacttagacgagtctgcttacaattttttgaaaggaaaggctgttgaaggtgtcaccgagctactagagaaaaggactaattctaatgggttagtattttcatcactggttaattag

SEQ ID NO: 141634 - DNA, 562 bp, Arabidopsis thaliana landsberg
ggacatctgacatagtattcacttctttcctataaccatgtctatagacacatgccaatgaggagcaaaaccccaacgcctctccgcttctcaaatggaaagcatcagagagatgattctgagtatagttggactgatgtaggtactggggagaaggccaggaatgtctccgtcctcggtgcgatcagaagggcagctaagaaagtctttgctattattttcttaggacaacggaagttaaagccaacagaatgtagatctgatcctggagagagcagcacgcacgacagagaatctacatgtaagcaaattggtgtttgattgaatctttcctaaaacagcctttcttgaatatcaggagcatgctttgaatctcttaagctctggtgatgtatgccgaccattaagacaaccaaactttgttacaaacctgagggtctttgatggatgatgcgatatatttctgtacatccatgctctctgtatatctgtgacaatcttttttctttttcttgaatatgtgcagtatcaggctggactggttattcatcaccaagctcct

SEQ ID NO: 141635 - DNA, 990 bp, Arabidopsis thaliana landsberg
atactattaaagaactagacagggtttctggaacatggcccatacgacctgccattccattcacggtattcttctcttacatggtataagttggtttctgattagatgtcaaacggttctttgaactgattccatttttatgtgcgtggatatatagcccccaaaggaaaaggtggaaccgatatatcacaatgagtgcagtttcgatgataaagctcatctgggagtatctgacagcgccctttttgtacaaggatttgatacttcccatccaaggcatgaaatcaagacagcattgtggaatcatttctcttcatgtggtaaggtctatctgatttatgttcccattgcgtgttctaccggtgcttcggtgggatatgctttcattgatatgaaaaatgaaaccaaggggttgacactcaatggaagtcatttgggaggacggaagatcgatgttatgttcgccatagatagagaagagttttacttctcttctaacttaaaacactgtcaacgctgccgtaattataggccatggcttgttttaaaagccatgtcagatgcctgctttgaatatcaccagaggtacacaaaaatcagtttcttcttctttattcattctttgataacaaagtctgtaaagtaacttctcactaattttttgcgctctaggattaaaccgcggatcgttggcactccccatagcaagattggtcgttttacagccattattggtcgtcgctcttacagctagtatttggtcctttttaccgttgctgctaccttgttactccaccagctacatgattttaggtctaagtagagttgtgtctttatgattttaggagttttaaagtctttttcttacatgactggcgtgattagcaagcatgttctctattggtgattgatctcaaacgtaaagaaaatagtaaccgaatactcacaatttatatctgtttgactttaatgacatccgtatttacaaaa

SEQ ID NO: 141636 - DNA, 937 bp, Arabidopsis thaliana landsberg
cacatttccatttttctctcttccataaaacccaaaagaaactaggaagaggaaggacaatcgttcccaaaaaaacctctcttctctctcctcactgtaacaaatttttagatctagatctgcttttctcggtgcctttgatcttcatctctttggctttgctttgaaatttcaggggtgaacaagatgccttctccgttggcagtggtgtggtttttctctccttcgatgtagttgtggatccgatgtgttggaagtagagagttgctacgattcccttcggttgtggacgccggttggtgtagcgatttcttctcgtggctcagccgtcgtgtcggcctctgcaactacggcggaagtcgatcgagagaaggtgggtagtgccaattcgccatggaggttaacggtggatcttcctagatttgttggctgtcgcggattcagtgtgtttgggtgtttcgcttgagccttggcctcaaacaccaccgtgacttgcttcctcttggccggttgaaggttttttgttcggtaaatcggagattcgttggattgggaaagaggggttatgtttgattgtcggcttgctaggtacgggagctaatatacggcgtgccgtgatgtcggagggttgaccatgccgagagatttgtggtggaaacggttggtcgcgggaaaaggaatagtagcggaagtcggatgcttcctctctgtttactagatacttcgatctgctgcaacgctgtggttctcgcatccgtcggtgctaatggtcggcttctctgcgtcacggtgtcactagggcaagatcctcttttccggtcccgacaaattttttcgtttttcctttgtctctggttttctttgtaaaccaaagcccagcccaattttgtgggttctataactaataaaaggccgttttaaaaaaaaaaaaaaaaaa

SEQ ID NO: 141637 - DNA, 953 bp, Arabidopsis thaliana landsberg
aattttcgtcatcatttcttgagatgtatatggcctcactgtctccgagactccacaaagcgtacaaagctagatgtgttagcttaccggttcggtctcatccgagtgttaggaggattcaagaagtggtctccaaggttagagctttggggtcttcttcgttagactcgaggacaatagtccgggacagtctctctggtctcaccgagctttacagatgtttaagtgaagatctcttcaagtcttcttctgaaactcaacaagcccttcttaatggtgatggtttgatggaagagcttcttgaagtatcactgaaatacttagaggtttgtggaggagctaatgacgcagcttcgaggatcaagaagattgttgtcgagcttcagtctgctttgagaaggagcaagaaaggaggtgagtttagcctcgagagtgacgtggatgcttatgtggcgtctaggaaagagatcaagcaggagatcaagaagtatatggtaatgtcgaaagagacagatgcgtctttggagagtgtttggtgtgatggcgatgatcaagagatgagtgctttagttagagtgatgcaagagacgagtgtaatgacttgtttcgtcttacgctcggtcttctcgttcttgtcgtcgcctaaagggttaaagactaagaatcatcatcaccacaaaggttgggggattgttatgaagcttgtgaagaaaggaatagaacatcatcaccaggagaaaagagattacgagacgggattttcttgtctcgtgcttgaagctatggaatctgagcttgggaagctcgttgtgatgatgacaagggaagatcaagaagaagagaaaaagattagtgaagaagtatctgagagggttcaatgtgcattggttagatccgaaggtgtagaggcagccatggaagagcttgaagagggacttgaaggattgttcaag

SEQ ID NO: 141638 - DNA, 1218 bp, Arabidopsis thaliana landsberg
ctcataacaacaaaaaaacaaaaaaaaaacctaattagttttttctttctgcagagattatggaggtaccggtgattaatagaataagagatttcgaagttggtataaactcgattaatgatccttcgtttctttctcgatctgttgctgtttccggaatcggaaagctacaccaagcttatggtttttggaaatggggagctttgattatcgcatttctagcttatttcaccaactttgttagtaaactcaacagtctagttgttaggttaagaaaaatagatgtctctgtttcctctccaactctttttgatgattacgatagcgattccgatgtttcttgttcctctaccgtctcctctgacgatgaaaaagacgaagaagatgaggctgatgatgaagatgaggatgttgactcgatctttaatcgaagacgagtcaacggaggtttccgcgttagaggatctgattattacgatgatgatgatgatcagggagacaatggtaattgcacatggatggggaggcgatgtagtggtagttttggagatttgttctcatggcctgatcttggtgggattggttcgagtggagtcgtgaagctttgggatcatttagatatcgatggcgatgatcatgagaatgttgtggcaacgtttctcaagaactataactcaacctcgtcaccgtttttttgggcggcggagaaaaaaggtgttgacgccgttaaagtgaaggcgtgtgatccacgcgccggttttcggatgccggctttgctcgcggagtggaggcagccggggcggttgttagggaatataatcggagttgataccggtggtgtggagaaagtatacgtcagggatgatgttagcggagagatagccgtgggagatttgaggaagtttaacggtgtgttgacggacttgacggaatgtgaggctgagacttggtgggacgctgacgtccttatctcgggctgatggaatccttgacgagagaaaatattggttgggacggttttgtcttaaagttaagaggacggacgaaagattcaacgccaaaaagaagtgttaaagattaatgagaacgacgcaacgttttgtaaataatttgtctgtttgcttctctgcgatttttattttaaaattttagttttgattgaataaaaatcagcgtcagattaataaaagtgtttgtgtgtttggtcggttactagtt

SEQ ID NO: 141639 - DNA, 768 bp, Arabidopsis thaliana landsberg
atcctaacaaaaacgccgatcttgtggatgtgcttagtcgtcgacgcttaaaagtaggtcccacgtctcccttcgtccgatagattctcttcttggaatgcttgccatttctcttcacactattctaaacaaattgactacacactttctactactagtactaattacctattttttatacggtaactatatcagtaatgatctaatatacacttcgaaatgtgtaattatgtagtcttcatcgtttatttgtttgtaatattagtttatatcttcaatagaaaatttacgcttttagcaaacaagttatgtttgtcgttgcactttacaaaagatggtaaatataacttctctcagctagttcaaaattcaaaaacaaaaagacaacatcggcatcgaagatcagtgagctttaaagtttgtcaatataacgttatgggccatatctataagagatataagccctacatacactgtttcacacattttggttcgaagtaaagttgtaacttttaactgtacatttagaaagaaaaaaaaacaccaaaaagccattattctctgctattacaatgacgaaaacgattaccaattgattaccgtgggaacgcagcgaggtgttgcgccacatcagcgtcgagcggttgtgccacgtcagcagccactggatcggcaacaacgacgacttgtctacgttgtctttcccggagatagagaattgtgatgagacagacaaagagtgtaagtattgttgcattaccttcttca

SEQ ID NO: 141640 - DNA, 589 bp, Arabidopsis thaliana landsberg
aactccctagtttatatatttttttttcccctttaacttttcattttatcaaaaaatgtttttaaaaagagtagaggactcataaagcttcgtacttgttttatttatataattaataactcgtatcaatgtcaataactatcatccatcccttttttcttcctagttcaaaaaacttttaatattgtttgtataaatatctagttatctactattagaccattaatacaagaaaacaaaacttttaaactgtaaatagtggcttgattttgaatgacgagacttgtatgtatacgagtggggtctagaatattagtcgctgtctagtacatggtttaatggttcggttggtgcaagtaattaattatgagaatctttgcttattttttaaaactaataattccacaagtaaatagtttaatacgtcaattatatatgtctttgtctaatgaaaattttaaaacttccacttaattctcagccgtccgatcatccaagatgtgaccttttcatgggcctagaaccgcgaatcgtagcaatgtgggcaacacgtcgagaggaatctcttagacgaagtaaacgccgttag

SEQ ID NO: 141641 - DNA, 2565 bp, Arabidopsis thaliana landsberg
acgaagccaacgaaactgctttaaagttattggaggaaaccgtgaagcattgtgttagtatggataattcttccaagtttccttcagagccagacaagttaatgacaggtggatctattggcttagaaaacgaaggtgtgttggactgtgcatcaaaattgtccaagaaaaagaaaattcagaagaaaagaaaggtgatttttagattcttcaatcttatgagattatttgtagtttgctagccctggcggaaagatctgattgattatcttgtgtttaaaggtatactgtgggccagaggatgcaacaaacaggtcagaagaacttcgccaagaaaccgttagtaatctgattttgccatgctattatatctgaaatctcccattttcttagcagtgttattattcatggcaaattattttcatccaaatacttgaaattagtccatgcaccctgatactattaggcttatttttcatgtgcaggaacaagttagctccagagctcctacgtttgagaattgttacattcctcaagcaaatatggaggagcccgaactaggctcccgtgcaacaactcttggggtctattattcaacacaacaaactaatcaaggagtgggtgcacattattactctgtcattttgttgtctaacaatttttatattactgtttcattgaaattgatacactgttcttgttattctggcagttcccatcgatttcttccatccagaatggttactatggacatccgccaaccatacaagctatggtgaaatgctttatctatctcatttttagtttcaaagcttttgttataacatatgcaaatccatatccgtaaccaatatccaatcgcttgacatagtctgatgaagtttttggtagttaagataaagctcgagactgatatttcatatactgggtgatttagggaaacttgcattctattcatgaacgaatgagtcaatacgagacacaaccaagcatgcaaggagctgtgagttgatgttctatgctatttaagtatttttcgggagatatatatatcttattgttctcctcctcccgagtcaagttgttctaagaaagaaggatctatttcattttgtggattgtctagtttcagggacagacggggtttaggggaagcgctatccgtggctgctatgacatcgaagaaactctgcacgacatggtatgtaatcttgtgacgttagtaaaaacgctctaatgttacaaaagaaagaaagagaaaacgaacccaattcctcaaaatgttttcttttgacaatgtcaacttcttccttctcgggtttttatcagtttgattgaagcgagactgcgaaattcctctgtttacagtagaaaatgtgatcagccctatttataaccgttgtatgttttccggtgtttgtttgtgcagacaatggggtcctcacagtttcagggatctgattcgagccatcctagtgatcaccgcttatccaattaacagaacagaacaagctcaagagttgctactttcatatctttaaaatagtggaatgttttgtatgtacagaaataggaaaggtctaaagtgtggagctggctttgaggtaaactcttactctgattgaatttgcttgtatttataccggaatcataatagaaatatatgattaaagtattcacattctctaatcttcttttagacttgtagttaccattcaaaagtcatggacccccctcgttaaccttgagggccactgagagacaaccatggacttggtcactggctcattatttttgcctcgccaaagttaatctatcgactgatattggttaatttttcaacaaaaaccaagagagaaagaagtcaactaaaaagcaatattcagttattcactctgttgtatatagctcaccaattaaattcaaacaactaattcaaaacattatactatagcttttcattaaaaaatttccaaaacattcatttaattatataaaccaaagaacagcttttaagacttaaaatatttcccaagtatccaacaagtcaatacagattttttaagaaaactaaaccattttttcaactttacaacaaaaacaccaactgttacaaaaaaactctcgaatttcctatttctccagccttatgacaaagatatcagattaatataatttagaattcattactttttcttcattttaaaattatctacatactatttatttctctccattttattcagtgagaaaataaaattacaaatgcctgaacacaaaaataaataaaattagaataatcagtttcctctagaggatattcttcgtcataaaattaaaaaaaaaaagagtaggagaagagggaagcgactagcaccttttgtagttttccgtttattttctgtataaggcgggtgatctcggctccttcatcggaaattatgagcaacgttatcggcgatcgcactgaagacggcctttccaccgccgctgcggcctctggctctacggctgtccagagttctcctcccactgatcgtcctgtccgcgtctacgccgatggga

SEQ ID NO: 141642 - DNA, 359 bp, Arabidopsis thaliana landsberg
gcagccttttagccaaaaaaaacaaacaagaatacaaaaatggctgaacaacaagatcatcacaaagagcttcagcttttaccttctccaccgtctaccgaatctccggtaaggaaacaccgaccaacagttataacaaccgaccatcacaacaatcaccaccgttcctcctccatgatccaccacgatcttgacctcaaactctccatcagcctcagctcgatctcaacagcggaggagcttccaaacggtggtgtggaggcgttgaagtggcaagccgcggagcagataaggcttgcggctatagagaaggcttacgccgagagggttagagagttgactcgccgtgagatggagat

SEQ ID NO: 141643 - DNA, 4070 bp, Arabidopsis thaliana landsberg
atgcatctaaaacaacgatacttatattttcagggatattcaagaacatctgatgagcatagggcatatcccaaagatccagtgatttttggacaacctaagatgagcctagaccttgagctgaacctttcaccttcaggttcaccttcacgaaccacaacgaagaaatatgaatcctcctcaattcacaatgaaacagtatcatcatcaaagattaaagttttgacgaacacaagtaagaagagcataattgggacaggactaagtcgatcaccatcctggctagcgtttgaaggtggtgatgataacgatgttgatcacaaggggcaagagatggtaacaacagtttgcatgaaatgccacatgctggttatgttgtgtacatcaactcctgtttgtcccaactgcaagttcatgcacccacacgatcacagctctacaaaactgtttaaaccatcaaatttgcttaggcttctaagctaggctctatcaaggttactgaatctataaaatttgtacggcagataataagccaagagactagatatggacaaagttatgtatatactaaaagtaccagaaagtttgtattaattctctgcttctatgaacgatcatgctttagatctctaaacatatcagtattttgcattgaattgtacttggggaataacacgtacacacggaataatatcaactagtattgcactaaaacatatatggatactgactaaatagctttattcaaggtaagatataccagagtttgagttccgagtgtagtcactatcaataatagaaccagaggtaaaatggtttaacttgaatctaccaatggttcagtagcaagcgacgatgcttgtgttatttgtactattgacattaaataaattaactaaccccaaaacactttggagggaaaatctcgaaaatagaagtgggacattttcattttccgggtagattcaactaatcatatattgacacctgtcacattgaacccttcattgagaatctggcgtagaagttttgaaactcaaaaaatcaaaaaacagaaagaagcagagagacgatggcgagcaaagacgaattttcccgagatctcactgcgattcgctgcgccagagctacgatgcttctctattcacttgcatcatctcgcacaatcgattccgccggcgaggttagttcgatcctttcttcttccgattggaatcgattttgctacaatcgactcttaaattacgaaattgccatgcgaaatctcatctctggtgttttgtttagaagcaggagaaaggagaaacgcgaagagagatagaggatctgaggagaaagcttaccatggtgaagataaagatgaatcggattaagctttgcggattgatggaactgcttcttctcgtctttttggtactgttgctttccactttcttccttgtcttcttccttggatctacttgatccttccttggaatcatcagcttatgcaacattatggttattagagtaaggaaactattttagaagtcgagatttgtgcagtagaagaatcggataactgtagaagtcagtcattagttttaaaacttaacgtttgcatcttctaatgaatgaatcttgttataaacacttaactatttgagctctggagatttagtagttcttcttgcaatcatcttcttatatgcttttaactgaatacattatgctctttcctgaatgtgaaacttgttttagtacatcatcttgcttggctttgacctctagatatataattcttgctccagtcatcttcttgaatgctttcaattgaaaacatgagtgctcgttcctgaatgttgttagcagagacttactggttgagctctgaagatcttgttcttcttgcaatcatcatctcgaatgctttcaactgaacatcatgctcgtttctgagtgttattttttcaaagtcagagcagcctgaatctgagcttttctcagttcctcatcatgcttggctttgacctctggagatctaattcttattgcaataatcttcttgtaacatcatgctcattcctgactgttgttatcagaggcctcatattcctaggcttcatattctgagcttggcttcagtttctcattgtgattggctttgtgctacaaagaaaacgccaaagaaaagggactttgattcagatatctcatatctgcatcttctgctgctaaacctataattaagaggggttaaaatcttagaaaactccatctaacatatagttcctcagcattatatccttttcagaatcaataatttcatgctttccttacctttacttttggagccacagaatttaaagtataaaaagcccaaaaacggttccaccggtccaaccactcaattttggccgattcccacaaattagcttttctctacaaattcaaatcaattttgctcctttcattatccaaatgtcaggactcgatatctatcctcacgatccttcttcttcttcttcgaccagctctatcgatctatccaatgaagctttcttcagcaccggtggtctgtttctcgaaccaccaggcgtttcctcttccttcttcgactctatctcctccaaatgctccgactcagagccactgcatttccccggttactggagaaacaaaacccgtctccgctccggtaagaactttatgttcctgtccgtgagcttgagtaaagacagatctgagcagcaatgtaagaaggctttggcgcgaaacgacgaaattcccggcaaggataatcgaaaacgaagtgttatcggtggcgtgaggagacgcgggaccatgaacacaaggaagcatctctgggctggtgctgtagctgccatggtttcaaagtatacatattattgaatcagagcgcatataacttgtttgatgaaatgcctgaaccaaaaccatgattttttgtattggtattaatattacactttttgttgttgatgatggcagaacattcttagctccacttgagagactaaagcttgaatatacagttcgtggtgaacagaggaacttgttggtggttgctaagtcaattgcaactacacagggcttgactggattctggaaaggtaatttgctcaatgttcttcgaactgctcctttcaaagccgtcaatttttgtgcctatgatacctatagaaagcaattgcttaaaatcgctgggaatcaagaagcaaccaactttgaaagattcgttgctggtgccgctgctgggattactgctactgtgctctgcttgccactcgacactgtatgtttttgattccttaaaccattttagatcaaatatgacaaagttctctgctttagagtgacataagtctagtgttagtgttcgacaggacaattatgagcatgtgtaaccaatttgactgaaatgtgttcttctactggcacagatacgaaccaaactagtggctcggggtggagaagccttggggggaatcggaggagcttttcggtatatgatccaaacagaagggttgttctccctctacaagggtctagtgccgtccatagcaagcatggctctgtccggtgcagttttctatggcgtttacgacatccttaagtcatcgtttctgcatacaccagaaggccggaaaagactgatagacatgaagcagcagggacaagaactcaatgctctagacaggctcgagttaggacccatcagaactctcatgtacggtgctatagcaggtgcttgtactgaagtagccacttatcctttcgaagtagtgagacgacagcttcagatgcagatgggtaaaaacaagctcaatgctttagctatgggattcaatatcattgaaagaggagggatcccagctttatacgctggacttttacctagcttgctccaggtttgcataatacttgtttcattactaaactcaacttgtgtatctactgtttccaaaagcttgatatgttctgtttcacatctccaggtattgccttcggcttcaataagctactttgtctacgagtgtatgaagatagtacttaaagtagaataacaa

SEQ ID NO: 141644 - DNA, 596 bp, Arabidopsis thaliana landsberg
attttctgaaagacacaccaaagacctcggtgctcttgccggttgcagccaccgagatggctatcaccacggcagcttcgagccctagcacaaccgaaggagacggagaagggattgaccattctttgttcagcttcaactccatagatgaagctgaagagaagcctaaactaatagaccatgacattaatggtctaattacacaaggctctctttctttgttcgagaaatggctctttgatgagcaaagccacgatatgatcatcaataacatgtcactagagggtcaggaagtgttgttctagaaagcattaaagtttgacgatttgcttgaggaaccacgaggcttagttataaacaatttgtataattaagtactctttagtttttttttcaatccttattatgatcatattgcagtaattagggattttagtctttagtagtaactcttaagttttaacacatttttctctatctttttagtaggaactctttattttttccttaaatctttgtcgacgtggagatgatatcttctatgtagtagaaactcaaaagtgtagatcatctttattaatgtaacgtctttttaa

SEQ ID NO: 141645 - DNA, 411 bp, Arabidopsis thaliana landsberg
tttttttttcttttcttcctgggtttgatttcttggagtggttgattgcgcaagtctggattttgattttggtacaagacatttgcttgtacaaggaggaagggatttgttggtatacagtattgttattgcaaaggtttttcgaatgtcaaaacaagtttttggattattgattttggaaatctgagtggatggagaacgatgacatgtatcctgatgagcctgtaggttctgacttggaacctcaagagagtgatgttgtttttgcaagagagtcacctcttgtaggtatcatcactcaaccgaccaaatgctctggatctactgcaaagatactgaaatgcaggggtcttgagcaacagaagaagcttaatagacaggatagaatcgaattgggacggcttttccaag

SEQ ID NO: 141646 - DNA, 720 bp, Arabidopsis thaliana landsberg
acatctagtgaaaggcttatagtgattcagactttcgtagttcgcattctactactagaaattgctcttcatctccagcagcaaatccgggaagaacaatcaaaatcgtcatcgcttcatctaactcctatatcttcaacgttttggttgaatggaactgaattctagttatgcattatgcttccatgtttgaggttttttttcatggaatcatatatttaagtatataatcatcgataaatcacctaaaccgtttttattttatgaaatatttacatttttagaaaaaattattttcatgatcgaactatgcatgcaccccaatatgcgcataaacatttaattgctgagttgagatggtcatgatggtcattctctatcttttttttccaaccatgcaggacagtcattgcaaaaattctaaatattagtttagattcttaatcttgtctgaaatacgattttagtggttcacttcaacatgaaagtacttctttttttattcctattcatacataatttatctcatgtattactactctatatgttattataaaacagaaataatgtttaaagaaatctctatatataaagcaattctttcatttattataatttagaataacattttttttttgtaaatattttggaataacatatagagtgagtttggagaaaaattactctataatagagttttagaagaaaaataaatatata

SEQ ID NO: 141647 - DNA, 2079 bp, Arabidopsis thaliana landsberg
agcctcgaccacttccctgagaacccgtcgctcatttgctcctctcgcaaagcgaataacaagtttgtggtggttggacatagaggacacggcatgaacatgtcgcagtcgccggatctaaggttctctgctctcaaggagaactccatcctctcctttaatgccgcttcaaaattccctctcgactttatcgaattcgatgttcaggtatttacttatttctttcaatcctctcttcgctctcggttcgccgcattcgagtttcgatcggcttctttttttttttttaatttggttcagccacgtgaccgccggcaataccacgtggggtgcctaattcgttgacattttcttattttgcgccaaaaaaaaaaaaaactgttaatgaaatgtaaaaaaaaaagatctgatctgatctctttatttttttaattgatcgcgcaggtcaccagagatggctgcccaatcatattccacgacgacttcatctactccgaggaacagggagtggtgtacgagaagagggtcacggaggtttgcttgtcggagttcatgtcctacgggccacagagggatacaggcaagacaggaaagcctttgctgagaaagtcaaaggaagggaagatccataagtggagcgtcgcaaccgacgactctttctgtactctccaagaggcttttgagaaagtagagaatccaaacctcggtttcaacatcgaactcaagcttgacgacaacctcttctattcctccgatcacctctcccgtcttctcctcccaatcttgcaggtcgtgtctgatatcggaaacgacagacctatcatcttctccagcttccatcctgatgcagcccttcttgtcaggaagttgcagaccacctaccccgtaagttgatggaatcccaaaagctacgtacactctttccactttaatccatcaacttaatttatgatccaaattcaattacaggtattcttcttgaccaacggaggaactgagatgtaccacgacacgagaaggaattcgcttgaggaagcaatcaaagtatgtttagaaggaggcctccaagggattgtctcggaggtgaagggagtattccgcaaccccgctcttgtcaacaagataaaagaatccaagctctctctgatgacatacggaaagctaatcaatgtagccgaggcggtttacatgcagcatttgatggggatagagggagtgatagttgatcatgtggaggagataacagaggcggtgagggagatgatgaagccatccaacagagatgctgatggtactaagccaaagcctaacttctctgacagagagctctcctttcttctcaagctcattcccgagttgatacaacactaaaactatctcttttagttaggatctctagtttcccaaaatgtgatagtgttttgtatcgggaaaatttgacaatgtgggtgctgctatcatgattcatgaggtgaaagcccaaatgttatggaatatatctgtttgcagacgggttatgacttatgaggtatcaaagcaccatcagcaaattatgtaaatgtattcaaaagtggaaagtggcaccttgggagaggaggccgtgctgcaggtgatatttgagacggggcaagagaggtctgtaaggatcctcctcccttctctgcttcacaaactttatgcatctctcgacctccttcttcacgtctgcgtacacctcctttgccttgtctctgtctctcaactcttctgctcccgtctttatctccttcccaaagtaataatagtatctccctggacactttggtatcactcctggcatgtggaagtcttggttcccctcttctccttccaggcttcccctttagatcaccaaccatgtcaaaatgtcatcacccaccctcatccagttctacaatttatattctctactaaattctattcacattacctcacctccgggccttccgctgtcactctttttagcacctctttcaccaacggaacctttatctggtcattgtagtctacgaccacctgcattcgttagacagagttacaccgattatatattacacatga

SEQ ID NO: 141648 - DNA, 2116 bp, Arabidopsis thaliana landsberg
  unsure (1)..(2116): unsure at all n locations
atggtaactaatttggcttccccattttcaatgtttgttcgcttacgctataaaggtgaaccagaatcagcccacgaccctaaccggattaaaccgacattgttcttcttcccaatctcgtttcggcccaatattaaaccaacgagccaatactcccttaaacgattatttggggcaaaaagactctcaactcaattcacatgcccattaaaggcccgatataatttcaccgtccaaaactacaaattcgtttcggcttgcttcatttctcagcttctggttaatgggtggtaaatgatagctctaagaataaaggcttttctctactacataagaaaaaaaaaagagaaaaaaagaaatagcccatctctacttgtcccttttattggcctgatttagcttattcaaaaataagaaaagaaatgggtttgttaataataaatcagtaatactaatctaacggctaattgtcaaatcgttgagaagacagtcgaacggtaagtttaattttaaaaagatcaacattatagccgttggtgaagattgccaacaagccctataaatacttccactaaacttttttacagccatccaagtggaccaatcttttttatttggctaaaatgtcaattgaattcagatggtatagttgcacacaagaaaaataaaaaataaaaaaattcagatggtattaacagtttacatattcacccttaatcaaaacggaaaangagagcataaagccataaagtaaaattcagtctaaaaagctgtaacaatttcttaaatacaaacgacccaatttgttgagatgtgaaaaaggcaaaaacaagtcactacatgaaattggatgttgtaggcccaatttgttgatatagtaaaaccgaatcattttttatcaagcattaggttggaaattggttggcccatagagtatgtaaaatcaaagtagaaatggagaaaaagtgaaaaacaatgaaatctttcttgtttattttgatttttctcaaaatttacatcttttcgattgttatcatcttataggtcttttgcaactctcttgcctttgtcgtgcttgttctggtggagaaaggagtcgttgttttgtgggctcttgtgttatgttgtgaaataggtttggtgacataaaggcccattcctatgatgagcttaagctaaccaaattatacatttattgttagattgcctctaacattttcacaataccttgtggtttgagtctttgagatactgttaccataagataagaccgagatataataaccacgtgctctctattaaaatcccaagcgtgtgggtcagagtctaactcgattagagagaagaaaaaacttgttcgaggcttcgaagaatgtcgatgttaatggctgtcaaaacaacttcactctgttgtagcagcttaaaccttacagcttcaccaacattccgacggaacccacgcgcggcgagattggtgaatccgacagcgagaatccaaacacgttttcatcgcctgattgaagaacaaggcattgtgcttatgcctggatgctacgatgccttatccgcggctattgtgcagcaaaccggattctccgctggttttatatccggttacgccttatccgcttctctcctgggaaaacccgatttcggtttgctaacgtgcgccaccttttttttctttctttctttagtaattttttgtttgtatgctgtcgttttatttgtgttctttcgtcgttttagaccaccggagatggctgcgacggcaaggtcggtgtgtgcgtcagctcctaatatacccatcattgcagatgctggtaaagttgcaaaattttgatagtataataaggacatcattaaagaatgcaagaagcttaactaaaaccaaaaaaggaaaaaaaccatttaaaaacattgattcgttgattctttaccaaagattgaaagtatcaatctttcttggttagagtcgcttgcttgcttatagttctcttcatagctttttgaaaatagtggatttgcttggttatagttctcttcataggtttcttttgatctttttaagataccggtggaggaaatgcgctaaacattctaagagccttatagg

SEQ ID NO: 141649 - DNA, 511 bp, Arabidopsis thaliana landsberg
atatcaaaccccttctctttgctttctcacactgaaatcaaactcctttggtaatactactctcacttttgcttaaatattaatatgatcttcttcatacatatatttgtgtcatcatcagtttcaagcttttctggttttcttatttccctttctgtctctccgcaaataaccataattctcagcttttaatagtagttactctgcaggagttgtttctccactcaaaagctgacatcattttcttaataaatctcaatctcatatgcaaaattttcaaactttagcttatcttttggattttgttttccacttttcatggtacttatcaagctttctcatagtaaaaaagaaaatccttttgcaatacatgtttccatttaaagtttatgtatcttttttgttccatgtgttataaactctttccatgaccagagaatcttaatctccttataggtaattaaagatggagaagaatggtcacacggaaagtgaacttcaaactcaaatg

SEQ ID NO: 141650 - DNA, 944 bp, Arabidopsis thaliana landsberg
tttgctttaccaaccaatgtctgttcagaagagtctgctaccttcattgattcttcatcttccaaattcacctccaggataggttcagcagaactgttctcaaacagaacttctacgcaaacatgtaatggagatacattagagacttcagataaaaaggcatagtctaccttcaagccactgccatttccagggtctacgagactatagcttttaggcttaactcggcttcctacatcaccaatggatatcttcgcataagagctctgattactatttaatgcagatggagtttggtttgatgtactaggctgatcatctaaccacaaatccagggcccttctggaccttagttcttcctggtcagcggaaacagaagtctctgaaatttgaattaaaggagcagctgggtcattggcgtcattagacactgttctttcatcaccttcactgctaaaatccgaaccattagaagattcagagtcataatcagaggagccattctcatcccctgtttcagaggattcctcagaaccatctaaatcagctgcggcctctctttgtttatctaaatctgacagctggtcctgttcttcatacacaaaactgcagggctttggaagaggttcatatccaggggctgcatgaagaactatctgtgacagagatccaggaagataaaaacgattgtgcagggttataggtgaaacagatttcagttttcttccaaagacatgttccacaacatgcgcagcaatattttcttgtgatgcaacactgtcttctgccggctcatgactagctaatttgcatgacagcagtttcttcaggaaacgagttcgatcacgaatatcatagcttaagtcatattcgcccaatccaaacacatagaccacaatccttttcaacatatgaaagtcaccagcctctgcacttgttagaac

SEQ ID NO: 141651 - DNA, 451 bp, Arabidopsis thaliana landsberg
ttctgtctggcaaatctagcttctataagcagttttggtcggcttttatatttgtttttagtttttttttatagattttaattgatgattcgttttatagattttaattgatgattcgttttaggtgttagtcacttaaaatcaatctatcgacttgtatctctggaagctcgatcttgcaaatcgcctaaagtaaagagaagaagagttgtttccagcaaatttggattgccatagccgtctctagttgtttttggtgcttcgatcaaacaaaattttgtgaattaatcagaatttttcctttttatcttatagggttgaatgatctgttattgatttacttctctatgtctatgcagaatctggtgaaaaacaaagtaaatcgatgtttaagaaatttacagcatcgattgagttcaccagaatcggaatcgttgacgacaaagattaa

SEQ ID NO: 141652 - DNA, 749 bp, Arabidopsis thaliana landsberg
atgagtttacctaattcaggtccaccaagtaaggcagtcttctggagagaaagaacgtttattgacctagaggctgatactgataccaatagtagtcatgaagccgtcattcatcaaaatcacttggattcaagtttaacttctcaccaacagcgccccttgtatccatatattcgtccagattctgctgtctcctggaaccatttgcactcttcttggcaaaatcctagctttggattccctcagaaagttgcttcagctcagagatatccggttctaaacatgtctgatacactgattggtaatgctcagaagcaagggtatcttggagatagattgcagtttgaaagcaattctagatttgactcagggtgcgggaattccagtcggttaaaccacaatatgttttacaatgagtgttccacttcatcaaaatcgaaagtcgctgggactggctataattatcctaacggaggaagaagtgattacagcccggagaggaagtttgtgagggatttgaacttaaatgtgacactttcaaacacttctgttgttgaagtcagaaaggatgaagaacacctggctactttaccatggcttaataaacccaagtctgtttgtaactctgagttagctgatgggaaatggagtctgaagagtaatgatgctgttccaagttcttctttgaaaccattggatatcagagatgaggcaggagacaaagttcagaatattatgtggctagagag

SEQ ID NO: 141653 - DNA, 695 bp, Arabidopsis thaliana landsberg
aaagatcaactctttcaaacacttactctgcatgtaacttcatagattgaacgaagaaccaaaaaaacagagcaaaacaaacaaaagatggttcaaaaccaccaaacagttctcgccgtcgatatgccacaaaccggcggctccaagtacttggacgacgacgggaaaaacaaaagaactggtaacaatgtttctctctttctctttaattcatattgagacttggttctctaattattcaaaaaaatattaatttaactcgaaacctgctctgatttagttatgttgaaaaaacgagaaagttgaaagtttttaaattttgggttttagggagtgtttggacggcgagtgcacacataataacggcagtgataggttcgggagttttgtcactagcgtgggctacggcgcagctaggttggctcgccggaccggtggtgatgttgctcttctctgccgtcacttatttcacttcttctcttcttgctgcttgttaccgctccggcgaccctatctccggcaagaggaactacacttatatggatgctgtccgatcaaatctcggtaaatacaaaacttcaaagtagaaatcggacaatggagatcagatcagaacagagcattaacatttttcattgttctgtataggtggcgtgaaggtgacgctatgtgggattgttcagcatcctaatatc

SEQ ID NO: 141654 - DNA, 227 bp, Arabidopsis thaliana landsberg
cacaaaagccggcgtgtgctgaaacttagcggttaaagtggctttaataggaacagtaccaatggtggccacaaccaaggtctttgtctctttgtttagtgacattacaatggctgcagctaaagtagccatgaatgcaaatattctcagccccaagagtagtttccagctctttgtggtaccaccagccaccacaatcttctctctggccattgttgatgcagtga

SEQ ID NO: 141655 - DNA, 909 bp, Arabidopsis thaliana landsberg
gttgacgccggggatgtaatttatctatcagagaccaagctatgcccagcaccctctgtgaactgaagcagtctgaggtaatcacatcagatttttctttttccaaaagggaagaagtcttttgcttacatagagtctcttgcagcacggtggtccatcagttgcatcccttgagatattaggaaatggagttattgttcatgtcaatggcaagtgttaccagaaaagtacttgtgttcatctacggggtggtgacgaggtgatcttcagccttaatgggaaacatgcttatgtatcctttttggagttgcgtgaaagttaattcgcctaattcactagttattaatttatcgatccattctaaatgatttataacgtttttttcatttaaaatcagtgtcttttggtaaaaatttcttaaccatcttctagatatttcaacctgttaaagatgaaaatttagcagctcctgacagagcttcttcgttgagtatatgtgaagctcggggtgcccctctgaaaggggttcatgtcgagacaagggcaggagatgttgatggggcctcagatgttgatggggcctctatattggcatctctatcaaagctccgcagcttccatcttctaccaccaattgctaaagctggcaagaggcagcaaaatcctgcggttcctgtggtaccttccagtttcaatgattgcatctcggatacagacatgaacgatgctgatagtaataatgaccatgctgctgttgcttctgtggaaaaaattgctgctgcttctacccctggtactgccaatgagaacctgaatgtcgatggcagtggattggacccttttcaagaagctgatggtggaaatgtccctgtgctggttatgaaattagaccaatcgtgcaccttcttg

SEQ ID NO: 141656 - DNA, 793 bp, Arabidopsis thaliana landsberg
cctaacgataatggtggctatgagatctccgtcttttctccgtcgtgtttctcaccgccgattataaaatacttatctactaccatctccttgtcggaaacggcgagctaagtcgattaggtatttattccttttttctcttttatctgttaaagctttcttagggtttttgtttttgttgttttgcatttgaaattgtgatctcatcgactatcaagcttcgaactttacattagggttttgtgtaaattcgtgttcttcttcactttctctttccaattcgacgcatatggatacgtgatgaaagttttcgaaaatttgttcaatttcaagtttagttctttatgactcttctgattccggatttttctagggttttaattgagaagaaataaaaaggatattttggtatggaggtgaaggaatcgaagatagatatggatgattcagtcaataaggagattggggaattaccaaaagatatgccttgtactagtaactatgaggaccatagttttcataatcatgttgaagaagatgtcactgaggatcttccttgtggtggtgatgatattgatgctgatgcttctattaaaaaagaggttgcagagttcgacgaggacgaggttgatatattggaatgcaatgataacattgagattcaagtctcagggtgtgatgatgggactgatggatattcgagttcgtttggtggaacggattctgaacatgagaatgatcaagaagttgactccatgatttgtaatgagacttcacttcctctttgggtgaa

SEQ ID NO: 141657 - DNA, 591 bp, Arabidopsis thaliana landsberg
ggtgactcttgtgtgacctatttcaaagctgactatgaaaggcttcaaagccctgtccttggaagtgatcatgggaagaagacattgcttggagcagaggaggttgtaatcttgatttcattttcaaatcttgttttctatagttattgatctagaaacctaaagtctttaattttgttgcaaaacgtgcagtttgtgcttggaccagatgagtatgtcactgccgtgtcgggctactatgacaagatttttagtgtagatgccccggcaatcgtctcgcttaagtttaaaacaaacaagagaacatctatcccgtatggactcgagggaggaactgaattcgtactggagaagaaagaccacaaaatcgttggtttctatggacaagctggtgaatatctttacaaacttggagtcaatgttgcgcccatagccaaatgatgtgaaaccaatctggatatccctgaaatttgaataaggttatgttgtgagtttatgaagttgtggtctagtgttgtattttgtttttcttaaggataatgcatctgtgtgctttgcttatctaaaatctaaataaagtgggtttctgca

SEQ ID NO: 141658 - DNA, 3175 bp, Arabidopsis thaliana landsberg
aaggacaacgggtctacctgctgacagttcttttgcagagactcttgatgagatcaaaagactagttagaagcatttctccggatgaaattgcaggaatagttaaagcgttttcttctgcattgatatgtgcaacacctgaatcgatcttgcaaaattttgcttctgtgatggatgtttcttgggccttttatggaacaccattctcatttttacagtccatcacctttctagaggaaaatttccttggaaacctttcaaagctatcgcctgacttgtttgcttcaggttcagaatttactgggtcagggaatctgtgtgaaggaacagtagatagtgagattgatttttctggccactcatccgtaactgaagaaatcagaagtaagatggacaatcgtgatatggaatcttcagccttctctatattcttaaagcaggctccttttcctgtattacttaacgcaattatgagcatggatatatcttgcttaccagagtttccaagaatatcagagctattgctgctaaaagtttcacagcctaaaagtggtagtattgactccaatattcaattaatactgttctggctctttcaaatacgatcatcttacaaggttcaaccagctccagtacttcatcaactctctgagatctgcttacgtctcatgaagaacttgttctctcaaatatcagaaccggagcttgtttctggaccctcttcaaataagttgcctgcttcttttgcaaagtggaagcatcaagtggccgagacagttctttgccacccagttgtgatggcactgttagagagtcccttggattgtggcacattacctccagtgcagaatgttgagattttttcagaaacatcgctgacaatgggcaggctagtatttagtgaaatagatcaacacatccttaatctattggtttctacttgtgaacactttttgtttgatgagaaaccccccaatctgtggaaagaggacctcaggaaaaataagtcaattatagcgtttaaggacttggttgaaaggcttctcttggaatttagggtcaagtttgagctttgtgttggttctcaaagttacgtttctcttctccaaccagcacaattgattcatgctttgttgagatttatatcaccttttaaactttttaatattgctcattccatgttgagtaaaattgatgaggaaggattaacaagcccaaattcaagtattattctcagtttgggattgggtattgcaggtggagcttttgaaatgcttgtattatattcacaccagccgactgctaagagaggggtatatgatttgctgtgggaattagaagaaaagaattatgccagtaacatcattgagaaagtatatagcatggcatgcaagttttctacctctcttgatttggattcagcagatatttgtttgcttaaagtttgtggtggtattttcaggggaaaacataatcaaaattatgctgttgacccgttggtcttgaaaatttcactgattgttggaagaacccctgaagacttgattatccattgcattaaccgggcaagcataaccagagccaagatattattctaccttgtggagtccagtcccttgcatctgttagtctttggacactttttctttagtatgctaagtaagaaacaggatgactctgctcttacagatgatcagtttatcatgcttctgcctgctgtgctatcgtatctgacatcagttattgcaaaactcgagaagccttgtaatagatgtttggatataacttcagtttattcaaatatactaataaatggttttcttcagtggccgaggtttttggctaggtgcatctttgaagagaagcatgaagagattcttctgtcaacgactgaggatatggaaactatgtttaatgcgagtcttattgggaaggcagtacgtatgtttcaataccacttttccttgactgaaagtccaactaaagaagatgatctctttaaggtatttaattccatgtttcctctcagtagtactggcaaggagatgttggattacgagataaaggaagtggacgttcagtcagtagaccaaatattaaatgttgctatccgtgtggttgcaaaagtaacagtttcaaggatttgtttgtttcctgaggatagcagtatgtgtcatctcaaacgtgcagcaggtacttgtgtgaaggaaagttcttcaaaaattggatgcaatagagcaattttatcaaagccgttgctagatgctttagttaatagttggcaatgtgttgtcaagaaatctgatggatcttttaaagggaattatgaaggaaaacaagacagatgttggtccttgtgcaaaagtcttgaaaacttcattttgagaagtattctacagtttttggaaagcatgtgtgaggagcttgttcaattggattctcttcccttcctggacagattgatgaaatcagttcttctctatagatttgaggactcgaagacactgaagatactgagagaaattttctccttattgtctagagggaagtactcatatgcaccatatatccaacgcttaatatatcactctcggtttacaccaactatcagttctctctccatatcatcctcaaatactggtgaattattcaggcctgtctccagcatcctaaatcatcttatcatcttaagtccggattctgtcagagttaaaaggtgttgtcttgaagcacctaagtatgcaaagcagttagaaattgtcaaaattctcagagtgctgctctccaattgtggaaaagattcaggaatgaaagagctgctttcagatctacactttcttcttttgtgttcttatggtgcaactctgagagaaatcgacttggagatctacaagctgatgcatgatatcaagttgattgaggccgaacagacactgaatgtttctgaaacagattatttgtggggtaaagctgccttgaaaataagagagggactctctcaggatgcatctgatgtttgtcaagttgatttagtggaagatgtccggcagggtcttattaaagagaatctttgtgttgatcccaaaatctgtgctctaactgttttgttttttccttatcaacgtactacagagaaatcggagaatttttacctatatgatgatccaataaatgag

SEQ ID NO: 141659 - DNA, 1822 bp, Arabidopsis thaliana landsberg
taggtactctccacagctatttactcatatcattatgatgttacagatggaaggggtgatttggaaagtggtctaacatggctaagagggggaggtggagagcaccaaggtttgcttcctctaaattatccatctgttggtttgtttccatggatgcaacaaaggctggatctcagtcaaatggggactgataataatcagcaataccaagcaatgttagctgctgggttgcagaacatcggcggtggagatcctttaagacagcagtttgtacagctgcaagagcctcaccaccaatatcttcaacaatcagcttcccataattctgatttgatgcttcagcagcaacagcagcaacaagcgtcacgccatctcatgcatgctcaaacacagattatgagtgagaatcttccgcagcagaatatgcgacaagaagttagtaaccaaccagctggacagcagcaacagctacagcaaccggaccaaaatgcatatcttaatgctttcaaaatgcaaaatggccatcttcaacagtggcagcagcaatcagagatgccatctccctcgttcatgaagtcagattttactgactcaagcaacaaatttgcaacaactgctagtccggcttctggagatggcaatcttttgaatttttctataaccggtcagtctgtactccctgagcagttaacaacagagggctggtctccaaaagcatccaacactttttctgaaccgttgtcacttccacaagcctatcctgggaagagtcttgctctagaacccggaaatccgcagaatccctctcttttcggtgttgatcccgactctggactcttcctccccagtacggttccccgctttgcttcttcatcaggagatgctgaagcttcccctatgtcactaacagattcaggatttcagaattccttatatagctgcatgcaagacacaactcatgagttattgcatggagctggacagattaactcgtccaaccaaaccaagaactttgtaaaggtgctggtttgttctaggctcaccgacttctctgtggctctactgtctctaagaaaatactgatatgcttacaaatccaaaactgcaggtttataaatctggttcggttgggcgttcattagacatctcccgattcagcagctaccacgagctgcgagaagagttagggaagatgtttgctatcgaagggttgttggaagacccccttagatcaggctggcagcttgtattcgttgacaaggaaaatgatattcttctccttggcgatgacccatgggagtaagtaaagtactcttcttctatttgtattcattgctttagatttgagatagatctttaaaagcttgttctgcaggtcatttgtgaataacgtttggtacataaagatactatcaccagaagatgtgcatcaaatgggagatcatggagaaggcagtggtgggttattcccgcaaaacccgacccatctctagaagctgcttcggtgttagtctcatcatgctacaacgcgggagccctttgtttcccatttgaagtcgtttccactcatctttatatgccattcgttcgcatctctctcgttttgacgtttttagaaagaaacataatcatatttgtgagtatgggtcctgaaactttaggacgtactttagcttgtattagacagacactctcgtcataaacataagaacctttatgtagctgtctcagggtaactaaacttttctagtatttattcttattctatttttggaacaacattgttagacattcagtttggtcagaccaattagattccata

SEQ ID NO: 141660 - DNA, 396 bp, Arabidopsis thaliana landsberg
actgaagagtggagattttcctcaacaggtacgtttcctacaccaaaatggctactatcatcttaaaacttccaaattctgtaatagctttactgatagaagtggaaaaaacaaagctaaaagctaattgtagtttgtttaattactttttcagcaagcaaccggagtgtttttgaagaattgcacattacactacgctgcatatagaaacattcatccgttgtgggcactcgcagaatatcgcgcgcgagtttcgttgccatgacgacacttttcataaacttttctttatatcagagaacatgtgaatttattaacctatcatcagtctattacaagaattcgtgtatgcgatatgtcaatgtttttagtcaatgttttctttttgtgtaccgt

SEQ ID NO: 141661 - DNA, 540 bp, Arabidopsis thaliana landsberg
gaatatctaaaccaacatgaactcttcttatctccaagcgagccgcgtcatggtgctcggatctaaatctccggtagaccgccgccggaaatcacttgaaagagtggataaagaactcttaagaggcaattacgaaactgctctctcactcgtcaaacaactcaagagcaaacatggctgcttatctgcttttggctctgctaaattggtttctctcgcatctctctcttaatgcttatttgccaataaatcatctctaattcctttttttttttaattagcttccgaagaaattagacatgagtagcaaaactgatctcaggtcgttgattgattctgtctccagaagtattgaatctgtttatgtccaagaggtactttcaatttttgcagtgttttaccaataaacacatgtaatttcatgtaccttaattttttttattttttttgtaggattcagtgagaacatccaaagagatggaaattaaaacttcacctgaagaagattggttctctgttgttcaggtgaagatctcttag

SEQ ID NO: 141662 - DNA, 447 bp, Arabidopsis thaliana landsberg
gatctttccacaattccatcaatgggtctttcccggtttctcttctcaacgcgacggagcttcgatttcttgatctgtccgataatcacatctccggtgcactaccggcgagttttggcgcgctttcgaacctccaagtgttgaatctctccgataattccttcgtcggcgaattaccgaacacattaggatggaaccggaacttaacggagatttcacttcagaaaaactatttatccggcgggattccgggaggttttaagtcgacggagtatcttgatctctcgtcaaatttgatcaaaggctcgttgccgtcacatttcagagggaatcgtctacgctatttcaacgcttcgtacaacagaatctccggcgagattccgtcaggtttcgccgacgaaatcccggaagacgccaccgttgatctctcattcaaccaacttacag

SEQ ID NO: 141663 - DNA, 804 bp, Arabidopsis thaliana landsberg
atttcttctctttctctctctctcttctctcatatctctctcttcgccgtcaggttttgcccaaatttctcggtcttcttcactcccgcgagatttttttctcgggaaaattttccaatcccaagctccattgaagccaagtaagaggtgcgattctcttcaattttgacttggaacttgtaaatagcgtatggatttgagctggttatggacagaattctagctcgtatgaagaaatcagctggacgaagaggaggagataagaatattactccggtacggcggttagagcgtcgcgatgcggcgaggaatatcaattacgacgcagcttcatgttctagttcgtcagctgaagatctttccgtttcgacttcttcgttgatgactcgctctttggagtttccggagcctactagtttccgaatcggtggtggtgttggagagatggatcggatttatcggtctcttggtgtttctggtcctgatgatttggctatttcttttgatgcttgggaagcttgtaagaaacgttcttcttcagatgttgttaataggtttaagtcttttgatcttgataaggttcgtgatcaggatttgagtgaagaaggtcctagtggtgttgttgttggttctgattcaatgaatcataaggttcagggtcaggatttgagtgaagcaggtcctagtggtggaattgttactgagttgagtgagattgggaatttaatcactcctgtggataggttagtagctgatggtgtggtagagaatatgcgtgttatggaaagaacaccaactattgtg

SEQ ID NO: 141664 - DNA, 788 bp, Arabidopsis thaliana landsberg
gccaccacatccaaggttgcactatgcatgacggtgactgggactcccacggctccatcagatcatggaatatcacatgcggtctctactttaccttctctctttttttgtagtattttggtagttttagatttttggtccatatattttttggggccaaggaataaggtagataagtcctctcccagatgttggtagctaggcctcgaaccttctcaaactctcctccaagagtttcaaagtagggctaccgacaccgggtgtccactctctttaatcatgtttggtaatacgaggattgacgatcggctaatttggtctagcattgtgtgtgtgtgtgtttgtatgaagatggaaagccggaagtcttcaaggagaagagagagatagacgacgaaaagatggcgttgacgttgaaagggctagagggtcaagcgatggagaagtacaagaagtatgaggttatctaccagttcattcccaagtcgaaggaaggctgcgtctgcaaaatcactctcatatgggaaaagcgcaacgaaaactcccccgaacccatcaactacatgaagtttgtcaagagcttagttgctgacatggacgaccacgtcctcaatggccagaacaaagcttgaatcccctctatggtcatcgtcgaatggtcttcatctttatgtgtgtgtatcttttgtgtatctttacgtacgtacgtgacttatcatccgcctctttccccctttatacaagttaaactaataataatggcggtcatggaagcctatgtatcatct

SEQ ID NO: 141665 - DNA, 706 bp, Arabidopsis thaliana landsberg
tgcatcggaatctagctgttccacaatctgcaattgtttgtttaggtatattgcagttcgttttttccgatgtcaaaagagagctggtgaaatcggattctagtagtgattacgttgcaaggataacggacttggtgaagcaggatcgtcatgagttcgatagctttggtcttgaagtctctgtgccatcaactatcatggagaatgaacgtgcactcttgtaagcttcttcgcttgcatcaactaaagattttttcctttttatcagttttgttttggttctgctctagtgttaatgtatctaccttaataggtcataccttaaaggaaagtacagcaccgaagtttggctgcagcgcgataaaatttctgtaaaggatgccttgaaagttctactcttggatcgaacttaaagcatcgttggtgagtcggtgatttgcttgaaagtgtttctgttttggaaaattgttgagttgttgcttaggttttcacctttgcttctattgcttagtatcttatacaaatggatgttataacctgcaaaatctgtttccagatactaaaagtctttgcgtttcttctctgttttggcagggcgctgaatcagattcaagctcttttcacatccgtttgacatacactaaagcatcagacgaggctcagggtgcttctgaaacaacgcatgaaagtaagaggaggaaaacag

SEQ ID NO: 141666 - DNA, 396 bp, Arabidopsis thaliana landsberg
ttttttgtttttggttacggttttgtttggccactaagtaccatcattacttgcatttattctgcactaacggtactaatcgaattggttctgtttctttacttccacaccatttgttttctttaacaattttatacattacatatccataaatggaaaacaaaaaaatatcttcacttcacatgcctccaatgaatcctctcttcatctcttagcataactaattcaatcattgtcatctacaaagtcacacagagtgaattgttaaatcgtaaagccacaattataaacataagtgtaaagagcaaaaccggtggtataaaccggacaatagatttgcttcacaaaccccaacaaaacaaaattaggtcactgagatttgactgttacctttaa

SEQ ID NO: 141667 - DNA, 221 bp, Arabidopsis thaliana landsberg
ctcttacaaggagcgaaagagaaacactttccgacttgggtaaggaaaaagagtttgatgggttgttgtcaatccttgttttccggcgataacccacttgggaaagatggagttcagccgcaaccactatctcaaaacaatcacggaggagctacgacggctgataacggcggaagcggcggagctagtggtgtaggcggcggaggaggaggaggaggaat

SEQ ID NO: 141668 - DNA, 580 bp, Arabidopsis thaliana landsberg
atgcatgggaagaaagacgtcggttttgaaatgattctatataatttatcccgtttatatataagtaatgttgatgtaaaatataggaaaattggcaaggttaaaattgggagagattcacgtggagggaggaggtgagtcgcatgaattggtttggtgttggatgaaatgaaagatatgtgtgtgaaagagggcgttatgacaatgaattcggcatttttattttgtttttcttaattaattagctatatttaattatgtttgcaccgtttttttcttgggttgtgatgttactttgcatcgatgtgagaattcaatgaggttcgttaaaccgaaaaaagaattcaatgagtccgtatatttcggcttagagaatacgaaaggacaaaccaatgaatatgttctttagagaagaaagaatattagtcggttatagatatcgatggctttagatagttgtgacgtgcagcgagatacttgccctgattaattatcttcatattttttgagtttgtagtagaacagaattataattttccatgagagtataattgaacattatatttgagcttttagtaat

SEQ ID NO: 141669 - DNA, 758 bp, Arabidopsis thaliana landsberg
taacgagagggggcttttgaatttttttgctcaacttccaaatcgtcgccggcgatagaaaccctagatttgattctccgtcggttatatccagcaatgtcgttttttcccccacagcaacaacagacgcctcagccgctgtttcaaactcagcaaacgtcgttgtttcagccgcagcaaaccaattccatcttctcgcaatcgcagccgcagcaaaccaattccatcttctcgcaatcgcaaccacagcaaaccaattccatcttctcgcaaccgcagcaacaacagcaaacgtcgttgtttcagccgcaacagttccagcagcagcagcaacagctaaatcagcaacagcagcagcaagtacaacaacagttgtatttgttcaccaacgataaagctccggcgaattacagtactaagtgggccgatcttcatcccgattctcagaaactcttgcttcagattgagtatgcttttacttaaacgcctaaattcgtttcctttttctccataggctttgctttagtgcttactgttattttgttgaattgttcttgttcagattttgaaatcttaaagaatcaataaatttagaatctttttgatgccgttgatggttattgattctttgtgttatctgtagagagaagatattggagcatagaagtgaaagtcagagattagatcagtgtagtcgactttatgattcttctgtatccagtgaagggtttgagtttgatgctagccgcattgttcag

SEQ ID NO: 141670 - DNA, 896 bp, Arabidopsis thaliana landsberg
gtatggaaaggaccatttattctcgactcaattgctctacgagctctctcctggtttcaaactcggtttaaaggccgggaatctccccattctggaccccgcaaataacaacgcgggtgtaatgatgatcccgcacgttatctatttcgatatcggagaaggtggacaatacgttaaccttctccgtacattatccacgcgccggaatggtaaaagtcagaatcagaattctccggtggttaagatcaccgccgtggcgaacaacgtttacggatgtttagtcgatgacggtggagaagagaggttaaaagccgtcggagatttgttgagccaactcggtgatcgactcggtatctccgtaagtttcaacgtggtgacgagtttacgactcggtgatctgaatcgtgaatctctcgggtgtgatcccgacgagactttggctgtgaacttagctttcaagctttatcgtgttcccgacgaaagcgtatgcacggagaatccaagagacgaacttctccggcgcgtgaagggacttaaaccgcgcgtggttactctagtggagcaagaaatgaattcgaatacggcgccgtttttagggagagtgagtgagtcatgcgcgtgttacggtgcgttgcttgagtcggtcgagtctacggttcctagtacgaattccgaccgtgccaaagttgaggaaggaattggccggaagctagtaaacgcggtggcgtgcgaaggaatcgatcgtatagagcggtgcgaggtgttcgggaaatggcgaatgcggatgagcatggctgggtttgagttaatgccattgagtgagaagatagcggagtcgatgaagagtcgtggaaaccgagtccacccgggctttaccgttaaagaagataacggag

SEQ ID NO: 141671 - DNA, 1590 bp, Arabidopsis thaliana landsberg
gttgacttctgagaatttttgaaagtctgacatcagatctatgacaagaggagcaggaggggagacagtggcatggagttacttttgcagagatgttgtgccgttcactgcaatggtcgcggtggagtgtgttacggttggatctaatacactgttcaaggctgcgacattgcgaggattgagcttctatgtctttgtcttctatacctatgttgttgctacacttgttcttcttccactttccctcatttttggaaggtactgatctcttcaagtactcttgaccagtataaaaatttcaagaatgtgaacatagtttatgtgcaggtcaaaacgattaccttctgccaagacccctgtcttcttcaatattttcttacttgcgcttgttgggtaatgatatactccttatactaccagatttagcctcatttaactgtttttcttttctagtttgctaacttttgggaaacaggttcatgtctctgatagttggttgtaaaggtatagaatatagttcaccaactcttgcctctgctatcagcaatctgacaccagctttcacatttacgctcgccgttatcttcaggttccacctctttttctttcgtttccgttctgggatagtatatagataatttagttaacaatgcggtagttccacacttatttaaccgttcaaagttttaagccttttgcttttgtcacagccactagtacaagtacaaccttgtggttgcataaaaaatgttgtgcccacatgttgttctaagagacagagagaaatatgggtaaactagaggggtgtttgtttctatcagctgaacatttaactcttgttgttactgcttccttgtgtgactcaaaagaatggaacaaatagtcttaaggagctccgcgactcaggccaaaatcattggcacgatagtatctatatctggtgctctggttgttattctgtataaaggcccacaagttctcgcctttgcatcttttacaactgtattacctaccgttacacttcaccagcatttgacctcaatagagtcaagctggataatcggagggctcttgcttgcttcacagtattttcttatatccgtctggtatattcttcaggtacaaacacttgaaaatttcactaaaaaagactttgggtttacacattaaattctgtagctgtatatggtttcagactcgtgtcatggaggtttaccctgaagagataaccgtagtcttcttctacaatttatttgcaacactaatctcagtaccagtatgtctttttgcggagagcaacttgacttcttgggtgcttaaaccagacatttccctcgctgcaatcatatactcggtgagaagaatcagatcttataatctgcttcaagaactgaagattttataaactcagaaattaacactttgtttcagggagtcttcgtttcattattcagcgcgcttacccacacatggggtctgcatctgaagggtccggtatacatatccttgttcaggccattgtctattgcgattgcagtcgccatgggtgctatattcctcggcgatgcacttcaccttgggaggtaccat

SEQ ID NO: 141672 - DNA, 2886 bp, Arabidopsis thaliana landsberg
  unsure (1)..(2886): unsure at all n locations
aagcaccattgctccaacagtgacgggtacaggatctagttctgtgtttgtggagtcaaggcagaatatgagctttcaagtcaggcgagataggagcgatgataggtctcatcgattcaatcatcagcaaacgtggattcctagaaactcatctacctcgagcgtggtggtaaatgagcctttgcttcctcctaatacagatagaaattctgaaacccttgatgctggttctgcatcccgtcctgtttatctgcaaaggcagcataacgcttctggtcctccgtcctataaccaccaccaaaggagtagtaacattggtccacctccacctaatcaacatagaagatataatgcgcctgataaccagcatcaaaggagtgataacattggtccacctcaacctaatcaacatagaagatataatgcgcctgataaccagcatcaaaggagtgataacagtggtccacctcaaccttatcgacatagaagaaataatgctcctgagaaccagcaccaaaggagtgataacattggtccacctccacctaatcgacaaagaaggaataatgcttctggaactctgccagataatcgccaaagagttgcatctatgacgcggcctgtgaatcaagggaaaagggtagcgaaggaggagaatgttgtgttgacagacccaaacttgcctcaacttgttcaagagttacaggagaagcttgtcaagagttctattgagtgtatgatttgttatgacaaggttgggaggtctgccaatatctggtcatgctccagctgttattccatcttccatatcaactgtatcaagaggtgggctcgagcaccaacttcagttgatttgctagctgagaaaaaccaaggtgataactggagatgtccaggttgccaatctgtacagttgacatcatctaaagagatttcctatcggtgcttttgtggaaagagaagagatccaccgtctgacccatatctcactccacactcatgcggggaaccatgtgggaaaccgctggagaaagagtttgcacctgctgagacgactgaagaggatctttgtcctcatgtatgtgttttgcagtgtcatcctggtccatgtcctccctgtaaagcctttgctccacctcgtagctgtccttgtgggaaaaagatggttactactagatgctccgagcggagatctgatcttgtttgtgggcagcgttgcgataagcttcttagttgcgggcgtcatcaatgtgaaaggacatgtcatgttggcccttgtgatccttgtcaggtactggtaaatgccacatgtttctgcaagaaaaaagtggagactgtcatttgcggtgatatgaatgtgaagggggaattgaaagcagaagatggtgtctattcatgcagttttaactgtgggaagcctcttggatgtggtaatcatttctgttccgaggtatgccatcctggaccttgcggggactgtgacttactgcccagtagagttaagacatgctattgtgggaatacgcgtttagaagaacagatcaggcagagttgcttggacccaattccttcttgttcaaatgtatgtaggaagcttcttccttgtaggttacatacttgcaatgagatgtgccatgcaggtgattgcccgccttgtttagtccaagttaaccagaaatgccggtgtgggtcaacatccagggctgtggaatgctacataacaacttcctcagaggcagagaagtttgtgtgcgctaagccatgtggacgtaagaagaactgtgggagacnnnnnnnnnnnnnnnnnnnnnnncctctcttgaacgggaagaagaatgatttatctggcgattgggacccacatgtctgccaaataccttgtcagaagaagctaaggtgtgggcagcattcctgtgaatctttatgtcacagtggacattgccctccttgtctcgagatgatcttcactgatcttacatgtgcttgtggaagaacttcgattcctcctccactatcatgtgggacacctgttcctagctgtcagcttccatgcccgattcctcagccttgtggccattctgatacgcatggatgccattttggagattgtcctccttgttctacccctgtggaaaagaagtgcgttggtggtcatgtggttctcagaaacataccctgtgggttgaaagacattagatgtaccaagatttgtggaaagacgaggcgttgtggcatgcatgcttgtgccagaacttgtcacccggagccttgtgacagcttcaatgaatctgaagcaggtatgcgtgttacgtgtaggcagaaatgtggtgctcctagaacagattgcagacacacttgtgcagcactctgccatccttctgcgccttgccctgacctaagatgtgaattttcagtcacaattacttgttcatgtggtcgtataaccgctacggtcccttgtgatgctgggggaagaagtgccaacggttctaatgtttactgtgcggcctatgatgaagcctctgttttacagaagcttccagctccacttcagcctgttgaatcgagcggaaaccgtatccccctcgggcagagaaagctttcgtgtgatgatgagtgtgcgaagctggagcgtaagcgggttcttcaagatgcatttgatataactcccccaaatctggaggcattacatttcagcgagaattctgctatgacagagattatttcagacctttataggcgtgatccaaagtgggtactggctgttgaagagcgctgcaagttcttggtacttgggaaagcaagaggaagcacaagtgcccttaaggtccatatcttctgcccgatgcagaaggataaacgagacacggttcgacttatagctga

SEQ ID NO: 141673 - DNA, 1384 bp, Arabidopsis thaliana landsberg
aatttaaagaaaatttttccatttttttttttactctatctctgtgagagattctcttcaagctcaggcctttaggctttaggtttcttttgggagtcttcttgagctctgtaatcactctctagaagcttattttgcctcctaatgttattaggtacgtctttgtatctgtactcttgcttctgcatttttcgatatttgtttcttttgatgagatttggggactcttccttcagaaggatatgaagattttgacatcttccattaaaagttgaatctttacttaagctagtgttcttagcattctgtttatgttagcttcatgagatctgggatttcgaggctgcttttttttttttgctttgatttcacatttaatggggtttgattacattttcattaggtgaagtgacttgaacttggcttgtggttgtgatgaatttctttctattaaaagttttggtttccctaccaaaaaaatgtcttctttttgttaattaaagtctaaaagtagctaatctctatctgtacttgtgtagggttcatcatttgagtctataactataatgacttttcactgttcatttcctttttaaatctcttgttgtttccctttccttactttgttcatcatttctccttccctttactcaatagacactgctcttcctttggattattgctctgtgagttatttaaaataagccataaggtctcttcttatgattgttgcagggtgttgtactggaatctttaggatgaaccaaggaagatgagtctctcggtctttcaaaaaccaagtcttgtaatgaggagctgtccactgttgtaaagtaagtcattaagatggaatcgtttgcaggttcttgtgaaattgttgaggagaaggatgcggtaaggttagccaaacattctagcagatattgtatgtcacctttgggatcaagtaaagatatggagcagcgtcctgcattgaagtcagggtaccaaggttctatggagtatgacattgatcagcttttccagtctataactataaaaccatcacctagaagagtgatgggctcttctttccatcatcttgagacgagcgcaagtgctggtacgagcaggagcacaagcccttcaaataaaggcgctatgaaaaagccctttcccatgggaacccctcgatcaccaagagttggtccctctgattcaatatctctgaagcaggctctgagagatctttgcatctccaaggcatcagaaatggcttcccagaaacgtttatcaaaatctgcagctgcatctccgagggtttctgaagcagacaggataaagactctttacagacaagttttgaatgaatctgctggcaagcctgggcttcctgtggacaagg

SEQ ID NO: 141674 - DNA, 2312 bp, Arabidopsis thaliana landsberg
atgactaatctcaggattgttaccgatatcccggggacgactgatgtatcatttggtaagtcctatacatatatccttagatataacaaatcacatttcatatacgtatattttctgttcaaagattttaatatgagaatacaaaacaggtaaagagataatcgggtacgagatgcctcggccaaacatagggatccaccgctttgtgtatttgttgttcaagcagacccgtagaggaagtgtggtgtctgtgccatcttacagagaccaattcaacactcgagagtttgctcatgagaacgatcttggcctccccgtcgcggctgttttcttcaactgccagcgtgagaccgccgctagacgccgttgaatgactttccacgctgccgcagctgccctaactaactctggctgtgcccggacaatatgtgttgttccatgcattctatattttagttacgggaaacagcttttcctatcatatttatgtgtgtatttgttatgaactgtttgtgatctgaataaacttggcttataatctcatgcatggtctattttcatattgatggatgttaatttttagtattatcaatgtaattatacctgatattccttattttcaaaattatgatatagttgtataatggtagtcgtccttaagtaattggtggctgcaagcaccaaaaatttgtttggacaaatttccatgatcgccgtctgtggggatcgaacccacggccacgtggttaaaagccacgcgctctaccactgagctaagacggctttgattactttcataaagttatcgaaaatcaatcctataaactcattattttattcatgttttgatatacttttacttaacgcagaaaagatactataagtcaataacgcaaagttaaatacgaattttctacaactaaatcgtaactacgacaacaaatcctagcaaccataagtccataacgattgacaaataaacaaacaagtgtcgattgaaaacgttaacaattgacaaataaacaaacaagtgttgattgaaaacgttgcgtattgcaacaacacaatcataatgatgatttacaaagtgttgttcgctttagaaccaaagctcccgtttcagatgctgaaggctcgttgagacctcttatctcattccgcttctgtcctaaaccacaatttttggtaatggatgataaaaatatggcggtcaacttgagaaacgatgacttaagcgaagaaacaaagactctcatctcttcacttccttcagacaaagattccactgggataaatgtttgtaagtaccaaggttgttggtatactcaccactttctccaagctgtcctcaatttccagaaaaacttcaagcctcaagacaccaatatcatcgttgcttcgttccctaaatgcggcacgacttagctcaaggcacttacattctcactagtgcatagatcaaaacacccttctcatgatcatcatcatccccttctttctaacaatccgcacgttcttgtcccctaccttaaaatgaatctctattactatagcgaaaaaccggacctgaccaagttctcatcgtctccgaggctgttctcgacacacatgccgtctcatacgctgcaagaagtgcttaaagattctacttgtaaagttgtgtatatttgcaggaacatgaaagacacattggtttaatattggcatttcttttctaatgatgataacgtaaaaaccagtttcgaggaaacgttcgagtctttttgtaagggagtcaacttttttgggcctttttgggaccaagtcttaagctactggagaagaagcttggaagatccaaatcatgtccttttcatgaggtttgaggagatgaaagcagaacctcatgagcagatcaagagacttgctgagttcttagattctccttttactaaggaagaagaagagaacggattggtggatgagattatagatctttgctctctacgtaatctgagcagtttggagataaataagactggaaaattatgtgaaggtagagataacaaaacatttttccgtaaaggagaagtcggtgattggaagaactatttgactcctgaaatggagaacaaaatcgacatgatcatccaagagaaacttcaaagattattccaaggtttggtttgaaaatgcattgtaataattaataagtgacccttctaatgttaaggtgcatggttttaaaattctgaattagtgatgtttatgtgttgtttgtgttttgttttctattgaaatgcattgtaacaataagtacctgtatcctttga

SEQ ID NO: 141675 - DNA, 1137 bp, Arabidopsis thaliana landsberg
ggtctggtgaagctctacagtgttggtgaaagtcgcaacgagaacattccggaatgtagttcatttttccttccaaaagctgccattggatttatcacaaaccttgcatcaagccttttcggttatcagggttccacttcggttataagttcacattcacgttgcaatgattctgaagatcaaagtgactctgaggtccttgttcaagaaacagcagaatcatatgacaactctgaaacaaattcaggtgaagtggatatgaccaccacgatggtcaacatacctatagaaggaaaaggaattaacaggacactggattcaactcttctagagaacagcaggaaccaagtgagattcagacagtttgatatggttaatgactgctcggaccatcatttcctttcttcggataaagggttggctcagtcccaggtatgactcttgggaccaatacttaacattctttttgataaaccgatacttaagccaagtaatccttttgcatttttatctcttataggtcacaaagagttgggtgaagaaagtccagcaagaatggagcaatttggaggcaaatcttccgagttagttgtgactctttctgcatatatattctctgttgatttcctagccatgccgcgcttttttttcgctttggccaaatgatagttttcaattatcgtatgttctgatgttgtgtttggttataaaatcactgattttgaatttttgtgatgaacagacacgatatatgtgcgtgtgtgtgaagaaaggatggaccttctgcgtgcagccctggttggtgcccctggaacgccatatcacgatgggcttttctttttcgacataatgcttccacctcaatatcctcatgagccaccagtgagtttcacttctttaacttctctatcactcactctcgcttttaaatatgtgtttcttggggactagtcagtcggacttctgtttcttgtaaattcttagcaatatcatggggtctaaaaatgtaactgttgttgtttaaaagtgttttgtggactaaaacaagtgacattgataattttttctccttctatggatacagatggtacattatcattcaggtgggatgcgactgaatccgaacctgtatgagtc

SEQ ID NO: 141676 - DNA, 4987 bp, Arabidopsis thaliana landsberg
atgggtgtcctcctcctcgtctccgtctctgttttgacccatcactgtatgatgcttcttgtctatacccgccgcaagctcgactctttcaatgctggcatctccaagatcggctcttttggtgaccttggattcgccgtctgcggctccttggggaggatcgtcgttgacttatttatcattctgtctcaagctggtttttgtgtcggatatcttatcttcatcggcactactttagctaatctatccgatcctgaatcgcccaccagtctgaggcatcagtttacaaggctgggttctgaattcctgggcgtgtcttctaagagtctctacatatggggatgctttccctttcagctcggtttgaattcgatcaagacgctcactcacttggctcctctcagcatcttcgccgatattgttgatcttggcgctatggctgtggtcattgttgaggattccatgattatactcaagcaaaggcctgacgtggttgcctttggtggtatgtccctcttcttgtatggtatgggcgtcgctgtctattccttcgaaggcgttggaatggtcttgcctcttgaatcggagatgaaggacaaggacaagtttggcaaagtcttggctctcggcatgggattcatctctctcatatacatcgcatttggtatcttaggttacttggcttttggtgaggacaccatggacattatcactgctaacttgggggcaggacttgtcagcactgttgtccagcttggactgtgcatcaacctcttcttcaccttccccttgatgatgaatccagtgtttgagatagtggagaggcgtttctcacgcgggatgtactctgcgtggctcagatgggtactcagcttagcagtgactctggtggctctttttgtgccaaactttgcagattttttgtcattggttggcagcagcacttgctgtgtgttagggtttgtgttacctgcattgtttcatttattggtgttcaaggaagagatggggtggctgcaatggagttcagacacagcgattgtggtactaggtgtggttcttgctgtgtcgggaacttggagttccctgagtgagatcttctctgtcaaagtgtgagcgtccgtgaagtcagagattggagaggtttttctctccttgtgtgcaattatgtatatggaattggttgtggttttaagagtaactgtgattgtatttgtattttgatggtttggaataaaagagatcagctctgtcttctgttttgtgtttacatgtacaacatatgtgagagttttgatttctcaatgttacaagcaagggaagcttgcgaaataagcctggctagctaatcaaatgctttggttttgtattattacaaactgttgagtgtgttccttccatgaatcgccttcttcaagatgcctctcgtagaagcaaatctcaccatcaccaccaccatctccatgggacttgacgatgatcgcagagatgcttctggtcccataacgcccctgtatctccatgagtgagactgaatatttatggaaagtgttaaacaaacaatcaatgtactctaaaaaaggaaggttacagttggtctctgcatgtcgacgaagatggagctgagatggtattccgtctctggtgtgaaaacgtgaggtagctcggtttcttcgtccttgacagtattggtcatcacctcctccaccatggtcttcaccgggaattcaccgctcccgttctcagccagaagctgttggaaaccctccctcagcctcagacactgcagagacaaaaacacgcaattgggggagtctgcaaaaggtaaataaagggagaaatggcccacatttacttaccttgggccaaggggagtcgaggttggcgttggaaaggacatggatcccgggagagacttgcgtcacgagcttgtcaccgtggggtggtcggttggtaatgtaaatcatggatttggacaagacatgagcgacaaccaggttaaagccattgtagagtgaaatttcgtcttggatctcctcggcaaactcggccggactcttttcgctctgttctcaccaaaacgttaaaagtactctcagtctctaacatgagagacaatctaaagcatattaggtggtggtgtagacctgcaagtaacgaagaggcagatctccacgggatttagcagcagggaaggaggaggcttccctgaaattggtgaggaaagccagacggccatgcctcgtgcagcccagccacgtcccgccgccaacaaggtctcttcctcccaccgtctctccgtcttcccaccaacgcagcgcctctgtcgcccttgacaatttacacaaaagattagtacaatctcatcaaaggaaacgattacagaggggattgaatcacctgttgtgatcttcatctctgttgagaaatagaagaaaagggtacagcggatgcgattgccacagaaatactgctatgcacattctcttctcctccgacgaaccaacgagccaaccatctctctgctctaatcaaagtcgtcgtctcttttttttttttttttctccgtcttctacttaaagaaactgcgtgtagtttttcttaccacgaaacggcagcacgtgcaggttttaacaaacctctcgattgattgatttgctttaaagaaagctcgccggcgatgtggtaatatcagtcagatccagatgacgacgttctctacatgcgccgcctttttatcgctggtacctagcttgattgttctctctccgttcgatatgattatctatatttacttagctcgtcctggaattcgcactactctcttaaaatggatcatctgatcaaattgtgccttaattttttgacatgtcgacgatttgcaggtagtagtgctacatgctgttcatgtcggtggagccattttagagtcacaagcaccgtaatgatacatctccttgaagcttgtcttttggctacactgtttctattttatttttatactcttttcttctttttgccatgatgtttccttatgcagccacagagaacttaaagcttatcgtccgctgcaagataataatctacaggtcccattctcctcttgttctccagataacttatttggttcaaatatcagactttgctgtgattaagtttttgttatccacttttgcctttaggaggtgtatgcttcctcagctgctgcagtgcactacgatccagatctgaaagtaaggctgcagtcctctttctctgagtagtgaatacaatttgtatgcttcctacttctaataaagctgttatctcaggatgtgaacatagttgcgacatacagtgaccattacggcaatatacgccttggtagggtgaaaatgggggatctttcaccttcttgggttttggagaatcctgcctatcaagttagccgcaaaacaaaaggttcgcaggtaccaaacatttcatgttctggtttttagttttaatgagatttgatcatcagtttaagaatagaactgtatatcctatggacatatggagttctatagtagaaaacttaaagtgtgtgaagtgattacttaccactcttctcaccgagcaaaaaatacctctcatgaacttcatttgttctaaccttgtgtttcttgaatttatccttaagcttgctcatattctttgttctctagttgctgacattttttgtatggaattagctagttataccacgggattcatttcaaaatgatactggaatggaagataatgcaagccattctacaactaatcagactgatgaaagcgaaaatcagtttccaaacgtggattttgcaagcccagcaaaactgaagcggcaggtgatctgtcaaatagccttcttttctaatctctggatgccttaacactatatgactgagattgtaacaactgtagaccctttcagattttacgtcaggaaaggagaggtcaacgaactttagagctgatccgacaagaaaaggaaactgatgagcagatgcaagaagcagccattcagaagtcaatgagctttgaaaactcagtcatagggaaatacagtatatggaggagagactatgagagcccaaatgctgatgctatcttgaagcttatgagagaccagatcataatggcaaaagcatatgcaaatattgccaaatcaaaaaatgtaaccaatctgtacgttttcttgatgcagcagtgtggagaaaataaacgtgttataggtaaagcaacctctgatgctgaccttccttcaaggtacttttttacattcctcttgtcagcaatctttgtgagacaacaatctttgttgaaactttttccatcccattttctttgctagcgctcttgatcaagcaaaagccatgggccatgcactctctcttgcaaaagacgagttatatgactgccatgaacttgcaaaaaagttccgggccatccttcagtccactgaacgcaaagtagatggactgaagaaaaagggaaccttcttaattcagctagctgccaaaacatttcccaagccattgcattgcctgagtctgcagctagcagcagactattttattctaggtttcaatgaagaggatgcagtgaaagaggatgtcagtcaaaagaagcttgaagatccttcgctctatcactatgcgatcttttcggataacgttctggctacatcagtggtggtgaactccactgtcttgaatgcaaaggaaccgcagaggcatgtgttccatatagtaactgacaaactgaattttggtgcaatgaagatgtggtttagcatcaatgctcctgctgatgcgacgattcaagttgaaaacataaatgatttcaagtggctgaactcctcttactgctctgttctacggcagcttgaatctgcaaggctgaaagaatactatttcaaagcaaatcatccttcatcaatctcagctggcgcagataatctaaagtaccgcaacccaaa

SEQ ID NO: 141677 - DNA, 1526 bp, Arabidopsis thaliana landsberg
atggatgaagatagagagaaacgtgttcgtgcgaaaggatctgatgaagttgattggataagcaaattaccagattgtttgctatgtgaggtactcttgaatcttcccacaaaagatgttgttaagactagtgttttatcccctagatggagaaatctctggaaacacgtacctggtttagacctagacaatactgatttccaatagttcaacacattcttgagttttgttgatagctttctcgatttcaacagtgaatcattcttacaaaaatttatcttgaagtatgattgtgatgacgagtatgaccctgacttttttcttatcggacgttggatcaacactatcgtcacgcgtaaagttcaacatatcgatgttttggatgattcgtatgggggttgggaggttcagttaccttcaagcatttacacttgtgagagtttggtatctttaaagctttgtggattaactttggctagtcccgagtttgtttctttaccttcactcaaagttatggatctgattataactaagtttgctgacgatatggggttagaaacgcttattacgaaatgcccggttcttgaaagcttgactattgagaggtctttttgtgatgagattgaagttttacgtgtgcggtctgagtctctgttgaggttcactcatgttgcggatagtgatgagggtgtggttgaagatcttgttgtttcaattgatgctcccaagcttgagtatttgaggctaagtgatcatcgagttgcaagttttatacttaataaacccggtaagcttgtcaaagcggatatcgatgttgtgtttaacttgagttccgagaataagtttaatccagatgatctaccaaagagaactatgatacgtaattttctcgtcgggatctctattattaaagatatgatcatttattcgagtactcttgaggtacactacaatgtggaatttgctatttgattgaatgtgttagctctattctttcctgataactttttattttccttacaggttatctatgatttctcaagatgtgaacgactacccttattccgtaacctatctgtcttgtgtgttgagttttacggctacatgtgggaaatgttgccaatctttcttgagagctgcccgaatctaaaaactcttgtcgtggtaggtttacttaaactataagtactttctttggtataacaatgcaaatggggaaagtatcataattactccaacttgtttcgttcacttggttgtaatatcaggaatctgattattatacaaagaagagaactagtatcttatctcgacctcggcgtctcctatcatctctcgagtatgttaagataaaatcttcatgggacaagttggagatgaaattagtgagttacttcattgagaactcaccagtcctcaagaaagtcactctatgtttggatggttgttccagaaaggaatctgtcgtcctcagagatctgcttaccattcctagacactctacctcatgtcaagttgtcttcctc

SEQ ID NO: 141678 - DNA, 1151 bp, Arabidopsis thaliana landsberg
  unsure (1)..(1151): unsure at all n locations
atgagtatgttagatattagcaacgagttccaaaagtctaaaaagctggatccgttagctcctgtttttgttcctgcttgtgcaaaactaagtgagaagcacggtgcagcagatcacatgttaactatggagacaaatgttggctcaacttctggtgtaagttcttcagacagtatgttgcttaatacttttaaggttgttgggacacattctttagtggtcgaccgcagtttaaggaatagatactctaatacaagattggataggtccagcaacaagtctcatggtcggaagaagctaaatcctctggctcctcggttctcactagcagatcataaacaaaatgtatatggctgtgaggtaaaccaagctgcaaatgactttggtgatagacatggctgttccacatcatcaccatctcaaaaagtggatgttaagaaactacttacgacgattcatggattgtcagagttgctaacacatgtacacagttcagaaacttcggatttaccaaatgagcagtatcttgatctcatcaactgtactgtgcagaatctcaactcctatatcaataacagagttcaggagcatagtggggattatgcaagtgctgtacatagttcatgtgatttatattcgttnnnnnnnnnnnnnnnnnnnnnnnnnnnnnnntacttttaaggatcatcgaagcattcttgttcggttttaaagcctgtagactatcgttttcacaatgtgcaggttataagaaatcatcatcaaacagaagagcaaatcaacccagaggtgtgtttttataaaagcttatggctcaaggctaaggcagagagatcgttgatggaacatgaaacatttctttcaaaagcaagatcttgagcaattagtgaagagttatataaggtgacatcagatcatcctaacttttttacttcatagcaacaatgtcaaagattgatttctctttctatgaggtcctattgagcgtttgctttcgattttgcaggttagcgtgtagaaattcaagcggctgaatcgaggcggcgttactagctagagaagttttgcttgcaaatgtatgtgtaggtcgaaaagagggacactcatgtcaattctagacaaagacttgaatctgtactttgtgttgtaga

SEQ ID NO: 141679 - DNA, 489 bp, Arabidopsis thaliana landsberg
gagagcagatccccttcaaacatacaactgttgatatattcagcattgtcaaaggaactggccgtagaaaaaatctcatgcgttcaaatcctactgataagtcttcagaagcagagaatgctgctggtttgagggtaaagaagatcaagaggacaccggaggacgagaaagagtcaatggttctggttgagaaactaaggaaagaaataagagaagccgttcgtaacaaatcgatggaggacatcagagaaaaccaattcgatccaaaacttttggctgcctttagagctgctgtggcaggacctaaaactggtgaagcacctagaagaagttctgctctggctgtgaaggcaaagaagttgatgctgcagaaaggaaaagtcagagagaatctgacgaagaaaatttatgcagatttaaatgggaagcgaaaaagtgcatggcaccgggactgtgaagttgagttttggaagcatcggtgcatacaag

SEQ ID NO: 141680 - DNA, 1470 bp, Arabidopsis thaliana landsberg
atggtagctgaagattcagaggaatgcgaggacggtggaaaggggcttgtacgagagatggttccttatgaagtcgattctattatattgcgtcttctaagacaatgggtcgaagaaaagctcaaggcagttcaagagtgtttatttagagcaaaggaaactgaagtaagttttagagattttacttgtgatccaagaaacattacttcatctaatggtgtttgctttctatctttgtagacgtggaacccgaaatccaaatcagaaccttatgcacaatccgcaggagagttgatgaagctagcgaaggacacaatcgatgagttcttcgaaatccccatcgggattactgaagatcttgttcatgatatcgctgaaggattggaacaactttttcaagaatacaccacatttgttgcatcttgcggtaagcaaaacatccaaatctgtataccgcaagaattgaatttgttatctctaattcttgtcttgttcaggagcaagacaaagttacatccctacattacctcctcttacaagatgcaacagagattccagattcgttaagctatggaagagagctacaccgtgtactacttccaacgaagaccttaaatacaccacatctgtcatatccgacggccaccatccacggccatccacaagccgcgggacacaacgtctatacattcgtctcaacacattacatttcctaagctcacatatccactccttaaacaaaacactctctttaaacccgaggatacttccggcaactcgaaaacgttaccgccatagaaacaacaattcatcttcttatttcgatttcacatacgctggaatcgaatccgcttgccaacacgtttcagaggtcgcggcttaccgtttgattttcctcgattcaaactctgttttgtacgagagcctctacgtagagaagttgcgaacgcgaggatcagaccagcgttacgaatcatgaaacagaacttaacattgatgtcagcgattcttgcggatagagctcaatcattagcaatgagggaggttatgaaatcatcattcgaagcgttcttgatggtccttctcgccggtggatactcccgagtgttctatagatcggatcacagtattatcgaagaagatttcgagaacttgaaaagggtcttttgtacttgtggtgaagggttgatacctgaagaagtggtggacagagaggcagagacagtggaaggagtgattcagcttatgagtcaaccaacagaacaacttatggaagattttagtattgtaacgtgtgagacaagtggaatggggatggttggttctggacagaagctacctatgcctccaactacaggacggtggaaccggtctgatccaaacacgatcttgagggtactttgtcatagaaacgaccgtgttgctaatcagtttttaaagaaatcgtttcaattgcctaaacgaaggtga

SEQ ID NO: 141681 - DNA, 777 bp, Arabidopsis thaliana landsberg
aaaacacatctttacacttgaaataagcttttgcctttcttggtaataaaaatatccttttcgtttcttcttctccacacttctagaagttctagatttttcctagctaacgtaccagaaaaaaggaagccaagcctagaaacactataaagataagacacaaaggaagtctgagaattgtgagtaaaaatgtgtttggaagttgtgtatcatgaagagaagacggagcttggtcggcaacaagcaccagggatgtgcccttattgcggcggaaaagtatcggcggtggatatagagacgaagtggttgttctgtttcttaccactttgtttcaaggtcaaacgcaaatactcatgttcatcgtgcgagcgtcatctcgtcttgtattattgaagaaactcgtagagagatgcgaaattgaagtaaagagaaaaaccaaaacagaaagaatgaagaaaagaaacagaggagaaactgaaaaaaattgttttatctatttcatttatttggttgcttctcctctcaatgttgaggtttttgcagatttcctcttgtgacttctgattttgctagaaacgccctctcgtgttggtgagtggtgacattggtcaattttcattgagttctttatttctcgtctgagttttgtgcaatgtatataatttgttggatttgtttaataaagattgttattcttaagtgaattactttgctattctattttcatataatttattggtaattcctagtcaattcttaaataaatctctttttatt

SEQ ID NO: 141682 - DNA, 1022 bp, Arabidopsis thaliana landsberg
cgccgggttaatcgattcgggttccatcggtgttgcccccaatggtaatttagtaaattacaaaactttgagagctatgcttgaagagaacggttctatcttcaatactagctctgatactgaggttgtgcttcatttgattgctatttctaaagctagacctttttttatgaggattattgatgcttgtgagaaacttcaaggtgcttattcaatggtgtttgttactgaggataagcttgttgctgttcgtgatccttatgggtttagacccttagttatgggtaggagaagtaatggagctgttgttttcgcttcggagacttgtgctcttgatttgattgaagctacttatgagagagaggtttatcctggtgaggttttggttgtggataaggatggtgtcaagtctcggtgtcggatgcccaagtttgagcctaagcaatgtattttcgaacatatctacttctcgttgcctaactcgattgtgtttggtcggtccgtgtatgaatctaggcatgtgtttggtgagattttggcaactgagtcgcctgttgagtgcgatgttgtcatcgctgtgcctgactctggtgttgtggctgctctcgggtacgctgcgaaatccggtgtgccgtttcaacaggggttgattaggtctcattatgtagggaggacgttcattgagccgtcacagaagattagagactttggtgtgaagcttaagttgtctcctgttcgtggtgttttagaagggaagagagttgttgtggtggatgattcgattgttagaggcacaacttcgtctaagattgtgcgtttattgagagaagctggtgcgaaagaggttcatatgaggattgctagtcctcctatagtagcttcttgttactatggtgttgatacgcctagctcagaggagttgatatccaacagattgagtgttgaggagattaacgagttcatcgggagtgactatcttgcgtttctgtcgtttgataccttaaagaaacacttgggaaaga

SEQ ID NO: 141683 - DNA, 1391 bp, Arabidopsis thaliana landsberg
atgatcggaatctgtatctccggccggttaacgggaacccagattgaaaaaacagcggatactgagggaattgaagaagagagacaaagaaaagctgcgatgaatccaatcccaagaacactggtgaagtacaacacaagcatcaatctccttgaagattggtgatgatgatgatgatgatcaggtttattcgccatttgtgtttatgcagagctattgaaagagacatctcattcatatagaccgcaacgagaaacagtgatgatttgatttcacgtcgctgaagaatctctcattaccgaaaaaatatgtgcgccggtggtttttccccaaccagaaatcacgccggtggtttccaattttgtattattattattttttttggtaatttcccctaatttgaaccttcttaacgagacaaaaggtttgtttgtaattatatgggcttgattaaaaactaagcccaattaaaaataaaaaagcccatgaaaaatagaatcatatagtcactcacgtgttgactctcgagtcatgtcggcgatttctttcactctccagtaaacttcaccaagtctcttctgctgaaatcacggtaatgcaattctcatgaaccttgattttgtttctgttcttcgcaatttctattgttgaatctttctgctagatctgaatgattcttcaaatcgaagtactcttagtttttttttgttaaatcaagctggaatctgaaatttcttgcagatccaatgaagaagatccaagttatatagtgagacctcaaaccttagcttgagctctgcttcttctctctttcactgcattgaagatgggatctgtatctttaaagatcggcgatggaacagccagattccgacgaacatcaatttgttcatccgccgtgaacctcctcatgctcttctccgtcgtcaccacaaatctcttcgccttatacgcgttctcctctcattcccaagcaaactcgccacttctccacagctccaacaatatctcactcgtttctcaacatctctctttgattctccgagaaatcgattcgtctcaacgcaagcttgctcagatggagaaacagatgcttggttacgaatctattgatatctctcgacctaacattgttcctgagctcaaattgttcctccagcgtcatcagcttcctttagggaaagattcgcgtaccggaatcactgaaatggtgtcttccgttggacattcttgtgagaaatctacggatctgctttctcagtatatgtcatataagctgtttgatagatgtcctgatgattggagtcttggccagaagttgattcttcgtgcttgtgagccgttgccgcggagacggtgtttggcgaaaacgctgcagaagcaagatttga

SEQ ID NO: 141684 - DNA, 3593 bp, Arabidopsis thaliana landsberg
  unsure (1)..(3593): unsure at all n locations
atggattcattggaacgggagtataccaaccttaactatggagttcgagcaatgggtattaatcttcctgggtttgcttatcatagagctttgaaggtaaaacattcaacaacctcttgtttccacttgtgcatatctcttgggatttgaagagtagtattttccacttatacaggcaaggaaaaaacttgtagctgcctttcagtccatagtgactaaccgaagaaatcaaaggaagcagaatatttcatccaatagaaaagatatgctggataatctaatagatgttaaagatgaaaacggaagagtcttagatgatgaggaaattattgaccttttgttgatgtatcttaatgcgggtcatgaatcttctggacacctcactatgtgggctaccattttgatgcaagaacaccctatgattctgcaaaaggctaaggtaaattagaagatatgtttcacaatttcagtttatactcttgagttgtgatattcgttgtaccataggaagaacaagagaggatcgtaaaaaagagagcaccgggacagaagttgacgcttaaagagacacgtgaaatggtgtatctttctcaggtcaagtttctgcctcattgcaacgtaatttttggtgtttataacattgtatgagttgttacagtcttttactgatggaaagagctttttatcaggttattgatgagacccttcgagtaattacattctctctgacggccttcagggaagcaaagagtgatgtccaaatggatggtcagtaatcagtatactcattacctacatggaacatggtaaatcatcttaattttttattatactcatttctcatgtcttttctttcaggctatataattccaaaaggctggaaggttctgacttggtttaggaacgtccatttggaccctgaaatctacccggatccaaagaaatttgatccttcaagatgggaggtacgtagagataagcattctacaatgaaatgtctttgtaactgtatttggtgatgccgtctcttatatgtcaaaagtatctgaacattgtctggttccttctacagggatacacaccaaaagcaggcacattccttccttttggtttgggaagccacctatgcccgggaaacgatcttgccaagctcgagatttccatttttcttcatcatttcctcctcaaataccggtaacttcctctctctctgtatatagctcagctttcaagttatcactctgcatgcagaatcgtaatgttttgtttccaatggcataatcacagggtggaaaggagcaatcccggatgtccggtgatgttcttgcctcacaatcgacccaaagataattgcctagcaagaatcaccagaacgatgccataatcatcatcttcaaactagtagaccccttagcaaatatataagcttcgtctcaggtttccattgtcttcatcttctcttannnnnnnnnnnnnnnnnnttcggtttgtgaatttggtttactaggatgtatcaatagtttgaaggatttgtcaaagtaatgttgaaatttttctctggtttagcttcaaatttggttataaaaaagtaaaatcgaatttcttgaaataaaacctagcttgattaccacatcaaggttagtgtgaattgattaaactaacatcaaggtttgttctttatttcgcatttattagccaataatgcgtcattttatctcttctctatcacattttctaattacaagtggagaattgacttcttcaataaatattcaatttattggtattgactattgaactatttatatagttgtacttacttttctcgaattttaaaaaaaaattagaaagacaaatatttcgtaagaattaatcaaaataataaaagatagagttaagcccacaacagcagagtacaacaacaccgttatctcctgtccactatctctgagttttttttaagacacagagagacaacaaatagacagctcggactcttgtaccactttgatttcttcttcatttcttaaatttagcaactttttttcacaatacaaaccagaggattaagtagcttctctcaacaaagcttcgaaattgatccgtaattagtgttcaatttcgtgttttttcctacattggattctcacttttagattttgtggggagggaaagataaaaggttggatttttatttttccggtgaggaaaaaatgacgacgagaggaagcagatcggagaaagtcaagagaattttccagcaattcgacgggaatctcgacggaggattaagccgtgaagagatgtcagctctcgtcgtagctgtgaaccctagggttaaattcagcgacgaacagataagcgcaattctcgatgaagtgtttcgaacctacgctgaattcatcgacggagataaaggtttgacctttgacggtcttctccgaacttacgacgacggtgctggagatgttgatcgtgatttcgacgctttagggattgagtttaacgaagagacaaagggtggctctgaagcttcgtcatcttcgattactgatgagagagctgttgaagcgcagaagcagcagagaacggcagcttgggcggtttcgccgaaccatggtattgttttcgatgagacgtggaagcttgttgatgatttggagattttggttaagagattgaagtctaagcaggagaaagatgggaaattgaaagtggataataataatgttgatgcgttttctgaagctggatggtctagagagttaggaccgtcttcggatatttcggataagagaatctattgggaagaatcgagtcatgattatggagtgtttgtgaaggaattaggtgtgttgagaagtaaagcagatggtgctagatcaagagaagaagcttttgatggacatatggcgattggtaaggttttgtatgagcaccagttgtttaaagaagctcttgttagttttaagagagcttgtgagttgcaaccgactgatgtgagacctcatttcaaagctgggaattgtctttatgtattggggaagtataaagagtcgaaagacgagttcttgttggcgttggaagctgcggagtctggtgggaatcaatgggcttacttgcttcctcagatttatgtcaatcttggtatctctcttgaaggtgaaggtatggttttgagtgcttgtgagtattatagagaggctgcgattctttgtccaacgcattacagagccttgaagcttctaggtagtgctctgtttggtgtaggagagtatagagctgctgtgaaggctttagaggaagctatatatttgaaaccggattatgctgatgcgcattgtgatttggcttcgtcgcttcatgcaatgggggaggatgagagggctattgaggttttccagagagctatagatttgaaacctggtcatgttgatgctctttataacctcggtgggctttacatggatttgggtaggtttcaaagagcttcagagatgtacactagagttttagcggtgtggcctaaccattggcgtgcacaactcaacaaggctgtgtccttgttgggtgctggagagaccgagggatga

SEQ ID NO: 141685 - DNA, 914 bp, Arabidopsis thaliana landsberg
caggaagggaagaaccactttaaacccttgtctacgctggtccgagtccagagtcctctactttgacagtctccctccatgtcgtcgttgtgtgcatctaattgctatccttcatcttcttctatcaatctcttctccaacaacagcaacccaactaaaccctttcttctctccctcagattcgcctcctccaattctcttccatttgttgctcctctcaaattctctaccaccaatcacgtccttagtaactctcgtttctcttcgaaccgaatccaaagacgcctttttttgctccgatgcgtttcagaagaatctcagccgtctctttctatcggtaacggcggctctggtaaatacccttttgctcattattgaattaacaaacttggttgaatgttattgtaaagatatcgaatttgaacgccattgattatgtagtaatatcgatttcgatttctgcagaagagagagtgaatgttcttgtaattggtggaggagggagagaacacgccctttgccacgccttgaagcggtctccttcttgtgattctgtgttatgcgcacctggaaacgccggtatatccagttccggagatgccacttgtgtacctgaccttgacatatcagacagtttagctgtcatctctttctgtcagaaatggaatgttggtttagtggttgttggccctgaagtgcctcttgttgctggtctcgctaatgaccttgttaaggccggtatcctcacctttggcccttcttctcaagctgctgctttggagggttccaagaactttatgaagaatctttgccacaagtacaatatccctactgctaaggtttgcgtcgctttctctttttcatttatccctgatggttaccaatttcttcccttgctgtgttaggatccataa

SEQ ID NO: 141686 - DNA, 524 bp, Arabidopsis thaliana landsberg; identical to SEQ ID NO: 39856

SEQ ID NO: 141687 - DNA, 2049 bp, Arabidopsis thaliana landsberg
  unsure (1)..(2049): unsure at all n locations
atgaatcccgaagaatcaagaaggagagcctctgctcgagcagtggcaagagggtttgagatgattaatgagaagaatcagtcaaagaatcagaaagctgcgagtcctggttttactcggatgacaggccgagtacaatggccgagtatggccccggagtcctctgagggtcgttctgcggctgctcaagaggaaatagcaagaggcaagagggtctgggagtccgagccagttgcagaagaagaagtgcctgagatagagaaggaagcatctgaggaagatgtgcaagttgatgaagaggtcccgatagttcctacaagtagaagaaggaacaccatgaggagaaagaaagaacctaccatagaagagcactaccaatatctcatggagctgagttttgaggggacaagatatccccatagacctaccatgcaagctttggggatatgtagagatgttgactacctcatggagatggccaagctggagaccttcttctcctaccagtatgaaggatacaaaactgagagctgccaattcctagccactttgaagctccatttctatgctgaagaaagggagagagagctgcataagggagttggttacatcactttcatggtgtttggaattcaatactcggttcccattaggcagttggatgctattttcaagttccccaccaagtatggaatccgccaaaacttcagcaaggacgagctccttgatctatggttgacaatcgccggtccactcccctacaagtcatctagggccaagagttcgttgataaggagcccggtgcttaggtatctccacctttgcattgcaagtgccttcttcccgaagaagacaaccggccatgttaatgagggagagctgaagttgcttgatctcaccttatgcttcattttggggcacacgaggaatgggatagagatggaaggggatagggctgatacatccctttcggtggtgttgattgatcacttgattggttttagggagtatgcagccggaatccaccaatccggctatggaggaagcttatgtgctggaggagtgatcacgcccatcctaatagccgctggagttcctcttcatacccccactcacacagcaacctacatcgatatggagtatttgaagaggaagtgctacttggataggtctgctccagcggatcaactctatttcaagttcaagcactccacgctaggtctctctaggctagcactcccttgcaagaagttcaccaccattaggattgggaacaacattgactttgatcctcctcaatcgatcttagtcaatgtccttgcgcctctacaagcagagccgagcataggaagtgagtctcaagaagaaggagcagagtggaatgaagaagaagctgagcaggaagcttatactcgcccgagtaactttcagcaggccgagtatggccatgacgagtttgagccagctgagttcagtcaagctgaacagtttgatgaacaagaagattcgtgcgaagctgcagcggagcagtttttctttgaggattatgctgagtccgatccagagagagatcccggtcaagttcacaagaagttgggaatgctcaaaggtctgggcaagtttcagaggaagttgttcagtgggttgaagaagaaggtgagaaagatgaagagagcaatggatggcatggcggtnnnnnnnnnnnnnnnnnnnnnnnnnnnnnnntcaccaccacctcgacccgagttcaggagaagtaactcaacaagtgtggcgccgcgaagggacgctcgtttcgacccgccaagagcctcaaactacgagctcgggaggagctccaccttttcagatcgccgtttcaacagccgcccacccggtccagtgaaccagttggttctgaacgctgacccaagccgagaggagtactactcgggatacatgctcgaccggtcaaccgagtacaacgccaataaccccaacacctccacacgtgatcctgagtacacacaagaccgcctggacgagtttgtccagaacctcttcgtctaa

SEQ ID NO: 141688 - DNA, 1121 bp, Arabidopsis thaliana landsberg
atgcaaggaaattcaaaccaagataatcaagaaaacaggtatagcgtttcttctacgtcagatatcaaatccgtgatcgagtgaacaatgtcaatatgacaatattctacaaagaagaaattttgtttcattcatatttcttggtaatgtatcgattgatcattttgtttcttcctgtttttgtttctatattgtttaacactacaccaatgcttctgctgctttggatgacgagatagtttttttttttactcgacacatcatacaagaccttcgtaagtatctgtaatacacgaatcattaatacataacacgaataatgcattactatagttttgagaatctcattctcatacttctgtctctcttgttgtcgaagaatatcacacttaacatataaaaagaacaacatgtcagtacacaaaggtaaagcccaccaaagagagaaaagaaaacaagacttaactataacaataaatttaatgtcgctctcaaaactcatttttttcatatgaattttctaacacaaacaattttccttggaaatctccgccttgtatctcttatataactcatctctctatactccgaacatgtccctctccgttaaccttaacggccatgtcagccgccgcagctgaaaccgacgtctctctccgtcgcagatctaactctcttaacggaaaccacactaacggcgtcgccattgacggaaccctagacaacaacaaccgtcgcgtcggagatacaaacactcacatggatatatctgctaagaaaactgacaacggctacgccaatggtgtcggaggaggaggatgcagaagcaaagcgtcgttcaccacgtggacggcgcgtgatatcgtctacgtggtgagataccattggataccgtgcatgttcgctgccggacttctgttcttcatgggcgtggagtacacgcttcagatgattcccgcgagatctgagccgttcgatcttgggtttgtggtcacgcgctctttgaatcgcgtattagcatcttcaccggatcttaacactgttttagccgcactaaacacggtatgtcgtgtgagttaatttaggtaaaatatatatttaatgattatcttcaaattctt

SEQ ID NO: 141689 - DNA, 457 bp, Arabidopsis thaliana landsberg
agagctcttatctataaaacattctaaagaaaaatgaagatgataatccaaattttcttcatcatctccctcatttcaaccatctcttttgcctctgttcaagacttttgtgtagctgatccaaagggtcctcaaagcccatcaggatactcttgcaagaaccctgaccaagtcaccgaaaatgactttgcatttaccggcctcggcaaagctggaaacacttccaacatcattaaagccgcagtgactccagcctttgctcctgcttacgcaggcatcaatggccttggcgtatctctggctcgtcttgacttagccggtggtggtgtcatccctttccacactcatcctggtgcttctgaggtccttgtagttatatcaaggcaccatttgcgccgggtatatctcctctgctaacaaagtttacttaaagacactaaacagaggtgattctatg

SEQ ID NO: 141690 - DNA, 1394 bp, Arabidopsis thaliana landsberg
atgaaagccgtgaaacaatctggtcagagacaaggacttcctacagccccaaagtaaatctctagatattgttgtcttttcaaaccaaacaacatgtcagataatttcttgtttttctttttaatattcggcttacctccagcagatcttcttggcaagatagtctcttgaaatatattttcaattgtccccatcgttcttgtgtatgggaaaagatagatgaggaaacttagtgtcttattcagctgatatataatcattactacatacataagttcatctactcgttagtttctgttgctcatgaagtggtactttgatgtgacagaaagcatgcatctcgaagcaattcaaagcttgaaaaagagcttaaagccatgactgataaggttgccacagtcatagaattcatgctaaggtgaactctattttgtcagtctttttatctccaaggagacaacttgtttttgaacttgacattgcttgtatatggcttttgatttgctgccgtcatttaaaacgttgccatgttagattatgtacacgtcttgagaattaatcacagccttttgtatggaacagggaatatatgaagccagttgagagtgttcctttccacgaaattttgtgtttcaagaatgtcgataaacttcaatctgtaagtcgtcagcatccttcttcctctcggattcacttatatttacattacttggaagatttataatatataattaattgttaattgttgctcccgtggtatcattctcatcaactatcttaaagcaaaccggttacaagatcagttctgagagagtctgagcattttctttttttaactaattcatagaatgattgatgtggtgcttaaaattttacatatggccttctctctcttcctcctcttaatttgatatttatatctgttttaggctttacttggagacccgagaggcaggatccaattagatctactggaatctcacgatatcctccactgtgtgtgctgcagccagagaggcacaactctactgccttccatgcatgatacatcgattttgtgagcattcatttacttttatacacttgcattctcatgttgtctttgttgaaacaattcttccggtattactttttcttgtcgagtatatgatttgagagataatcggcgaggcaaacgatcttcaaacacgcatatacacgatacacatgaacacatactgtcttctttctcctttgtttgtttcaatatgtgttgcactgaaaagctttgtgataattgataatataggtataaactggcgcaagagcacgctgatgtcattaacctccatgactggtatcaatctttcaagacgatacttattccccggagtagcaaggctaaacaaaaatct

SEQ ID NO: 141691 - DNA, 2844 bp, Arabidopsis thaliana landsberg
caccgcccaaaaaaaaaaaaaaaaaaaaaaaaatcctttttttctcttcttgagagagagaaagagagagggagacaagtttgttctggataaaaagacaattcatttctattttaattgtctgcaaaattctcacgggccatcggagagaggagaacagaggtggtgctgcacaagaatccttcctcctatatcctacaagacttgtaagaaacaatttttgttttgcattttggttgaaacatttatcttctgttttttgggtacctgctcttccttaaatccttgttctatctgtaaaaattgctctcaaagttttcaaatttattcgttattcttactatttattgccccatctggatttttaaattttgaaaatttgactctttcttcatttggttgtttatgcgtgttggtttcacttatgaattgttcttctgtggccctttctacagattcaagaatgtttctaactttgaaccaatctctgttcattacgttccaattttgaaatgtcagatgaaaaaagagttgtgaacttttagaagattatattttgttatcgctagggtatagagaaagctgagattttacaaattgaaatgggtctttgagaatctttgtaacagagaatctgtttgttttgtctttggttggtggatatgtccagtggaatgggaagagaagttgttgaggtgcttatggaccgaaacgccgacgtttcaaacggtagagttcatgttgctcctaagatagctgcagaggagactgatgaggaatttgaagtcaaagaatgcacagaggagaagtctctttctgagaatgcaccaaatgttggatctgctgagagagttggagctcagaaatcacctaaaacccgtaatggaaatgctaaagtttcaaaggtaaaactaattcataagatcttggttttgagaataacgctttgtagatggtatatgattgaggcctaaatccgattttgacccgtttcttaatgttttttttagcagcagcatgctcctcttctcgcggtgaggaagccattgcaacccgagaacaagaagcatattgatgacgaagataattgctccattgcttcttcgtatccttttcccatctctatcattttatacttgatacttatgtatggatgtttatgtacacgatgcttaacagaatcgatattgtttccttaacgttatttaccacagcgttgcaacttccatgaggatgggtaagtctggattgacttatggaagtgctccaacgtttaggagtgctcaacgtgctgagaaacgcaaggaggtaagtacatattctatctttctgcttccacatctcagttatagatcacataagctctttaaagccaacaaaaactcataatcagaaacataatctgcattaaacgtgtagaattcactctgttctgtatactgattggaatttattttgtggggtctgcttggctcagtattaccaaaagctcgaggagaaaaaccaagcgcttgaagctgagaggaacgagcttgaacagaggcaaaaggtaaagtacacatttccggtagatgcagtttttttacctgattctagattggttgtgaaacctcatagatttaaatggtttgcaggatgaacaagaagcagccttgaagcaacttagaaagaatctcaagttcaaggctaaacccgtccccaacttctactacgaggcacctcctgcgaaacctgagctcaagaaggtatccttcgaaccaaaactttatctttgttcagagctcagcattgttctacttatgtgccaaagtaacttatgttatgtttctttctagcttcctttgacacgtcccaagtcgccaaaactgatcctttctcggagaaaaagcttcagcgacgcagtcagctcgtcttcccgtgaagagattctgaagacagtctctaaccgtaaccgacacagcactggaacagttcagaacaaagacgatgatcacaagaacaagaacaccaatgctgcgcacgacagccctcgtgtcagatcaggcaaaggtaaatccggattgaaaccagtgaacgagtcctcagaagaagcttgaaatttcaaaagatgatgctttgttggtctaacttgatcttgccggagaaaatgtaaaatcaaagactctttgtttttcggttatttccggtatacgtttggttcactatgtaactgtctttttcgattttaagttttaacatgaaaaactttatgttgattgttgaacaactcctcctaatgttgaaatttgtaaatctgaatgttgttggatttaaatttagcagctaaggttattttcagaaataatctctaatcgaattatttacggactgaaaccggcatcaaacatttaacctaaaccgaaatagtcctaacaaacttctgataaaatccagagagcaaaccagtggaaagcaaaaccggcatcaaacatttaacctaaaccggtaaatcaaatatagaagctttaaaaaaccaaacctaaaccggctaaaatcgatagacctaaccaaccactagcagtttcccggccgccgcttgaatgatgaccactgcggtgcgttccaccgccataaatcggaatcggacgtattcctcctcctctgctagaactccctcctccgcctctgctagaacttcctccaccgcctctgctagaactccctcctccgccgaaactgcgtcctcctccgccgaagccgcctccacctctgcctcctcctccgccgcctttcttaacaacgactgttaatttcggtaaattggcttcgattacgtcaccgtctggcttcaattctacttcttga

SEQ ID NO: 141692 - DNA, 3230 bp, Arabidopsis thaliana landsberg
gaaagagtaaaagcccattatatttatgggcttatagaaaagagcaatagcccatttaaccgacttactctatcgggtataaccaaaaacccgataacccggctcgttcatcggggaattttccgttttctaaaagtaaatctctttgaaataaaaaagcttctccgtttccctcttttgaaaaaatcagaaaccctaaaatcgccactctctcgtctctcttcgcggtccattctgcttcatctctcccggcgaaaccttaatcgaacagctcggattcgatcctagtctctgttgttttctaagaaagatggagtggaatcgggagactctagtgttcctttcgcaatgttttcttaacacgctctctccgataccggagcctcgtcgaacggctgagagagcactctcggatgctgctgatcaggctaactacggcctagcccgttctccgtttggtggctgagccagcaatcgatgaacagacgcgtcacgccgctgctgtcaactttaagaaccatctccgttcgcgatggcatcctgctggtgattctggtatctcaccgatcgtagattctgagaaggagcagatcaagacactcatcgtctctcttatgctctctgcttctcctcgtatccagagccagttgagtgaagccctaaccgtcattggtaagcacgatttccccaaagcttggcctgctttgcttcctgagcttatcgccaaccttcaaaacgctgctctcgctggcgattatgtgtccgtcaatggtattcttgggaccgctagttcgattttcaaaaagtttagttatgagtatagaaccgatgctctgtttgttgatttgaagtattgcctggataattttgctgctcctttgactgaaatattcctgaaaacgtcttcgttgattgattctgctgcgagctctggtggttcacctccgatcctgaagcctctcttcgagtcccaaaggctgtgctgtacaatattttactctttgaactttcaggacttaccggagtttttcgaggatcatatgaaggagtggatgggagagtttaagaagtatctatcttcaaattatcccgccttggaaagcacagaggaggggttaacacttgttgatgatcttcgcgctgctatttgcgagaatatcaatcattatattgagaaaaacgaagaagagtttcaaggctttttgaatgagtttgcatcagttgtctggacattgctccgggatgtgtcaaagtctcctagcagagatcaactagctactacagcaatcaagttcttgacctctgtgagcacaagtgttcaccatgctttgtttgcgggggacaatgttatcaaggaaatttgccaaagtattgtgattcctaatgtttctttgagggtggaagatgaagaaattttcgagatgaactatattgagtttatccgtagagatatggaaggaagtgatgtggacactagaaggagaatagcttgtgagctactcaaaggccttgccacaaactacaaaacacaagtgacagaagtagtttctcttgagatacagaggctcttgagttcattttcagcaaacccgtcggcaaactggaaagataaggattgtgcaatttacttggttgtctctctatctactaagaaggcagggggtgcatctgtgtctacagatctcattgatgttcaaaacttctttgcaaacattattctcccggagctgcaaatccgcgatgtcaacagctttccaatgctaaaggcagggtccttgaagttcttaactatgtttcgtagtcatataccaaagccctttgcaatgcagttgttcccagagttggtccgtttccttaaagcagagtcgaacgtggtccactcttatgctgctagctgcatagagaagctcttgctagtgaaggaggaaggcgcaaggggtaataggtatgctgctggtgatttaagtccgtttttgctgcagttgatgacaaacctgtttgatgcgctgaaattcccagaatcagaggagaatcaatatctgatgaagtgtataatgcgggtccttggtgttgctgatatcagtgctgaggttgctggaccttgcatcgggggattgacctctattctcagtgaagtttgcaaaaatcctaaaaatcctatatttaaccactatctctttgagtctgtggctgtacttgttcgacgggcatgtgaacgtgatatttctcttatatctgcatttgaaacgagtcttttcccaagcctccagatgattttggcgaatgatatcacagagttcttgccttatgggtttcagttgctggctcagcttgttgagttaaatagaccacctctctcaccaaactacatgcagatcttcttgctgctcctctcgcctgagtcatggaagagaagtggcaatgttccagctcttgtgcgcctgcttcaagcttttctgcagaaagcacctcatgaggttactcaagagaatcggttgagtcaagttctggggatatttgaaaagctggttgcatctcctagcacggatgagcaaggcttttatatccttaacacgattattgagaatctggactacagtgtgattgcaccttacatgaaaggtgtatggagtgctctattcacacgcgttcaaaacaaaaagacagtcaagttccagaagtcgctagtaatattcatgtcgcttttcttggtgaagcatggacaggcttatctagtggagactatgaatactgttcagccaaacatcatcactgctatcgtggagcatttctggattccgaacctgaaactgatcatggggagtatggaggtcaagttaacggcagttgctgcaactagactcatatgtgagactccggctctcctggatccatcagctgctaaactctgggggaagatgcttgatagcatagtgacgcttgtttccaggcctgagcaagaaagggtacttgatgaacctgaaatgccagaaatctcagagaatgttggatacacagctgcatttgtgaaactccacaatgctgggaaaaaagaagaggatcctctgaaagacatcaaggacccaaaacagttcttggacgcttctgttacgaggctttcttctgcttctcatggtaggtacccacagataattggtgagaatcttgaacaagcaaaccaaacagctttgatccagctctgcaatgcttacaactgtggaattgcttga

SEQ ID NO: 141693 - DNA, 840 bp, Arabidopsis thaliana landsberg
aacttcgaaagatttagcgatttttacaaacgccgcgtttcgcgtttattacacaaacgcgaaaaaagcgtcaggaaagattggccccttgcgcactcttgcttttttctggaaacgtctctgaacgaccaactatagatcgtggaaaattcagattccattgcgacgaaaagaaggcggcggattcaaagaacacccaaatacaaatcgaagacggagccttttcagcaatttcgttttattcaacctctggaacaccaatcatctcaaactgattgaatgagaagccctcccccgtctctgctctccctcaccgtcaacgccgccgtcttaaacatctctcgcatcaacgatctctcccatcttcctgatcacatcgtccttgacctcttcgcggtaaaaccccttatctcaatacttggtttgattctggctctgggttttcgaatttagtgtaaagtttgaatttttaggtcatcatcatttgattttgagtgaaagttttaagctttagagaggttagggtttcagaatcgaagtatactactactctatatgctttgtgaggaacagttgctcgtgttattgatatctcttatctgttcttaaatcactgtttgttgttgttgtttttgttttttggctccattacatatgtattgatattgctgttcctaattgattctattgctgtttttgtaatgtaaagaggacattggaagctgggaaattgaatgagagagttctgagactctttatggcatctggaaacgaagaagttctttctgttatcgacgccctcaaaatcaaaatcaacgtttccccgatccttcctactcg

SEQ ID NO: 141694 - DNA, 2523 bp, Arabidopsis thaliana landsberg
gccctttctcatcgtcgtcttcaactctcaccagcagctcaagaaccggtttttcgtcctccgtaacagtcatcgaatccaatccaaaaagataacactgggtaaaatctaatccactggattttccggttaaacgggaaaatccagtgatcgggaattcgaaaaagaagaatgcaatcgaaagaatcacaaaacaaattggtgtgtaggaaagaaagagagacaatttgtggaagttttctccttgatttgtgtctttgctttgtagtcttgtaccgatttttttattaccctaacttaagtatattaattgcgtctttctcactacacaacacattatattccaaatatcagttttaaaataagaaaatcataatttgaaatatacattatcttaaagcccagtgggccatttccagaaacttaaactctaactgggtcgggtcgggttttgttaggttgatgatgcgacagattctcgggtcccagattctctgaatctctccctctttcttccatttcccagaactctcagagtttcaccacttcttctgaagaatctgaaagatcacaaagtccaaagaaaaaaaatgagcgtgatcacaactccaatagagaccctgcacctaaagtcaacacttcgtcttctaccacgagctgtttatcgcagtcaacggattcaagttttcccgcccaacatcttctcgaacacttctctgagttctccacttcgcatcgacccaatctctcaaggtttgttcatcttactctcatcgatcctcaggcgtttatgcttgttgggtacctgcaaaatttacactttcttctctcatggttttcttcaacctactatatacacagttggcggatcgaggaatttgtggcgtagatatgcatctgataatttctcggagatgggtttggatcctggagctgatccattcaaggtgtgcgctatgggatctttccttttccattctatgttatgttgggtttgaatagtcttctcaaaatgtgtcatctttaatgtcaaaatgtgattttgcactattgaagacttgttaattatcctacttttgaatctgattagctaaaaatcatccctggatcacagttttgctactttgttcttcgtttgctgatgatttcagttgttaagaattttatgttacttccgagaaccaacatgaatctagtaagtggcttgcaggttattgagaagccttctatagtggatagaatgaagaaagcaaactcaattcttcctcatgtagtgttggcgagtacaatattagctcttatctatcctccttctttcacttggtttacgtcgaggctcttcccattggaacaaggtcaaattgatctaagactttgaattgtagacatgaggtttgctaaaaagctcttctttactctcctgttattttaggtactttgtgcccgctttaggttttttgatgtttgcggttggtatcaattcaaacgagaaagactttcttgaagctttcaaaagaccaaaagctatcctcctcggttatgttggacaatatctcgtaaagcctgtcctaggtttcatctttggcctagctgctgtttctcttttccaactcccaactccaattggtaaaagctccctgtctctcatcattcaagactcttaacctatctctcacattaaccaatctttctcaatctctcaggtgctggaatcatgttggtatcatgtgttagtggagctcagttgtcaaactatgcgacattcctaactgatccagcattggcacctcttagcatcgtcatgacatctctatcaaccgctactgcgtcctcgttacacctatgctttcactcttactcattggtaaaaagcttcccgttgatgtgtttggaatgatctctagcattctccaagtggtgattacacctattgccgcaggactacttctgaaccggtgggacatcatctcaatcgattagaattattgtaatgttatatgttagaaaaaaaactaaacaaatgtgagtgcaggttgtttccaaggttgtctaatgcaatcaaaccatttctcccggcgttaacagttatcgatatgagttgttgcataggagcaccccttgctttgaatatagattcaatcttgtctccgtttggtgcaaccattttgttcctcgtcatcacgtttcatctcttggcttttgttgctggttactttttcactggtttcttcttcagcaaggcacctgatgtaaaagctctgcaaagaacaatttcctatgaaacaggaatgcaaagtagtcttctcgctctggccctcgctacaaagttctttcaagatcctctcgttggagtgcctccagcaatctccgtgagttttcaatatagttttgttacatctattttcttctcttaaccatgttttgtttaaccggaaatttttgatattttgcagacggttgttatgtctctaatgggcgtctcgcttgttaccatatggaaaaacagaaaggagtagtgacatg

SEQ ID NO: 141695 - DNA, 2210 bp, Arabidopsis thaliana landsberg
agcatctcatctgctcgaatcagtttcatataatattatgatgatcactatatgcagctattggtccacctttgattcaaacatgtggagtgctgtgtacatacgcacatatggtaaagactacaaattaaaagctggctatgattctgatgtacgccttggctgggcatctctctgggtaaatcatcaacctttagttttcttttctctattctcttattagcgtaatctttttcactcgcttaagccccaatccgagtcatatagaacattcattcaccacacaattgtacctaatgatgtatctaccatctaataagatctaaaggacacactcttgagcaagcttttgtttattgagttgtgaccatgcatgagtctcttgttataaccgtggcaggttggtgatgaagctggaaaagtgaaaacgacaccaatgaagatgaaagtccagttcatgcttcaagttccacaagatgacatcaaatcatcagtcttgatgttccgagtcaagaaaagatgggacatttgatgaaatctttgaataaatcatctcttagtttcactttcttttatctctctgtaaaacccataaaagttgtttgtttctccttatatatcaaatcttttgcaaagaaaatacaaaagcttagagtgaataattgcaattgtatttctgtagcttttttttaaatgatctttttcacacgtgtgagactagtataaatgttgctaattttcgtttccagtataaaaagttacattgcttttaccttcactttttaacccaaatcaattttaaccactaatattaaaattatgctaaaatggaatattcttctcacaacgaaaaattaataaaaaagtattgttggcttatttcctccgttattgtttttgtatgcatttggtctgtgtgttgtgttgtgttgtgttgtttatcttcttcttcttcaacccgaccaaatacacatccgacgggaaaaaagagttccgacaagaatcgagaactgaaagatttttcatttgtctctcaaatatctgtggagagaagagaaattggaataaagaagacagtgttgtgagagagagagagagagagagatgagttcgtctctacctctgaggctacttcttcctcttacaacttctctgatttctcctcctcctcctcctccagattctttccatgctccttcgtcgttcagatcgaaaaaccctaatttcaaacgccgattgtcttcttcttcctgttgttcttcccagtcgcagcttttctctgggagatgcagatcctattcgcggtgtgttaccatggtatcgtttgattctctctctctcattgtttgataattcccattgagtttttgtgctaaattgcttgatcagcattagtttgatcaatttcggaaagtgattgaattcgtaggactgtgtttagaatgatccatgttttgtttcatcaaagtttgtattttcttcccatttatagatttcgacctgaaattttatcctaggtgttatttactctgtatcgctttcgtcttcaatgtagtagttaggtgggattccagtgttttaatggcctttgctgacttattcaagaatcaagatttcactctatttaaacttcattgtatatcaaagcttttgatggttgtatgtgtgtctttgagtccttagtgtttataagactacattgtatcttatcatgtacgtaatgtctcaaagttgtagattttgttttagggggtggtttctgtctcaaagttggttctctggttcactttaattgggttttcttggtcttaaaagcatgttgctgcactccttgaaacatcagctttgatttgtaaaagtaaaagatatttagtttctcaagtttcatcatgatagtgtaagcttgagagtttgtgtttgtgtctctcttcccaaaagtcttttgcagttgttttttttccggcttttctctgatgatgtacgtttaatggctgtttcttatatgctgtgtatagtgcttaccagaacacatgagaaatcaagagaacacagaaatcttgacagataaagatgaccacattgaatgtgtgcttgaatcggatgaagattctggcctcaggattccgactcaagcacaggctatcgttgaaggatctggttcagttgcagtgtcagagctaaaacccgctgctgatgtagattacatacaa

SEQ ID NO: 141696 - DNA, 998 bp, Arabidopsis thaliana landsberg
attccaaattctctctctctctctctctctttctctggctcgggaagaagatgtcacgtagttgctcacagtgtggaaacaacggccacaactctcgcacatgtccgacggacataactaccaccggtgacaacaacgacaaaggcggcggggagaaagccatcatgctttttggcgtccgcgtcacggaagcttcatcatcttgttttagaaaaagtgttagtatgaacaatctctctcaattcgatcaaactcctgatcccaacccaaccgatgacggtggttacgcttcagacgacgtcggtcacgcctccggtagaaaccgtgaacgcaaacgaggttaataaaataacctttcttctctctttcccaaatctcatctctgtttatgtttcttgtttttgaaactctcttgcaaatttggaatttatgaactccatggacagaggaagaacatagattgtttcttactggattgcataaagttggaaaaggtgattggagaggaatctctagaaactttgttaaaactcgaacacctactcaggtagcgagtcatgctcagaaatattttctccggcggactaatcagaatcgtcgtcgtcgtagatcaagcctcttcgatatcactcccgattcggtaacgtttcattctttaaaatctataattaaaatcaagaatctgtaagattatactaacacataaggttcgatatgtcaacagtttataggatcatcaaaagaagagaatcagttacagactccattggagctaatccgtccagttccgattcctattccgattccaccgtcgcggaagatggctgatttgaatcttaacaagaaaaaaactccagcgacaacggagatgtttccgctgtcgctgaatttgcagaggccgtcttcgtcgacatcgtcatcgtccaatgaacagaaggcacgtggctcacgtgcctcctcggggttcgaggcgatgtcgagtaatggagatagtataa

SEQ ID NO: 141697 - DNA, 2158 bp, Arabidopsis thaliana landsberg
cgatcaaacttccgttttatccagccgatgaaggcatgtatggtctgatacatggtccctctccttccatagggacagaccggatgctccttgtattaacagaatcctagatcgctacagggctcccaagatgatgagttttcgtatctgttcttgttgcagggcagcctgtatcagcagacccgacacgcatgctgacatcgacagttggatcaacttcgccatgtcccgaaacgtggagaatctgtccctgtatctcgatgaggataaatatgatatccctgaattcctttacatcaattcctctctcaagcaactctaccttgatttcggctgcaaaaaggattttatatctctgaatcccaaatgttctgtgtcttggacatccctgaagaacctgtcattgtatcattgcaacatctctgatgaatccattgctaatattctatctggttgtcccattctcgaaagcttattgttgtttttctgcaagaaactgaaggtccttgatctcagcaaatcaccgcgtctgataacattagaaatcactcgtagatgtcgaatggagccaacacagctcgttgcaccacatatccgttgtctcagattgataaactctgagaaaccatgtgctttagttgatgtctcctctttatcccaagctgaactagacattaccgcttacgcaatagttgataataaactggaggctgattttcatcagaccatggtggtaaagatgttagaaaagtgtcagaatgtggagaagcttactttgggggcaaactttcttaaggtatatgttttcactcctgatttagtttacataattaggctctgattttcaagaaaactagtgtgttttttggtatacactcatttgtcttctgttttttttgtttgttatagatgttatctcttgccgagctccgtggtgtttcttttccaaagttgaaggctaaagctctgatacttgagacaatgatctctcgatatgttattcatggtatagtaaaggtgctacaaaactcgcctgacttgaagaagctaaccatacacccaatggggtctgccggctcatatcccataccggtaattatgaatattccttgaccccgaattttgaatcatcatattgaaatatacttgcattacaggaagagcatattgacatatacttggattctcatggcttgaattgggatccatcctggagctcggagtttaagaacacttcccgcaggaatgtagagtcaaagcaagtggcttcgtttctgcaacttgtgcttaaaaccatatcaacattagagttgattgtcgcaaggttggaaagttatcttgatggaagaggtttcgaagaattgcttgagatggttccaatgctttctcaaaacaacaatgtctccattgtgctcagctcaagaaaaaaacgatcctgctttagtcttcaagatcatagattgggaaattatcaaatcaaatttagttcaatcatattttctataagtttagaataattctatatattattaataatttactttttctacgcattataatttgaaataattttgaaagatgcatatttccgaattttgaacaaataagctaatttgaaaatataatatttttctacttaataatttttaatgtctgagttttctatatttgttttgttaaaatattttgaccaaacaaaattgtctgaaaaggtatagaaattaatatcaaaaataaatgaaatatacttttttaggatatacaaattaatgttttgaaaaatagaaagaaaagaactcaattatagcagacaaacaaaaaaactttattacaaaaaataaagaaatgacatgtggttcttttggaaccggtttataaaataaccggtaaaccgaagcgaagaaccaatagaatgcgccatatcacatccaacaaaacgggaacctgattttggtcgcataccttaaacataggagatcgagattgatggatcctttctcaatccatccaaaatcttcagacccaatgctcttcttcatctaatttcctgtctgacggacacatctcgaagaatcagagaccagtttcttcagtagagactcgacgagaagttgcacctgaaaattcatattcagattacgggtttattgattcgtag

SEQ ID NO: 141698 - DNA, 1055 bp, Arabidopsis thaliana landsberg
ttcaaaagctggcatcaagtctcaagctggagaatcttgacctcagagggtgcagaaacctgagggatgaaaccttgaaagctgtatctcatctgccaaaactgaaggttttacttcttgatggcgctgatattagcgacacagggctttcgtacctaaaagagggagttttggactccctagtttctttatctgtcagagggtgcagaaatttaaccgataagttcatgtctaccttatttgacggatcctcaaaactggcgttgcgggaactcgacttgtctaatcttcctaatctaacggatgctgccatttttgctctagcaaaatctggagccccaatcacaaaactgcaactaagagaatgtagactcataggtgatgcctcagtcatggctcttgcatccacccgggtttacgaagacgaatgtcctggaagtagcctgtgcttgttggatctttacgactgtggtggcatcacgcaactctcattcaaatggctaaagaaaccgtttttcccgaggcttaaatggttagggatcacaggaagtgtaaacagagatatcgtatatgctttggcaaggagacgaccacatttgcaggtctcttgccgtggagaagagcttggaaatgatggggaagacgactgggactctgcagacatacaccaacacatagaagcacaagaagatgagcttgaacagtggattcttggagacgaaggtgatgttgaaatggaggatgcagaagacgagagtgaagaagacgcaagtgaagaagactgataattctgaagctatttgggtaaataccaattctcttcatctttacttgaggttttaattcttttgatgttctttttttctttcttagttcttatggttattgttgttattagtgttgtgttgttgttgttggtgatgttgttgttctaatcatctcttgtttctttaactctggtcttgattatttgaataaaggatatctagagattgtgttgtgtgtgtttttgtaataattagagtttgataaaagaaaataaaatatttaaggtg

SEQ ID NO: 141699 - DNA, 1828 bp, Arabidopsis thaliana landsberg
cacctccattaattctgctgctgcaaattctatcgaactggtgagttttgttaatctctttcctcgttcgtccttgtctgtatatcagatcgatctctattaccgttttagcttgttcttgatctttgtcaacataaaaacaatcaaacaaagtttcttctatgagttctggtctgaacgaagatttcctcgattgtatcgtgcgtttagaggagacacatgttcaacaaggcttcgatgagggttacgaagaaggtcttgtgtctggtcgtgaagacgctcgtcatctgggtttgaaactcgggttcgagacaggcgagctgattggattctacagaggttgctctgctctttggaattcagctctccgtattgatcctacacgcttctctcctcagctccataagcatctcaatgatttccatgtcttgctcgataaattcccgcttttggatcccgaggacgaagctaaagacgggatcaaggatgatctcagagtcaaattcagcatcatttgtgcatctctcggcttttccaagaaacaatttgagtataaaggatacccgaatccttcctccaatctcgacttttaagacctccctccatcaaaacactcttgtattgtatgtatggctttcaaagtttctctcgtttcctcaaagtttgtatttttaagagaagtgtgtgtgtagacaatctatgttttattggcttgtccttttttctggacatgtgaatgctgaccacaagtctaaatctggtggataacttcttttttagccttataatgaacaaacaaactcacatctgtagatatatatttgtataggtggtcggaggagatgttgagagaaatgcttggttgttgcaaggtttacatatctgaagcgcggaataagacggccctcgaagccattgagagagctttaaagccttttccaccagctgcaattgtcaacaagtttgaagatgcggcttatggcagggttggttacactgttgtatcctcgcttgctaacgggtcgtcttcttccttgaagaatgcggtgtttgctatggttaagactgctctcgacactatcaatcttgagttgcactgtggatcccatccccgccttggagtggttgaccacatatgctttcaccccttatctcaaacctctatagaacaagtttcttccgttgccaattcccttgcaatggatatcggctccattcttcgaggtcagtacctaatagaagacctcagtcataaacatgtgaattcctgaattttaaaagatacttatcaagctaagagcagaacattgttgctatgctgctgttgatgtgtactttgtgataagccattgaacatggaagtctatgagcaatgctctgctcttataaaaatgactagccatagaacatgaagtttgtagcaatgctctgctctctgctgttatcaagataagaacagagcattgtttgtctgctgtactttgtcataggcagagtgatgttctgtttttactatctcattatctctaggccatagaatatggaagtctttgtagcaatgatctgctctctgctcttatcaagataagaacagagtattgtttgtatggtgtagttgttgtgtacgttgtaacaggcaaagtgatgccctgtgtttaaaatctcatcttcgtctaggccatagaacttggaagtctttgtaccaatctctatattgatatgtggactggactgagatatatgacccaccctggtgcagttcctacatatctctatggagcagcagaaaaggagcagtgcacctggattcgatcagaagaaagctggg

SEQ ID NO: 141700 - DNA, 507 bp, Arabidopsis thaliana landsberg
ctttctccgcactcctaatcagagagatcctaccggttatcaaattcgaagagttaacgaattccggcgaagatctaccggaaaactgcgccgtttgtctatacgaattcgaaggagaacaagagatccggtggctgagaaattgcagacatatatttcaccggagctgtcttgaccgttggatggatcatgatcagaagacgtgtccactttgtagaacaccgtttgttccagatgagatgcaagaagagtttaatcaacggctatgggctgcttctggtgttcatgattttcactgtcccgtgaccgaattattatagaagaagccacgcttttctatctttttctgtgtcccttatgttcttttttgttttgactttcacccctctacttttgatgttgcttttttcacccctcttactgacatttagacttgccacgcttttatgtgtgtatatactccttacatatgaatgagagatgagcaataaatattaccgagacagg

SEQ ID NO: 141701 - DNA, 2284 bp, Arabidopsis thaliana landsberg
atggcgaaatctgcgggaatcagaacgatcgttatggttcctactgatgctggtgttcttgagcttggttctgtttggtctttgcctgaaaacattggcttggttaagtctgttcaagctttgttcatgaggagagttacgcaaccagtaatggtgacttcaaacactaacatgactggagggattcacaagcttttcgggcaggatttgagtggagctcacgcgtatcctaagaagctcgaagtgagaagaaacttggatgagagattcactcctcaaagttgggaaggctataataacaataaaggtccaacatttggttacacacctcagagggatgatgtgaaagtgctagagaatgtgaatatggttgtagataataacaattacaagacgcagattgagtttgcgggatcatcagttgctgcttcttcgaatccatctacaaacactcagcaagaaaaatcagaatcttgtacagagaaaagaccagtgagcttgttagcaggagcaggaatagtttctgttgttgataagaagagcccaagaaagagagggagacagcctgcaaacgtaagagaagagccattgaaccatgtggaagctgagaggcagagacgcgagaagcttaaccaaagattctacgctttacgatcagttgttccaaacatttctaaaatggacaaggcttctctacttggagacgcaatttcttacatcaaagagcttcaagagaaagtcaagataatggaagatgaaagagtaggaacagataagagcttatcagaatcaaacacaataacagtagaagaaagtccagaagttgacattcaagctatgaatgaagaggttgttgtaagagtaatctcgcctttggattcacatccagcttcaagaatcatacaagcaatgagaaactcaaatgttagtctaatggaggctaagttatcattagctgaagacacaatgtttcacacttttgtgataaagtctaacaacgggtcggatccattgacgaaagagaagcttatagcagcgttttaccccgagaccagctcgacgcaaccgccattgccttcttctagttcacaggtctctggtgatatataagtttcacatgatggtgaagcttttgtctattcttgtttcagtatagataactttcaggttcaactagaaatagataaaatccttttttcttttctctttcttatagtgaaaggaatccggtttaagtatattcattaactttatttagaccattgattaacatatttgtatcttgggaaaatatttcctatactttagaaaatcaaataaagtatgaaagatatttgacttctctttctttgttatggatgctttattcagttccaatttgggatccattcttttttttttttcaaataaagcaatagttataacaagttaatattatccaatcaatgttattcaggtaaatatttgattaattatcttgtagaatgttcatgtacatttgaattttgaagtgaccaaatcttatatattggtcatgaatatgatatattgacatttcaagagactgagctaaaaattacttaaaaatgagaatcaattatttttttccattggtccattattttatgcaatgcagcacataataatctattttggttttggtttgggcttctggtagttctgaaaagcccagtataaagcccaactccattaatgcatcttcacctctacgacgagaattgtgcttccgattcatttcacatagggtttgtttctccgatcagatccaatttcaatccttctccgtcagattatctcctcggccacgatgtctctccgccgcactatcctcgatctccaccgtcaaacccagagagccactctctcaaagtctctacctttctcgatgagtcacatctcctccgcatccgccaccgccgccgtgagaaacccactgggaagagacctctcttcaatccccttcgcacaagcccagaaactgaaaccagattcaaccaatctcgtcaccgatcgctcgatttcgtcttcaattgggcaatctgaactcaacaaggcagccaaattctcgcgtcaatcgtcttctcgaggttacactaatggctctttcttacgcaaaatccctgtagtctttcacattcatgaaggaatggaagagattttggcggattatgttcaccaagaaatgacaaggaatttgattgtgatgtctttgggattgttccagattatcgttcttaaagatattatcttgtttcttctctga

SEQ ID NO: 141702 - DNA, 636 bp, Arabidopsis thaliana landsberg
atgggtgcagcaatagctctctactccacgacgtgctacgctcttggacgttatggaaccggacatgcttatactataaacctacgagctactgtaggacttagcggttggcttcctggttggaggtataaatatatgtcttcaaccctttcttgtcacttgttaacacagagacttaacattgaaagcttaaacataacaatgcaggagcttaaggagcaaaatagaaagttcgaatgaggttgcaaggcgcgctgcatcgataccgatcttacttgcacatggaacttgtatgtttacatatatcattatatgatttactgtttcaagataaaatcaccgaagagaatctagaattttattcacttgatgtgttttttggttgcagcggacgatgtagttccttatagatttggagaaaaatctgctcattcacttgccatggctggattccgacaaactatgttcaaaccatatgaagggtaactgttcaacctatatcccaaagttatcattatcaatctagttgttttagtctgagattgtgaggttttaatgtgattgtgtaggcttggtcactatacggttcctaaagaaatggatgaggtggttcactggctcgtctcaaggcttggt

SEQ ID NO: 141703 - DNA, 2499 bp, Arabidopsis thaliana landsberg
ggtgttttgttcgcttacgcgatttctcgaagaaaaaatctcgtattcctggatcgagacaaggctgattcgattactcgctgttgctgttgttgattttggatctgtgttttgttatctgcggatcgggaaattggaaaaaccctagatatttgagccatttcgtcgcaaaattagggatttttttttcaccgctgggtttttggatctaaaggtatcgaatattgtctggggaaaaaaggaattttgaggatttgtttgatattcgctgaggaaattgatgttgttcgaaggagaagatgatagaaggctatgcatgggagggtttgtgagcggaggcacaaaagtcgtcgtcggcacatgttgatatcttcctctcgtgtaattgcgactgtggaaggtggtggttcttcttgtttgtccttatcttcatctacctcgttttctaaggtaagttctattcgatttcgtttcgatttcctcaggcggtttttttttctttcgtgtttccttctgttttggtggatgggtttgcccaaagttttgaaatttcgtctggattttgtgattctattggttgattcgagaaaatgatttttttttttttttttttttgggtttgctcttcgacttatagttttgtttggtgtttgctgtcactagcaggacgggcgcaaaattagtgttggtgactgtgctctgtttaagccaccacaggattgtccaccgttcattgggataattcgcttgatcattgctgaggaagaagataagttgaagttgggtgttaattggctttatcgacccactgaattaaaacttggcaaaggcatccttctagaggctgagccgaacgaactcttttattcctttcacgaggataatatacctgcagcatctttactgcatccgtgtaaagttgccttccttccaagaggtgttgaactgccatctcgaatcagctcgtttgtgtgtcggcgagtttacgacgttacaaacgagcgcttatggtggctgactgatcaagactatattgatgtgagattataactcatcaccaactgccttcttctatttggatttatggctttctctggtaactaaggcatttttttcctctttgcaggatcgacaactagaagtagacaagttattgtgtaagactcgttcagaaatgcatacaacattacagcagggtggtcgttctccaaagtccatgaatagtccaacaacatcacaaccgaaagatggcatccagaacaacaactctcttttctctcagggtaagggaaggaaaagagagcgtatggatcatggttccgagtctgttaaaagggaacgttctagtcgagtagatgacagtggttctggtcccctcagaacagaaagcggtttaaagtctgaaattttaaaatttacagagaaaggtggtctggtggattctgaaggagttgaaaaattggtgcagctcatgctgcctgagaggaatgaaaagaaaatagacttagttggccgtgcaattcttgcaggggttgtagcagcgacaaacaagtttgattgccttagtcgttttgtccagctcaggggattacctgtgtttgatgagtggctgcaggaagttcataatgggaaagttggagatgggggcagtcccaaagacagtgataggctagtagacgatttcctcttagtcttacttcgggctcttgataagctaccggtgaatctcaacgcgcttcagacttgtaacattggaaagtctgttaatcatctacgctcacataaaaattcagagattgggaaaaaagcaaggagcttggttgacacttggaagaaacgagttgaggcagaaatggatgcgaagtctggatccaaccagggtgtttcctggcctggaagactgagtcatgggggaaggcattcaggtggttccgcggaggcaaacaagacatcatcatcacatctacatgcttctaagtctgtctcggtcaaacaacaggtggaagacaacctgaagtgtgtagtcacgtcgccaggctctacaagatcagctccatctccgggatcaggtggtactgtttctaaagatggacagcagcgaaatgctggggctggtggtgtatctgaagtcctagcagcagtaaaagatgagaaaagtagcagctccagtcagtcccacaataatagtcagtcttgttcgagtgagcatgctaaaacaggcaatctgtgtggaaaagaagatgcaagaagctcaactgctggttcaactttgaagaagtgctccagtggctcttcaaggcatcggaaatcaaacaatgtgtttcaaggttcgtcttcgtcagcatcccctagggaaactggttggtgtagcagcttctcgtcacacaggagtgtcccgtgtgagaaaatttgtcaatcaagtttcccatctcccgagactcgtgagtttcctctaaaaaagggtaaaagtgatagattggttgtgaagcagccgcgggg

SEQ ID NO: 141704 - DNA, 722 bp, Arabidopsis thaliana landsberg
aattttctttgtaattttgattatttttcattttcatagatgtttttttttttgtatttttttgagttttagctttttacttttagtggtggttgattcatgattgatttttaaaaagatttatcatttcaaagcgaaaaaggttgaaatctttgatcattaaacaaaaaatgggtttagtgattctaaactagaaaaaaactatgtttttggttccataatttggatttgcagttacagaggatttgatgagtctcaaggtatagaagtagcatggaaccaagtaaagctctacgatttcttgcagagtcctcaagagctagagaggctctactgtgagatccatctcctcaaaaccttaaaacacaaaagcatcatgaagttctacgcttcttgggtcgataccgataatcgaaacatcaactttgtcactgaaatgttcacttctggcaccttgagacagtaagcttatctctctatctcataagtgaagttctcttgataacttactcataatgtttttatatctttcatgcaggtataggctaaaacataagagagtgaacataagagcggtaaagaattggtgtagacagattttaagaggattaaactatcttcatacacatgaccctcctgtgattcatagagatctcaagtgtgacaacatttttataaatgggaaccaaggagaagtcaagattggagatcttggtcttgct

SEQ ID NO: 141705 - DNA, 1357 bp, Arabidopsis thaliana landsberg
agtctagtccagtctctcgtatttctaatactgccaatcacatccttcctctctacgcttttaggggggttttaggggagcgtcgatcaggtgcgacgagcgtacgtttagctcgctcgttgatctctcaagtctaataagttgactaggtttgactagtcaaaatgtgtgcgagtgtatacacacatctggagagcttgccgcgaattacctaggtcccactaaggaaagggcatatatatatcatgggcaaaaaagcgccgccaatcaaaacacttgaaaaaaagcaaattataagggaaaaaaacttacaaatagaaccggcccactcatagcccagtaataaaaaagtccattaatggatatctcgggtcatccaaaacccgaacccgaaccattttcgatgaagttgacgaacctgtctggttttgttgcgttcttccgatttgggttggagaggaaatggcgtcgggatggggaataacgggaaacaaagggagatgctacgatttctggatggatttcagtgaatgtatgtctcactgcagagagcccaaagattgtacccttcttcgtgaagattacctcgagtgtctccaccattccaaagaggtaggtacccacttcttttttccggtgatattgtttgaagaatttcattgatttgatggttctgatgttcgccactgtttccggctagatcagtgtgattgtgatgtctagatcacttagttgtcgaaattccaaaaatcctagatcaggtcgagcaattgggaaatgagtcccatgcctttgttgattggccattttcggaatcctcagctgcagaatcaagatgccattgaaagatcatgttctcttgtttaagataggatgtatcgattaggcgtttctggaactaaatcatctctgtacatgttacaactgtttcttctgcaattacacggctctcttagaacattacgattgacaccagtggtttctttactttgaatgaagatgctgtaagtttaagtttttatgtgttgtgtacctgttgttgcagtttcaaagaaggaacaggatatacaaggaggagcagcgtaaactaagagcagcttcgaggaaaggtgaagaagccggagatgggactcacacccatcactagtctcaacaatcctccttcaagcttcatccgattccagagaagaataataaaaggttcatggaagattttgtatcttggaatctctaaacgctttgattgtttttcagttttcaattttatccaatcatgttctgctttctttttatgttaaatcgtctctttgagacgtatacttttccacctgaattatggacatgtggattgtggatc

SEQ ID NO: 141706 - DNA, 1431 bp, Arabidopsis thaliana landsberg
gtctcgagtctcgacggctgcggaaatcggaaaatcacgattgaggactttgagctgccacgaagatggcgatgaggttgaaatcaatggcgactttgccgaaattgattcaaagtatgagaaaagaagttccgaagcattctaatcctgttttgccctctctgagacgagctttttccctctatgatcagatcaatctcattgacaatgttcctgaagaccagcttcgcttccaagagtaatcaattccaagctttctctattgtttttcgtcgttgattttgttttttaccgactgtgtttctgggtttgatttaatgaatgattagggtttttggaattggaaatgtataaatatgtggtggttgattgattctcctcacttactttgcagatttaatgatacgagtttcactgtgaatggagtcaaatacgaaggtagcttactctgtgttgggaatctgttaatgtcatggagtcctcgtaaattttcagagatcaccactgataggtatcttctctcttctcaggcctttgattctcaccaatgttctgtcacaaccttatatcgatttgagctgatttttatgactgtgtttgagtgaaagttgtgtgcttttggcaatagattggttgaaggttttcaatgttcattgtcatgagaggatttgacagctttatcaatttgaagtgtttgataaaacatttggtttattttcgacaagtgttctttttttttttgtcattgagagcaatggctaaacgtttgtatatttctatttccatggatgcagcttgtctatcttccagacagttcgacctattccaggtaataatatttgtgtacccatgagtcatcagtatgaaaataaaactgtattagtacctctggttgattaacttttgctgcatattagcttcaatctcagctcttattagatattctaaactaaatcatcgaattgtccagagctcttgattgttggttgtggaagagacattcacccggtaactcccgaggtccgtcagtttgtcaagtcccttggcatgaaactagaaacagttgattctgtaagtttcttaatccatttctacaggcttcttttctagtcccaagcttacttcataacttcttattcgcttattatattgattacttttaattcagagaaatgctgcatcaacgtacaacattctgaatgaagaaggaagagtcgttgctgcggcattgcttccatatggagttacatcctaaagaaaactaacaactcgagctctggctttctaaactgtaaatggtttttgagaccttccgaaaataaaccgaatttcatcggggtttttattgcgtttgagctatataacaaacgttgtaacatggtgcgactttatctcgcatttctcatccttccaaagatataatatctccag

SEQ ID NO: 141707 - DNA, 3750 bp, Arabidopsis thaliana landsberg
  unsure (1)..(3750): unsure at all n locations
atggaggttctactaaactccaatgatggtttcttcaatttctcgtctttctcgtccaattcgaacaggagactcgctaaccaacgtcgattcaacttgcccatctccaaattccactactatcgcgtttcaattctccgagtctcggctcggttcggagagacctcgaggcgacgtaattcgctgaggaagaagatcatcggtgatgagtattggcgttcgactccgaaatcttctgaaccaggtacgaaacctctaaacgaaagccataagtttggtcactgtgatgatttaagtagcaccgagggattgaaagatagggttgctcaagattcaaatttgctgaatgagcttgaagattgggttgctcggtataacaaggaagcagagttttggggtattggttcgaatcccattttcactgtctatcaggattctgttggaaacgtagagaaagtagaggttgatgaagacgaggtcttgagtagaagaagatcagctcttggggatttggaatcagtgagttctaagcttgtatatgcgaagaaattagctgaacaaatggagaatggggaacatgtgatccataaggagagttctcttgtcaagttcgtttcttcttcttcttcttcttcttcagaggaagagtttcgtctcgttagctcagtccaaaacgcaattcttcgtcttgacttaattccaaagttgccggcgattggaagagctgttttgtgtggttacattggactctggttgctgaagacggtgcttgtgtataggaagagtaatgaggttgagtgtacagagttggagaaggagatgatgaggagaaagatgaaagcttggcaggaaagggatatgtcggagaaaggtaccgtggaagttttgcacaaggagggtttggaaaagccattgatgtcatttgagaagcctaagtttgatcgaaatgaacttatgactagtatttctaaagttaagggttcagagaagaaactggaactcgtgaattctcctcatgttgagctggactttgttgataagatccatgaaatcaaagcaatggctagacgagcacgggagatagaagctggcatagaacttaatgaaaagcagaagctcgatgtgaacaaagaaacaggcgacaatgaggaagatataagcattcagtcacagaagagtcttccacatgaggctttgacacacagtgaaggtgatgatgataaagatgaacgcttgggaacttcgactgacagtgagaacactgaactttctggttttgctgttccgatgttgaatggggctatggtagattctggttttctgaatcatgaaatggcagcatctgacaaagaaaaggtgagtaatgtggtaccaccagttcctacagacggagtcatccaagcttctgatgtcactaaggatcagttaagtatgatgaagaatagcactggtcgaaagtcacgggtcatacggtctgtaaaagaggctaaagagttcctttcaagaagaagtggtgagaaagagcttactcaggaactttctcagatggcccaagacagtgatgaaatcttcccaaaacagagcgacgaagagcgtggtgtagctagaaaacacaaattggttgacaaaaataaaatccttggtgcagctgtcaattgaaccttgaaatctgcacttgagtctacttcttctgaaccgttggggaaggatgttgattctcaaccccaaaagaatgactaccaaaaactctcagaaactgggaatgcagttaagggatcgagttcaaataaaagagaagagctcaaatcagccaaaagctcttctggtggtactaaacatatagagaaggaagaaccatcaggaaaggagaattggatagagaaaactaccatgaatttgagcctgttgttgaaaaactgagagcaggatttagggataattatatggctgcaagagagagagagaaactcaggagcctggtacgattgctgatattgcagaactttaccgcagtgaatataatgatgagcttgagtggatgaaggacgaaaagctaagagacattgtcttctgtgttcgagataatgagctggctggtagggatccatctcacctgattgatgctgaagataaagctatatttttgcaaagcttggagaagaaagttgagaaagaaaatgagaaactgtctcatctgcatcagtgaattcattcaaacgttgaaaacctggactacagagtaggtaatcttctctacaactttgattgagactaagtttgctcaatatcttacgtacacaaattattcattaatcagcttgtcaaaatatatctcaaccatctcccttcctcttattattcagatggcgtcagtgtgtatgatccactagaaaagatcataccgagatggaaagggccttcgcttgataagaaccccgagtttctcaataactatcatgaacagcgtgaagcactgttttctggaaaagctgcatctgtatctcctgtgaaatatgaagaacagagctctcatcaggaattatcagagtctgcttcctctgagaacactctcaccccttcatcagaaattacctcaagccagccaaagattgttgtagaaggaagtgatggatctgttagacctggtaaaaaatcaggaaaggagtactggcagcacacgaagaagtggtcacgtgggttccttgagttgtacaatgcagagactgatccagaagtgaaagctgttatgagagacatgggaaaagacttagaccgatggattacagaagacgaaatcaaagacgcagctgatataatggaaaagctgccagagaggaacaagaagttcatggaaaagaaactcaacaaactcaagagagagatggagttgtttggtccgcaagctgttgtcagctaataccgcgagtatggagaagataaggaagacgattatctatggtggttggacattttattactaaaaagctcagttcgagcaggcacttatgcaagagatgctgactgtttgtttttaaccgaaaagagcttattggtaagagatgtttcttgtggataatataactcttctttgtgggtaaaaattggtttgttatgtaaactagtaacttgaatattgttttatctcagatgttatcagtgctgtttaaagtgtatggggctatggtagattctggttttccggagcatgaaatcgcagcatccgacaaagaaaaggtgagtaatttggtaccactagttcctacacacggaatcatccaatcttctgaagcagagtattgtggtatttgttcaaatcccattttcactgtctatctggattctgttggaaatgtggcgaaagtagaggttgatgaagacgaggtcttgagtagaagatcaggtcttgatgatttggaattagtgagttctaggctgcagaaggttttggaagatcaggtacgatggaagttttgcagaaggagggtttggaaaatccattggtttcgnnnnnnnnnnnnnnnnnnnnnnnnnnngacttactgctgatgatgtttccggatcagctactacttcatatctgttactgctgatgtttcggaagattgatctggaggttatatcccacaggcttattaagggaccaaggcatcatatttctatacgatctttttctgaaacttatggtcatttacaggaccatgcatgggtcagacaaggattgatgtatccatttacggaatttatgggcaa

SEQ ID NO: 141708 - DNA, 441 bp, Arabidopsis thaliana landsberg
aatgtgagggtgtcagggatctggtatgaaggtgtctattaggcagcttgaacctggaatgatccagcagatgcagcatgcatgtaatgaatgcaaagggacaggtgagaccatcaatgatcgggacaggtgtccacaatgcaaaggagacaaggtcattcctgagaagaaggtgcttgaagtgaatgtggagaagggaatgcaacacagtcagaagatcacatttgaaggacaagcagatgaagcggtatctactctcatacatttactccagctttgattactattatgtttacttttcttctggagactaaccttttgttttatgtttttgtgttggtgcagcctgacactgtcactggagatatagtgtttgtccttcagcagaaagagcacccaaagttcaagagaaagggagaagacctctttgtggagcacaca

SEQ ID NO: 141709 - DNA, 628 bp, Arabidopsis thaliana landsberg; identical to SEQ ID NO: 72147

SEQ ID NO: 141710 - DNA, 1866 bp, Arabidopsis thaliana landsberg
atacgatcaagaataatgtgaccgattttataaaagatcaaaaaatgttagaatcggaagaagcagtacctgggaaacgaaaaagggggaaattggaagagagagcgagagagaggtccgattcgccggagaaatggaaacctagctcggaattacgcggtgggagtctgagtcaaagactgagatttttcgtgttgattcttatgtcttttcaaaattcccaagatatagaaaaattgaggtattcacattttgtgcggattttattatattaaaagtaattaagtgaacctattgtttatacaaaaagaaaaaatattttcattccacattttctttttttttttgtaagaaatgttgtattacattttatggcttcatttttacaaaatcgtagactaattatgattgattagggtattatttgctagattatataggcaagttttggctaaaaattgatataaaaaaaacatattgtatatggtaaaactataattttaaagaaattattccatatgtgattttaacaaataacgtagatcatgtataaactgcatgttaattaagaaaaaactagtgttaattttgaaaacaatgtgtaaaaaaatataaggcgcaaattttcatccaacttgaaagttttttttgcataaaaatcaaatttgtcgtatattaagatcggtaataagccgtaatataagattggtcgcatcataataaaaagtgactacacctccttgatagtctcgcttaggcatcttttaggtcatatcaatacaaaatacacatatacatatttttcaacacctgaggtgcgcgaagatagacacttcttcatcctctccgtaattctcaaaattagggttttcttccggcagctctctcaggtactttctcgctctttcttctttcatctcattgcgcctctcttcgtttcctttcgtgaatctttttttttggttggggatccacaattgggatttgtgtaactcttcttatcttaattaaaaactgaatctttctctcatttttgttccaatgattgctaagttagcttaaacacgcctttgattgacatttctctgagttatagctttgtatgtgtattgggttgttcttggttgtatctatcattgtggtcaatttgtgtgaaataatcaaatagaattgtagttataagctgaggattctcttaacaggttagattggcagcataaaaaatatcacttgcaaattctgaacaatgtctgttgtgggagattctaacatggagctggagttttctaagcaaagatactattttgactttagcccttcttatctttcttgttgccatgaatattttaaccttctttgcatctaaccaaggcctatgatatcatggtttttatccgctctcaggggtcatttcgtttcttatctttttttgtttcacctgttgagcatttcatcgccctcttctctctttatctatttgtttgtcacctttttagccgcattatggcaaagcgtcaattcgaacttcttattcttcttttctattggcctcttattgtttcttttccaacctttcctcggttttattctctctccccacttgcttcttgcttctgtgtctcctccacagttgtactgcaagcattcttttctagatatttaagatgtcaaggacgaggactgctgcttctgaggctcatgactccatggaatctgaggaaagggtagaccttgatggtgacaatgatcctgaggagattctggaggaggaagttgaatacgaagaagttgaagaggaggaggagattgaagagatagaagaggagatagaggaggaggttgaagtggaagaagaggaggaggagg

SEQ ID NO: 141711 - DNA, 1332 bp, Arabidopsis thaliana landsberg
atgatgatcactgtctttgtcatccacagtctccattgcagcagcaacagtgttgagctgaacctgtaagctaaacaacaaatttaagaaaaaagaagaagaattttaagtatatgagaacgaattacatagaattatactgtcgtagttgttaccttcgagatacagtaaaacaggggaagaacaagaaaatgggatctgcaagcgaagaaacccacacttaaaaccgccattgatatcaaaaagtttcaccatttcatcatgggcttttaagcttcatcaagctgcttttgatgaaattaaagaagcagagattttttcagaaatgttagggtttttgaagatgaacaatgaaggggtttatagcgacgtggccagttctcatttgaaataccgttccgtcaaatcgatgccgtttcatgttactcactagaacatttcggcgttcgctggcttgtcttaagttatctacgcagcgttttataaagtgaaagaactgtaagccgtcttaagcttcagaatgagaactacatgctgttttcatactcactcgcttagatcggaacttggatactttgaattgaaagatcgagaatttcacatcgtcttctcctggaaatcacgaagctgaagcttctactggggaatcgatgaagctcttgcatctgatattcttattaggtttgactactggaatctctgctgttctaatctacattatcggcgtctctaatctctgtaagtaatctccatcattgtcccatgcttgtagtgttgtatttcgtgattttttctgaagtatgaagatgattaatgataaagaagatgattccgtggatttagacgagtctaatcgttttaccaatgaagatttagaggcgttgcagtctttgcagaacggattccagaagtgcgtagtaagtaaatctgtgttagcttccttatcttgtgttataccctcttgatccgtttggagttatagatcttacctctgaatctggagcttagctgattagaactgatctaatgatgcacagtgcaaatggtttgggactacaagctgctatgggtagagattattgcaaagtttctataaacttccctaaggatactgtccccaaatgggcaaattctctcttctgactatttggttatcatagttaagcttgtcataatccttgtcttactgtctagcaaatatgggctaccttattattatgtcttggattatgtacaacaacagaaagatcccaagtctggagagcttgaaggattgtcatatcagtttgacctgtgtgaagcaatagctacatgggaacaagtgggtatttg

SEQ ID NO: 141712 - DNA, 3475 bp, Arabidopsis thaliana landsberg
atttttcttttacgcgtatcccttttcaatatacatatatatatacagagctagagaagttgcagaatcctgtgttaatcatattacaatctgcattgtgaaattttgcgaattcatctagggtttgatctgactccaaatttgggatttttagggtttaaatctagagatagagagagagagaatgggaggttgtttatctggagatgtgaaaggaggcaaacaagccattggaggggtccagcagagacccacttcctcaaccatcgccaacaatgcggctcacaacgacgctgtcgattttttcttcagatcatcgtggtccatatcctctcttttgtctaatcgaggtactaaagtcaggttttttttatgtttgtttagctcttctagtatatgatgtggtcacatttggattagtcaaccaagttaacaatttgtgaattgtatattgcttaaacactagattattgcttttgtttaaggatccttgttctccttttttttatccatactggataagatattccctcttgttatgtacttttctaatggagctagcccattgaccctctgttcagtctttgtttatcactgctaaacgtgtttatgtctttatttgtgtcagaaatatggaattggatactcaaaacttggttgatgaaaacaactttaatcttgaggatcaagaaatggacgatgaagatccagaaatggatcagatactacctcatgacactgcttcttcagggacagttgagagaggtaaaagtagtgtaagtagatttcgtgctgcatgctggaaaaacttcgatagaggacagaaatatcctaatgggaaaactgaggttacatgcaaatattgtgagcagacttatcacttgaatctgagacgaaatggtcctaataccatgaatcgtcatatgagatcttgtgagaagactcctggaagtacacctagaattagcagaaaggtggatatgatggtctttagagaaatgattgcagtggctttagttcaacataatcttccatattcgtttgtcgaatatgaaagaattagagaagcctttacatatgctaacccttatatagaattttggagcagaaatactgtagcttctgatgtctacaagatttatgaaagagagaaaattaagcttaaggaaaagttagctataatcccgggtagaatatgcttaacaacagatttgtggagagctttaactgttgaaagttatatttgcttaacagctcattatgtagatgttgatggtgttctgaaaacgaagatcttatctttctgtgctttcccgcctccacattctggagtagctatagcaatgaagcttagtgagctgttgaaagattggggaattgagaagaaagtttttactttaactgtagataatgcttctgcaaatgatactatgcaaagcattttaaagcataatgcttctgaaaatgcattcttatacttagtgagaattttgttttgttggtcatatttcaggggttttactcttacttttctgaaagaaatggaactggaaaatcaccattagatatgtacttggaagagcctgtgttagatatggtctcttttagagatatggatgttattgcatattggaaaaacaatgtctcgcgttttaaagaattgtcatcgatggcatgtgatatcttaagcattccgatcactaccgtggcatcggagtcagcttttagtataggtagtcgtgtgcttaacaaatatagaagctgccttttacctactaatgtgcaagccctcctatgtactagaaactggtttcgtggatttcaagaagttggtaatattcacatcttgaactcgtttataatagtaaacttatatggcttttggactgcagcttttagattaatagctcggtttttcttattgtagaaactgatgagatccaaggtcaagaggacacaaacaccacccttgcataaacgtttcaagactgggaagaaacaggtacatggctgttctcttaagctctgagcctatggttatgtgtttattattctcagtacatggctgatttgatgatgtatgtctttgacagattgttataggttgtgatggtatccgatctaaggttgcaacttggatgacagattttggtttgatttcatgttgatgttatggttttataaatagagcttttaacgagattgtgtgaaaatgcattgtatataaacatcattgtatgggctggccatgggctgaccattggacaatggtctttaatggtcttggacaaattttcagaccattgtccattaaagaccaaccaataaaaccaatgaaaaaaatggtccaagtggacatgaccaatgggctttggacagcccaattgacacttctaactacacttgggactctaactccatgttttgctccttttagacacttaacatcaaccttgagtctaagagacaacataattacctagttgggtcctaataatccgtttggcccattattacaaaacacaacttaacaaaacaaaccaactctttttagttgattttgttctttcctcttcatgtgtcgttgaccttcttgtcacgacatcttcttcttccttttgctccttcttcactcttgaagcttcttctctattcttctcttcttctcatgaagcttttcttgttgcaggattaaatcttaggattcacaattccaacattacagctaacaagataatagctgagatatataaaatataggaaggtcctaaaacctaattaactcaatagaaaaataagaaaatctacaattataaatcccctagaaataaaaacctataatgaaaataagtacctaaaaccatcggcaatacttttctcctaaattaaaaaagctttcatccacctagggtaactttgagccacataagagttcactcttatatcagaagtaacacttctagctattttataggccccctaattacacccattaggttcaaataaaatgaaccaatcttccatcccatcagccatagataacagtgggaaaatatgacttacaagtgatggtcagtcctttggtttatgaaggactttgattatctccattgtattggccccaaaagtcactttctgtacatgtaaacttttcatactctcaactgcccattcccagctcttaatcttagcttcaaacaaggaaactacgtgagagtaagatcgacagctatggagaacagagatttgtatgattccaccctttttgcattactgaagttgcaaaaaagtttttgacctttgagactatcgtttctcccactatctcataatagcgttggaaaaaggcagcgttaaaaccatccctggtgctcgtgttgctcctatggagaaaagtgcttcacgtatttcctcaatagtgacctcctttaataaggcttcattcatctctgcttttcttctgataaatcaatag

SEQ ID NO: 141713 - DNA, 1019 bp, Arabidopsis thaliana landsberg
aacaacatgtacgagggatttcattctcagccgccggtatctacagctccaaacctgcctggacaaactccatttggacaagctgttcaaccatataacatggttcctcattctcaaaatatgactggagccatgccatttaatagtggaggcttcatgcaccagccgggctcacaaactccttactctaccccaagtggaccagctggtcagttcatggcacaccaaggtcatggaatgccgccatcccatggtccacaacgaactcaatccggacctgttactctgcaagggaacaacaatgtcatgggagacatgttctcgcaagctacgcccaactccttgacgtcatcatcatctcatccagatctcacacctttaacaggagcaattgagattgttcctccgcctcagaaaaagtttgagccaaaatcatcagtctgggcagacacgttgagcagggggcttgttaactttaacatatctggatgtaagatagatttcaccataccatttaaggaaaaaaaaacgtctttagcaaactttctaacattgtttttgtttttctacttatcgcagctaaaacaaatccattggcagacataggagttgacttcgaggcgatcaacaggagagagaaacggctggagaaacaaacaaacacaccagcaacatcgactatcaatatgggtaaagccatgggatcaggcactggcttagggcgttctggtgcaactgctatgagacctccacctaatccaatgacaggctctggcatgcccatgggcggaggaatgggtgttggtagctacggaggtatgaaccagaaccaacccatgggtatgggtatgggggccggaatgaaccaaaaccaaccgatgggtatgggaatgggacccggcatgaacatgaacatgaacatgggaggatatggccaaggctatccgatgcaaccacaaaacccagggatggtaaatagcccaaacatgcctggcaataactacaatccgatgatgggt

SEQ ID NO: 141714 - DNA, 1076 bp, Arabidopsis thaliana landsberg
cctggctgtaccaattttggtttcatctggcagttttatccagttgacaggcacaatgatcggcatgctcattcgatttgacaggtaaactgataggcactatattgtgagatgcttgatacatatggataaacaataaataataatataaataggtaggagtctttttgatcattgggacttgggagccttaggaatttgggagatattaggaactctaaaacaaacaataactgatcaattcacctaaattggttctccatgttcttcctttgaaaaataaagacagttctgctttctgttcctatcataaacaggctaaattcttgcctaaacttagaaagtgaaataaaatgtgcatactatgttggagcagggttgaaataaatccatggagcggtaattagtttttagctcgcagctgtccaagtaaacatggcgactaaagaaaaaaagtcagaatgcggttgctgctatgggaattaatagttctgtgaatctctttcttatttagcattcaacaaaccttatattgtagctgttgtttttggtatttttgtgtgtagtaacccaggagtaactccagaatggctaggcagtgcattgatcgctgttgctattgctactttcataagtctgtccatggtatacctgctggcctatattcatctctccggtaatgctctactccaaaactttgttatggaacctatcacaataattacaaactttaggttgattaagcataataattcctgccaaacttgtggtctccaggtgcaaaaaagtcgattgtcacagcattatgcattatcactgccctctctcttgctcttgtatcttctggtgttcttcctgcatttactgaggatactgcaagagcagtaaatgtatgcccctttgattctcgttccagtggatttattttattttatttctgttgggttgctacttttaagttattcaaacattatgggactcagcgtttcgatatatggttgtacacatgtaggtagtacatgttgtggatacaagcgggcaagatcaagtggcgtttatatcactattctcaaaca

SEQ ID NO: 141715 - DNA, 1709 bp, Arabidopsis thaliana landsberg
tcttcttcttcctctctctctttctctcaccatatatctaaattgctcatcgattctcaattcagcttcatgctttcggatttgattcgtcgataaccccaatttctttacaaagttgaagtttttatgtcatttctggttcgaaattcgttgcaattggaatgagataaagtctctgaatttgctatcgctttgttttattcgttttctgttttttttgagatgccatcgatgcttgttctcgtcggcacaatgccgtccttggcttctctggttagtctaggtggtgcttgtgcaagcgtttctggaacgagttcttcggatgcatcgtatgctttagttaagagggtttctttgtcaaggagaagtgttaaggggactaagaaatggctgtgtagatattctgtttcgtcttcaactactactactactgctgacttcattgctgaccaaaacaacaactcagtttctatagattctaactcgtttagggggagtaaagatggggatgatagtgaggttgtgctgaaacagactcctaaacctgtcttgaaaccccctgtggcaagggtagaaagaggtttgggggtgaatactgctccttggagtaaagatttgtcgaatgggggtaagtttgatggagaggaagagaggaataaggttattgaatctcttggtgaagtgttagataaagctgagaagatggaaattccgaaaccgggtaacaaagagggtggtgaggctgttaagccgtcacagcctagtgccaacagtagtaactcaagaaatggtagctatgcgaatgcgagtgatggagggacaaggaagacgaaaaccatgaagagtgtgtggcgtaagggcgatgctgttgctgctgtgcaaaaagttgttaaggaatcacctaaaattgttaacagaggaatgcagaccgaacctagaacgagagaagagggagaggtgaatgcaaatgcaggcactccattggcaccacctcagccaccttttagacctcaaccgcctgtaagaccccagccaatgttacaagggaagcctatggtagctccgcccgtaaagaaatcacccatcttaaaagatcttggtatggcagcaaaacctttagtttctgaagaagttgattctagcgttaaaagtaaagaaaggaagcctattttggttgacaaatttgcttcgaagaaaaaaggtgttgatcctgcggcctctcaggctgtgttagctcctactaagcctggaaagggtcctccctctaacaagttcagagtggagcaccgtaataaaaaaaatgcatcagctagtccaagacgaagaattgttgctgaagatgacggcgacgaagatacatccatttctcgatcaggcagaaaagggagaaaatggagtaaagctagtaggaaggctgtaagactccaggctgctaaagacgcagcacctgtcaaagccgaaatcttagaggtagaggaagaaggcatgtccatcgaggatttggcttacaacctagccatcggagaaggtgacatccttgggtacctatattcaaaagggattagacctgatggtgtgcacactttggaccgcgagatggtgaagatgatttgtagagattacgatgttgaggtccttgatgctgattcagttaaagtagaagagatggcaaagaaaaggcaaacttttgatgaagaagatttggacaa

SEQ ID NO: 141716 - DNA, 972 bp, Arabidopsis thaliana landsberg
ttacgagttttgtttggaagagagtttttgcttcaggatttattgatagtgtgggatgagatattctcagcagataacacggcgagaacagatgcggataacaatacaaaccagagctacaagatctttgattctcctcggggagctctaatctcgggaatggcagtttcgatgatattatctttaagatcatcattgcttgctactgaaaacgcagcttcttgtctccagagactattgaatttcccagagaagattgatgtgaggaagataatagagaaagctaagtcattacaaactttggctttggatgatgatgtacgatcatcagctctatcgataaatgatggctttgatcagagcatcagtccagcagtaccggcgagaactaacagttttccttccggatccacatctcctaaatctccattgataattacaccacaaagttattgggaggatcaatggagagttctacacaaagccgccgaggaagagaaaaaaagtccttctccaatacagaagaaaaagccttggttcagggtgaaaagacttttcagagcagagtctgagccaactcatagcgccaagtcaccaaatgggaaaagtgaagtcaagatatcatcagttgcgcgtaacttgcttgaagattttaatcggcagcttgtttctgaacctgtggaagctaatccaatagatgttgtgaacaatgaagatagctcaattcgagaaaccgaggatataaacacggattttgaaactgctgctgaagagagtatagtaatggaggagaattcatctgatattttctcagatccaaacagtcctctcagagactcaaactacattgagaatgattcggatagcagtaacgagtcaaatctatttcctgaagaaacagttaaagatcaagaaacaagcgtagtagattcgcctttttccattttttctcaaccgaacatgggagttata

SEQ ID NO: 141717 - DNA, 400 bp, Arabidopsis thaliana landsberg
  unsure (1)..(400): unsure at all n locations
cagacccgggaaagcttctcctctgttnttaggtgtgaagccttttcttaagttcagttatctgaactcaactcaagtcttttaaacaatcttttacacactcttcttattgcagggctcattgcagcatcgtgtggcgagttagacacagtcctgaatccagcttctgctcatcaacattcgattagtaacggtccaacaaacattttcatcaatggaacttccaagaaatctcccaatggcttggctgatgtaagatataataacggctactgcaatggcctctacactagatagctgcatttgctgaattctccctctccattagaattattgctttgtgttcgatttagtttggattttggtttgctttcttcttaataatcttaggatttttcct

SEQ ID NO: 141718 - DNA, 602 bp, Arabidopsis thaliana landsberg
agcaaaaccgcgagctctcatggcttccggcggcaaagattccgatcgtaccttagggtatatgactcggaaagatacagaagtcaagcttccaagacctactcgtgtcaagaacaaaactccggcgccgattcaaataactgccgaacagatattaagagaagctcgagagagacaagaagctgagatccgtcctcccaagcaaaaaatcactgattccactgagctttccgactacagactccgccggagaaaggaatttgaagaccagatccgtcgcgcgagatggaacattcaagtttgggtcaaatacgctcaatgggaagagtcacagaaagattacgctcgtgctcgaagtgtttgggaacgagccatagaaggagattacaggaaccatacgctttggctcaaatacgcagagtttgagatgaagaacaagtttgtgaacagtgcgagaaacgtttgggatcgagctgtaacgcttcttcctcgtgtagaccagctttggtacaagtatattcatatggaggagatacttgggaatatcgccggagctagacagatttttgaacggtggatggattggtcaccggatcaacaag

SEQ ID NO: 141719 - DNA, 1207 bp, Arabidopsis thaliana landsberg
atggaagatatgaaacagagcagccagcaaattccttccattcggaacaaagagtctctcagcttcagtcaaagtatatcagttattgatctcaagaaagtaatagtagtgagcaatgaagatgatgatggagctctagagttgaagaacagaggagtggaacgaaccagtggagaactcttgaagaccacagtgtcaatgtgtttattgttgtctttgtctttctctaaaagttgtaaaaaaaaagggtgtgaagctaaagctaaatggtatgtaagcaatgttttgcaattttaaatttacaaaataacactcggagtttctgaaagtttaattttgacccataatatttgatatttgaggcattgtcctggaattaaaaccaaattgaaactccttcgcgtgtgttttctgctgcatttttacctcttagcgtctccggcgaaaacccactacgactgagtatggcgctcgaaatcgaagctcgagagtaagatttcgctttctcttacaaaccctagttttcgtttagtgtcactgatatgaattgtgctccaagaaccatcgtttacgaatgctcagatggatcttaggttacatgtttggagaaaacatcttgaatgttggtttttttatatcctccatactaaagttgtggtttttaaatctacccataatttgttttagcttggttcttctaaagctaattgcttctgaatatctagattcctccgtagctattcttcgtttaaattaacgtcgtatacgaaaatttgagggagatcatcgttagagtgttttgattctttgcaatgcgtctcgaggaaaaacccaatttgtataaatttgaactcttgttaattctcggcttggattgaaaccattgacagtattattagccattttgttagtaatattggatggagaacgttttgatgctatatgtcagctttgtgtagatcttcatccctaatagctctctattgtgttgaatgtctcagtgtaataaagattatgcttcagttctgcaaagaaaattccttgaatcagacattccagacattacaaagcgagtgtcaggtttccttgaatacagtagacagcgtcgagacgtttatttctgatattaatagaggaagatgggactcggtactacctcaagtttcccagcttaaacttcccaggaataaacttgaagacctttatg

SEQ ID NO: 141720 - DNA, 616 bp, Arabidopsis thaliana landsberg
caaaacataaatactaatggagcaccaccaccagcatcaccgtcaccaccaacgcgacgacggagaagacgatcgtcaatcctttggagtaccaccgccacacgtcgatgctccgccacaacctcatggtctttaccagtcacagcctcattttgatccttacgcgcctactcctcaagctccggcgccttaccgatcagaaactcaattcgaaccccacgcgcctccgccttaccgatcagagccttactttgaaactccggcaccaccgccttcatttggtcatgtgagtcatgttggtcaccaatcacccaacgaatcttacccaccggaacaccaccgttacggaggttatcaacagccgtctaattctttactggaaagtcatggagatcacagtggagtcacgcacgtggctcaccatagctcaaatcagccccaatcgtcttctggtgtctaccacaagcctgatgagaatcgtctacctgataatcttgctggactcgccggaagagcaacggtgaaggtgtattccaaggcggagcctaactataatttgacgatcagagatggtaaggttattctcgccccagcggatccatctgatgaagcacag

SEQ ID NO: 141721 - DNA, 6122 bp, Arabidopsis thaliana landsberg
atggctttgcgtttaggtgtttctataggggcagctttgggttcctctcattgggacgacggacaacgagtacgacaacgtgacttctccgcttctgtgaatttcaccgcaccggttacgagccggaggagcttaaggggtagtagaaccggtgtgaggattcttagggtttcaaatgaaggacgcgaatcgtacctcgatatgtggaagaacgctgttgatcgcgagaagaaagagaaggcctttgaaaaaattgcagagaatgttgtagctgttgatggtgagaaggagaaaggaggagacttggagaagaagagcgatgagtttcagaagatcctcgaggtttccgttgaggaaagagatcggattcagcgaatgcaggtcgttgatcgtgccgctgccgcaatctccgcagctagagctattctcgcctctaacaattccggcgacggcaaagaaggatttccaaatgaagacaacactgtcacaagtgaagtcacagagacacccaaaaatgctaaacttggtacaaatcttctacttgttagcacaatccaaagttaatgatagtattagtcaccttacttggctatgttattggaaattttattaggaatgtggagcagaacagtgtatgtgccacggtcagaaacttcagggactgagacaccaggaccagatttttggtcatggacacctcctcaaggtagtgaaattagttctgtggacttgcaggctgtggaaaagcctgctgagtttccaactttgccaaatcctgtattggagaaagataaatcagcggattctctttcgataccatatgagagtatgctttcttctgaaagacatagctttactatcccgccttttgagtctttgattgaggttcgaaaagaggctgagacgaagcctagctccgagactttatcgacagaacatgaccttgatctcatatcttcagcaaacgcggaagaagtagctcgtgttcttgatagtttggatgaatcttcaacgcatggagttagcgaagatggattgaagtggtggaagcaaacgggtgtggagaaaagacctgatggtgtggtttgcaggtggacaatgatacgtggggttactgctgatggtgttgttgagtggcaagataagtattgggaggcttctgatgattttgggttcaaggaacttggttctgagaaatcaggacgtgatgccactggaaacgtgtggcgtgagttctggagagagtcaatgagccaggttagtgtaaagtagttgccgtagtaaatctaacgcactatagactatttgagacttaatttgaattgtttattacaggagaatggtgttgtgcatatggagaaaactgcagacaaatggggaaagagtggacaaggtgatgaatggcaagagaaatggtgggagcattacgatgctaccggaaaatcagaaaaatgggctcataagtggtgcagcattgaccgcaacacgcctcttgacgctggccacgctcatgtctggcacgagaggtattctcaaaatcctcttttcacataacgaaacactaataacataatcgaatctttatcctttaactttcagtccttaaaatatcaatcaatctctttaacacaagttagaatgtttgtcctttaacttttacaccttatattgttgaacatcaaatcagttcagtagcaaaacattgccttttcatactctttaaggtgctctattaacatttagaagcttagtctgcgagctttgttgaactgttatcaaaacagaactgacactagacaagctgtgaccaaataacagggaatgtagagtgtttctaaatatgtcttgattggttttgaccaggtggggagagaagtatgacgggcaaggcggaagcacaaagtacacagacaagtgggcggaacggtgggtaggtgacggttgggacaaatggggagacaaatgggacgagaactttaacccgagcgctcaaggagtgaaacaaggtgagacttggtgggaagggaagcacggcgacagatggaaccgaagctggggagaaggtcacaacggatcaggatgggttcacaaatacggaaaaagcagcagcggtgaacactgggacacacatgtaccacaagaaacttggtatgagaagttccctcactttggcttcttccactgttttgacaactctgttcagctccgagccgttaagaagccttctgatatgtcctagatatatcaaatactaagcataaaatatataaataagctgggacaatcaaagaattggcctacaatattagagtagtttgatcaagtgcaatgtatgtaatatttattatgacttctaatttgttctatgctttggtgtttcttaatgagtatggccaaagtttatttggtagttactaatataacacaaatctgattagaaaactggaacacattccattccaggagcataaagttatatgaacagataatctaaactctttatttggtaaagataagaagacaaatattttctgtaaccaataataatcttcagttacatttgtattaaattctaataaaaaaaatatacagaggacaagccaaagtggaaccccacccactgtcttctcaaagattaaaaaaaagaaaaggattttacccaaaatctccgatattcttattcctttgctgtatcatcttcttcttctacttcgtcctcatcatcgtcacatagatcctcctttttcgttaattggggagagatatacgtaacagctcttctctctacaaagaagttgacttttgcatccttacatctctcaaatctttctctggttaatctgtattcgtgtatttttgcagtttcttttgaggatcagatcgtgacagggtttagctcaaggagaggtattagatccgtactttgtgataaactttctcaaggtttacgatctcattctatctagatcggcttcgtatagatacaatcttgtttcaattagcaatggatcgattttgttattcgaatatttagaaaaaggaaagatttttccaaaggggtttcctcttataccattttttctgggttttttgaaatttagggtgagaaaaagaagaagaaggtgagaaaagtgaaggcaaggctttgaggatgtcttttacaggaactcaacagaaatgcaaggcttgtgagaagactgtttatgctgttgagcttctctctgctgatggagttggatatcacaagtcttgcttcaaatgcactcactgcaaaagcaggcttcaggtctgattctctcatctttgtattcatgttaatgatgctgctttaattagaggaatgagtttacgaattacccatcttcttgcttaaatgatgaattgaatgtctattgtaaccataagcagctcttgataaagtaaatgtctttttacagctgagtagttactcatcaatggaaggtgttttgtactgtaagcctcattttgagcagctctttaaggagagtggtagtttcaacaagaactttcagtcacgtatgtagttttgtttctgcttcgattcatgtttttttttcgcttgcccttcttttggttattgatttaatcagtcttgcaactttgtttcctcacagctgcaaaatcggctgacaaatcaactcctgagctggtaaatgtttcttttctggtttggtcagatgctctttggatacatttctctgattgaacttttctcttatatttccttcttggtttgttttcagacaaggacgcctagccgagttgctggcaggttctctggtacacaagagaaatgcgccacttgtagtaaaactgtgtatcctattgaaaaggttataactcgtttaatctttcattgctcttccttcactcatgcattttccattaactgaagctttggaatcacctttctgcactctaaggtctatgttggagtattactctaaaacacagttccatcatttgcaagaattctcctgtgttttctatttcatgttgaggatagatacataatcccctcagttaccgagaacttgcaaggaaaccaaatgttttgcacagatgcatagaccctggagatatcggttcttgttactttaatttgcatgttaaacctataaaggagacttaatatgaaaactctttatgggatctttaaaagctatttggtcacaaatatccgtctttttcgattctgaaatatgcaggtaacagtcgagagccagacatatcacaagtcctgcttcaagtgctcacatggaggttgcccaatttcaccttccaactacgcagctcttgaaggaatcctgtactgcaagcaccatttcgctcagctcttcaaggagaaaagaagttacaaccacttaatcaaatccgcttccatcaaacgctctgcagccgcagcagtcgccgccgggtaccagcagcctccgttcctgaatcttaaaatccaataatttctcctctctagtctaaaatttgaagttaatgccatactgattcagtttgatttctctttgtgagagcgtgtgtgtaatctatgctttgatgttcttatttccattgatgtctcctaaaattctatgtttgtgtggtgatttggttatctataaaaagtctgaaactttccttctaaatcttcaatttcgttttttctgtgtttctctagacagaagcctccaagtaatatagagggttttgactatactattcaacgccgtaagactgtggtcaaacatctgacacgtgtagtcacatcaacgtctaggttacgagtgatgtctacagttacaaacatacactgtagcacagaggaacattaactcctctaacagaatcctcccgcccattctctcacatagttcgtcttcaacctttagtctctcttgatcagaattctcagtctccgatttcactttctctctctaacttcgaagaaagaaagaaagaaaaagagaatgaagaaaatgcactctctctcctcttatctcctcctccttatctcgttaaccgccatggctacacctacgacaacctccgccacaacgatcggagtcacatactcgactccagcttcaatctccggcaccgtacaactctcaccggacagaatcgccgaaaaagtcgtttcaatgaacattccggcggtgagactcctcgattcaaatccggcgatgattcgtgccttcgcttacacaaacgtatctctcttcctctccgtaccaaatccactagttcctctcctcgcttcaaatcgttctctcgcgatgcgttgggtctatcgccatgtgcttcctttttatcctcgcaccaagatctcaatcatctccgtcggtaacgacgtgatttcgtattctccggacgtatctccgtttctcctccgtgcgatgcagaatgttcatctatctcttgtagatctgagaatctacaagatctctgtatcaacgacgttctctttcttcaacatcgtacccacggcatttccaccttcgtcggcgcagtttcaacaacctaacggagaagttatcatcagaccgattttgcaattcctcgaaagaacgaattcgtctttcttgatcaatctctatccctacaatatgtatcggtctagcttctcgattccgattggatttgctctttttgaagagttcccgttcaatttcagagatgatctgaccaccggagtaagataccggaatctttttgatatgatggttgatgctgtgattagctctatggctgttatgggtcatgagaatcttccggtgattgtggcggagactggttggcctagctctggaattgatactagtgaagtagatgcgacgttgttgtatagtgagatgttcttgaaagctttgttgactcatctgagaagtggatgtggaacaccgttgaggaaagaaggtgtttcagaggtttatatctttgagcttgttgagaaagatgctaagcaagggattaggaattggggacttttgcatcataacatgactagtaagtacagcttcgacttctcggatggaggcaaagtcagaagattcaaagagattttggttggattctttgtgcaagtggtgatgctttacctgttgatgtag

SEQ ID NO: 141722 - DNA, 969 bp, Arabidopsis thaliana landsberg
atgaatggtgaagttggccctaagactgttcacattccatctggagagaagctctcagtctttgacgctgccatggtttgtatttatctaattaaaatttgtattactgactgtatgttgatcatgtcgaatgtctccttatcataatgtcaaatgtatcagaggtacaagtcatctggtgaagacacaattattctggctggagctgagtatggaagtggtagctcacgtgattgggctgccaagggacccatgctacaggtttagaaccgcttctctagtttctttccgcataaaccaatcttactgttttattctgaaacaacaagtttgggattgtcagggtgttaaagcggtgattgcaaagagttttgagaggattcaccgaagcaacttggtgggaatgggaatcatcccattgtgctttaagtccggtgaagacgcagatactcttggattgactggtcacgaacgctacacgatccatctcccaaccgatatctcagagataagacctggccaagatgttaccgtcactaccgacaacggaaaatctttcacttgcacagtccgcttcgacacagaggtaactaaatactccaatctttagtgaaaaaaagcttttcaatgtgaaggaactaataatggtaaaataaatgtgcaggtggaattggcatactttaaccatggaggcatacttccatatgttatcagaaacttgagcaagcaatagtgaaggaagcaatacacaagttatggagcaaaataaaagagtgtttgtttctgttttaaaatgtcttttttaaaaggcagataagtctgtctaggattaggttaaaaggtgagtgatctcatgcaatatatgagtttcagtgggttattcttacacgcttaggctcccatgtttcgcaacttgcaagagttgaatattattgtttttgaaaaggaataagagagccttcttgcata

SEQ ID NO: 141723 - DNA, 333 bp, Arabidopsis thaliana landsberg
gttggacagccattgcggtttcccgagcatccaaatgtgagctttgtagctagagatttgatcagaggattgctagtgaaagagcctcagcatcggttggcttatagaagaggagctactgagattaagcagcatccgtttttccaaagtgtgaattgggctttgatcagatgcaccagtccaccacagattcctcaaccggttaaaccaatggatcaagctcacagtgttcgtcatggttttagtcaaggacatggacatgttggttatgataagcctcctactgtggatgtgaagccttctggtaattatttggaaattgatttcttctga

SEQ ID NO: 141724 - DNA, 378 bp, Arabidopsis thaliana landsberg
agtaacatcgagacaaagaagaaaaactaaaaaagagaaccccaaagaatcgaatatttattatttcgccccgaagattctatttctgatcatttacacccctaaaaagagtagagctttcgtgaagccaccatgtgtggaggagctataatctccgatttcatacctccgccgaggtccctccgcgtcactaacgagtttatctggccggatctgaaaaacaaagtgaaagcttcaaagaagagattgaataagcgatccgatttcttcgatcttgacgatgatttcgaagctgatttccaagggtttaaggatgactcggcttttgactgcgaagacgatgatgatgtcttcgtcaatgttaagcctttcgtcttc

SEQ ID NO: 141725 - DNA, 1455 bp, Arabidopsis thaliana landsberg
atgttgtgttgtgatgagtgtgaatttcggttggacttccggggcgctactttacctagaaagataatgaatcaaaggtacgacgatcatcctctctacttgtcgtacggtgaaaataaggaagatggtcaactttggtgtgaggtatgtgaaacaaaagtagatccaaaggaatggttgtatacatgtaatctatgtggaatcattttgcatatctcgtgtgtcgtgggagacttctcatatcacgtaccaggacacatttcatcgaacaaaatcgcaaatggagtagtggtacccaacacttctatttgtagaccccattgttctaggtgttcttcaagatgcaggcttccttatatacttcaaatcaacgacttttacttttgttctaataagtgttgtgggaatactcgcaaccctaggggtcgtaattactactaaacaatagtagtgtatcatgatactaataatgtactgtttctatcgttatttttcttttaagccaacccccatgaatgaaattatgttttacatgaataatatattatatatgttttttaaaatactcttgtatttgatttgattgcatataaattatttcctcgtgaatcaccaagggatatagaatcaaataattgttaaattagcgttacattgggtgattggaaatggatctagccagaatactggtggcccgcaggtggccgccgtggaagaaaattattcccggcgcaaaagatgcctcgtaaacttagatcagcccaattcaaaactaaccaaatatgggcctaatccaagaaggcccatttctaaccacgtgattggcacgtgtaaaccaaccaacggaagtagcagagaaaactagtggcatcggcaagtaaaaagcccctctctttattatcgtcgatccaaaaagcagatttgatagaaaagccgcgaatttttatgtttttctttgggaattttccggtaaactcatcggaaaaatgtttctgtctcaccctcctcaagtaatacaaccaacttatcatacagttaacttcttacctcgctctcctctgaagccaccgtcgtgttccgttgctttaaacaatccttcaatttcctccggcgccggagctaaaatctctaataatcagctaattcaatcattgtgcaaagagggtaaacttaaacaagcgattcgcgtcttgtctcaggaatctagcccaagtcaacagacttacgagcttctgattctctgctgcggtcatcggagctctctttctgatgctctacgtgttcatcgacatattctggataatgggtctgatcaagatccttttttggctacgaaacttattggtatgtactcggatttgggttctgtggattatgcacggaaggtgttcgataaaacgcgtaagagaactatatatgtctggaacgctttgtttcgagcgcttacgttagcag

SEQ ID NO: 141726 - DNA, 1031 bp, Arabidopsis thaliana landsberg
tcatgatcatatggaacgagcatgaccatgctaggcgcgatgtaacatttttttccttgtgagttatgcgttttcatgatgaaatgttcccttagattcctgtgttgcttactttcaggatgagaagaacgccatcagaagtcttgatcttttgtatagaagagtcgaggtaattgtttctcttcattcttttctatgctataagatcttgagctgctgatgctttatatcaccatcttcaaacttactcatttgtcaaggaagattatcaactcgtattagtcagctttaggtgaaagtgaatccttatatcgggtgtttctctatccagacagagatcttaaaacggcaagcaagtcctgcaatgaaactgctgaatgatcttctaaacatgcatgatggctttgaagacgatgcttggctcaaggactgcagaaaacgaatggctgagaccttcccccgagaagaccccttcagcattctaatgccaccgggattcgacattgatatggtgcgtccctttttctcttttttgtttttttttattgataaaaacctctcaacagcaagaatcaatgctgtgtttgtagcatcaaggacagttgcgaccgcccattgagactgagacagacaacacccttctgagagtagactttgtaagagaagtggatgcactgctacaggaagtgaggatagaggaagacgctacaactggtagcaaaggagaagggcttgatcctgaagctatagcacttaagtttaagcaacaggagaagcaacgaaccatccgccaaattgaagccattcttgatttagccctcaacttgaagtggtaggcagttaactagaatatcaatctatacgccataataatttttttaagatagaccctagagttagattgattcaggcgtttttgtttagaaatgaatggagtctaaataataggttttggctaaaaattccaaatccaaatgttgctgactatctctctgctcatagtctccaccacaatcatctcttcctctttc
